(19) United States
(12) Patent Application Publication
(10) Pub. No.: US 2011/0014706 A2
(43) Pub. Date: Jan. 20, 2011

(54) Arabidopsis thaliana Genome Sequence and Uses Thereof

(75) Inventors: Yongwei CAO, Lexington, MA (US); David KOVALIC, University City, MO (US); Jingdong LIU, Ballwin, MO (US); James MCININCH, Burlington, MA (US); Steven ROUNSLEY, Melrose, MA (US); Sai SUBRAMANIAM, Framingham, MA (US); Roger WIEGAND, Wayland, MA (US)

Correspondence Address: ARNOLD & PORTER LLP, 555 TWELFTH STREET, N.W., ATTN: IP DOCKETING, WASHINGTON, DC, 20004, UNITED STATES, 202-942-5000, IP.Docketing@aporter.com

(73) Assignee: MONSANTO TECHNOLOGY LLC, St. Louis, MO (US)

(21) Appl. No.: 09/474,435

(22) Filed: Dec. 28, 1999

Related U.S. Application Data
(63) Continuation-in-part of application No. 09/459,109, filed on Dec. 13, 1999, now abandoned.
Application No. 09/459,109 is a continuation-in-part of application No. 09/459,110, filed on Dec. 14, 1998, now abandoned.
(60) Provisional application No. 60/114,151, filed on Dec. 29, 1998.
(60) Provisional application No. 60/120,644, filed on Feb. 18, 1999.
(60) Provisional application No. 60/135,825, filed on May 24, 1999.
(60) Provisional application No. 60/139,932, filed on Jun. 21, 1999.
(60) Provisional application No. 60/143,994, filed on Jul. 15, 1999.
(60) Provisional application No. 60/155,422, filed on Sep. 23, 1999.
(60) Provisional application No. 60/111,990, filed on Dec. 14, 1998.
(60) Provisional application No. 60/111,991, filed on Dec. 14, 1998.

(51) Int. Cl. C12N 5/10; C07H 21/04

(52) U.S. Cl. 435/419; 536/23.1

(57) ABSTRACT

The present invention relates to nucleic acid sequences from the dicotyldonus plant Arabidopsis thaliana and, in particular, to genomic DNA sequences. The invention encompasses nucleic acid molecules present in non-coding regions as well as nucleic acid molecules that encode proteins and fragments of proteins. In addition, proteins and fragments of proteins so encoded and antibodies capable of binding the proteins are encompassed by the present invention. The invention also encompasses oligonucleotides including primers, e.g. useful for amplifying nucleic acid molecules, and collections of nucleic acid molecules and oligonucleotides, e.g. in microarrays. The invention also provides constructs and transgenic cells and organisms comprising nucleic acid molecules of the invention. The invention also relates to methods of using the disclosed nucleic acid molecules, oligonucleotides, proteins, fragments of proteins, and antibodies, for example, for gene identification and analysis, and preparation of constructs and transgenic cells and organisms.

[0001] This application claims priority under 35 U.S.C §119(e) of U.S. Provisional Applications No. 60/089,524, filed Jun. 16, 1998; 60/089,516, filed Jun. 16, 1998; 60/089,808, filed Jun. 18, 1998; 60/089,812, filed Jun. 18, 1998; 60/089,807, filed Jun. 18, 1998; 60/089,806, filed Jun. 18, 1998; 60/089,811, filed Jun. 18, 1998; 60/089,813, filed Jun. 18, 1998; 60/111,990, filed Dec. 14, 1998; 60/111,991, filed Dec. 14, 1998; 60/114,151, filed Dec. 29, 1998; 60/120,644, filed Feb. 18, 1999; 60/135,825, filed May 24, 1999; 60/139,932, filed Jun. 21, 1999; 60/143,994, filed Jul. 15, 1999; and 60/155,422, filed Sep. 23, 1999; and under 35 U.S.C. §120 of U.S. application Ser. No. 09/333,534, filed Jun. 14, 1999; 09/459,109, filed Dec. 13, 1999; and Ser. No. 09/459,110, filed Dec. 13, 1999, the disclosures of which applications are incorporated herein by reference in their entirety.

[0002] The entirety of the Sequence Listing of U.S. Provisional Patent Application Ser. No. 60/114,151, filed on Dec. 29, 1998, is herein incorporated by reference.

### FIELD OF THE INVENTION

[0003] Included in the disclosure are nucleic acid molecules representing the genome of the dicotyledonous plant Arabidopsis thaliana and, in particular, to nucleic acid molecules having nucleic acid sequences corresponding to genes, promoters, other regulatory elements, and introns found in the Arabidopsis thaliana genome, a specific set of genes of Arabidopsis thaliana and a set of primers based on the Arabidopsis thaliana genes. Also disclosed are homologous nucleic acid molecules, complementary nucleic acid molecules, polypeptides expressed by such genes, constructs comprising such promoters, regulatory elements and/or genes, transformed cells and organisms comprising such genes and/or promoters and regulatory elements, primers useful for replicating parts of such genes and nucleic acid molecules, computer readable media comprising sets of such nucleic acid sequences, polypeptides and primers, collections of nucleic acid molecules and methods of using such molecules and sequences including the use of collections of nucleic acid molecules in genetic research and clinical analysis, e.g. for gene expression.

### BACKGROUND OF THE INVENTION

[0004] Arabidopsis thaliana is a small plant in the mustard family which is widely studied as a model organism for plants in general, dicotyledonous plants in particular and most especially for plants in the Brassicaceae family including oil seed rape (canola), cabbage, cauliflower, broccoli, kohlrabi, turnips, Brussel Sprouts, radish and watercress. Arabidopsis thaliana is a small, compact, prolific-seed producing plant with a short life cycle. The genome is believed to comprise about 20,000 to 30,000 genes on five chromosomes.

[0005] This dicotyledonous plant has been employed in investigations into a variety of genetic phenomena including the metabolic pathway functions, stress response and general cell development. A set of nucleic acid molecules representing a substantial set of the genes in the Arabidopsis thaliana genome is useful in transcription profiling work to find, identify and characterize counterpart genes in other species, particularly plants and especially in dicotyledonous plant species. For instance, it is possible to identify unknown plant gene function by studying a similar (homologous) gene in a model plant in which genetic modification can more easily be done. That is, if unknown genes are disrupted or overexpressed, transcription profiling can be carried out to understand effects of the genetic modification.

[0006] Moreover, chemical discovery for plant treatment/regulation can be practiced using such transcription profiling with nucleic acids molecules of the Arabidopsis thaliana genome. In addition environmental stress studies of the Arabidopsis thaliana genome will provide insight into related mechanisms in plants, e.g. yield, stability, thermal resistance, water/drought tolerance, etc.

[0007] Nucleic acid sequences of a species, e.g. the Arabidopsis thaliana can be generated by random shotgun sequencing of cloned genomic DNA and assembled into longer lengths of contiguous sequence (contigs). The final data set from an assembly process comprises a collection of sequences, which includes the contigs resulting from linking of two or more overlapping sequences as well as singleton nucleic acid sequences, i.e. trace sequences which are not incorporated into contigs. Such sequences can be screened for genes, e.g. full length or substantially full length or partial length genes. Screening methods include homology searches against databases of known genes and predictive methods using algorithms which infer the presence and extent of a gene.

[0008] The nucleic acid sequences disclosed herein are believed to represent a substantial number, or at least a major part, of the genes in the Arabidopsis thaliana genome. Genome sequence information from Arabidopsis thaliana permits identification of genetic sequences from other organisms including plants, animals (e.g. mammals such as humans), bacteria and fungi by comparison of such sequences with Arabidopsis thaliana sequences. The availability of a substantial set of genes or partial genes of the Arabidopsis thaliana genome permits the definition of primers for fabricating representative nucleic acid molecules of the genome which can be used on microarrays facilitating transcription profile studies. In addition the identification of the Arabidopsis thaliana genome permits the fabrication of a wide variety of DNA constructs useful for imparting unique genetic properties into transgenic organisms. These and other advantages attendant with the various aspects of this invention will be apparent from the following description of the invention and its various embodiments.

### SUMMARY OF THE INVENTION

[0009] The present invention contemplates and provides a substantial part of the genome of the dicotyledonous plant Arabidopsis thaliana. One aspect of the invention is a set of more than 81,000 contig and singleton sequences comprising coding sequence as well as promoters, other regulatory elements and introns identified from Arabidopsis thaliana ecotype Landsberg erecta and represented by SEQ ID NO: 1 through SEQ ID NO: 81306 in Table 1. Contigs in SEQ ID NO: 1 through SEQ ID NO: 81306 are recognized as those sequences whose designations begin with ATL8C; singleton sequences are recognized as those having designations which begin with ATL8S. Thus, a subset of the nucleic acid molecules of this invention comprises promoters and/or other regulatory elements of the Arabidopsis thaliana genome as present in SEQ ID NO: 1 through SEQ ID NO: 81306 or complements thereof.

[0010] Another aspect of this invention is a set of clustered ESTs which are derived from various tissues of Arabidopsis thaliana ecotype Columbia. The ESTs represent consensus contiguous sequence (contig) and EST sequences which were not included within a contig as present in SEQ ID NO: 81307 through SEQ ID NO: 138060 in Table 2.

[0011] Another aspect of this invention comprises a set of more than 57,000 genes or partial genes of the Arabidopsis thaliana genome including genes represented by SEQ ID NO: 138061 through SEQ ID NO: 195836. As used herein, a substantial large set of genes for an organism is referred to as a unigene set. Thus, as used herein reference is made to specific genes comprising the unigene set of Arabidopsis thaliana as “ATUxxxxx” where ATU is an acronym for Arabidopsis thaliana unigene and xxxxx represents a number. Thus, ATU00001 to ATU057776 are used to designate the genes of Arabidopsis thaliana identified herein which are expected to include previously reported genes of Arabidopsis thaliana. Moreover, the term “ATU” by itself is also used herein to mean any of the nucleic acid molecules comprising genes or partial genes of the unigene set for Arabidopsis thaliana. More particularly the term “ATU of this invention” as used herein means a nucleic acid molecule representing a gene or partial gene of Arabidopsis thaliana disclosed herein selected from the group consisting of ATU00001 to ATU057776.

[0012] The present invention also contemplates and provides substantially purified nucleic acid molecules comprising the ATUs and other nucleic acid molecules of this invention as well as molecules which are complementary to, and capable of specifically hybridizing to, the ATU or its complement.

[0013] The present invention also contemplates and provides substantially purified nucleic acids molecules which are homologous to the nucleic acid molecules of this invention including, for example, those which are homologous to the ATUs of this invention, e.g. a plurality of related sets of homologous nucleic acid molecules in other species which are homologous to the ATUs.

[0014] The present invention also contemplates and provides substantially purified protein, or polypeptide fragments thereof, which are encoded by cDNA associated with the ATUs of the present invention.

[0015] The present invention also contemplates and provides constructs comprising promoters, regulatory elements and/or the ATUs which are useful in making transgenic cells or organisms. In particular this invention also provides transformed cell or organism having a nucleic acid molecule which comprises: (a) a promoter region which functions in the cell to cause the production of a mRNA molecule; which is linked to (b) a structural nucleic acid molecule, which is linked to (c) a 3′ non-translated sequence that functions in the cell to cause termination of transcription and addition of polyadenylated ribonucleotides to a 3′ end of the mRNA molecule, where components (a) and/or (b) are selected from Arabidopsis thaliana nucleic acid sequences provided herein and more preferably selected Arabidopsis thaliana nucleic acid sequences from the group consisting of ATU00001 to ATU057776.

[0016] Still another aspect of this invention is a set (and subsets thereof) of primers for the ATUs of this invention, which can be used to generate and isolate nucleic acid molecules representative ATUs of this invention and homologs thereof in other non-Arabidopsis thaliana species. The nucleic acids molecules of this invention including primers represent a useful tool in genetic research not only for the species Arabidopsis thaliana, but also for other plant species, both monocotyledonous as well as dicotyledonous, and other microorganisms and life forms with more differentiated cell structure such as plants and animals. The present invention also contemplates and provides primer pairs for replicating or identifying parts of the ATUs.

[0017] The present invention also contemplates and provides computer readable media having recorded thereon one or more of the nucleotide sequences provided by this invention and methods for using such media, e.g. in searching to identify genes associated with nucleic acid sequences.

[0018] The present invention also contemplates and provides collections of nucleic acid molecules, including oligonucleotides, representing the Arabidopsis thaliana genome including collections on solid substrates, e.g. substrates having attached thereto in array form nucleic acid molecules or oligonucleotides representing genes of the Arabidopsis thaliana genome. The invention also contemplates and provides methods of using such collections and arrays, e.g. in transcription profiling analysis. The present invention also contemplates and provides methods for using the nucleic acid molecules of this invention, e.g. for identifying genetic material and/or determining gene expression by hybridizing expressed and labeled nucleic acid molecules or fragments thereof to arrayed collections of the nucleic acid molecules of this invention.

[0019] The present invention also contemplates and provides oligonucleotides which are identical or complementary to a sequence of similar length for an ATU. Such oligonucleotides are useful, for example, for hybridizing to and identifying nucleic acid molecules which are homologous and/or complementary to the ATUs of the present invention.

[0020] The present invention also contemplates and provides methods for determining gene expression comprising collecting mRNA from tissue of an organism, using the mRNA as a template for producing a quantity of a labeled nucleic acid molecule, and contacting the labeled nucleic acid molecule with a collection of purified nucleic acid molecules of this invention, e.g. deposited in an array on a substrate.

### DETAILED DESCRIPTION OF THE INVENTION

[0021] As used herein, a nucleic acid molecule and/or polypeptide molecule, be it a naturally occurring molecule or otherwise, may be “substantially purified”, if the molecule is separated from substantially all other molecules normally associated with it in its native state. More preferably a substantially purified molecule is the predominant species present in a preparation. A substantially purified molecule may be greater than 60% free, preferably 75% free, more preferably 90% free, and most preferably 95% free from the other molecules (exclusive of solvent) present in the natural mixture. The term “substantially purified” is not intended to encompass molecules present in their native state.

[0022] The ATUs of this invention and other nucleic acid molecules and/or polypeptide molecules of the present invention will preferably be “biologically active” with respect to either a structural attribute, such as the capacity of a nucleic acid to hybridize to another nucleic acid molecule, or the ability of a protein to be bound by an antibody (or to compete with another molecule for such binding). Alternatively, such an attribute may be catalytic, and thus involve the capacity of the agent to mediate a chemical reaction or response.

[0023] As used herein the term “polypeptide” means a protein or fragment thereof expressed by a nucleic acid molecule in a cell.

[0024] The ATUs of this invention and other nucleic acid molecules of the present invention may also be recombinant. As used herein, the term recombinant means any molecule (e.g. DNA, peptide etc.), that is, or results, however indirect, from human manipulation of a nucleic acid molecule.

[0025] It is understood that the nucleic acid molecules of the present invention may be labeled with reagents that facilitate detection of the agent, e.g. fluorescent labels as disclosed in U.S. Pat. No. 4,653,417, chemical labels as disclosed in U.S. Pat. Nos. 4,582,789 and 4,563,417 and modified bases as disclosed in U.S. Pat. No. 4,605,735, all of which are incorporated herein by reference in their entirety.

[0026] The term “oligonucleotide” as used herein refers to short nucleic acid molecules useful, e.g. for hybridizing probes, nucleotide array elements or amplification primers. Oligonucletide molecules are comprised of two or more nucleotides, i.e. deoxyribonucleotides or ribonucleotides, preferably more than five and up to 30 or more. The exact size will depend on many factors, which in turn depend on the ultimate function or use of the oligonucleotide. Oligonucleotides can comprise ligated natural nucleic molecules acids or synthesized nucleic acid molecules and comprise between 5 to 150 nucleotides or between about 15 and about 100 nucleotides, or preferably up to 100 nucleotides, and even more preferably between 15 to 30 nucleotides or most preferably between 18-25 nucleotides, identical or complementary to a sequence of similar length for an ATU.

[0027] This invention provides oligonucleotides specific for ATU sequences. Such oligonucleotides may be nucleic acid elements for use on solid arrays (e.g. synthesized or spotted) or primers for amplification of ATUs of this invention. Such primers for use in polymerase chain reaction (PCR) primers are preferably designed with the goal of amplifying nucleic acids from either the 3′ or the 5′ end of an ATU or a fragment of an ATU, e.g. about 500 to 800 bp of nucleic acids from the at the 3′ end of such a nucleic acid molecule.

[0028] The term “primer” as used herein refers to a nucleic acid molecule, preferably an oligonucleotide whether derived from a naturally occurring molecule, such as one isolated from a restriction digest or one produced synthetically, which is capable of acting as a point of initiation of synthesis when placed under conditions in which synthesis of a primer extension product which is complementary to a nucleic acid strand is induced, i.e., in the presence of nucleotides and an agent for polymerization such as DNA polymerase and at a suitable temperature and pH. The primer is preferably single stranded for maximum efficiency in amplification, but may alternatively be double stranded. If double stranded, the primer is first treated to separate its strands before being used to prepare extension products. Preferably, the primer is an oligodeoxyribonucleotide. The primer must be sufficiently long to prime the synthesis of extension products in the presence of the agent for polymerization. The exact lengths of the primers will depend on many factors, including temperature and source of primer. For example, depending on the complexity of the target sequence, the oligonucleotide primer typically contains at least 15, more preferably 18 nucleotides, which are identical or complementary to the template and optionally a tail of variable length which need not match the template. The length of the tail should not be so long that it interferes with the recognition of the template. Short primer molecules generally require cooler temperatures to form sufficiently stable hybrid complexes with the template.

[0029] The primers herein are selected to be “substantially” complementary to the different strands of each specific sequence to be amplified. This means that the primers must be sufficiently complementary to hybridize with their respective strands. Therefore, the primer sequence need not reflect the exact sequence of the template. For example, a non-complementary nucleotide fragment may be attached to the 5′ end of the primer, with the remainder of the primer sequence being complementary to the strand. Alternatively, non-complementary bases or longer sequences can be interspersed into the primer, provided that the primer sequence has sufficient complementarity with the sequence of the strand to be amplified to hybridize therewith and thereby form a template for synthesis of the extension product of the other primer. Computer generated searches using programs such as Primer3 (www-genome.wi.mit.edu/cgi-bin/primer/primer3.cgi), STSPipeline (www-genome.wi.mit.edu/cgi-bin/www-STS_Pipeline), or GeneUp (Pesole et al., BioTechniques 25:112-123 (1998)), for example, can be used to identify potential PCR primers. Exemplary primers include primers that are 18 to 50 bases long, where at least between 18 to 25 bases are identical or complementary to at least 18 to 25 bases segment of the template sequence. Preferred template sequences for such primers are selected from a fragment of any one of SEQ ID NO: 138061 through SEQ ID NO: 195836 or complements thereof.

[0030] This invention also contemplates and provides primer pairs for amplification of nucleic acid molecules representing the ATUs. As used herein “primer pair” means a set of two oligonucleotide primers based on two separated sequence segments of a target nucleic acid sequence. One primer of the pair is a “forward primer” or “5′ primer” having a sequence which is identical to the more 5′ of the separated sequence segments. The other primer of the pair is a “reverse primer” or “3′ primer” having a sequence which is complementary to the more 3′ of the separated sequence segments. A primer pair allows for amplification of the nucleic acid sequence between and including the separated sequence segments. Optionally, each primer pair can comprise additional sequences, e.g. universal primer sequences or restriction endonuclease sites, at the 5′ end of each primer, e.g. to facilitate cloning, DNA sequencing, or reamplification of the target nucleic acid sequence.

[0031] Nucleic acid molecules of the present invention include those having a nucleic acid sequence selected from the group consisting of SEQ ID NO: 138061 through SEQ ID NO: 195836 and complements thereof and fragments of either. Preferred nucleic acid molecules include those having a nucleic acid sequence selected from the following groups: SEQ ID NO: 138061 through SEQ ID NO: 162749 or complements thereof for which the principal evidence is identity to EST sequences as determined by GAP2 analysis (as indicated in more detail in Example 4 below); SEQ ID NO: 162750 through SEQ ID NO: 174652 or complements thereof for which the principal evidence is correspondence to a known peptide as determined by NAP-TBLASTX analysis (as indicated in more detail in Example 4 below); and SEQ ID NO: 174653 through SEQ ID NO: 195836 or complements thereof for which the principal evidence is a GenScan prediction (as indicated in more detail in Example 4 below). Other nucleic acid molecules of this invention are genomic nucleic acid molecules having nucleic acid sequence from within a sequence selected from the group consisting of SEQ ID NO: 1 through SEQ ID NO: 81306 or complements thereof. Still other nucleic acid molecules of this invention are EST nucleic acid molecules having a sequence selected from the group consisting of SEQ ID NO: 81307 through SEQ ID NO: 138060 or complements thereof which were produced by assembling public and original EST sequences as explained in more detail in Example 3 below. Other preferred nucleic acid molecules include any of the above groups but where such groups also include fragments of such sequences.

[0032] Nucleic acid molecules or fragments thereof are capable of specifically hybridizing to other nucleic acid molecules under certain circumstances. As used herein, two nucleic acid molecules are said to be capable of specifically hybridizing to one another if the two molecules are capable of forming an anti-parallel, double-stranded nucleic acid structure along a sufficient portion of the molecule to allow for stable binding under laboratory hybridizing conditions. A nucleic acid molecule is said to be the “complement” of another nucleic acid molecule if they exhibit complete complementarity. As used herein, molecules are said to exhibit “complete complementarity” when every nucleotide of one of the molecules is complementary to a nucleotide of the other. Two molecules are said to be “minimally complementary” if they can hybridize to one another with sufficient stability to permit them to remain annealed to one another under at least conventional “low-stringency” conditions. Similarly, the molecules are said to be “complementary” if they can hybridize to one another with sufficient stability to permit them to remain annealed to one another under conventional “high-stringency” conditions. Conventional stringency conditions are described by Sambrook et al., Molecular Cloning, A Laboratory Manual, 2nd Ed., Cold Spring Harbor Press, Cold Spring Harbor, N.Y. (1989), and by Haymes et al., Nucleic Acid Hybridization, A Practical Approach, IRL Press, Washington, D.C. (1985), the entirety of both of which are herein incorporated by reference. Departures from complete complementarity are therefore permissible, as long as such departures do not completely preclude the capacity of the molecules to form a double-stranded structure. Thus, in order for a nucleic acid molecule to serve as a primer or probe it need only be sufficiently complementary in sequence to be able to form a stable double-stranded structure under the particular solvent and salt concentrations employed.

[0033] Appropriate stringency conditions which promote DNA hybridization, for example, 6.0× sodium chloride/sodium citrate (SSC) at about 45° C., followed by a wash of 2.0×SSC at 50° C., are known to those skilled in the art or can be found in Current Protocols in Molecular Biology, John Wiley & Sons, N.Y. (1989), 6.3.1-6.3.6. For example, the salt concentration in the wash step can be selected from a low stringency of about 2.0×SSC at 50° C. to a high stringency of about 0.2×SSC at 50° C. In addition, the temperature in the wash step can be increased from low stringency conditions at room temperature, about 22° C., to high stringency conditions at about 65° C. Both temperature and salt may be varied, or either the temperature or the salt concentration may be held constant while the other variable is changed.

[0034] Preferred embodiments of the nucleic acid of this invention will specifically hybridize to one or more of the ATUs of this invention or complements thereof under low stringency conditions, for example at about 2.0×SSC and about 50° C. In a particularly preferred embodiment, a nucleic acid of the present invention will include those nucleic acid molecules that specifically hybridize to one or more of the ATUs of this invention or complements thereof under moderate stringency conditions. In an especially preferred embodiment, a nucleic acid of the present invention will include those nucleic acid molecules that specifically hybridize to one or more of the ATUs of this invention or complements thereof under high stringency conditions.

[0035] In another aspect of the present invention, one or more of the nucleic acid molecules of the present invention share between 100% and 90% sequence identity with one or more of the ATUs of this invention or complements thereof. In a further aspect of the present invention, one or more of the nucleic acid molecules of the present invention share between 100% and 95% sequence identity with one or more of the ATUs of this invention or complements thereof. In a more preferred aspect of the present invention, one or more of the nucleic acid molecules of the present invention share between 100% and 98% sequence identity with one or more of the ATUs of this invention or complements thereof. In an even more preferred aspect of the present invention, one or more of the nucleic acid molecules of the present invention share between 100% and 99% sequence identity with one or more of the ATUs of this invention or complements thereof.

[0036] The present invention also encompasses the use of nucleic acids of the present invention in recombinant constructs. Using methods known to those of ordinary skill in the art, an ATU sequence and/or a promoter sequence of the invention can be inserted into constructs which can be introduced into a host cell of choice for expression of the encoded protein if an ATU is used or for use of an Arabidopsis thaliana promoter to direct expression of a heterologous protein. Potential host cells include both prokaryotic and eukaryotic cells. A host cell may be unicellular or found in a multicellar differentiated or undifferentiated organism depending upon the intended use. It is understood that useful exogenous genetic material may be introduced into any non-fungal cell or organism such as a plant cell, plant, mammalian cell, mammal, fish cell, fish, bird cell, bird or bacterial cell.

[0037] Depending upon the host, the regulatory regions for expression of ATU sequences will vary, including regions from viral, plasmid or chromosomal genes, or the like. For expression in prokaryotic or eukaryotic microorganisms, particularly unicellular hosts, a wide variety of constitutive or regulatable promoters may be employed. Among transcriptional initiation regions which have been described are regions from bacterial and yeast hosts, such as E. coli, B. subtilis, Sacchromyces cerevisiae, including genes such as beta-galactosidase, T7 polymerase and tryptophan E.

[0038] Furthermore, for use in transformation of Arabidopsis thaliana, constructs may include those in which an ATU sequence or portion thereof of the present invention is positioned with respect to a promoter sequence such that production of antisense mRNA complementary to native mRNA molecules is provided. In this manner, expression of the native gene may be decreased. Such methods may find use for modification of particular functions of the targeted host, and/or for discovering the function of a protein naturally expressed in Arabidopsis thaliana.

Complements and Homologs of ATUs

[0039] Another embodiment of the present invention comprises a nucleic acid molecule which is a homolog of an ATU of this invention which encodes a polypeptide also found in a plant, animal or bacterial organism. Yet another embodiment comprises a nucleic acid molecule which encodes a polypeptide which is homologous to a polypeptide encoded by an ATU of this invention where the percent identity between the polypeptides is between about 25% and about 40%, more preferably of between about 40 and about 70%, even more preferably of between about 70% and about 90%, and even more preferably between about 90% and 99% and most preferably 100%.

[0040] Genomic sequences can be screened for the presence of protein homologs utilizing one or a number of different search algorithms that have been developed, one example of which are the suite of programs referred to as BLAST programs. In addition, unidentified reading frames may be screened for by gene prediction software such as GenScan available for downloading from the Stanford University web site. The degeneracy of the genetic code allows different nucleic acid sequences to code for the same protein or peptide, e.g. see U.S. Pat. No. 4,757,006, the entirety of which is herein incorporated by reference. As used herein a nucleic acid molecule is degenerate of another nucleic acid molecule when the nucleic acid molecules encode for the same amino acid sequences but comprise different nucleotide sequences. An aspect of the present invention is that the nucleic acid molecules of the present invention include nucleic acid molecules that are degenerate from the ATUs of this invention.

[0041] A further aspect of the present invention comprises one or more nucleic acid molecules which differ in nucleic acid sequence from those of an ATU of this invention due to the degeneracy in the genetic code in that they encode the same protein but differ in nucleic acid sequence or a protein having one or more conservative amino acid residue. Codons capable of coding for such conservative substitutions are known in the art. For instance, serine is a conservative substitute of alanine and threonine is a conservative substitute for serine.

Regulatory Elements

[0042] One class of agents of the present invention includes nucleic acid molecules having promoter regions or partial promoter regions or other regulatory elements, particularly those found in SEQ ID NO: 1 through SEQ ID NO: 81306 and located upstream of the trinucleotide ATG sequence at the start site of a protein coding region. As used herein, a promoter region is a region of a nucleic acid molecule that is capable, when located in cis to a nucleic acid sequence that encodes for a protein or peptide to function in a way that directs expression of one or more mRNA molecules that encodes for the protein or peptide. Promoters of the present invention can comprise nucleic acids in the range from about 300 bp to at least 1000 bp or more, say about 2000 bp or even higher say about 5000 bp and up to about 10 kb upstream of the trinucleotide ATG sequence at the start site of a protein coding region. While in many circumstances a 300 bp promoter may be sufficient for expression, additional sequences may act to further regulate expression, for example, in response to biochemical, developmental or environmental signals. In a preferred embodiment of the present invention, the promoter is upstream of a nucleic acid sequence that encodes an Arabidopsis thaliana protein homolog or fragment thereof or preferably upstream of an ATU of this invention. It is also preferred that the promoters of the present invention contain a CAAT and a TATA cis element. Moreover, the promoters of the present invention can include one or more cis elements in addition to a CAAT and a TATA box. For the most part, the promoters of the present invention will be located in contig sequences which generally represent longer nucleic acids than do singleton sequences of the present invention. Contigs in SEQ ID NO: 1 through SEQ ID NO: 81306 are recognized as those sequences whose designations begin with ATL8C, as opposed to singletons whose designations begin with ATL8S. Where an ATU is specified as being located on two different contigs, the promoter region will be located on the contig representing the 5′ region of the gene encoding sequence.

[0043] By “regulatory element” it is intended a series of nucleotides that determines if, when, and at what level a particular gene is expressed. The regulatory DNA sequences specifically interact with regulatory or other proteins. Many regulatory elements act in cis (“cis elements”) and are believed to affect DNA topology, producing local conformations that selectively allow or restrict access of RNA polymerase to the DNA template or that facilitate selective opening of the double helix at the site of transcriptional initiation. Cis elements occur within, but are not limited to promoters, and promoter modulating sequences (inducible elements). Cis elements can be identified using known cis elements as a target sequence or target motif in the BLAST programs of the present invention. Promoters of the present invention include homologs of cis elements known to effect gene regulation that show homology with the nucleic acid molecules of the present invention.

Polypeptides

[0044] Other aspects of this invention comprises one or more of the polypeptides, including proteins or peptide molecules, encoded by the coding region of an ATU of this invention or fragments thereof or homologs thereof. Protein and peptide molecules can be identified using known protein or peptide molecules as a target sequence or target motif in the BLAST programs of the present invention. In a preferred embodiment the protein or fragment molecules of the present invention are derived from Arabidopsis thaliana.

[0045] As used herein, the term “protein molecule” or “peptide molecule” includes any molecule that comprises five or more amino acids. It is well known in the art that proteins or peptides may undergo modification, including post-translational modifications, such as, but not limited to, disulfide bond formation, glycosylation, phosphorylation, or oligomerization. Thus, as used herein, the term “protein molecule” or “peptide molecule” includes any protein molecule that is modified by any biological or non-biological process. The terms “amino acid” and “amino acids” refer to all naturally occurring L-amino acids. This definition is meant to include norleucine, ornithine, homocysteine, and homoserine.

[0046] One or more of the protein or peptide molecules may be produced via chemical synthesis, or more preferably, by expression in a suitable bacterial or eukaryotic host. Suitable methods for expression are described by Sambrook et al., Molecular Cloning, A Laboratory Manual, 2nd Edition, Cold Spring Harbor Press, Cold Spring Harbor, N.Y. (1989), or similar texts.

[0047] A “protein fragment” comprises a subset of the amino acid sequence of that protein. A protein fragment which comprises one or more additional peptide regions not derived from a base protein is a “fusion” protein. Such molecules may be derivatized to contain carbohydrate or other groups (such as keyhole limpet hemocyanin, etc.). Fusion protein or peptide molecules of the present invention are preferably produced via recombinant means.

[0048] Another class of agents comprises protein or peptide molecules encoded by the coding region of an ATU of this invention or complements thereof or, fragments or fusions thereof in which conservative, non-essential, or not relevant, amino acid residues have been added, replaced, or deleted. An example of such a homolog is the homolog protein of a non-Arabidopsis thaliana filamentous fungus. Such a homolog can be obtained by any of a variety of methods. For example, as indicated above, one or more of the disclosed sequences for primers of this invention can be used to define a pair of primers that may be used to isolate the homolog-encoding nucleic acid molecules from any desired species. Such molecules can be expressed to yield homologs by recombinant means.

Antibodies

[0049] One aspect of the present invention concerns antibodies, single-chain antigen binding molecules, or other proteins that specifically bind to one or more of the protein or peptide molecules of the present invention and their homologs, fusions or fragments. Such antibodies may be used to quantitatively or qualitatively detect the protein or peptide molecules of the present invention. As used herein, an antibody or peptide is said to “specifically bind” to a protein or peptide molecule of the present invention if such binding is not competitively inhibited by the presence of non-related molecules. In a preferred embodiment the antibodies of the present invention bind to proteins of the present invention, in a more preferred embodiment of the antibodies of the present invention bind to proteins derived from Arabidopsis thaliana.

[0050] Nucleic acid molecules that encode all or part of the protein of the present invention can be expressed, via recombinant means, to yield protein or peptides that can in turn be used to elicit antibodies that are capable of binding the expressed protein or peptide. Such antibodies may be used in immunoassays for that protein. Such protein-encoding molecules, or their fragments may be a “fusion” molecule (i.e., a part of a larger nucleic acid molecule) such that, upon expression, a fusion protein is produced. It is understood that any of the nucleic acid molecules of the present invention may be expressed, via recombinant means, to yield proteins or peptides encoded by these nucleic acid molecules.

[0051] The antibodies that specifically bind proteins and protein fragments of the present invention may be polyclonal or monoclonal. It is understood that practitioners are familiar with the standard resource materials which describe specific conditions and procedures for the construction, manipulation and isolation of antibodies (see, for example, Harlow and Lane, Antibodies: A Laboratory Manual, Cold Spring Harbor Press, Cold Spring Harbor, N.Y. (1988), the entirety of which is herein incorporated by reference).

[0052] It is understood that any of the antibodies of the present invention can be substantially purified and/or be biologically active and/or recombinant.

Plant Constructs and Plant Transformants

[0053] ATUs or other nucleic acid molecules of this invention may be used in plant transformation or transfection. Exogenous genetic material may be transferred into a plant cell and the plant cell regenerated into a whole, fertile or sterile plant. Exogenous genetic material is any genetic material, whether naturally occurring or otherwise, from any source that is capable of being inserted into any organism. Such genetic material may be transferred into either monocotyledons and dicotyledons including but not limited to the plants, alfalfa, Arabidopsis thaliana, barley, broccoli, cabbage, citrus, cotton, garlic, oat, oilseed rape, onion, canola, flax, maize, an ornamental plant, pea, peanut, pepper, potato, rice, rye, sorghum, soybean, strawberry, sugarcane, sugarbeet, tomato, wheat, poplar, pine, fir, eucalyptus, apple, lettuce, lentils, grape, banana, tea, turf grasses, sunflower, oil palm, etc.

[0054] Exogenous genetic material may be transferred into a plant cell by the use of a DNA vector or construct designed for such a purpose. Vectors have been engineered for transformation of large DNA inserts into plant genomes. Binary bacterial artificial chromosomes have been designed to replicate in both E. coli and Agrobacterium tumefaciens and have all of the features required for transferring large inserts of DNA into plant chromosomes. BAC vectors, e.g. a pBACwich, have been developed to achieve site-directed integration of DNA into a genome.

[0055] A construct or vector may also include a plant promoter to express the protein or protein fragment of choice. A number of promoters which are active in plant cells have been described in the literature. These include the nopaline synthase (NOS) promoter, the octopine synthase (OCS) promoter, a caulimovirus promoter such as the CaMV 19S promoter and the CaMV 35S promoter, the figwort mosaic virus 35S promoter, the light-inducible promoter from the small subunit of ribulose-1,5-bis-phosphate carboxylase (ssRUBISCO), the Adh promoter, the sucrose synthase promoter, the R gene complex promoter, and the chlorophyll a/b binding protein gene promoter. For the purpose of expression in source tissues of the plant, such as the leaf, seed, root or stem, it is preferred that the promoters utilized in the present invention have relatively high expression in these specific tissues. For this purpose, one may choose from a number of promoters for genes with tissue- or cell-specific or -enhanced expression. Examples of such promoters reported in the literature include the chloroplast glutamine synthetase GS2 promoter from pea, the chloroplast fructose-1,6-biphosphatase (FBPase) promoter from wheat, the nuclear photosynthetic ST-LS1 promoter from potato, the phenylalanine ammonia-lyase (PAL) promoter and the chalcone synthase (CHS) promoter from Arabidopsis thaliana. Also reported to be active in photosynthetically active tissues are the ribulose-1,5-bisphosphate carboxylase (RbcS) promoter from eastern larch (Larix laricina), the promoter for the cab gene, cab6, from pine, the promoter for the Cab-1 gene from wheat, the promoter for the CAB-1 gene from spinach, the promoter for the cab1R gene from rice, the pyruvate, orthophosphate dikinase (PPDK) promoter from Zea mays, the promoter for the tobacco Lhcb1*2 gene, the Arabidopsis thaliana SUC2 sucrose-H⁺ symporter promoter, and the promoter for the thylacoid membrane proteins from spinach (psaD, psaF, psae, PC, FNR, atpC, atpD, cab, rbcS). Other promoters for the chlorophyll a/b-binding proteins may also be utilized in the present invention, such as the promoters for LhcB gene and PsbP gene from white mustard (Sinapis alba). Additional promoters that may be utilized are described, for example, in U.S. Pat. Nos. 5,378,619; 5,391,725; 5,428,147; 5,447,858; 5,608,144; 5,608,144; 5,614,399; 5,633,441; 5,633,435 and 4,633,436, all of which are herein incorporated in their entirety.

[0056] Constructs or vectors may also include, with the coding region of interest, a nucleic acid sequence that acts, in whole or in part, to terminate transcription of that region. For example, such sequences have been isolated including the Tr7 3′ sequence and the nos 3′ sequence or the like. It is understood that one or more sequences of the present invention that act to terminate transcription may be used.

[0057] A vector or construct may also include other regulatory elements or selectable markers. Selectable markers may also be used to select for plants or plant cells that contain the exogenous genetic material. Examples of such include, but are not limited to, a neo gene which codes for kanamycin resistance and can be selected for using kanamycin, G418, etc.; a bar gene which codes for bialaphos resistance; a mutant EPSP synthase gene which encodes glyphosate resistance; a nitrilase gene which confers resistance to bromoxynil, a mutant acetolactate synthase gene (ALS) which confers imidazolinone or sulphonylurea resistance; and a methotrexate resistant DHFR gene.

[0058] A vector or construct may also include a screenable marker to monitor expression. Exemplary screenable markers include a β-glucuronidase or uidA gene (GUS), an R-locus gene, which encodes a product that regulates the production of anthocyanin pigments (red color) in plant tissues; a β-lactamase gene, a gene which encodes an enzyme for which various chromogenic substrates are known (e.g., PADAC, a chromogenic cephalosporin); a luciferase gene, a xylE gene which encodes a catechol dioxygenase that can convert chromogenic catechols; an α-amylase gene, a tyrosinase gene which encodes an enzyme capable of oxidizing tyrosine to DOPA and dopaquinone which in turn condenses to melanin; an α-galactosidase, which will turn a chromogenic α-galactose substrate. Included within the terms “selectable or screenable marker genes” are also genes which encode a secretable marker whose secretion can be detected as a means of identifying or selecting for transformed cells. Examples include markers which encode a secretable antigen that can be identified by antibody interaction, or even secretable enzymes which can be detected catalytically. Secretable proteins fall into a number of classes, including small, diffusible proteins detectable, e.g., by ELISA, small active enzymes detectable in extracellular solution (e.g., α-amylase, β-lactamase, phosphinothricin transferase), or proteins which are inserted or trapped in the cell wall (such as proteins which include a leader sequence such as that found in the expression unit of extension or tobacco PR-S). Other possible selectable and/or screenable marker genes will be apparent to those of skill in the art.

[0059] Technology for introduction of DNA into cells is well known to those of skill in the art. Four general methods for delivering a gene into cells have been described: (1) chemical methods, (2) physical methods such as microinjection and bombardment, (3) viral vectors and (4) receptor-mediated mechanisms.

[0060] It is also to be understood that two different transgenic plants can also be mated to produce offspring that contain two independently segregating added, exogenous genes.

[0061] The present invention also provides for parts of the plants of the present invention. Plant parts, without limitation, include seed, endosperm, ovule and pollen. In a particularly preferred embodiment of the present invention, the plant part is a seed.

[0062] Transformation of plant protoplasts can be achieved using methods based on calcium phosphate precipitation, polyethylene glycol treatment, electroporation, and combinations of these treatments.

[0063] Any of the nucleic acid molecules of the present invention may be introduced into a plant cell in a permanent or transient manner in combination with other genetic elements such as vectors, promoters enhancers etc. Further any of the nucleic acid molecules encoding an Arabidopsis thaliana protein or fragment thereof or homologs of the present invention may be introduced into a plant cell in a manner that allows for over expression of the protein or fragment thereof encoded by the nucleic acid molecule.

Uses of the Agents of the Present Invention

[0064] Nucleic acid molecules of the present invention may be employed to obtain other Arabidopsis thaliana nucleic acid molecules. Such molecules can be readily obtained by using the above-described nucleic acid molecules to screen Arabidopsis thaliana libraries.

[0065] Nucleic acid molecules and fragments thereof of the present invention may also be employed to obtain nucleic acid molecule homologs of non-Arabidopsis thaliana species including the nucleic acid molecules that encode, in whole or in part, protein homologs of other species or other organisms, sequences of genetic elements such as promoters and transcriptional regulatory elements. Such molecules can be readily obtained by using the above-described nucleic acid molecules to screen cDNA or genomic libraries of non-Arabidopsis thaliana species. Methods for forming such libraries are well known in the art. Such homolog molecules may differ in their nucleotide sequences from those found in one or more of the Arabidopsis thaliana genes of this invention or complements thereof because complete complementarity is not needed for stable hybridization. The nucleic acid molecules of the present invention therefore also include molecules that, although capable of specifically hybridizing with the nucleic acid molecules may lack “complete complementarity.”

[0066] The disclosed nucleic acid molecules may be used to define one or more primer pairs that can be used with the polymerase chain reaction to amplify and obtain any desired nucleic acid molecule or fragment thereof. Such molecules will find particular use in generation of nucleic acid arrays, including microarrays, containing portions of or the entire encoding region for the identified Arabidopsis thaliana genes. It is noted that the molecules on such arrays may contain native intervening sequences (introns) of the genes and will still find use in microarray based methods such as transcriptional profiling for functional analysis of Arabidopsis thaliana genes and metabolic pathways.

[0067] The nucleic acid molecules of the present invention may be used for physical mapping. Physical mapping, in conjunction with linkage analysis, can enable the isolation of genes. Physical mapping has been reported to identify the markers closest in terms of genetic recombination to a gene target for cloning. Once a DNA marker is linked to a gene of interest, the chromosome walking technique can be used to find the genes via overlapping clones. For chromosome walking, random molecular markers or established molecular linkage maps are used to conduct a search to localize the gene adjacent to one or more markers. A chromosome walk is then initiated from the closest linked marker. Starting from the selected clones, labeled probes specific for the ends of the insert DNA are synthesized and used as probes in hybridizations against a representative library. Clones hybridizing with one of the probes are picked and serve as templates for the synthesis of new probes; by subsequent analysis, contigs are produced.

[0068] The degree of overlap of the hybridizing clones used to produce a contig can be determined by comparative restriction analysis. Comparative restriction analysis can be carried out in different ways all of which exploit the same principle; two clones of a library are very likely to overlap if they contain a limited number of restriction sites for one or more restriction endonucleases located at the same distance from each other. The most frequently used procedures are, fingerprinting, restriction fragment mapping or the “landmarking” technique. It is understood that the nucleic acid molecules of the present invention may in one embodiment be used in physical mapping. In a preferred embodiment, nucleic acid molecules of the present invention may in one embodiment be used in the physical mapping of Arabidopsis thaliana.

[0069] Nucleic acid molecules of the present invention can be used in comparative mapping. Comparative mapping within families provides a method to assess the degree of sequence conservation, gene order, ploidy of species, ancestral relationships and the rates at which individual genomes are evolving. Comparative mapping has been carried out by cross-hybridizing molecular markers across species within a given family. As in genetic mapping, molecular markers are needed but instead of direct hybridization to mapping filters, the markers are used to select large insert clones from a total genomic DNA library of a related species. The selected clones, each a representative of a single marker, can then be used to physically map the region in the target species. The advantage of this method for comparative mapping is that no mapping population or linkage map of the target species is needed and the clones may also be used in other closely related species. By comparing the results obtained by genetic mapping in model organisms, with those from other species, similarities of genomic structure among species can be established. Cross-hybridization of RFLP markers has been reported and conserved gene order has been established in many studies. Such macroscopic synteny is utilized for the estimation of correspondence of loci among these organisms. It is understood that nuclear acid molecules of the present invention may in another embodiment be used in comparative mapping. In a preferred embodiment the nucleic acid molecules of present invention may be used in the comparative mapping of filamentous fungi.

[0070] In one aspect of the present invention, one or more of the nucleic acid molecules of the present invention are used to determine the level (i.e., the concentration of mRNA in a sample, etc.) or pattern (i.e., the kinetics of expression, rate of decomposition, stability profile, etc.) of the expression of a protein encoded in part or whole by one or more of the nucleic acid molecule of the present invention (collectively, the “Expression Response” of a cell or tissue). As used herein, the Expression Response manifested by a cell or tissue is said to be “altered” if it differs from the Expression Response of cells or tissues of organisms not exhibiting the phenotype. To determine whether a Expression Response is altered, the Expression Response manifested by the cell or tissue of the organism exhibiting the phenotype is compared with that of a similar cell or tissue sample of a organism not exhibiting the phenotype. As will be appreciated, it is not necessary to re-determine the Expression Response of the cell or tissue sample of organisms not exhibiting the phenotype each time such a comparison is made; rather, the Expression Response of a particular organism may be compared with previously obtained values of normal organism. As used herein, the phenotype of the organism is any of one or more characteristics of an organism.

[0071] Nucleic acid molecules of the present invention can be used to monitor expression. A microarray-based method for high-throughput monitoring of gene expression may be utilized to measure gene-specific hybridization targets. This ‘chip’-based approach involves using microarrays of nucleic acid molecules as gene-specific hybridization targets to quantitatively measure expression of the corresponding genes. Every nucleotide in a large sequence can be queried at the same time. Hybridization can be used to efficiently analyze nucleotide sequences.

[0072] Several methods have been described for fabricating microarrays of nucleic acid molecules and using such microarrays in detecting nucleic acid sequences. For instance, microarrays can be fabricated by spotting nucleic acid molecules, e.g. genes, oligonucleotides, etc., onto substrates or fabricating oligonucleotide sequences in situ on a substrate. Spotted or fabricated nucleic acid molecules can be applied in a high density matrix pattern of up to about 30 non-identical nucleic acid molecules per square centimeter or higher, e.g. up to about 100 or even 1000 per square centimeter. Useful substrates for arrays include nylon, glass and silicon. See, for instance, U.S. Pat. Nos. 5,202,231; 5,445,934; 5,525,464; 5,700,637; 5,744,305; 5,800,992, the entirety of the disclosures of all of which are incorporated herein by reference. Sequences can be efficiently analyzed by hybridization to a large set of oligonucleotides or cDNA molecules representing a large portion of a the genes of a genome. An array consisting of oligonucleotides or cDNA molecules complementary to subsequences of a target sequence can be used to determine the identity of a target sequence, measure its amount, and detect differences between the target and a reference sequence. Nucleic acid molecule microarrays may also be screened with molecules or fragments thereof to determine nucleic acid molecules that specifically bind molecules or fragments thereof.

[0073] The microarray approach may also be used with polypeptide targets (U.S. Pat. No. 5,445,934; U.S. Pat. No. 5,143,854; U.S. Pat. No. 5,079,600; U.S. Pat. No. 4,923,901, all of which are herein incorporated by reference in their entirety). Essentially, polypeptides are synthesized on a substrate (microarray) and these polypeptides can be screened with either protein molecules or fragments thereof or nucleic acid molecules in order to screen for either protein molecules or fragments thereof or nucleic acid molecules that specifically bind the target polypeptides.

[0074] It is understood that one or more of the molecules of the present invention, preferably one or more of the nucleic acid molecules or protein molecules or fragments thereof of the present invention may be utilized in a microarray based method. In a preferred embodiment of the present invention, one or more of the Arabidopsis thaliana nucleic acid molecules or protein molecules or fragments thereof of the present invention may be utilized in a microarray based method. A particular preferred microarray embodiment of the present invention is a microarray comprising nucleic acid molecules encoding genes or fragments thereof that are homologs of known genes or nucleic acid molecules that comprise genes or fragments thereof that elicit only limited or no matches to known genes. A further preferred microarray embodiment of the present invention is a microarray comprising nucleic acid molecules having genes or fragments thereof that are homologs of known genes and nucleic acid molecules that comprise genes or fragment thereof that elicit only limited or no matches to known genes.

[0075] In a preferred embodiment, the microarray of the present invention comprises at least 1,000 or more, e.g. at least 2,000, more preferably at least 5,000 or more, e.g. at least 10,000 distinct nucleic acid molecules that specifically hybridize under high stringency to nucleic acid molecules encoding Arabidopsis thaliana protein or fragments. In a more preferred embodiment, the microarray of the present invention comprises at least 15,000, or more, e.g. at least 20,000, even more preferably at least 30,000 or more, e.g. at least about 40,000, nucleic acid molecules that specifically hybridize under high stringency to nucleic acid molecules that encode an Arabidopsis thaliana protein or fragment thereof. While it is understood that a single nucleic acid molecule may encode more than one protein or fragment thereof, in a preferred embodiment, at least 50%, preferably at least 70%, more preferably at least 80%, even more preferably at least 90% of the nucleic acid molecules that comprise the microarray encode one protein homolog or fragment thereof. It is, of course, understood that these nucleic acid molecules can be non-identical.

[0076] In a preferred embodiment, the microarray of the present invention comprises at least 1,000 or more, e.g. at least 2,000, more preferably at least 5,000 or more, e.g. at least about 10,000 distinct nucleic acid molecules that specifically hybridize under high stringency to ATUs selected from the group having SEQ ID NO: 138061 through SEQ ID NO: 195836 or fragment thereof or complement of either. In a more preferred embodiment, the microarray of the present invention comprises at least 15,000 or more, e.g. at least about 20,000, more preferably at least about 30,000 or more, e.g. at least about 40,000 distinct nucleic acid molecules that specifically hybridize under high stringency to ATUs selected from the group having SEQ ID NO: 138061 through SEQ ID NO: 195836 or fragment thereof or complement of either. While it is understood that a single nucleic acid molecule may encode more than one protein homolog or fragment thereof, in a preferred embodiment, at least 50%, preferably at least 70%, more preferably at least 80%, even more preferably at least 90% of the nucleic acid molecules that comprise the microarray encode one protein or fragment thereof.

[0077] Nucleic acid molecules of the present invention may be used in site directed mutagenesis. Site-directed mutagenesis may be utilized to modify nucleic acid sequences, particularly as it is a technique that allows one or more of the amino acids encoded by a nucleic acid molecule to be altered (e.g. a threonine to be replaced by a methionine). Three basic methods for site-directed mutagenesis are often employed, i.e. (a) cassette mutagenesis, (b) primer extension and (c) methods based on PCR. See also U.S. Pat. No. 5,880,275, U.S. Pat. No. 5,380,831, and U.S. Pat. No. 5,625,136, the entirety of all of which is incorporated herein by reference.

[0078] Any of the nucleic acid molecules of the present invention may either be modified by site-directed mutagenesis or used as, for example, nucleic acid molecules that are used to target other nucleic acid molecules for modification. It is understood that mutants with more than one altered nucleotide can be constructed using techniques that practitioners skilled in the art are familiar with such as isolating restriction fragments and ligating such fragments into an expression vector.

[0079] Preferred aspects of this invention comprise collections of genes, nucleic acid molecules, polypeptides and/or primers of this invention ranging in size from about 10 non-identical members or more, e.g. at least about 100 or 270 or higher, more preferably at least about 300 or 350, most preferably at least 500 or higher, up to about 1000, or 2000 or even higher, say about 5000, or more non-identical members. As used herein a nonidentical member is a member that differs in nucleic acid or amino acid sequence. For example, a non-identical nucleic acid molecule is a nucleic acid molecule that differs in nucleic acid sequence from the nucleic acid molecule to which it is being compared to. For example a nucleic acid molecule having the sequence 5′ CCC 3′ is not identical—i.e. non-identical—to a nucleic acid molecule having the sequence 5′ CCG 3′. In one aspect a collection may comprise all of the genes, nucleic acid molecules, polypeptides and/or primers of this invention. Such collections can be located or organized in a variety of forms, e.g. on microarrays, in solutions, in bacterial clone libraries, etc. As used herein, an “organized” collection is a collection where the nucleic acid or amino acid sequence of a member of such a collection can be determined based on its physical location.

[0080] Preferred collections of this invention comprise nucleic acid molecules having a sequence selected from SEQ ID NO: 138061 through SEQ ID NO: 195836 or homologs or complements thereof or fragments thereof, e.g. oligonucleotides including primers and primer pairs of this invention. Other embodiments of the collections of this invention comprise nucleic acid sequences, complements, homologs, fragments, oligonucleotides and primers having a sequence identified by SEQ ID NO: 138062 through SEQ ID NO. 162749, or SEQ ID NO. 162750 through SEQ ID NO: 174652 or SEQ ID NO: 174653 through SEQ ID NO: 195836 or complements thereof. Other preferred nucleic acid collections include any of the above groups but where such groups also include fragments of such sequences.

[0081] It is understood that all these preferred collections may also range in size from about 1000 or 2000 or more, e.g. at least about 3000 or 5000 non-identical nucleic acid sequences. In some embodiments the collections will comprise at least 10,000 or 15,000 or more, e.g. about 20,000 or 25,000 non-identical nucleic acid sequence. In still other embodiments the collections of this invention will comprise at least 30,000 or 40,000 or more, e.g. at least 50,000, non-identical nucleic acid sequences.

[0082] Another aspect of this invention provides the genes, nucleic acid molecules, polypeptides and/or primers in a substantially pure form. For instance, by use of the primers of this invention, any of the ATUs can be produced in substantially pure form by PCR.

[0083] Another aspect of this invention is to provide methods for determining gene expression, e.g identifying homologous genes expressed by non-Arabidopsis thaliana organism. Such methods comprise collecting mRNA from tissue of such organism, using the mRNA as a template for producing a quantity of labeled nucleic acid, and contacting the labeled nucleic acid molecule with a collection of purified nucleic acid molecules, e.g. on a microarray.

Computer Media

[0084] One or more of the nucleotide sequence provided in SEQ ID NO: 1, through SEQ ID NO: 195836 or complements or fragments of either can be “provided” in a variety of media to facilitate use. Such a medium can also provide a subset thereof in a form that allows a skilled artisan to examine the sequences. In one application of this embodiment, a nucleotide sequence of the present invention can be recorded on computer readable media. As used herein, “computer readable media” refers to any medium that can be read and accessed directly by a computer. Such media include, but are not limited to: magnetic storage media, such as floppy discs, hard disc, storage medium, and magnetic tape: optical storage media such as CD-ROM; electrical storage media such as RAM and ROM; optical scanner readable medium such as printed paper; and hybrids of these categories such as magnetic/optical storage media. A skilled artisan can readily appreciate how any of the presently known computer readable mediums can be used to create a manufacture comprising computer readable medium having recorded thereon a nucleotide sequence of the present invention.

[0085] As used herein, “recorded” refers to a process for storing information on computer readable medium. A skilled artisan can readily adopt any of the presently known methods for recording information on computer readable medium to generate media comprising the nucleotide sequence information of the present invention. In addition, a variety of data processor programs and formats can be used to store the nucleotide sequence information of the present invention on computer readable medium. The sequence information can be represented in a word processing text file, or represented in the form of an ASCII file, stored in a database application, such as DB2, Sybase, Oracle, or the like. A skilled artisan can readily adapt any number of data processor structuring formats (e.g. text file or database) in order to obtain computer readable medium having recorded thereon the nucleotide sequence information of the present invention.

[0086] By providing one or more of nucleotide sequences of the present invention, a skilled artisan can routinely access the sequence information for a variety of purposes. Computer software is publicly available which allows a skilled artisan to access sequence information provided in a computer readable medium. The examples which follow demonstrate how software which implements the BLAST and/or BLAZE search algorithms on a Sybase system can be used to identify open reading frames (ORFs) within the genome that contain homology to ORFs or proteins from other organisms. Such ORFs are protein-encoding fragments within the sequences of the present invention and are useful in producing commercially important proteins such as enzymes used in amino acid biosynthesis, metabolism, transcription, translation, RNA processing, nucleic acid and a protein degradation, protein modification, and DNA replication, restriction, modification, recombination, and repair.

[0087] The present invention further provides systems, particularly computer-based systems, which contain the sequence information described herein. Such systems are designed to identify commercially important fragments of the nucleic acid molecule of the present invention. As used herein, “a computer-based system” refers to the hardware means, software means, and data storage means used to analyze the nucleotide sequence information of the present invention. The minimum hardware means of the computer-based systems of the present invention comprises a central processing unit (CPU), input means, output means, and data storage means. A skilled artisan can readily appreciate that any one of the currently available computer-based system are suitable for use in the present invention.

[0088] As indicated above, the computer-based systems of the present invention comprise a data storage means having stored therein a nucleotide sequence of the present invention and the necessary hardware means and software means for supporting and implementing a search means. As used herein, “data storage means” refers to memory that can store nucleotide sequence information of the present invention, or a memory access means which can access manufactures having recorded thereon the nucleotide sequence information of the present invention. As used herein, “search means” refers to one or more programs which are implemented on the computer-based system to compare a target sequence or target structural motif with the sequence information stored within the data storage means. Search means are used to identify fragments or regions of the sequence of the present invention that match a particular target sequence or target motif. A variety of known algorithms are disclosed publicly and a variety of commercially available software for conducting search means are available can be used in the computer-based systems of the present invention. Examples of such software include, but are not limited to, MacPattern (EMBL), BLASTIN and BLASTIX (NCBIA). One of the available algorithms or implementing software packages for conducting homology searches can be adapted for use in the present computer-based systems.

[0089] The most preferred sequence length of a target sequence is from about 30 to 300 nucleotide residues or from about 10 to 100 of the corresponding amino acids. However, it is well recognized that during searches for commercially important fragments of the nucleic acid molecules of the present invention, such as sequence fragments involved in gene expression and protein processing, may be of shorter length.

[0090] As used herein, “a target structural motif,” or “target motif,” refers to any rationally selected sequence or combination of sequences in which the sequences the sequence(s) are chosen based on a three-dimensional configuration which is formed upon the folding of the target motif. There are a variety of target motifs known in the art. Protein target motifs include, but are not limited to, enzymatic active sites and signal sequences. Nucleic acid target motifs include, but are not limited to, promoter sequences, cis elements, hairpin structures and inducible expression elements (protein binding sequences).

[0091] Thus, the present invention further provides an input means for receiving a target sequence, a data storage means for storing the target sequences of the present invention sequence identified using a search means as described above, and an output means for outputting the identified homologous sequences. A variety of structural formats for the input and output means can be used to input and output information in the computer-based systems of the present invention. A preferred format for an output means ranks fragments of the sequence of the present invention by varying degrees of homology to the target sequence or target motif. Such presentation provides a skilled artisan with a ranking of sequences which contain various amounts of the target sequence or target motif and identifies the degree of homology contained in the identified fragment.

[0092] Computer media of the nucleic acid sequences of this invention can comprise a few as 1000 distinct nucleic acid sequences including complements and homologs, preferably at least 2,000 or 3,000, more preferably at least 5,000 or 10,000 or more, e.g. 15,000 or 20,000 and in certain embodiments as much as 30,000 or 40,000 distinct nucleic acid sequences.

[0093] Having now generally described the invention, the same will be more readily understood through reference to the following examples which are provided by way of illustration, and are not intended to be limiting of the present invention, unless specified.

### Example 1

### Genomic DNA Library

DNA Preparation

[0094] DNA from Arabidopsis thaliana, Landsberg erecta seedlings is prepared by a CTAB genomic DNA isolation protocol as described by Dean et al. Plant J 2:69-81 (1992) and modified by Dubois et al. Plant J. 13:141-151 (1998).

[0095] A solution of DNA to be sheared is prepared in a 1.5 ml microcentrifuge tube by mixing 15 ug of DNA, 6 μl of 10× mung bean (MB) buffer (10×MB buffer=300 mM NaOAc, pH 5.0, 500 mM NaCl, 10 mM ZnCl₂, 50% glycerol), and water to a final volume of 601. The DNA solution is kept on ice prior to sonication. For sonication, a cup horn probe chilled with ice water for 1 hour prior to sonication is used. The sonicator (Ultrasonic Liquid Processor XL2020, Misonix Inc.) is pulsed for approximately 10 seconds on full power prior to use. DNA samples are sonicated twice for 6 seconds each at 60% power. Four sample tubes may be processed at once in a multi-tube rack which is positioned 1 to 3 mm above the opening in the probe. The DNA is returned to ice and a 1 μl sample is analyzed by electrophoresis on a 0.8% agarose gel in 0.5×TBE gel, run at 60 volts for 30 minutes. Sonication may be repeated if necessary.

[0096] A 0.26 μl aliquot of mung bean nuclease (150,000 u/ml) is added to sheared DNA and the sample is incubated at 30° C. for 10 minutes. To stop the digestion, 20 μl of 1 M NaCl, 140 ul dd H20, and 200 ml of phenol:chloroform are added to the sample which is then, vortexed and centrifuged for 20 minutes at 13,000 rpm. The resulting aqueous phase is transferred into a new 1.5 ml microcentrifuge tube, 500 μl of 95% ethanol is added, and the DNA is precipitated overnight at −80° C. The sample is centrifuged for 30 minutes at 13,000 rpm, washed with 500 μl of 95% ethanol and centrifuged again for 30 minutes at 13,000 rpm. The sample is then dried under vacuum, and resuspended in 10 μl TE.

[0097] The sheared DNA fragments are sized and purified by preparative agarose gel electrophoresis. Five microliters of 6×BP-XC-glycerol dye (0.25% BP, 0.25% XC, 30% glycerol) is added to the sample. The sample is split into two samples and loaded (12.5 ul per lane) on a 0.8% (1×TAE) low-melting agarose gel (SeaPlaque GTG) and electrophoresed at 60 V, 46 mA for 3.5 hours.

[0098] The gel is photographed under long wave UV and slices containing DNA fragments of 1.3-1.7 kb and 2-4 kb are excised and excess agarose cut away. The gel slices are placed in 1.5 ml microcentrifuge tubes. One gel slice is stored at −20° C. 15 μl of 1 M NaCl is added to the other gel slice, followed by melting of the agarose by incubation at 65° C. for 8 minutes. The resulting approximately 250 μl samples are placed into microcentrifuge tubes. An equal volume of water is added, following which the sample is vortexed and placed at room temperature for 2 minutes to bring the temperature up to 30-35° C. 0.5 ml of water-saturated phenol that has been cooled on ice is added and the sample vortexed vigorously. The sample is placed on ice for 5 minutes, and the vortexing step repeated.

[0099] The sample is centrifuged at 4° C. in a microcentrifuge for 20 minutes. The upper phase is transferred to a clean tube, and the bottom phenol layer is reextracted by addition of 2001 of dd H2O. The sample is vortexed and placed on ice for 5 minutes, followed by centrifugation for 15 minutes. The aqueous layer is extracted and added to the aqueous layer from the previous step. Phenol extraction is repeated with 0.5 ml phenol, followed by vortexing and centrifugation for 20 minutes at 4° C. The aqueous layer is removed and repeated sec-butanol extractions are performed until the final volume is reduced to approximately 0.165 ml.

[0100] Two volumes of 95% ethanol (400 μl) are added and the sample is stored at −80° C. overnight. The sample is centrifuged for 30 minutes at room temperature to pellet the DNA, washed once with 95% ethanol and dried briefly under vacuum. The sample is resuspended in 7 μl of TE. A 1 ul sample is run on a 0.8% agarose gel with markers to estimate concentration of recovered fraction.

M13 Library

[0101] 20 ng of M13 DNA digested with SmaI is mixed with 1 μl of 10× ligation buffer (10× ligation buffer=0.5M tris pH 7.4, 0.1M MgCl₂, 0.1M DDT), 1 μl of 1 mM ATP and 100-200 ng of sheared genomic DNA fragments (1-3 μl volume), and 0.3 μl of high concentration NEB ligase (5 unit/μl) is added. Water is added to a final volume of 10 ul and the sample is incubated overnight at 14° C.

Plasmid Library

[0102] 200 ng (4 μl) of pSTBlue vector (Novegene) is mixed with approximately 600 ng (12 μl) of sheared genomic DNA fragments from the 2-4 kb size range gel slices and 1.2 μl of Gibco T4 ligase (5 units per μl) is added. Water is added to a final volume of 30 ul and the sample is incubated overnight at 14° C.

Transformation

[0103] The ligation reaction is titered and diluted for optimal transformation efficiency. When the ligation contains approximately 20 ng of M13 vector, the dilution will typically be from 1:25 to 1:100. A 1:25 dilution is used for plasmid ligation containing approximately 200 ng of vector DNA. To increase transformation efficiency, the ligase is denatured by heating at 65° C. for 7 minutes, and placed at room temperature for 5 minutes following the heating step.

[0104] A sterile electroporation cuvette is chilled for each transformation. Electro-competent cells are removed from the −80° C. freezer and thawed on ice. For each M13 transformation, a sterile tube containing 25 ul of IPTG (25 mg/ml in water), 25 μl of X-Gal (25 mg/ml in dimethylformamide) and 3 ml of YT top agar is prepared, capped and placed in a 45° C. water bath. YT plates are pre-warmed at 37° C. for several hours to avoid cross-contamination problems that may result if water remains on plates. For plasmid transformations, a sterile tube containing 0.5 ml of SOC medium is prepared for each transformation, and L+amp plates are pre-spread with 25 μl of IPTG and 25 μl of X-Gal.

[0105] 25 μl of electro-competent cells are mixed with DNA in diluted ligation mix in the cuvette, and the sample pulsed in an E. coli pulser (BioRad) set to the appropriate voltage (1.80 kV for 0.1 cm cuvettes; 2.50 kV for 0.2 cm cuvettes). The cuvette is removed from the pulser, and the sample immediately transferred to the tube containing SOC or YT top agar. For M13 transfections, the sample is plated immediately on YT plates. For plasmid transformations, the tube is placed in a 37° C. shaker for 15-30 minutes and 30 ul aliquots are plated on L+Amp plates. Plates are incubated at 37° C. overnight.

### Example 2

[0106] Two basic methods can be used for DNA sequencing, the chain termination method of Sanger et al., Proc. Natl. Acad. Sci. (U.S.A.) 74:5463-5467 (1977), the entirety of which is herein incorporated by reference and the chemical degradation method of Maxam and Gilbert, Proc. Natl. Acad. Sci. (U.S.A.) 74:560-564 (1977), the entirety of which is herein incorporated by reference. Automation and advances in technology such as the replacement of radioisotopes with fluorescence-based sequencing have reduced the effort required to sequence DNA (Craxton, Methods 2:20-26 (1991), the entirety of which is herein incorporated by reference; Ju et al., Proc. Natl. Acad. Sci. (U.S.A.) 92:4347-4351 (1995), the entirety of which is herein incorporated by reference; Tabor and Richardson, Proc. Natl. Acad. Sci. (U.S.A.) 92:6339-6343 (1995), the entirety of which is herein incorporated by reference). Automated sequencers are available from, for example, Pharmacia Biotech, Inc., Piscataway, N.J. (Pharmacia ALF), LI-COR, Inc., Lincoln, Nebr. (LI-COR 4,000) and Millipore, Bedford, Mass. (Millipore BaseStation).

[0107] In addition, advances in capillary gel electrophoresis have also reduced the effort required to sequence DNA and such advances provide a rapid high resolution approach for sequencing DNA samples (Swerdlow and Gesteland, Nucleic Acids Res. 18:1415-1419 (1990); Smith, Nature 349:812-813 (1991); Luckey et al., Methods Enzymol. 218:154-172 (1993); Lu et al., J. Chromatog. A. 680:497-501 (1994); Carson et al., Anal. Chem. 65:3219-3226 (1993); Huang et al., Anal. Chem. 64:2149-2154 (1992); Kheterpal et al., Electrophoresis 17:1852-1859 (1996); Quesada and Zhang, Electrophoresis 17:1841-1851 (1996); Baba, Yakugaku Zasshi 117:265-281 (1997), all of which are herein incorporated by reference in their entirety).

[0108] A number of sequencing techniques are known in the art, including fluorescence-based sequencing methodologies. These methods have the detection, automation and instrumentation capability necessary for the analysis of large volumes of sequence data. Currently, the 377 DNA Sequencer (Perkin-Elmer Corp., Applied Biosystems Div., Foster City, Calif.) allows the most rapid electrophoresis and data collection. With these types of automated systems, fluorescent dye-labeled sequence reaction products are detected and data entered directly into the computer, producing a chromatogram that is subsequently viewed, stored, and analyzed using the corresponding software programs. These methods are known to those of skill in the art and have been described and reviewed (Birren et al., Genome Analysis: Analyzing DNA,1, Cold Spring Harbor, N.Y., the entirety of which is herein incorporated by reference).

[0109] PHRED is used to call the bases from the sequence trace files (http://www.mbt.washington.edu). PHRED uses Fourier methods to examine the four base traces in the region surrounding each point in the data set in order to predict a series of evenly spaced predicted locations. That is, it determines where the peaks would be centered if there were no compressions, dropouts, or other factors shifting the peaks from their “true” locations. Next, PHRED examines each trace to find the centers of the actual, or observed peaks and the areas of these peaks relative to their neighbors. The peaks are detected independently along each of the four traces so many peaks overlap. A dynamic programming algorithm is used to match the observed peaks detected in the second step with the predicted peak locations found in the first step.

[0110] After the base calling is completed, two sequence quality steps occur 1) poor quality end sequences are cut and if the resulting sequence is 50 bp or less it is deleted 2) overall sequence quality is examined and poor sequences are deleted from the data set if they have an average quality cutoff below 12.5. Contaminating sequences (E. coli, yeast, vector, linker) are removed after sequence quality assessment. The screened file contained 498,037 sequences.

[0111] Contigs are assembled using PANGEA clustering tools (PANGEA SYSTEMS. INC) and PHRAP (http://www.mbt.washington.edu). PANGEA clustering tools are a series of scripts which group sequences (clusters) by comparing pairs of sequences for overlapping bases. The overlap is determined using the following high stringency parameters: word size=8; window size=60; and identity is 93%. Each of the clusters are then assembled using PHRAP. This step results in 102,349 islands. The next step is to combine the islands together to collapse the contig number even further. Default, less stringent parameters, are used in this step: minimum match=14, minimum score=30; and the penalty is −2. The resulting, final, total number of islands equals 81,306. Of these, 50,262 are actual contigs and 31,044 are singletons. The final set of 81,306 nucleic acid sequences is identified in Table 1 by sequence identification (Seq. ID.) “ATL8Sxxxxx” (for singleton sequences) and “ATL8Cxxxxx” (for contig sequences) and by the corresponding sequence number (SEQ ID NO: 1 through SEQ ID NO: 81,306). The final set of 81,306 genomic sequences is run through the following annotation and gene selection processes described in Example 4. The genomic sequence traces and many of the contigs and singleton traces are disclosed in copending provisional applications for patent identified by Ser. Nos. 60/111,990; 60/111,991; 60/114,151; 60/120,644; 60/135,825; 60/139,932; 60/143,994 and 60/155,422.

### Example 3

[0112] This example illustrates the generation of the ATCEA4 EST library from cDNA prepared from a variety of Arabidopsis thaliana, Columbia ecotype, and tissue. Wild type Arabidopsis thaliana seeds are planted in commonly used planting pots and grown in an environmental chamber. Tissue is harvested as follows:
[0113] (a) For leaf tissue-based cDNA, leaf blades are cut with sharp scissors at seven weeks after planting;
[0114] (b) For root tissue-based cDNA, roots of seven-week old plants are rinsed intensively with tap water to wash away dirt, and briefly blotted by paper towel to take away free water;
[0115] (c) For stem tissue-based cDNA, stems are collected seven to eight weeks after planting by cutting the stems from the base and cutting the top of the plant to remove the floral tissue;
[0116] (d) For flower bud tissue-based cDNA, green and unopened flower buds are harvested about seven weeks after planting;
[0117] (e) For open flower tissue-based cDNA, completely opened flowers with all parts of floral structure observable, but no siliques are appearing, and are harvested about seven weeks after planting;
[0118] (f) For immature seed tissue-based cDNA, seeds are harvested at approximately 7-8 weeks of age. The seeds range in maturity from the smallest seeds that could be dissected from siliques to just before starting to turn yellow in color.

[0119] All tissue is immediately frozen in liquid nitrogen and stored at −80° C. until total RNA extraction. The stored RNA is purified using Trizol reagent from Life Technologies (Gibco BRL, Life Technologies, Gaithersburg, Md. U.S.A.), essentially as recommended by the manufacturer. Poly A+ RNA (mRNA) is purified using magnetic oligo dT beads essentially as recommended by the manufacturer (Dynabeads, Dynal Corporation, Lake Success, N.Y. U.S.A.).

[0120] Construction of plant cDNA libraries is well-known in the art and a number of cloning strategies exist. A number of cDNA library construction kits are commercially available. The Superscript™ Plasmid System for cDNA synthesis and Plasmid Cloning (Gibco BRL, Life Technologies, Gaithersburg, Md. U.S.A.) is used, following the conditions suggested by the manufacturer.

[0121] The cDNA libraries are plated on LB agar containing the appropriate antibiotics for selection and incubated at 37° for a sufficient time to allow the growth of individual colonies. Single colonies are individually placed in each well of a 96-well microtiter plates containing LB liquid including the selective antibiotics. The plates are incubated overnight at approximately 37° C. with gentle shaking to promote growth of the cultures. The plasmid DNA is isolated from each clone using Qiaprep plasmid isolation kits, using the conditions recommended by the manufacturer (Qiagen Inc., Santa Clara, Calif. U.S.A.).

[0122] The template plasmid DNA clones are used for subsequent sequencing. For sequencing the cDNA libraries, a commercially available sequencing kit, such as the ABI PRISM dRhodamine Terminator Cycle Sequencing Ready Reaction Kit with AmpliTaq® DNA Polymerase, FS, is used under the conditions recommended by the manufacturer (PE Applied Biosystems, Foster City, Calif.). The ESTs of the present invention are generated by sequencing initiated from the 5′ end of each cDNA clone.

[0123] A number of sequencing techniques are known in the art, including fluorescence-based sequencing methodologies. These methods have the detection, automation and instrumentation capability necessary for the analysis of large volumes of sequence data. Currently, the 377 DNA Sequencer (Perkin-Elmer Corp., Applied Biosystems Div., Foster City, Calif.) allows the most rapid electrophoresis and data collection. With these types of automated systems, fluorescent dye-labeled sequence reaction products are detected and data entered directly into the computer, producing a chromatogram that is subsequently viewed, stored, and analyzed using the corresponding software programs. These methods are known to those of skill in the art and have been described and reviewed (Birren et al., Genome Analysis: Analyzing DNA, 1, Cold Spring Harbor, N.Y., the entirety of which is herein incorporated by reference).

[0124] The generated ESTs (including any full length cDNA sequences) are combined with ESTs and full length cDNA sequences in public databases such as GenBank. Duplicate sequences are removed; and, duplicate sequence identification numbers are replaced. The combined dataset is then clustered and assembled using Pangea Systems tool identified as CAT v.3.2. First, the EST sequences are screened and filtered, e.g. high frequency words are masked to prevent spurious clustering; sequence common to known contaminants such as cloning bacteria are masked; high frequency repeated sequences and simple sequences are masked; unmasked sequences of less than 100 bp are eliminated. The thus-screened and filtered ESTs are combined and subjected to a word-based clustering algorithm which calculates sequence pair distances based on word frequencies and uses a single linkage method to group like sequences into clusters of more than one sequence, as appropriate. Clustered sequence files are assembled individually using an iterative method based on PHRAP/CRAW/MAP providing one or more self-consistent consensus sequences and inconsistent singleton sequences. The assembled clustered sequence files are checked for completeness and parsed to create data representing each consensus contiguous sequence (contig), the initial EST sequences, and the relative position of each EST in a respective contig. The sequence of the 5′ most clone is identified from each contig. The initial sequences that are not included in a contig are separated out. A FASTA file is created consisting of 56,754 sequences comprising the sequence of each contig and all original sequences which were not included in a contig. The FASTA file is referred to as the ATCEA4 EST library. The EST contigs and original sequences which are not included in a contig are presented in Table 2 comprising SEQ ID No: 81,307 through SEQ ID NO: 138,060.

### Example 4

[0125] This example illustrates the identification of ATUs within the ATL8 genomic contig and singleton library assembled in Example 2. The genes and partial genes embedded in such contigs are identified through a series of informatic analyses. The tools to define genes fall into two categories: homology-based and predictive-based methods. Homology-based searches (e.g., GAP2 and BLASTX supplemented by NAP) detect conserved sequences during comparisons of DNA sequences or hypothetically translated protein sequences to public and/or proprietary DNA and protein databases. Existence of an Arabidopsis thaliana gene is inferred if significant sequence similarity extends over the majority of the target gene. Since homology-based methods may overlook genes unique to Arabidopsis thaliana, for which homologous nucleic acid molecules have not yet been identified in databases, gene prediction programs are also used. Predictive methods employed in the definition of the Arabidopsis thaliana genes included the use of the GenScan gene predictive software program which is available from Stanford University (e.g. at the web site http://gnomic/stanford.edu/GENSCANW.html). GenScan, in general terms, infers the presence and extent of a gene through a search for “gene-like” grammar.

[0126] The homology-based methods used to define the Arabidopsis thaliana gene set included GAP2 and BLASTX supplemented by NAP. For a description of BLASTX see Coulson, Trends in Biotechnology 12:76-80 (1994) and Birren et al., Genome Analysis, 1:543-559 (1997). GAP2 and NAP are part of the Analysis and Annotation Tool (AAT) for Finding Genes in Genomic Sequences which was developed by Xiaoqiu Huang at Michigan Tech University and is available at the web site http://genome.cs.mtu.edu/. The AAT package includes two sets of programs, one set DPS/NAP (referred to as “NAP”) for comparing the query sequence with a protein database, and the other set DDSIGAP2 (referred to as “GAP2”) for comparing the query sequence with a cDNA database. Each set contains a fast database search program and a rigorous alignment program. The database search program quickly identifies regions of the query sequence that are similar to a database sequence. Then the alignment program constructs an optimal alignment for each region and the database sequence. The alignment program also reports the coordinates of exons in the query sequence. See Huang, et al., Genomics 46: 37-45 (1997).

[0127] The GAP2 program computes an optimal global alignment of a genomic sequence and a cDNA sequence without penalizing terminal gaps. A long gap in the cDNA sequence is given a constant penalty. The DNA-DNA alignment by GAP2 adjusts penalties to accommodate introns. The GAP2 program makes use of splice site consensuses in alignment computation. GAP2 delivers the alignment in linear space, so long sequences can be aligned. See Huang, Computer Applications in the Biosciences 10 227-235 (1994). The GAP2 program aligned the Arabidopsis thaliana Landsberg erecta contigs with the ATCEA4 library of Arabidopsis thaliana Columbia ESTs prepared as described above in Example 3.

[0128] The NAP program computes a global alignment of a DNA sequence and a protein sequence without penalizing terminal gaps. NAP handles frameshifts and long introns in the DNA sequence. The program delivers the alignment in linear space, so long sequences can be aligned. It makes use of splice site consensuses in alignment computation. Both strands of the DNA sequence are compared with the protein sequence and one of the two alignments with the larger score is reported. See Huang, and Zhang, “Computer Applications in the Biosciences 12(6), 497-506 (1996).

[0129] NAP takes a nucleotide sequence, translates it in three forward reading frames and three reverse complement reading frames, and then compares the six translations against a protein sequence database (e.g. the non-redundant protein (i.e., nr-aa) database maintained by the National Center for Biotechnology Information as part of GenBank and available at the web site: http://www.ncbi.nlm.nih.gov).

[0130] The first homology-based search for genes in the Arabidopsis thaliana contigs is effected using the GAP2 program and the ATCEA4 library of clustered Arabidopsis thaliana Columbia ESTs. The Arabidopsis thaliana Columbia EST clusters represented by SEQ ID NO. 81,307 through SEQ ID NO. 138060 are mapped onto an assembly of Arabidopsis thaliana Landsberg contigs represented by SEQ ID NO. 1 through SEQ ID NO. 81,306 using the GAP2 program. GAP2 standards for selecting a DNA-DNA match were >82% sequence identity with the following parameters:

[0131] gap extension penalty=1

[0132] match score=2

[0133] gap open penalty=6

[0134] gap length for constant penalty=20

[0135] mismatch penalty=−2

[0136] minimum exon length=21

[0137] When a particular ATCEA4 EST aligns to more than one ATL8 contig, the alignment with the highest identity is selected and alignments with lower levels of identity are filtered out as surreptitious alignments. ATCEA4 EST sequences aligning to ATL8 contigs with exceptionally low complexity were filtered out when the basis for alignment included a high number of ESTs with poly A tails aligning to genomic regions with extended repeats of A or T.

[0138] The second homology-based method used for gene discovery is BLASTX hits extended with the NAP software package. BLASTX is run with the Arabidopsis thaliana genomic contigs represented by SEQ ID NO. 1 through SEQ ID NO. 81,306 as queries against the GenBank non-redundant protein data library identified as “nr-aa”. NAP is used to better align the amino acid sequences as compared to the genomic sequence. NAP extends the match in regions where BLASTX has identified high-scoring-pairs (HSPs), predicts introns, and then links the exons into a single ORF prediction. Experience suggests that NAP tends to mis-predict the first exon. The NAP parameters are:

[0139] gap extension penalty=1

[0140] gap open penalty=15

[0141] gap length for constant penalty=25

[0142] min exon length (in aa)=7

[0143] homology >30%

[0144] The NAP alignment score and GenBank reference number for best match are reported for each ATU for which there is a NAP hit.

[0145] The GenScan program is “trained” with Arabidopsis thaliana characteristics. Though better than the “off-the-shelf” version, the GenScan trained to identify Arabidopsis thaliana genes proved more proficient at predicting exons than predicting full-length genes. Predicting full-length genes is compromised by point mutations in the unfinished contigs, as well as by the short length of the contigs relative to the typical length of a gene. Due to the errors found in the full-length gene predictions by GenScan, inclusion of GenScan-predicted genes is limited to those genes and exons whose probabilities are above a conservative probability threshold. The GenScan parameters are:

[0146] weighted mean GenScan P value >0.4

[0147] mean GenScan T value >0

[0148] mean GenScan Coding score >50

[0149] length >200 bp

[0150] minimum TBLASTX E value <1E-20

[0151] The weighted mean GenScan P value is a probability for correctly predicting ORFs or partial ORFs and is defined as the (1/Σlᵢ)(ΣlᵢPᵢ), where “l” is the length of a exon and “P” is the probability or correctness for the exon. The weighted mean GenScan probability for all ATUs is reported in Table 3.

[0152] ORF indications from GAP2-EST, NAP and GenScan are assembled into candidate gene clusters by first splitting the indicated ORFs into forward (+) and reverse (−) strand indication groups for each contig. Overlapping indications or indications with less than 150 bp intervening were grouped together (150 bp is less than the expected intergenic distance for genes on the same strand). The principle evidence that a given cluster represents a particular ORF or partial ORF is based primarily on the type of indication (GAP2-EST, NAP-BLASTX and GenScan), secondarily on the score of the indication and thirdly on the consensus sequence length. The order of confidence for type of indication is highest for GAP2-EST, next for NAP-BLASTX and lowest for GenScan. Clusters where then collapsed. Using clonemate information for the ATCEA4 EST library, when more than one potential ATU aligned to ATCEA4 EST sequences which were assembled from sequences of two or more common clone ancestors, the potential ATUs were collapsed into a single ORF possibly spanning more than one ATL8 genomic contig. When two potential ATUs had indications for an ORF of the same sequence but on different strands and one of the potential ATUs was based solely on EST evidence, the EST strand indication was declared suspect as being of improper orientation and the EST was agglomerated into the other potential ATU.

[0153] The potential ATUs were then ranked and sorted, the highest score went to clustered sequence indicated by all three methods GAP2-EST, NAP-BLASTX and GenScan and the lowest score to sequence indicated solely by GenScan. In Table 3 the ATUs of this invention are identified in the sequence identification (seq. id.) column with the name ATU (Arabidopsis thaliana unigene) and begins with ATU00001 for SEQ ID NO. 138,061. The ATUs identified primarily by GAP-EST are identified by “gap2” in the “principal evidence” column of Table 3 and include SEQ ID No: 138,061 through SEQ ID No: 162,749. The ATUs identified primarily by NAP, i.e. in the absence of a GAP2-EST alignment are identified by “nap” in the principal evidence column of Table 3 and include SEQ ID NO. 162,750 through SEQ ID NO. 174,652. The ATUs identified solely by GenScan are identified by “GENSCAN” in the principal evidence column of Table 3 and include SEQ ID NO. 174,653 through SEQ ID NO. 195,836.

### Example 5

[0154] This example serves to illustrate the design of primers of this invention which are useful, for instance, for initiating synthesis of nucleic acid molecules of this invention, specifically substantial parts of certain ATUs of this invention. Such primers are designed with the program Primer3 (obtained from the MIT-Whitehead Genome Center) with a “perl-oracle” wrapper. The criteria applied to design a primer include:

[0155] Primer annealing temperature (minimum 65° C., optimum 70° C., maximum 75° C.)

[0156] Primer length (minimum 18 bp, optimum 20 bp, maximum 28 bp)

[0157] G+C content (minimum 20%, maximum 80%)

[0158] Position of the primer relative to the gene

[0159] Length of the amplified region (500 to 800 bp)

[0160] PHRED quality score of the gene template (minimum of 20)

[0161] Whether the gene was defined from one or two contigs

[0162] Maximum mismatch=12.0 (weighted score from Primer3 program)

[0163] Pair Max Misprime=24.0 (weighted score from Primer3 program)

[0164] Maximum N's=0

[0165] Maximum poly-X=5

[0166] The primary goal of the design process is the creation of groups of primer pairs with a common annealing temperature (Tₘ). When the program could identify a primer pair for any gene that fit the criteria, the gene is removed from the bin of genes needing primer design. Genes remaining in the bin are subjected to additional rounds of primer-picking, with the gradual and simultaneous relaxation of the criteria (ie., lowering the annealing temperature, increasing the size of the window where primers could be predicted, expanding the range of permitted size and G+C content, removing the need for a G/C clamp), until a sufficient number of primers are picked for the ATUs of this invention. After the Arabidopsis thaliana specific portion of the primers is selected, an additional common primer tail sequence (universal primer) is added to the 5′ ends. For the forward primers, the additional common bases added are: (5′-GAATTCACTGCGGCCGCCATG-3′); for the reverse primers the additional common bases added are: (5′-GTTCTCGAGACGAGCGATCGC-3′). The universal primer tail sequences are added so that subsequent reamplifications of any primer pair can be done with a single set of primers. In addition, the primer tail sequences contain restriction digestion sites for 8 bp cutters (NotI and SgfI) and 6 bp cutters (EcoRI and XhoI) to facilitate cloning of ATUs into vectors. The forward primers contains EcoRI and NotI restriction sites; the reverse primers contains XhoI and SgfI restriction sites. It is noted that primer pairs are not required to contain the universal tail sequence, the relevant portion for amplification and/or hybridization probes being the Arabidopsis thaliana specific sequences.

[0167] Other modifications of the above described embodiments of the invention which are obvious to those of skill in the area of molecular biology and related disciplines are intended to be within the scope of the following claims.

LENGTHY TABLE REFERENCED HERE
US20110014706A2-20110120-T00001
Please refer to the end of the specification for access instructions.

LENGTHY TABLE REFERENCED HERE
US20110014706A2-20110120-T00002
Please refer to the end of the specification for access instructions.

LENGTHY TABLE REFERENCED HERE
US20110014706A2-20110120-T00003
Please refer to the end of the specification for access instructions.

### Table Column Heading Descriptions

Table 1

[0168] Seq No.

[0169] Provides the SEQ ID NO. for the listed sequences.

[0170] Seq ID

[0171] Arbitrary identification assigned to each contig or singleton of genomic sequence. Contigs designations begin with ATL8C. Singleton designations begin with ATL8S.

Table 2

[0172] Seq No.

[0173] Provides the SEQ ID NO. for the listed sequences.

[0174] Seq ID

[0175] Arbitrarily assigned number for each clustered EST Arabidopsis thaliana Columbia. EST contig designations begin with ATCEA4.

Table 3

[0176] Seq No.

[0177] Provides the SEQ ID NO. for the listed sequences.

[0178] Seq ID

[0179] Arbitrarily assigned number for each ATU (Arabidopsis thaliana unigene).

[0180] Unigene Location

[0181] Indicates genomic contigs or singletons from which the ATUs are identified and the location of the ATU within the contig or singleton. In cases where the first numeral is higher than its corresponding second numeral, the Arabidopsis thaliana protein or fragment thereof is encoded by the complement of the sequence set forth in the sequence listing. The first numeral separated from the contig or singleton ID by a colon represents the starting point for the codon for the most N-terminal (if the first number is lower than the second number) or C-terminal (if the first number is higher than the second number) amino acid for the protein or protein fragment encoded by the ATU.

[0182] Principal Evidence

[0183] A code which identifies the most reliable ATU selection method for the particular ATU. The selection methods are described in detail in Example 4 and briefly summarized as follows:
[0184] gap2: GAP2 identified ORFs
[0185] nap: NAP predicted ORFs
[0186] GENSCAN: GenScan prediction

[0187] ESTs Aligned

[0188] Indicates ATCEA4 EST library entry(ies) for sequence(s) which matched to the Arabidopsis thaliana contig query.

[0189] EST Pct Identities

[0190] Indicates the percent identity for the EST alignment(s).

[0191] Genscan Prediction

[0192] Indicates genomic contigs or singletons from which the ATUs are predicted by GenScan and the location of the ATU within the contig or singleton. In cases where the first numeral is higher than its corresponding second numeral, the Arabidopsis thaliana protein or fragment thereof is encoded by the complement of the sequence set forth in the sequence listing. The first numeral separated from the contig or singleton ID by a colon represents the starting point for the codon for the most N-terminal (if the first number is lower than the second number) or C-terminal (if the first number is higher than the second number) amino acid for the protein or protein fragment encoded by the ATU.

[0193] Genscan Weighted p Score

[0194] Indicates the weighted mean GenScan probability for correctness of the prediction.

[0195] Ncbi Gids

[0196] Refers to National Center for Biotechnology Information GenBank Identifier number which is the best match for a given contig or singleton region from which the associated ATU was identified using NAP.

[0197] Nap Identities

[0198] The percentage of identically matched nucleotides (or residues) that exist along the length of that portion of the sequence which is aligned by the BLAST comparison to generate the statistical scores presented.

[0199] Nap Scores

[0200] The aat_nap score is reported by the NAP program in the AAT package. It is an alignment score in which each match and mismatch is scored based on the BLOSUM62 scoring matrix.

[0201] Blastx Pscores

[0202] A score that is generated by sequence comparison of the designated clone with the designated GenBank sequence.

[0203] Genbank Description

[0204] A description of the database entry referenced in the “NAP hit” column.

LENGTHY TABLE
The patent application contains a lengthy table section. A copy of the table is available in electronic form from the USPTO web site (http://seqdata.uspto.gov/?pageRequest=docDetail&DocID=US20110014706A2). An electronic copy of the table will also be available from the USPTO upon request and payment of the fee set forth in 37 CFR 1.19(b)(3).

The application's sequence listing, which the Patent Office published only in electronic form, follows.

SEQUENCE LISTING (195836 sequences)

SEQ ID NO: 1 - DNA, 576 bp, Arabidopsis thaliana landsberg
  unsure (1)..(576): unsure at all n locations
ttcactcagatattgaacgttncattaacgagaaaatcatttttgcatttacagngatagncgaacatgctgggactagggtaagatacngngatgtccttctgacctacggatcttccactgtcattgagatgatattagtgcatgcacatgaactcgggaaaaagtttcgtgtctttgtggtggattctcgaccaaagcttcaagggaagctactgcttcgtagattgatcaaacgaggcattaactgtacatacactcatataactgccatatcatatatcatgcaccaagtcaccaaagtgtttttgggcgcctcatcagttttttctaacggaacagtttactcaagggttggcactgcttgtgttgcaatggtggctaatgctttccgtgttcctgtgcttgtttgttgcgaagcctataagttccatgagaaggtgcagttggattattcaatatgctccaatgagctcggtgatccaaatgctatttcaaaagttcatggaagagaagacataaactacttaaatggcttgaccaacaatgcanagctgaagtttctgaacttgatgt

SEQ ID NO: 2 - DNA, 661 bp, Arabidopsis thaliana landsberg
aaatttagaaaaacggaaatcttggttactggaagattactggcaaaccaaagcctatcttgcgtaaccgccaagagatcggtgagaaaaaggttttgatgttttacatgagtaaggaacttggtggatccaaatccgactgggttatgcacgagtaccatgctttctctcctactcaggttttttttccctctgtttttgctctttaccgtgatttgattgctcgttttcgtgtatcgggtgattgtgatttgactgaatgttttttacagatgatgatgacatatacaatatgtaaagttatgtttaagggtgacgtgagagagatttcttcttcttctgcttcttcttatggtagtgaaattgagcagagtcgtgactctttaatccctcttcttgtgaacgattctgaggtttgtcgatctcaaaactttctctgtttctcttttaaatccgataactgacttgttttgttggttggtgatgtgcaggaagaagctcaaatcgaggatgctataccaatagaggaatgggaaacatggttgactgatgatggtgttgatgagcaggtgaatcatattatgaatatgaaagatgatcgcaacaaccacaggcctcaaaagccattgactggtgtcttgattgacgatagtagtgatga

SEQ ID NO: 3 - DNA, 492 bp, Arabidopsis thaliana landsberg
  unsure (1)..(492): unsure at all n locations
atccgaaatttgatgaatatttctctgctcctaggcttgttgtttatgcagtaccatatggatgtgttgtcccactcaaggttttgtaagtgtcgtaggtacttgaactaacttttctttgcctgttggtgtgtaagcagggacggttcaatggaaatttacatgcggaaagaattgagatattgaggattaaaccccattggtacaagcttacgtttggttgtacttacttatttacagctttcttataacaatcaaaactcttggcagctactgaatatggagcacttcgatgatgtttggcaagatggccaatgaagtgtctatgccccggatgctcgcgttntgactacatattattgtggtatgattntccttttttctggaattcatgagctaattgattctcttcttctctcttttacttcatgttttcgtggctttatcttcctgttgaaatgaactcttaatngctaacccgtaacttacaag

SEQ ID NO: 4 - DNA, 7290 bp, Arabidopsis thaliana landsberg
gaagatgctaatggacccttaaatcaattccccatacatcaaagatctccatttccaagattgggttctgaggcatttcatttcttctgctaatgttgccctttctctgcctgagcgtctttaaacattgatggttaccaaaaatctacttgcagaatctttgacactgtcttgaatgtcgcgaagtggacaccatatgcagagccgtggcaatgtagcaggataccttctacttcatcttctcagacgcatctcctgtaaatcttatctttacagagagtgtaaaggtaaggctcatcccagtagtaatggtgtatgtccctgaaaaacttcttcctttcataactggtcaacttgggagactctacttcgcatgccaaataattgacgtgatcagcataccatggagatcttccctcaatagcactcagttggtggaactctttcccactgtagctcccaccgaagaattctacaaccatgagttgctcttttggcattgagtcgtccatttgaataggttcttcaattctcatccttgccagatggtcaactgcaccattttcaatgtccttcttgtctactatatccatgtcaaactcgtgcaacagaagtatgcatctcaacagtcttggtttagtatccttcttggcatacatatgcctcaaagttgcatggtctttatagacagtgaccttggatccaaccaaatagcttctgaacttctcaaatgcgaatacaacagctagaagttccttctcagttgttgcatattaatatagctcaaattgccttaagcttactccctcaaataagagatcgtcgttagcactttgataataggtttttagtcaattatcctaaaacaccaatcatgtcattgtagtattttaggttgtcaatccaaatgggtgtgatgctaacaatcaagatgtgatcagaagtcactaagtcaagccaagcataacaggttttggtgtgttccagcagtcctaagtgaacatgcagaaaacagaaaatcaaacagaaacagtaaaacactcgaccaacacagctctttgtagagctctgggtgaggtcgagtgacaggtcgagtaacagacaggaaatgaaacagggatactcgactgcacagtctgttgccagacaactgggtggtcgagtatcaggtcgactaacagtaaagatttgcagaaactaaacaacagatgacaggatgtagtaaacagtagtagagtaaacaataaaatcaattagataaagaattcctaaggatgggataattgagtagtttcgtttcctcagtttacaggtgattgacatgctcaataaattaaccctagacaacaagttcattaactaaatctaagtgccaccgcaacagagactctcaagctaacctagtcccagactcaatcaccattgacgagagctaacctaacaagcattacgaatcaacaagttaaagccaaaacgctccctgcaaccaataccttggtacagggtcacaaatctatggaattagtggttcagacatttcatcgaataccttttgggcgcggaaatgtctgggctcaaattccagttgatcagaaagcaataggcattaagaacaactaatccagaagggatctatcaatcaatactcaatcacctagcatactgagaattctacactactctaacccatcctcaggaacctattcactactcatacatcataatagaaagcataaacgttgaacaggttgaagacatgataacaacagtgtaacagtagtgtgataacaaaatgaacaacagtaaacgaaaatcaagaaccaaaactgaatactgaatagataaagagaaatccggattacaaaaagtctagaacacaaggtctgcggaaataaaactaggtaaaaacttcttttttcgaaaatgagaagtacatgctacttatagccaaatatcccgaaaccctaatactcaaaacgacgaagtatttggacgggttaagaactgtactcgacccaggtggtcgagtgagaggtcgagtgaatagctggagtcttcttttcttccttgtgctcgagtgtctggttgagtgcagaatgaagaaggctctgaagcttgtcatcgagtatgcagtcgagtggtgtgatggagatactcgacctctaggtagagtgagtaggtcgagtggttgtctgatgatggaggtgaagacactcgacctcatggtcgagtgaagtgatcgagtggcggtctggtgatggagacgagggcactcggcctcggggtcgagtggtgaggtgaagtggtgatgtcctctactcgacctggcggtcgagtgatctcttgagatcttgaagctcctactcgacctctgggtcgagtgatttatcatgatcaggtccgcttcttccagatagctcgtcaacagctccaaatcaccttaaatcaacgcaaatatgcaacatgcatgcaaaactatcctaaacatgcaaagtgatgacaaatgatgtgaaatggtatgaaacaatgatgatatgatgctaaagtgatgacaaatggatgctcaaaacatgcaaaatacacacttatcaccaagtgattaccttctttgcaaactcttcctccactctcttgcgagcagagaaacatcatggttgcgtcaactagaactaggttcactaaccaattggactgatacaaagaatcactacttcgatgaatccgtgacagaggcacttcgtttgcaaatttcttcattcactcaagctccacccgaatcccttagagcagcttggctccgtatcagatcttattagcgtgaatgtccccaacatggttttcaagagagccaactcattaatatattctacagaggggtagccaagccataccggactcaacttgatgcagcgagctactgtaacttcatgacaagaactactagtgaagcattactcctcattaccaatgctttaactagtctttcgacacaggaagttgacacaaaacaaagaatttcagctgagaatgccaccgcaagcaaagagactcttgtttcagtaatttctgctcctatccaagcccccccctccaccttccttagacagcagacttgattccatgcttgcccagattttcgcgtgccaaacaaagctcgaggataagtttgatagcaaatatgattctctctatacagatctaaatagcacgattgacaatctacgctctcatataacggaaccctcacctacatcagcctctatcaatgcagtcacattacgcaatggaaagcaactgaatccaatacttcagcgcgaacgttcagctcagccttcatctttaccagttgcagaaaaagactcagttcgattgacaccaatcactcttgacgactctgttttgcctttgtcgagtgaaatcgacaatttcgtggaggaggaggaaattattcccgatggtgtcgatcgacacccagctcgttcagacaatgtgcaaattcaagctaaaaccaagtcagcaaatcggcaaattcctttccccaagagtcctaaaaaaacaagataagccttagatgatgtcagatgcaaggctatgattgataaggttattattgagatggctctagttgaagctattcatctctctcccacaataagaaggtatgtcaagacaatggtcactaagaatttaacgaaagaatacagtgttatgatgttttcagagcatggaagcgatatcatttaggaacgaattccaagaaagctacctgaccctggaacctttgtactaagtgtcaccatccaaccacgattccttcccaagagccttatgtgatctcggttctagtgtgaatctgatgcctcgttcagttgctacctttatcactcttgtgttggtagatcgttctacccggattccagatggaattcttattgatgttcccgggatgattggaaagagcatgattcctatagacttcgtagtcttgccttatgagaaggaacctaaggatccattaatctttgggagatccttcttgcacactgctggagcaatcatagatgttcgacaaggcaggatagggctgaatgttggcaatcttactatgcagttcaatatgaacactttggtcaagaaacggatcatagaagggaaaaccttcttgatagattctttcacttcatcagcttcagatagtatttcagagatggaattagaagacccactagagcgagttttggtctcttccatagtggatagtgcagatttggacagtgaaacttctacatatactaagctgcaagatgagaccgaacatgtgatgcaacttacggttgaagaagctcttccatctgtgattccaacaccgactattaattcagattgggatccagcaaaggctcctcaaatcgatttgaaaccacttccagcagggctaaggtacgcttttcttggtgaaaattctacttatcatgttattgtgaatgtttctcttaatcccgcagagctcaccttattgctaagcaagctgcgcaatcatcgcaaagctcttggctattctcttgatgacattgcaggtatatctccagatgtatgcatgcataggattcaccttgaggatgagtctaagtcttcgttgaacatcagagaaggctgaatccgaatctgaaagaagtggttaagaaagagattatgaagctgttggaagcagggattattaatccgatttcagatagcagttgggttagtccagtttatgtagttcctaagaaaggagctgttggaagcagggattatctattcgatctttgttatgctccttcaacatttcagagaggtatgatgtctatcttcacagacatgattgaggatatcatggaggtcttcatggatgatttttcagtttatggatcatcgtttgaggattgcttagagaatctctgcaaagtattagcaagatgtgaggcaaaacatctggttttgaattgggagaaatgtcactttatgatgtaggatgagatagttctcggtcatagaatttttgagcatggtatagaagtcgatagagctaagatcgaagttatgacaagtcttcgagcgcccgataatgttaaagcaatgaggagtttccttggacatgctcgtttctataggagattcatcaaaggttttaggaaaattgcaagaccattgaccgctttactctgtaaagaagttaaattcgaattttacataagagtgtcattgttggacatgggcattgccccttcaatgttaggaggcccaaaacagatatcaacaaagaagagggccttttgccattaaaaaggcccattaggtcgagaagggcaaaatcataatttgcaagggagacagaacggaatttagggttcagattccctataaatagagagaaacactattgggagcaagatccgatccacaggttattagctgagagacaaagagaatcgttgccttgcccgaaatcgttgcctagcccgacctcgttgcctagcccgacatcggtgcctcgcccatttctgtactttgtctttctgcttttacgatgaagttctcggctcggcaggatagtctataaccggcgagacaaaactagtttgctgtaatctctcgatctttgttatcgttaataaaatggaccaactccgttcagcccccaaaatctcgtatattattattattattgcatccccaatacaaataattgacgcccactgtggggccgttgatcgaagctatccttttttgacgagcctatgcatcctgaccctcacaagattcgcggtgatatgatagatacttccagcgatcgagaaactgatactggcatacctcaagcgcccgacgcgctgggcttacctccgctcaacccagcagccatccgtgccgagcatgatccctcgcgccgaatcttgttcacaccagacacaggaggagaaacagatcatgttcaggtcgcacgacctcctgccgcgcctacccccctcgcagtagctccagccgacgaagcgaccgcagctgcagcagcagcagcaaaaggcgccgctcaaagacgtaccacaacagcagaacgaggcacccatttagacgacctcgttcaaaccattcttgatcgactcgacggacaggaagcacgaactaccgaacggattgacgcctttgtggcagcacaagtcacttcccagagtcagatcgagcggcttcgacgccgaaaacacacctcccaacctcatgacaatcacgatggacagcagtctccgcgaactccagtcaccgagcgctcagagacccatcgccgtagaccagcgtcagttatcgtaggattcatcgacgagcattctcgcggtagcccacaagatgaccacaacctacagaacgaccacaatatgcagagcggccccaacctgccgagcggtcacaacctgcagaacaaacacaaccagcagagcggccacaacgtgaaaaacggccacaaccagcagaatggccacaacaagcagagcggctccaacctgcggaacgtgcacaacatgttgcctaacaccaactatccgcagagtaatcataatctgaacgaccacgatctcgcgagaggtcaaaatctgccaagcgaccagtattttccgaataaccaaactctcgagtgcaggcggatcttttcggatcgacctatcgaagttgaaaaccgatcccgcgatctggaacttgcacggttgaacgcggtaacaagagatatgtcttccaaaatgaattgggccaccaccgcggcccccgaactagagagggtgttggaagaaacacaacgctcgcccttcacggcgcgtctctcggcagtacgcgtttgtcatgttaataaagtcaagctaataccatacaacggtcttaccgaccccaagatcttccttaaatcaatgtgcattgccatcaatggtgcacattttttctgctaaagaaagtgatgctagaagttgccaaatgttcttggaaaacctgactgcagacgcactcaactggttctcgcgaatcggagccaattcaatcgatagctaccgaaaacttacatctttattcctgcagcaccactcggttttcatgattaaggaggccacaaacgccgacttgtggaccatgtctcagaaggaaagcgaaccacttagaactgtcattgaaagattcaagaaggttgtctcgaatatagccataactgatgatgcggctatcggggctctacgaaacgcgttaagtttcggatcacggtttagagaa

SEQ ID NO: 5 - DNA, 1864 bp, Arabidopsis thaliana landsberg
  unsure (1)..(1864): unsure at all n locations
tttagagtgagttttgtgttaaagatatttatttacctgacattatgacaatttctaataaccacataaatagttacacaaaagaatttagagtgagttttgtgttaaagatacgacataacatttttctaatgacattacagggaatggcattactgacactatcagtatcgctaccgggacttaaaccaccgaaatgttcgacggctaatgttgaaaactgtgaaaaagcttcggttatacagttagcggtattctttggagcgttatacacattagcaatcggtacaggcggtacaaaaccgaacatttctacaataggtgctgatcaattcgatgaatttgacccaaaggacaagattcataaacattcattcttcaattggtggatgtttagtatcttctttggtactttctttgctacaactgttcttgtctatgttcaagataatgttggttgggccataggttatgggctttcaactttgggacttgctttctccattttcatattcttgttgggaactcggttataccgacataaactcccaatgggaagcccattcaccaagatggctagagtcatcgtggcttcacttagcaaagcccgcgagccgatgtcgagtgattcgacgcgcttctatgagctttcacctatggaatatgctagcaaaagggctttcccaatccattctactttaagtctaaggtaagtgaacgttcgatttggttcggttcagtttaaatattttagatacttgctgcattttgttaaaataccatatgtacctaagatttaactgtgttacagattcttaaatcgagcttcactcaaaaccggatcaacccataaatggaggctctgtactatcacagaagtggaagaaacaaaacagatgctaaaaatgttacctgtcctcttcgtaacattcgtcccaagcatgatgcttgctcaaataatgactctgttcatcaaacaaggaacgaccctcgaccgtcgtctcacaaacaacttcagtatcccacccgcaagtctcctaggcttcacaacattctcaatgctcgtctctatagtcatatacgaccgtgtctttgttaagttcatgagaaaactaaccggaaacccaagaggtatcacattgcttcagcgaatgggaatcggtatgatccttcacatcctaatcatgatcatcgcgtccataaccgaacggtataggctcaaggtcgctgctgaacacgggctaacccaccagaccgctgtaccaattcctttgagcattttcacattgcttccacagtatgtactaatgggtttggctgatgcttttatagaaatagcaaagctggagtttttctacgatcaagcaccagagagtatgaaaagccttgggacatcatatacgagcacaagtatggcagtcgggaatttcatgagcagcgtgttgctttcatcagtgtctcagataacaaagaagcagggaagaggatggattcaaaacaacttgaacgagtctaggttggataactattacatgttcttcgcggtacttaatttgcttaacttcatcctcttcttggttgtaattannnnnnnnnnnnnnnnnnntgatgttacgcaatcagcaaacgtagaacagaaagaaccaaatatggtagataacaacaatgagtaaggaaagacattaggtttttatttggttgtaataaaatgtatggattggaaccaattaagcaaagccttaaatccacttacaaatcataatcatacactgctattgtgattcaagattgttcacttaaataaatgtttctcaatcagacactgagaaaacactaaagattgttcttgtgagttcatcacata

SEQ ID NO: 6 - DNA, 3335 bp, Arabidopsis thaliana landsberg
ctataaggtgaatttatagaatgagtcttcatcactgaatgtgttatcactccatatgcttataataatataatcttgtttaattaaatatgcagagtcttccatataaacttgtgataggatgcatcccactgtatgcggtgttgagaatagcgcaaaagatatttcaagagcttccaaatctcattcagaattcagtgaaggctggcttgccttttgcatgtgcatcaaacgctatagacaaacatcctttactcaaggccattccttcttcccatgatatcaaatggggtcttgcaaggtcttcttacctcttcaatactcagcttgagaagaaccttggcacgtacgtccttaaaccccaatgtagtctcagagttttaacgagtatagctgtttgcaggcatgtgactatatatgacatccgttctgatcacttgtcatggctattgtagggtatttgtggtgctcctgataacatgcttttcgtttgttatcattggaggactcttctttttcaaattcaggtaacttagctatgtttaagaacttcttgtgatatccattgcatggtttcttacttttattcccctccttcttgttgtgaaggaaagacacatccttagaagactgcctctgggaggcctgggcatgcctcgttaacgctgatactcatctggaggtcatgatttgcttcttcacagaacaacttatattagtctcacgatatttctatggagttcttgcttactaaataaatgcctatgtatatgtttactgcaaactgcagcaaaagacacgcttcgaaagactcattggatttgtcctagccatttggggaatagtgttttactctcggcttttaagcacaatgacagagcaatttcgggtaagatcttgagataaacattattggttaattggtaaaagttatcctgatcgtttttgttttggcagatcatatgaaaaaagtgagggaaggggcacatatgcaagtcctagaatctgaccatatatcatttgtggaataaacagcatctgcctttcatactaaagcaactcaacagttatcaacagcatgctgtccgcttaggtaccaccacagctaggtaatttaaatttggtcacaccatgaatttaatttacccatttttgttgacttgggtaatcacttttccttgttatatgctttcaggaagcagacacttctgctcatgtctgatactccaaggaaagagatggacaagctagctgaggcgtacgccaaagattttgatcaacttgacatccttacaaagaggtaatatgcagacgtgaacctgaaattaagttatgccatatatattagttattgttcttgttggtttgcatatattttacaatgctgatttcattcttctatcagtgcagttgtagtcttaacatgacaaaatcatttgaaagggctgccgcctgtatggcgcgcgccattatcatactaccaacgaaaggtgatcggtaagaaaatttcaagtctcgaaaagtatatttgaaatcagctttgaggaagaagattgtggaaactgagaagttccggatagatattgagtaatgagtagtagatttttttagtgtcgtaactctttcaagttagctttcccgtagtaaaatacatatggatatgtttactaagctagcttagcaattgggatatgtataggatgcagttaagagagttatgtgtataaagtatttgggtggtttggggccttcggggttgagagtttggatttctcttgaactaactccttaataactacttctcattacgcttagtttgttcggttagtattttgttcttcaatatgtactttggttttcattatgcacaaagaaataaaatatgttctgaaacctgtcagaaaactggagtgctatggtaaaagatatggaatctcaatactttgtaaaaaaggaatcagttaagttaaacattgtttcaggtatgaagttgatacagacgcatttctttctgtattagcccttcaacctatacaaaagatggaatcgatcccaaccatagtagaggtaaaataggtaactaaagattgtgcagtaaatggttttctgtttataatgctgaccctttttctttcttgtttgtggaaatgaatgcaggtatcaagtcctaatacgtacgatcttctcaagtccatttcgggattgaaagtggagccggttgaaaattctacatccaaattgtttgtccaatgctcacgtcaaaaggacctgataaagatctacaggcacctactaatttactcaagtcagatactattattatacatatgttgacttattaagtttcgttatcaagactgattagtaccaagactctactcgatgcagaaaatgtatttaacctttgcagcttccccaatctaactgggaagaaatatatacagttaagactggggttccaggaggtaggattgacaatgttttgagtatgtttttgaatcattaccgttttagtctgcggccttttaagagatgtattcctccttccaggttgtggtctgtgggattttaagagatgggaaagtaaatttccatccaaatgatgatgaagagctcatggaaactgacaaactattgtttattgcacctctcaagaaggactttttatatacagacatgaaaactgagaacatgacagtagatgagactgatgatactcggaagcaagtgtatgaggaaaaaaaatcacggctagaaaagattataacgcgtcctagtaagtccttatcaaaggtctggctccgaactgtcccccctacaatgcttgaactatctatgatattaggcttttgagacctctgacgttcatttctatggtttacacagggatcagattctttcaaaggacccaaagaatctatacttttgcttggttggcgtggagatgttgtgaatatgatcaaggagtttgatagttatcttggtccaggcagttcattggtatgctctcatataccatagtctctttctgacgggctctcacggaatgagttactgatagttttttttaaacacaggaaatattatcagatgtaccgttagaggacagaagaggagtggaccagagtatagctacaggaaaaatcaagaacatccaagtttcacatagcgtaaatttcagtttcactggaaagaagaagaattagcttcaaaatcattgtgtattgatggttttcaatcttttgcaggttgggaatcccatggactctgatacattaaaggaaagtataaaacacatacaaaataaatatgaaaaaggtgaagcagatattcgt

SEQ ID NO: 7 - DNA, 10848 bp, Arabidopsis thaliana landsberg
  unsure (1)..(10848): unsure at all n locations
ggatcgatgatgatgtccctattaacgatttcttgcctgaggagaacatatacatgattgatacagctggagaagatgactgcaaatgtgataagttgcagaatcgaactttagtgtcgatcgacactccttctatgtcgatcgacactcacaattcagaggaagttgatattcgtagttgcgcaatggtgtcgatcgacaccactgaaaatgtcgatcgacaccctcctgcctcgacaccaaattggtcaccaactgagaattgagccaccacaggggtcgagaaggactacccatggtatgctgacattgttaattacctagctatagatgtggaactggataatttcacagattacaacaagaagagattcctaagagagattaggcgatattatagggaagaaccttatctttataagcattgttctgatggagtttataggagatgcatggctgcaacagaggttcctgatatactattgcattgtcacaactctagctatggtggtcattttgcaaccttcaagacagtatccaaagttcttcaagcaggcttttggtagcctataatattttgggatgctcagaagttcatatcgtaatgtgatccttgttagagaaggggaaagatcagcaagcgtaatgagatgcctcagaaatttatcctcggagttgaagtcttcgattgttgggatatagatttcatgggacccttcccaccttccaataagaatctctacatcctagtagctgtcgattatgtctccaagtgggtagaggctatagctagtccgaagaacgattcagcaatggtcataaaactcttcaaatctatcatcttccctcgttttggagtgccacgcatagtcattagtgacggaggtaagcatttcattaacaagattcttgcgaaattgcttcttcgatatggagttcagcattgagttgctactccataccatccacaaacgagtggacatgttgaagtttccaacaggcagatcaaagagattcttgagatgacagtgggaaaatcgaaaaaagagtggtcctataagttagataatgcactatgggcttacagaacagctttcaaaactccgcttgggaccacaatttttcatcttctctatggtaaagcttgtcatcttccagtggaattagagcacaaagcagcttgggcagttaagataatgaatttcgacatcaaatcagctggagaaaggagacatatacagttgaatgagcttgatgagatacgaattcatgcatatgacaactcaaagctctacaaggaatgcacaaaggcttaccacgacaagaagatcctcactcgaacctttgagcctaatgactaggtacttctttatgattctagattgacattgtttcctgcaaaattgtcttctcgttggtcaggtctatacatagtccatttggttaggccatatggaacagtcgttcttacatatacaatggatgatcatttgcaatgaatggacagaaagtcaaacactactgggctgaagccgagattccagtagaaaagcctttggatcttaaggacccacatgttgattaagcaactgcaaagtcaagctattgactataaacaagcgcttagtgggaagcaacccactaataagtatttctcttcttcatcatttcattcatttaatttttaacttaggatttttggttttataggatttatgaaagaaaaaaaaaagaaaaaaaaaagctctggtgtcgatcgacatcctcattttccaggtaagtcgatttaacctaaaacttcatcttcttcatttcagttttttccaaaccgccaaaatcactcttttctttctatatccttcgattttttaccgtttctagtgatttcaggctctaatctcattagaatttcattctctatcttccccaagtgtcaactccatcgatctgcaagatgacagggcagaaaaagaaggcgaggaagagcgttggaccttcctcctcatcagtcgcccctcacccagcatgcgcttatccactgctgtcggtctccgcccatcccaaccgatatcccaagttgcagctcctcaacctcctgttgatcaatttccatggccaaagcttccaaaagagaaaattccttctcaaagggtttgggagaaagatgtcaacagggaattcactaaaggtgactttatcaatcgccatttttctccagattaggatgattatgatactctgttctataatgcatagatgagtgtagaaattttgcctactcggtttgtggatttcggtttgatgcagcgtttgcagatagagaaatctgttttaggacttctagatgacataggtttggaatcatctattgtaggttgtactttttgtattatgagctggttaaacaattcatggcttctgttagggtatcttatgtgaatgacaggaaacacaacgctcaggaaggagctcttatcttcttcattcgcagtgtcagatacagtttaccagtgcgagatttgtgtgacatctatgggtttgacaatgatctcactggagtttccctgcctggtcagtttaaggattctcagattttctggagctggtttggtaatggaatctatgattccaaagacgcagtacattcagagatccgtcaccctgttctgggatattttgttaggctgattagtagcacactgttgtgcaagatggagcctggcaagatgagactttctgagttattattgctctataacgctcttcatgacttctttctagacagccttggatttgagcaggttgaccgtaatgtcaactttggggctgtgttcgctcatcacttggtttctctcaataccaagccctttataggtagaggacagaaatctgagagagttggcagtcttctcactcccatattcaagcatttctgcatcaactttaagggcgaagaagtcaacaccacgtgtgtcattatggatgaggcttaccggaagaactctcactggcttaaaggcaacttaatgtggtgcttcagagatgatacatgtcagcacatgattcggttacctcgccctgcacttacagatattacaggagagcatgaggagataggctttcatcctgatccttctcgtctgcatgccgcaccacgcacaaggcgatagagagtttcagcttcaggatgtgcgcctacacagaccgaggacgagttcattgaccctgctgggggtccgaaggttggatcttcctcatccgctcttccatatgagctgccttctcctccacccatcccattggagccatatgtctttcagcagtacatcgtcgacagtttcaagagcgtcgggaacgccatagctacactttctcgctgcggttgtgttgctcccactcgtcgccgtcgtcgctctcccgcacccacctccggctcagagcatgaggactagccatcctccctatcttgctttgttttctgattttgtttttgctttatttcagactatttgttatttgtattggaacttgttgcacttattttcttatgctttgttggaactattgatgtgtgttttagtgatttaacagtctaactcgaggatccatgtcaaaacactacccaaggctctacaataatgagctgaattcgcaaagctaagcaaaacgaccagagtgtcgatcgacaccattatggtatcgatcgacaccactcttaggtggcaactcacgtttctctaactttttaacttttgcttctttttccttcgatttctctagcttaataacactagggaccctgtcatataagtctgggggagtcagtaactaacttcaacttttcttttcttataagtcagttgtgtcattttaacttagagagtcgttttattgagtcaaattttttgtctgaaattttgatctctctttcgagtttattgcttagattgcttaagtacttcagattcaaatcaatccgactaatgggaaagccaaccgacaaacttaagcacatccattcccaacataatctacaaaggttggacctaatctcactgctcttccttttacctcatcaaaacggttagtgttcatagaacttgactctttgttcatacctgataaattgaccaatgtgataaaagaaaagtattcctcactcttgataaaaaaatatgtataataatgagagattgacaggattttcatatagtgtataggggtaggaatgtttcctatgaacccattattatacattgtttgaaatgatcaattacaaaggttggaaaaatgccgaggatgtcgatccagtatgcgagttcccctttgtttactttctaaaaagaataagtctgggggagagaaagaacaacaaaaaaaaaaataatataaagacaatggttgatttatcatggtatagtacatgaatgagtctagaaggatcttcaatgttagcttgtttgatgagacccaacgatgaaagcctggtggatatagttgtggaacttaggtatgaaatctagaatgttgtgtaagcttgcagagaagtacatgttggttaggatttgattagacttgttagacatatggatttggtttggatgatcaaggcagtaggctagagaatgttgggagttcctttgtttaaaaaatctcttccacgggttttgcttttgtgttttgcttgagggcaagcaaaagctaagtctgggggagttgatatatcccgattttcaccgattttatctatgttttaggtataggattttgagtctttatgttatttctcgagtctttttagtgtcttttcaagtattctatgcaatgggacaacaatggagataaggagacattttggagcaaaagcaaaggaaaaggaaactaaggacgcttttggattcaggaatcagcgaggagtgtcgatcgacacactcttggtgtcgatcgacaccagtttcggcctagcaaaaaccatagatgctttcaagtttacagaagatcaaatttgccccagaagactttcctatttgcattattagtccatggacgtttttagggtctatatatattgtttttaaacctaagtttcttttttcaagtctttttatcaagttttctacaaaccctattactgagagacataagccattcgtcgattattttcaaagttttattcagatcttaatacagtgaagagatccattctttccccttctctatctactgtgcttatactttcacacnnnnnnnnnnnnnnnnnnnnnnnnnntatgtcttagtaatctgcttgttggaatagggtttcttattagggatttatatggtttagtagaatgccctctttgtaggttatctatagaattgttcatctttaattgttcttaatgctagatctagagtaattaactagatcttgaatccaaacaatatatatacctgccataggtatatgtatttggactattatttgatgagcctggtttatagttgtgtaataagaatcgacctatctactaaggtgaacaatcgaactcgttcagaatgcatgtttaagttaaagatctctcggtttctccggttattcttaactataggcatagggagttttgcggaacgtccccggttattccataattagagtttgagtttaagaatggttcgataacaacatagctatcattagatctactaaccaatagtttcctgagaataccctactgctatctctttatttaatcgttacacaaccttcactctgctgtcttcttactttatttactttatttcaatcattccctactagcttaatcttgacatttgattcattgtgtgaacaaaagaattttgaggaaatttgacccttaaatattgcaaccgatctcttatttgagagagtaggtttaaggcaatttgaaccctatcagctatcaagattcttatacaaggattcgttatgggcaatttggttaaaggaaagatcaattttgccaagggacaataaaggaaatgaggaagaccaaattttatcggagaaaactagtgttatcgagaaataataattttaggccgagacaagcaagtgatgatcaaatggaatcggatacggatgatacaaggtttattagaatagtaaatcatgaggttaattagttatgtttagtattaattattttgttcattattgttagcatagttaattggatcctcggttattcgttacgtcttataatcgggtaagcgttgttattgaatcttgctcgtatgattgcttgatttattgtggttgattattgataaaccataagaggtaagtccccttggtttatattagcttgattgtatagagtcatggtagtataattgttatgccgacatgaggttggtattgacgttatgctgcctcactttataattgattgttgcatgaattagtttcatgcattttagtatagtttgcgtatgtgatgctttcccaaggttgtatcctagtagtgtgtgcgtagtggctagtttcctacacatgaatggtacgaagactcggagatgacaagctcgcaacctatggtcgagtgctgcatgacgatgtagcctgagtttcactagaatatgggactctgaacttactgatgttctatactagtttagcctttttggctacttgtataggtgttcacgactaagggaagggaatatcaatacgtgatgcgtgtttgatttcgcttcagacttttacctgaaagatcacacgactactgcaagtgcacagtatatcagagtagtattttaggatcgaatccacaaggagagaagtagttcagagaaatccttaaaaagagagtgaagctaggtccaaaataaagagagggggttgttgtatgtagtaagtaaccaaaataaaagacaagtaactaaagtcaacagtaagaaataagagagaagcgttaggtctttggaggtttctccagatgtcatggttcaataataaggtatagatctcaatctaggtgataaaatggctaggtttgtttacttccaaattctcagacatacgaaactctatcaagaccagctaaacctaacagctagtaggtgaaaaccagctatactcactaatatcttgcgtactcagttgccctatcggctagttggtgctaacatagtttcaaaatacaagatcaaagcattaagttcaaattcgattctagtccataagtccctatcactcggcgggcgtgcaacggttatagttgtttattcagttgagttaggtcaagcattcaaacgagattttgccaaagaatgaaatacctaaggtcaagtactaggtagcgttccggacatacaagcattaagattaaactcaactagaaggaatagtgtaaatggtcaaacaaagccatagaaaccgccaacctagatcttcaatctattggtccccataaattcccctttgaaaccccctcaaacccaactagagatctactcgctcatggcaaagaagctaataaaaagttgggttgagtagaccataactaaaagatgaataaaagttaaaagaggtttagagattacttctttgaatgtagaatacaagaggcaaagctccaccttaaagagttttacacgaaaacgagaaagagaaagagagagatggtgttcttcaagcttcaaaaagtgcggcggcgagtgggcagctctcggcgacggctagggttcgctggtgatgaaggcacacgtagggttaggacttaaaacaagtatttatacttgagggccaagaattagatttaggggtaagaacgtcattccgtcgggtaactaagtgatcgggccgagaagtgggcttcagggaaagagcctaatgacggcagcgcatagaggaaaggacttgggcgtgacctaatggtcggtggtgagctactaggagctgcccgggttcaagtctcatcggccggatgtgttttggatttattatttccaaacagcaaattcttgacatgtcttcactcttcgggtcatatcttttgaccggcttcatggattgcttcgattcgacttcgacgttaatcttgactcttctagctttccaatttaaccaagataccctcaggccgagatcaggaagaccttggccggatgtgaaacatctgaggcacaaaaactgtcttaaaacggattttggtcgacttctactcctttttgcatgaaaactcattattcttccttgaagctcaaatacttgaaatatgccttgaagtgtcctttaacttttgatatctccatggaaaacctaataaaaatatagtaaaagtgggcaaaaatacgatgttatcacgctacttgtgttaaaacttgtctgaactatgaatgctgcaaagattgtgcaaagattgtgaagtttcttgcaggcttgaatgaatcatactcaacgattcacagtcaaatcattatgaagaaaacaattccagaccttgtagagatttataatcttcttgatgaagatcacatccaacgcaacattattacagtttcaagtaaagctaaaatggagttccttggatgagctttcgaagcttggaatgaggttcacgatgatagtggcttggcacaaacctacgcctcatgagaagcttcaacccttcccatgtctcaataggatatgctccattacgccgccttgtagtgacgatctaatcccaccaactaagagcatagtcgtaaaatttggttgcagcgaccttcacgcggttaaggtcagtgttgttttgacaattgaacacaagttccattttcttttcccaatccaaataggcatccgaatcattctacccatggaaaggtggaaccttcatcttatagccttggaacaagctccaagaaaactcggaaaaggagaaatcataagtgaaagtttgaacaaaatgcaaaaacgaaatagattaagagtgattaagtttgaagattcaagaacacaaagaaaaactaagatataaaagctagatcccttggacaaatcccaaagtgatctatttatactaaaatattgaaaaccctatattaactagaagataagagacttgaggcggtttggaggagtgctcgatcttggggatcgagtaaagagggtgctgcaaagtctgcgcctctgcctccattctctgagtgatcaattggtcgagtagttgcttcttcctctcctattattatgctcagatgtctggttgagtagggaatgaggaggatcagaagacgctttgaatgatcaacaagtcttgtagagtgggttgcccttgatcgagtaaactggtcgagtagagtctgctgccttctctgtaactgcctggatcgagtaaactggtcgagtagatctgctgcctcctctatagctgcctggatcgagtaaactggtcgagtagaatctaatgcctcctctgtagctgtctggatcgagtaaactggtcgagcagaatgctctgctgctgctggtttgatagagtagagggtcgagtagattccttgtaagctccttctgcagcttaaaacacaccaaaacatgcaatatgtatgcaagatgatccttaatgcctaagtgtgcaaaataagctagatgtgatgcaaaataatatgagaaaatgagtgatcactaaggtaaatgatgataaacacatgcctaaaatgagtaaaatacagtgttatcagctacaagctgctccattggttcaagttccaagtcttgtccggcaatagtcatatcatttagccactttacgcatccttgttggtcctcttctcttctttacaggaggagctgactatggtgtttgtaatcctgaactactattcatctctataccagcattagtacgctgcgagtcttcttcccttacattagttcctactgccatatccttagtaggttctgcttccttatcagtttgttcagcttccatatctacatattcagcttcagactgtacttgctcatcaggttagtgacttgtgtgtacatcttctttttcagcaacatcttcctctacaacttctttctcaacagctacatcctcttgatcaccaacagaagcctctataccatctttctggacattttcctcaccaccctgcacctcaccaacaacctcctaagcatctctttcaccttccaatatctcaagaacatcttcataagcatcaatcatcagttctgcaattttttccttctttgctttcatagtttttggccgctttgtggtctgtcttgtctccacgcctcgctggcgttcactgggacgtactaactctcctcttgtcctaaataattaagatcctgaaaaaccatgaattaacagttagtcaaattttgacattcaaaataattccatatatactactctgccactatgatcccttccaatcatccctaacaaagaaactctcatcatcagaagattgattccccaaatcatcaactagttggtctgataaaggtgcaccaacaaactcttcctctgtctccaactcgtgatagcctctcggaggtgctctcataacaacataccacggtaatgtgtcattctctctagagtaaaaaacttgtttagcttgtgaagggagaatatagggatcttgcatatatgacgcttgattcatatgaaggttcacaagcgtgaatccatcctcctgcttgataccatatcctctagtggcccaattgcatctgaaaaatggtactatgaacatgtgatactctagaaatattatttctttgatcactccataataggtaactatgtcagcagtttgtatagtatcccgtgttgtagatctacacatgctaaaagcttcataagt

SEQ ID NO: 8 - DNA, 2759 bp, Arabidopsis thaliana landsberg
ttctagcttccattctcagcgatctagacttttcaataattttacaattataacaacttttccttaatacatatataatatagaaacacagaaacatgatgaattagcaaatatatataattagatgaaatctgaaaattggaatcaaccatgttacgttggacaaaaaaaccaaagaattttgtaattatagaaattaacaattccttcatttcaggtcgttatactacaatcgtgtgattgtaattgtttgaactcagtcacaccttcaagcttttactgtttcgtcggccctcttgtttccacaaagttcctcccgagtctcctacataaacatcagtctcaatgctaaaaatttattttaaaacaccccacttggaaacacaaataaataaaaataaattcaaaacaatgtattcttcatcatctgtatcaaaacgcttcgttctagtccctattgtggtcgtggtgaccacacaactcctcctggtacgtaacgtttcttcactaaaccttaccaattcgtatcttcaccacaaatgcgtagtcaatcaaggaaaatacaagccaggaagcaagtacgagaaatccctcgatgatatcatccaaagcttttcgaataaagataaagattcgtatggttttcgtaccggttacagcatgaaggcctacggtaaagaacctgatatggtctccatcacctaccagtgccgtatcgactctcgtgggcccaagtgccagtcctgcgttgtcacggccggttatgaggtaacatacttgagtgttactaataaggtagctttcacataatgtataaatatgcgtgcagagtctaccgacacacactatatttatgtttagatctaacacaaatataaacgcgagaaactatatcttatatatgaaattagtccatgcaatgttgatattagttatgggcctgtgggcctgtggcgttaatatgctaaatgtctatgacagcttcttcgtaagagatgtccgagatataaagaggcaataatatggtacgaccaatgtcttgtggagttttcttcgttagatacttctgggcagatcaattacgacgacaacttctgtatgcctagcgcgaagaacctgatcggcaattcaatctctcttgaagaaaggttgcatctcctcaacaatcttacaaagttagccgtcacgaaaatagataaaaacatagaaggtataagaaaaccagtactgtatgcggcgggggagaagagactcgggacgaaaagtctatacggaatggtgcaatgttcggctgacttatctgttcagggttgtaatgagtgtatgttatattatatagtgcattttcaagagtgctgggaaagtaaacaaggagtaagagttttgagtagaagctgtaactttaggtatgagctttacccttttattagccccaagggtccttactataccaagttctaaagcaatttgaatttatttttctattatttagcaaaatatcatatgatgtagttgaagtaaaaatttttatcagttaagtaaacgattctaaataattcatttttgaaattttcatgtcaagttgttttctttaaattgttaaaactatatatcaagagaaaattgcattaacatgttaatccgatccgaacatcaaaataatcattatgaaacttttagtaagtgaaatgaaatatatatttattgagttctacattacactacaaaaaaatacgtccgttacatttatggtttacgtcagattttcggtaactataagaagtttgcgttagttaaaactaacgtctcatgggctgacgtgaagttaattaactctaataatcactgtcaatatttttcccatttgtcgattttacgtcatttacacaagtgatgttaaataagtgatgtgttcaagcattttttttcaataagttagaacgtattcatttttccaaacataatttgaaaagtaattattttaatattcacaatttgtaaaagaaatacttttcactatttgctttgtacattaaaatttgtacaaattatttagtatacatatatacagaaatatacataaattaaaaaatatttttatttgtacatttcattaatagtacaaatgtacacaaatttatatttttattcgtatagccaatttaatatatatatatatatacataaataaaatatgtatatttttatcattttaccaggattttacactgaatcttgtaaaaatataactacgtaataaatcaataatggcttcatctgaggtcggcatcgtataaattctgtgattgtaaaagttatgactcagtcacgcctttgaacctttactttttcatcggcccttctctcgccgcaagttccaagtattaattctaacctctctctcctctcctccattacaaactcgaaaacattttttccgaaaacctaagtggtcaattgaaaaccttactataaggtaaccaaaaactaagactataaaaaggaattttttttttatctccactcaacatcctaattcctcttagtctcgacggttcatctataagaaacaatcttttggaacgaaacaaaattacaaatccgaagcaatgtactttccaccatcgtctgtaccaaaacgccttgtcttggtcatactctgcgtggtggcataatctggtcttatcgcagcgtttctcatgaacatgcaatgtgtactgcaccaatgattgtagtgagggagtacagctggagtgttc

SEQ ID NO: 9 - DNA, 5039 bp, Arabidopsis thaliana landsberg
  unsure (1)..(5039): unsure at all n locations
aaacacatattatcttcttcaatctccttatttctatcgatcatcatcatcttccgtcaactccaaatcttagatcttcgaggtgatccttcaccttctggactttgatttacccttatctcgtactcttggtgcgtactgattcgggatttatcataccttatttgtactgtttcagaacaaccaaccacatcgccaactgcgagccaccgtgaaaccctaactcagatccactttgcagtctatttgtactgccacgcgcctagctctttgttttgatattttccctagaatttcgcacatttctaacttcccatacgccatacaacgaaattctccaagtgaatattgaatcttgtatatttataatctttcgttcctgaaagagactcatatcttctttttttttgtcaggtttcctccaaagttatgagcgaaccatgtcgtctcaatcttctctgcagctgcaatcgtcgtaacgtttcagagaccatagacactgtattgatgttttctacacaaatctctaaaacattcatgattctctggaagcttattaagttattgttatctactctgtctcatatggtacgattattgttattcttctgtttcagataaagaacataatcgcgacatgtatccgcaagtacatgagtctagaagaaacaatggattatatgcaggaaaatcacaagattagtcaccatctcaccaaaccaagtatgtgttatataatctctttttctgtttgaattgattctgtgcttgtttataaagaattcagttttgtttcttttattagtatgggagcagcttgagaaagagaatgcagattttttcaacaagtaccacttaatacgcgaattagcgcgtcaaataaaattgtttaacagttttcttggaaagcaagtttctctgatgctcgagaatggagattttgatattagtactgcaacatgtacgtataacacaaggactaaaatctctaaataacgttcattagttttttgaaaattgggtttgttctgctttgtttgataactctttgcattatgcagctgataggtcagagttgagcactttaaacatgggaatgtcggcattggatgatacaaatggtctaacaggtaaagtcgaaaactcgatttcttgcacttttgacatgtaagaattcccttatgtttctctcttttgtagtaaaccagtcgcagaatcctaatgatcagcaatatcaatttcattcttgtcagtggccaactacaactaatcatataccttgtaagcaaagactcaaacctttctctctttctgaatattgagtttgtaggtcatgattgcagctgggcaaaaactcgattatatatttcacttttgatttctaaagcttcctttggtttctctgtcttgtagtaaaccagttgccgattcctaatggtcagcaaaatcatatatggtctacaccaaataatcatgcttgtaaagaagagactcaatctttctctcttaatctatcatttgtttaacacttctagtacttgaccatttttttatgaataactcaactttctttctccataggtaccaatcttggagcttctaccattccaccagcagctaatgatcaatggtttccttataaggatcctgcgtgtaaagaaaacactcaacctttctcccttaatctctcatatgcttatcacttgtacttcagcactattatgaatgactcaactttatttctccataggttccagtcttggagctcctaccgttccaccagaagcttatggtcaattgttgccatatactgatcctgcgtgtaaagaaaacactcaacctttatctctcatagtttaaacccttttcacatcaaagattttgaatgaatcactctttcttttttgctccatagattactatccagtactatattcaactgcagcaccagcagctactactcaatggccgacatctactgattttgcttgtaaataatatactttattaatcttcctttctcattatattgttttgtaactcttctacttaagcatttgtatgattcattctcctttctctttcccttagatactggaggtccaactcttccaaaagcacctactgcggcatttgatcattttagagatggtttcggagaagatattgacaatagcagcccaaatttccagcagatggatcctttaacagccgcactacaaacgctacccgatgacatgctacaagagctatatcaacaatgccaacgacaatcgcagcttcaacagaacttctcactagaagagcagcaaagacttcaatgtaaagtaaacaacaacgggcttcaaggagtagtaaggccacccgaaaagccgccacaagacctatatggacaatgtcaaccgcaatcgcagctgcaacagaacctcccagtagaagagctgcaaagacttgaagttgaatatcgagcaaacaacaacgagctgcaaggagtaataccgcagcaacagcatcatcaggaacaagaagcaatgcagacacaaggatatccactgaatcgaatacctgttcaatctgaagcttcaaaccattcagatagtggtaagtagcaacacccctttccaacactacaaaattcttttgtcatctcttatcttacttcgtctctcttttcacttatgtgttagcacactaacaatggctcaaaaccagcatggtctccaaaaggcaacatgaatgacatggtctctgaaagagaggagcgatatcagagagaggagcttagtgatttgctctagattagctttttttgtctttttgttaaatgtcgttggacgtgaaacacaagtctcgttgttctctatttagaaaccctaatttgtcgctcaaatgataaggtcaccaaattgacgaaccaatttgtcttgcttttatattgctcgtatacttaaacggctaaaagcatagtgagtcttttaaaaatgagaacagaggtgttttttttttggtatacgttctatatagataacttcagccttgatcaggactttgtatttccacactttcatatatcgtagacagttacccacaaaatcaaaaccatctgttacttaatcactctgtttacttcatatctaaaccaatatttcataatgttgctcatatagtagaggcagattaggttcattagttagtgtaaagtgtagattaatcagcttacttacacaagagttatatatctaaaagcacactggaagaagttgagaccatatacgtagtgcaagaaaacccaaaagactaaagatgcatttcaacaagtctcgtaagcatttttgtataaaagggtaaaagagtggccaactccacacaaggctaattctgttaagagtattcacatttttgcacaaaggtaagatataacagcttctgcagcaccacttttgcttcatatcaacaagctgctaaaacagtagatgtaataaaagatccttcacctgcaaattcatgaaagcttaactaagacttgaggctcaagaaaccatctcaacataataatatcatcatcaacagtcaatccacatcaaagattaacataccttgcaactgcaaacgaatcatcaaaacgtaacagagcgaaacagatcaatggaaggcgacttcactgatctaagcacaatcgccaatgaatcgaccttcccccaaatctcaccactttgacgattttccaactcaatctctacgaaccaaacatctttcaaaccacgctggctggaattagaacatcccaaaattgccaacttcccaccaaaattcgccattttacactgataataacaaaacttaggcaaaatatatgcccccttcacaggtctccaaatcaactcattcggatcataaacaactattgcatgtccaagaacacacataggatcaagtgtatacaacgaatctccgaccacacgagaagacgagccccagaatctcatcaactgacatataactcncaatgactgccataaaccttgtcttggttcgtaagcaaaaacacgcccaagatccaaaatgaaaatcctgccctgcatcaccgcatatgtaacaaacagtccattctcactagcctcgttagggcattgagtaggcacagtttcccagctctcagtcgtcacatcaaacacttcaacccaatcagcatcttgtttcttgcgtcctccgatcacataaatccttccgtcaattactccggcggctgcatggtaacgagccctttgcatatccgggagatagtgccacgtatggaatctgcagtcgatgacactcacagtagatacgggttgattcaagccgatggtacctcccattacatacatcttgtatccgattgtgaccacagctgctccaagtaacactgtaggatgtgaacggattatgtgacattctaaagggaagatggtccaacgtagaaagaaccagattatgggagtctgtgaggatccgattaaggcataaagaaccggctcgttgaaacctagtagcgagcgcgtcacggaatagtttatccgaagtgattacttgacgaaagtctctggagacgccgagagatatatacgggtaatcacatcttgggatgtgtgcgatgagtctttcgatgagttcttctggaagttctagaagattccgaagattctttacttcttcttgaggattctcgttttgattatcttctccttcttgaggattattgtttggatcgtcgccgttagggccatcgggaatttcatggagtacaaccatcgccgccgtgtgacgttagcagcaacgaattaactgaaagagagactaattcggtatttgtgaaaaaagtgttgttgtgtatttataaaggaaaccaaaatttcatttcactattccatctcagaaaaaatggcaaataaagaatttgtattaaatcattttccttctccttaattagggtctcgttatacataatcataatttttgttatgtgtttttcttaggaaactagaaaagttgattgtttt

SEQ ID NO: 10 - DNA, 1148 bp, Arabidopsis thaliana landsberg
cgagaatttagccctatttgcgttagccgtcgacaacttctaaggcaagaaaactttatttggatccctaatctattctagctccattgtatcaagatcaagccccaccctacacccgatatatagcgtttttgggtcaaattttctcttaattaggatctgctcatcgttgtaagctttagcggatcgatctcgaggtgccctaattttctgatttcgcagaaattggttgttccgggaaagatgacgactttatccaagaaagaaacattgaatatgaacaagtttggattgcaactgaggaagaccttgtccaagaaagttcttcttattgctccaatatttggtgaagatgaagaagacaacgatgtggacaaggagatttctcggcaagcttcaaagaccaagtctcttaaaaaaattgaggagcagcataagaaagccttggaggaagacccttgtgcttttgcttacgatgaagtttatgatgacacgaaacaggaagcacttcttccacgactacatgaacgtcaagagtgcaataagccaatatataaccagcttatgagggaaaaggcagaccgtagacagaaagaacgtgagatagtttacgagagaaagcttgcgaaagagagagccaaagagcaacatctttttccagatcaagttaaggttgtaactggtagttataaaaggaaactagaggaacgagatcgatggctctcagaagaaagattgcgtgaacttggagaggaaaaagatgatgttacaaagaagaaggacttgagtgatttctacttcaacattgggaaaaatgtggcgtttggagctcgagatatcaaagctagagaggcagagaggctcaaggagcaaagaaaagtaccgaagctagagaagctaagggaaaagatgaaaacagaatcaccagagagggtagtgttgcctgactccagagatattggatcaagttgtaggataattgtggaactgcaagaagcagagcaagtagcatctgagaagaagatgaattcagatgccacagaagagagagacttatcaatcaaagggcccgccccagatgagccgagagccacttaccaacaaaggaaaagcgaggatgcgcttgctgcagccaaaaaacggttttg

SEQ ID NO: 11 - DNA, 2467 bp, Arabidopsis thaliana landsberg
tatagtttgaacatatgtttgctatataataataccaaattcaacccatgcatggaatccatgttttcattttataattctaatgaaaatttgcttacaatatcaaattttaaaatatttagaagtgtcaaaccttatttaaacaagcatataatacattacgtttaacatgtcacatgctataaatattttaattatatatctatttttaaataatcaaattagagtatttacaattttttaattttttaatctattaaatatttatgatattctttaaaatattaaatgtattagtcctaaacaaaattttcttaagtttaagacaactgtagggtcgtccatacagaaaataacatttatcactttgtttagttggtatatgaccaatcttaggtttgatgcatgataaactggtaatggttttctacattttttttttttaacatctaaacaaactttattaatgtgaatcaaagtatacatgattatcaatgagattacaaatacaaccaattgtttttgtaacgaaaaaatgatgaagcaatacatgccgcattcttagtcaagtactttatcatcttcgtcatttctgtcaatttggtgtgactttcttgcttagggatctttttctttttactgataaaataccggtaatgcagttgaaagtcatatgcaacgatccatatgttacatcacaaagcttttggattgatcgagactctcatatagaatgagatgtcattggtcttggttgtgcttaaaacccattatcgtgtacatgacataaaccatcttccgatcattctcctccatagatagttgcttattgtcattatccattcatcccgaattgtctctttttccatggtagtttccattttccaaagtagatctgtttgtatagttgtaaagacaccaaattccgagatctccatttatatttgtaaatctgcgagaacaagactgcatcacatcgaatcatgggtttcagtgtggggataactgcggaagggtgggagagatgtcccaagaaaaccatatcattgacaaagagaattacaatcatcaccataaaggtgaagagaaatcgaatgaagaaaataaatctgagaacaatctgagataacataaaattccccatcacaattattgaaaacagaagaaaaataaagcaagtaacaaaatagaaccaccggcaaatgtcagcggcccgaaaaccaaagaggaaaaacggttttatcagtatccccttttgtgtcgacagagagataggagttgtttggccgttttcagggttatcatctttaccattgggttttctacaaatttatttgggttaatttgttcatgtctttttctttttttaattatcgttcctgttagtgctcatgccacgtaggagtgaatctcagtccttggaaattcactcggcatctcagcctttgaaggtcaagagaaagaccattgttcgccaatcgcgtatcactccgaacgaaatgtataactttacgtttactaaaccgcggcaatacctgaaacaaacaaaaaatccgatcaatcataagcatttcagattcatcacatggaggcaaaacaaaaacaccaaagaaagttgcaaataaacctgttgcaagtaatacttgtcgttggaccagctcacaggcggcatttcgaacaatttgaatccatacttcttactataacgtttaggaagtctccttatgatcctaacttcatctcttaacgaatcaatgaaatgctttatatcaaaaatgtcctcaaagtcactgtaaaaggaagaaacaaaagaatgctttaaactacaaaaaaatcttgtaggatcattgatatgagacaccaacatataccttgtatcagcccagaaggattttttatcaagctcaggaacaacaagagtcaaattcaatagcctagcaacagtcaccatatcacaaatctgaaacaaaacaagcatcaagatattgcaaaaccctaaattcagcaaatgagagagagttacacgaaccgctgcacgcatttgattcaaaccaccattacaggacactagtaaaattccattacttgtgtaattccctgcaaaaaaaatccaaacttttccttaaatctctcaaattctcaatcaccaaaacaaaactcaatgaagaagacaacaaaactaacttggaggaggaggaggcgttaatggaactgattcaacagggagagagaatctagaaatgtgattggttaaaccagtgaagatttgggaatgccaaaagagctgaatcaaacaagtccaaaccaaaatgcaagaacaaactctaaagaaccaaacttgtaatcgagctttgggaattgcttgactcggaggagccttatagtccctccgcaccagagtactctccgatctaataaccatctatctcgacgacgacactcatcgccgcttcatcatcggaaaata

SEQ ID NO: 12 - DNA, 1492 bp, Arabidopsis thaliana landsberg
ttactttgtcgataatgatgtctatggcaagagcttggttctgtgttgtcctagctcgaaacctatacaagcttgggtctatattgtgaggggagatctgtgcaaaaagattaagatagatggagtgcaatgtaggtctcagtcctctgtttatgttcccagtttgatcaccataacttgagagacttttgctgaatctagtgaacaagaagaacttttacaagtttgatttccattgttgctttcttgttttatttattttaacatttaggtctaaattcattgttatacagatcaaactgaaccaaacttcatgtggttggttctggtatgaatcactttctaggtcttttttttttttggactcgtcatcatcggcggaggaagatggcgactatctggcacacgagtgtttgggtctcttagctcatcaaagaacatctttattcatggattttagagcttccgatgctgatttcaaacaaactatgaaagtatcctcatattaggtgataatggatacactattagtagcattccttgtgcaagggtgaggtttttcattccttcgatttcgacaagctgatcgactccactattgccaggaaacagaggctgcataccgagaacaaaaatcatataggtattgcaaaagtagtgctccaacctatccaagaagcagtttcagccatcacacaacctgtggaccatagatatgtctacgggttgtgagctttggcctttggggcacgatagtatcttgaacaaatgtaagaaatattgtctcctcctttcacctgacacgacattatttaggcatagactagcaaaaaactaaatcactaattaattaagagtcttttgtttggtagaaataaattagacttcactaacacttttgtgcactcccaaaatcaaaaacttttagctgatatatgtgtgtgtaattaataagtgaacagatgcccggtaacattgagtattgaaaataaacattagtgagtacgtacgtgatgtatacatggccttgcttgattaaaccctccatgcatgttttaagaatatctatcatgtaagtaaatatttcaagaaaaggaccatgaggttcccctgtttttcggtggaaacagaggatttgtgagatttttggctgtgtcgtcacatatatcgtcagggattttcacatattaactagtttcttaaaacagcttggagttcatctgctaccatctgtaaggttgtatgctcctctcaactcggtccaaactttcgcaagtttatttgccagacatactttcatgtgaactacactgtgaaacacacccatgcaagtgaatcagaacttctttccacgttcgtgtttcttggaatttgcatcttccagtaaagagtgtaacaatctcatatgacgttgtaatatctcaataacttactcataaacttcttgcgaatattcagatttttgattcacgggctcctaaagctataaaac

SEQ ID NO: 13 - DNA, 2519 bp, Arabidopsis thaliana landsberg
aggtattgtactaagattaaaccctagaagaaattcgttttttttgtgtttgaatttcaacactgagatgtggaggatccgaatttgttgctactccacttgatgcaaatggttatgtgattctattgttgtgctaatatggacttgaatcgttcgctccctgataggtgtcaaacatggtagagatcacttctccgattggtggctccatgaggctgcttcacttgcctaaatcttatccgattcactgcaacatggtttcagctagcaatacatttgggtcagctcatctcaagctgcaaaacaaagaaccgtgtgagtctacttgattttagttcgagcatcttatctagtagaagatctggttttggataagaccggtttctttagacttggttctgattagtgttctggtaacatttgaagcaggctcccgtttaaggccttgtcgagtcaaacgcgaagaaaataaccaaactgcggatgttgaaagcatttcaatggatgagaacacgttgaagcaagatctcgagactgcggtccaggaagagaattatgtggaggcagctaaaatccgtgataaactaaaagagcttcaagaagacaacaaagcctctgttttatcagccaattctcggttctaccaatctttcagaaacggggatttagctgcgatgcaatcactatggtcaaaatcaggaaacccgtgctgtgtacatccaggggccaaaggcataactggttatgattacgtgatggaaagctgggagcttgtgtggatgaactatgagtttccgttactgattgagctgaaagatgtcgaggttcatgtccgaggagaagtaggttatgtaacgtgtatggagtttgtgaagacgaaagggagtagtagttggggagctcagtttgtgtcgaatgtgtttgaacggatcgatggacaatggtttatatgcattcaccatgcttctcctgttgatatttgatcaaagaatcgaagaaacgatacacattttcaaaacgttttatttttatatgcgtttggaggttgcggtgggatacattggtggtttgcttaagggtgatgaaggactgttttttatttctgaggttggcgattgggaatgaaaacgccacacaaacgagaagaggcataagttgtgacgtttgtactagaagaggcacaaaggatcattttattataaccagagccttgtagatctggcaaatcatgtagacaatgaaaaatgagaagaaaaataaactctttttattagaaccaagacctcatgaatcttggtcactcacaaagtaaaacataggaaaaacacattgaaacagaaatagcttaaagctcatccttcttgagcgcggatggacgaacaccttgactgaggaaatccttgtaatacttgccggattctttctcgtaacgtgtgaggttatttttgaaatcaacgtagtagagtccaaatctgtttttgtaaccatcttgccactcgaagttatccaacaatgaccatacaaagtatcctgtaacattcactttgtcgatgctgcagatattacacaaatgtttttattagattcttcactacaattgttagtatatcagatgaaaaggaaataggacataccaaacagcttcttgcatactcaaaagatgcctctgaagataatatttcctgttatgatcagcggtaccaacagcaacagaatctgaggcccctagttcttctccatatcctaaagaagaacatcaacatcaatatatttagttctaagataaaatcaaccaaataatagttgacagtaacaatagaatctctagttaccgttttccatgatcataatttccggatttgcgtatttgtccttaatgtacttcaaaagacttctaaaacctctcgagtaaacgttcaatgcagcggtcaaaggctgaaaataaaacagaggtgagaatgttgcatcatagacaaatgtagcacataaaaatttcagattgctattaaatttataccttgctaccaatggcgtaattttgcgcattcttagctgaaaagaagagataggtttcgattagtaccaaaaacaaacattttccctttgatttgttgccattggttttcttggttcggtttcaagtaagggcaaaacaaacttacactcccatgtaataagagaatcttgcatccatcttggttttgaaggatcaggtttctccaaatggtttgaaaacactgaagtatagtagttgagcccaacgaaatcggtagaagctttcagttttgctttctgctcagttgtaaatttaggcaatctatgtccaacaatgtctttcatgatctgtggataatctccaaatgtagttgtgtctagatgcctacaaaaaccatcaaaatatcgtcatataaaatttcaagatatttagtatagtactaattaattagggatgttataacttatacttaccatcccaaaataaagtcaagtgcacggtcgatggacgcaccgtcttgtga

SEQ ID NO: 14 - DNA, 1838 bp, Arabidopsis thaliana landsberg
  unsure (1)..(1838): unsure at all n locations
ctaaggactcgttgtccttcttacttcagtactaactctacactgaatcaactcctctgatgtctcgatcaaaatctagaggctacattccccacggaattaacgaactctttatttctgaaaactctttgatgtttacccagaataagcaaacgtgacaaatcatcttttgtttatttagcttaactattactggggtttcttcaatttaaacgtaattgaagtttatccagaagaagtactgatgaattatcttgttaattcagcctaattagttaccgggttttcttcgatttagactgttttagctggttgaatcgtcactttatagatcattagccaatttaagctattaaagttttaaactttttcttctgattcgttgaacgtcattgtccaattcagaccactttactgatttgatcagagagaattgtctttcttcaaagtaattttctacactgatctcattgattacgtcactctctctattgatgtttctttctctataatattggccttaggtttctttgttaacctctccattgaagatatgggggaactaaacggagtcatcattccgactatagacttggaagaggtttctgataagattctgaatcagaaaatccgtgaagccagtgagagatggggatgtttcagggtgataaaccatggagtttcattgtctttgatggctgagatgaagaagactgttattgatctctttcaacgtccatacgaggtgaaagtgcgtaacaccgatgtgctcctagggagtggttacagagctccaaacgaaatcaatccttactatgaagcattaggtctctatgacatggcttctcctcatgctgtcaataccttttgtgaccnnnnnnnnnnnnnnnnnnntcaaaggttaacttctttttctttggtctaaaatgatggaacattgattttatgtcttgatggagtttgagggttgcagggagattatggtgaagtatgcgaaggctatcaatggacttgcaacggatttagcgaggaaattagcagagagttacgggctggttgagaccgactttttcaaagaatggccgagccagtttcggattaacaaatatcattttaaacccgaaacagtcgggaaactcggtgtgcaactacacacggattcagggttcttgacgattcttcaagatgatgaaaatgttggtggacttgaagctatggacaattcttcaggaacctttttccccatagacccgttgccaaacacgcttgctatcaacctcggggacatggctacgatatggagcaacggaagattgtgcaatgtgaagcatagagtgcaatgcaaagaagcaacaatgaggtattccatcgcctcgttcttattaggaccaatggatacagatttggaacctccaagtgagtttgtggatgcagaacatccgcgactatacaagcctattagtcacgaaggggtacgaaatattagaatgactaaaaaattgcatgatggagaagctctcaagcttataacccatgcaggactagataaatgacctaaatggcattttaagatggtagcgctatggagccagaaaacagcaatttcctacctaagaatgagaaataaagatgtattaaaatgtattacctattggattgttgcaatatatgatcttttttaccttgagatctttgtggatgcaatactactactattgagcctctgtttgttggtggtacttctagagacatgttctagtatcaaaatcatatgtagtgactatggagttaattctgtatgtatagtctaaagctctgtgtgtctatgggtccaagtt

SEQ ID NO: 15 - DNA, 856 bp, Arabidopsis thaliana landsberg
aattggttcttggtatttgcataactatttccggttctccggcttcacaatttcctccggtttagttttacggtctgagattggatgtagtttccgtgcttgacacgtggaagaaaaagaagtgagaagatgaagaatcggccctccatattttgggctttaggttatagtaatgggcccaaaagtgagtctctcgtaacagagcaatttttagacagacgaagaagaagaagaagaagcagagaatcgattgacacgaatcttcatcttcctcttactcttaatcaggcttgttcttcagtttccatcacttaaggttttcgtattttctcgaaagattcaacggaaaagatagagatagatagatggaggaggaatttgttatgattgatcttgatgaagtttcaaggcacattgagattccatcagatgctccttatactttatcagttagttcaaatccatattctttagttaaactctttgcattggttttgttttgacttttgtttattatttctcagggtttggatactttgaatccggtgttgaccattgatggcaaaatcaagctggtgagttttctataacttgagtttgagtaactcttttgcttaaaccattcttaatcgtgttagatttgatgatctctcaggttggagaatatattgaaacgattggtacatgccttgctttctctgaaaagggttagtttcacttttcatctttattggttcacgtacttcttttgtcccttgatgtttttactgaagctgaattttgaaatttcttaacttttattttggttttgcagaagaagtttcagcaagtgaaaaccagatgccacataataagc

SEQ ID NO: 16 - DNA, 1018 bp, Arabidopsis thaliana landsberg
  unsure (1)..(1018): unsure at all n locations
taggctcaaaacctttttccctgactaaatcaagaatcccaagggccttgtgacactgagacttcccttcttccatgtaaataaccatcaaagtattgtaagtacaatgtttggaacaatcccttcttcctccaaatcactcagtatattctgtacttctccaaacccactcgactgtttcatcacaccctaaaggctgttatatataaaaaggtttggacttatgacacagcctgattcacttcttcagtctcttgtccttgccaaaaccccttatcatagcacaatacacttgtagagttaattctccattctccttgagaacaacatccacatcatcattctctatcatcttgaattggttttttctcctccatttacagcgtgtgattcataatgatcaacagaaactgaactcgaatcttccgtggaaacttttttcccgagctccaagtgctccgtgttccatcctaccccaaccgatgatcccagcaaacttctatttggctcacacagaaacagaacttttgaggtaggattaatggccaaaccttcaagtttcctataactcgaacccacagaaagcagcatattcaacaagacaatgcctctttctagtcagaggactaactacaaaacaagaacaatccaactcaaattccaatctcgatccaactaaatgaccagaatttaatagccaaatgcttaaagcttgcatctttttccaacacaaattcaccagcaagaacaatcaaagagaaaccaaacactcgcaaaattcacaggaataaacaatttttaaaaggtcgcaacttttctgtaaaattcatcacctaacacaacaaaaccccgaataaatattcttcaacaatctggaattcgaaaactcagacgcagcccaaacagatatggttttgggttaagtgatggtgtggtgctcttgtggccatccaatcatctcccatgagcggnggtaagctacaaccgctgcaagaggaaaaacatgtaagtgtacagt

SEQ ID NO: 17 - DNA, 1529 bp, Arabidopsis thaliana landsberg
actctcattcaaacccatcaagaacttagtaacatgacttcgctgttgtattctttcccatttaactgcagcatgacactcacagggaccacaagtgcacactggaagatccacataattcttatgttcttcccaaagtgtctgcaattcagtatagtaagcactaatatccatagaaccttgctcaatcttgctaagtctctgttctatatcatacactctaggagcatcatcctgcttaaacctagacaacagattcttccaaattccttcagcagttggaatgaaaaggagactctggcctattttctttgacacagagttcatcaaccaagtagacacagtatcattacaacgagaccaagcaccataatcacgatgatctaatggtggtttcacaatcgttccatctatgaatccaagcttattcctaacattcaatgccatccaaacagatcttcgccaagaatagaaatttgaagctgtattaaggcggtctgagactagaaccaaacctgcgtggtcactcgtatgcaaatgatgcggattctcatattgatcagcttgatatcgcgattgttcaggaacactagctggaggtggacgaagacttgaagaattcaacggattgttcatagaacccattcttaacaaattgttaaagaaaaatcaaagaaagtgagacgaaatgaaaagaaagtgagattcgtcaccacaaaaggtcaatcgaaggaaagaagaagaatcagaaccaaaattagatagctgacgaagaaattgcaaattgcaacaaacgattgtacgaatcgagaaactctcataagagaaagatgattcaatgaaagactcatctccgatgatatgcggaagctcaaatgatatgctctgataccatattaacaccggcgaagttccggtgaaacggaaaagaagagagaagatcgaagattgaactgaatctttattaacagaattaagtgtttgttacaacgttcatcaacaaaataaagtaaagtttagtttatatatacacaagataaatgatattaaaccagtatctagataaccgaagttaaccagattaaaccaatcaccaatatccactgttttttttttctcatataggctctagcaacacaaacttacgtacaaactacaaagtctaatttcaggtccacatataaaagactttgactattcttttttcaggtcaactaagtctagacgaccacttctgtctagcaataatatgacaacttgatggataatgacatttgaagatgagtgatcgatttttctagttacacttctttacaatttctttgtttttgattttgcttttgcttttttctttttcttttggctcctgcaacacaagattaagtcttaaacacaaaagtttccaattacatgaaaggctttggtaataatatggaaactaaacggattaatggcatttcaaatgagtgattgagatttcacaaataaactcttttgtcactatgatgtcatatattttaagcacaaca

SEQ ID NO: 18 - DNA, 1419 bp, Arabidopsis thaliana landsberg
cggaatttgacttaactcaattgtgttacccgtataatatgaattggttattactcgaaatttgtcaaaaaaaaaattaaaaaacagttgttattatttataacatccacgagaaaagaaacactacataacaaaatacatattatatgaacctacgttttcttttattgacctctaggtaccttcttaggtactatttttgctttattttgacatacgtacgtaatggtaattagctatgcatgcatacaaacatagagagtttgtattacacgcaattcatggcttagcttgttgggcctcaacagtttccacaacctcgtttgcctcggcttgactcctgcaacagtatctgcaccgtccacgccaccacccaccgcaacatccccacctacaaccaccacggccaccgccaccaccaccgccaccaccacggccaccctgctgaggctcaacatcgttgggctcaacagtttcacaacctcgctggcctcggcttgactcctgcaacagtatctgcaccgtccacgccaccacccaccgcaacatccccacctacaaccaccacggcctccgccaccaccaccgccaccaccacgtccaccctgctgaggctcaacatcgttgggctcaacagtttccacaacctcgctggcctcggcttgactcctgcaacagtatctgcaccgtccacgccaccacccaccgcaacatccccacctacaaccaccacggccaccccagtcttgctggggctctacaacagggtcattggcctcaacttgggcttccgcgatctggggtttaccgtcatgtttttgcgcctctatggcatgggttgcttcagtacttggcttcacttcatctttagatgcacgtgtaataatatacatgttttacaccatcgatcaaatatttaatccatagttacgcgaaagtgtaaaagagaactacaaatatagagttgtacataccgtgtgtggcatcgttggatgtgttcgcgaaaacagcgacggagaaagaaaagagcaaagccaagagaacgagagacttgaggtttcccatattttgttttagttacacaaaacacttatattgaagagtgcatgagcacagcacatatttatagttgggcagcaaaacttggcgacaagaaaccagtcaactatgtcgagtgagggaagataatgagttaatgacatatttatttaaggggatatatatatatatatatatacacatatataaaatgtaaagaatatcatattataagatcactataatccatgctaatagatatgatcgagaagtctcataaattgattgagaaagattttatacaatctttaattctttgaaacttttcttacactttctattttttttcgcctaatcgagctttggttttgttcaaaaaag

SEQ ID NO: 19 - DNA, 3353 bp, Arabidopsis thaliana landsberg
ccggtgaagcgaccctttgcatccaaaaagatcccctaaagcaaaagcaataacattaattccctccaaagaagtgcctataattatggtatttgaaaaatccgctagacagagtaacttacctcatcagtagcagcctcatcgtactgaggaagcatcttcttttctgccccgggatcatcattaaacctataaaataaatataatgccatgtttcagtcttaagcaacacagatatgctcatctaaatgcctttgaacaatacttaaacttacttatcatcgtatattccctttttcttcttggctgcttcataagcttcattccggcgcttctgttctccaatttccacattttctagcatgtcaatctctgcaagaatagttgaaaatctcattatgacagagcctaacatcaacaatgctgatagcataaataaaagatagcacaaaaagatactaaccattgttaacgtctccatcggtaaggacactttggtcttttagtgtcaagataactgctccaccttccaccactttctccaaaccatgtagaactttaacaccagatagatgctctgttaaccagaatatgtcaagataaattatcaatcagagagcatcacatttagaaaggaagatagaaaaagaaattctatggtatgacagaatacatgattacttcctttgaagagttaaagttaggggtaaaagaactagaaacgaaaacataccgccatcctcgccatcttcattttcaccttgattaagattgtcctgaacaaatatgagataagatatatttattaaaatgtcagataaaaggaagttatgaagaaataaaaggatataagatgttcaaggaatggaggtaatacctgctcctcaaaaattctcgagagctgctgtgctctttgcttctcagcatttcgtttttcctcaatcttacggctccttgcaacccatgatagagcatcagaagcatcttcagctttcttctttctttcctctctcatcctaaggaagaaaacacaaacttttaattcctgtactacctataattctagatttcatataacatatgagaatcacttacttcaaaatgcgattctgaaggtccaacgctgatgcttctttcccacttgatgcagcatcaacattatcgccaccttcattcatacctctgttgtcagaatgttcatatctttctgcagctttatgagtctcgtcatcatcttcacgacttttcttactcgctctcttcttcactcttgacctatccttgtctttttccttctcagtatccctctcattttctctatctctatgtctatctctgctcttatctttattacctacaccaagtaaaacctgcagaacaaaaaatgtgaagcatgtgatcaaaataagcatggcacttgcagattaatctagaaactctacattcaaagactaacttcattacctatttctctttcagcagcatcatgtgctcttatctgagacgtttcgcccccatcactcgtctcttccgtatcaacagcataaaatagaaaatatgttttggcatccaacacatcctccttactaactttggaaacctacaacaaaaacagacaataacgtaaaataatttgtaactcagacaacgtagaccttagcttaccttactgtcatttagacaataccatccacttgaaatgcgaacatagtagtattagtgacccgaactgatcaattcatcatcatgaactatcacaccggatagagtgtacttcaaatcacctttttgttgaacagaaatattgtactgttacaaaagaaatcacgaaactctaaaggtatcaacaagattgtccaaatctaaaaaaacagaaaactgtgtaaactactagaaaaaggtttcatgtcaagctgacaggcaaaatccactttcttgtttattttcttatttgtataagcctcaaaccgcttcataggtagcatcagaacagaaggaacttttgcaacagataccttcacattagccctaacatgtttattacattgcttacacgcatatttctcaaaatctttagaatttgtgtaacttgcaagcgccgctttcaatgaatctgtcttcaatatatctaggcttatgcaacgaaatgtgtcagtagattgtttcatagattcacagtccatacatgtgtacaagttgctaagggtgccttgaaagatcttggaaatctcatcagaggggagacactcgtcaatccttgttagcaaacaaagaaggaattcatgagcatcttcttgtgctgctgcgtttatgtgatgtggtaatatgcctaattaagcaattaagaaaaccctcgttaatcggatttagtaaaaaggcaaacttggagagaacaaaagggaaagcagacaagatatgagaagcataccttgcatattttaaccaaatcatttggtgatatcgttttgccagtggctttacgagcagtcatgatatgcttcttcactgaagataacgcgcaaaacccggcatcggcatgtttaactcattgttgatttgaacacccactaacaaagagattcgtgtatgtaagacattgcaatacatcattgaggtagcaattgttcttaatattctttaaaccagcaggtggctagcacactgagtctggcatggcaatagatagaatacagatctgggcattattatcaagtgaagctgagtacatgccttccaagaatatctttacgtcattagagcaattcatacattattaatcagaacacatcacattagaaaggcagattgaaaaaagcattctatggtatgaaagaatacgtgattacttcctttgaagagttaaaattaggggtgaaagaactaaaaacaaaaacataccgccaccttcattaaaacctttgttttcacaatgttcatatttttctgcagccttatgagtctcgtcatcatcttcacgtcttttcttactcgctcccttcttcactcttgacctatccttgtctttttccttctcattttcgctatctctagagatctccttctgagtgttctcttctctacttctttttaggtctctcactttctccttatccctgcggtggttctctcgatcatagaccttttctttacccttgctcatttgttctttctctttcttctttataacacatcctccttactaactttggaaacttacaacaaaaaaagacaataacgtaaaataatttgtaactcagacaacgtagaccttcgcttaccttacagtcatttagacaataccatccacttgaaatgcgaacatagcagtattagtacccgaactgatcaattca

SEQ ID NO: 20 - DNA, 427 bp, Arabidopsis thaliana landsberg
ttgcacggttcctctacgatcatggtttctgttccagacgtcaatgatgggcaagttattgagatcacagtgcagtccttatccgaaaacgtggcaagtttgaaagagaaagtagcaaacaaactgaagttaaggggaaaagccgggattttaaaggacgatgacaagtcacttgcacattacaatgttcgagcaggtgacatcttcactgtgttggggaaaaaccgggcgcgggaaagcgctataaaatctctaaacttgtgtaaaatagagaggtgtttaaaaactatatacatatgtgcaactgactaaagtgttgttacaactacttagtttattttatgtataaaacataatcgccgtacacgaattataagtaaaagtccacaggtgaaaagttttcttgctctttgatcattttcttctt

SEQ ID NO: 21 - DNA, 5532 bp, Arabidopsis thaliana landsberg
atttttactctcgagatcttgtaggcataagagttcttctcaaggtatatttgggtatttgccttttgtataatatatcgaaaatgggaaagtctggggtctaaatcagttatcttatacaggagaccggtcaacttgttggaactgttgctaatattttcgacaatggaggaaatgatcttctacatgttttgcttgactcatccatggaagtctgcaatgggagtgcaaagaccaatcagcttgtttggataccttttgtagatgcaattgttcctgatgttgatttggaaagaaaggagatgtatataactccaccgaagggactcctcgaggtgaatatgcgagcagatgatcggtccaagaaagaaaggcggcagcttgtgaggcatattcttcttcgctcttcatattgaccagtctttatagactttccagattgatctttcttggtctcttaaactctacgctctggtcatttcaggaatggaaagaaagaaaaaaacagcagaagcgccttattgctgctaaaaagaagttatgtgaaatggagcaaaagcatgtgtttgatggattaaggtttggagaaaagtctcaaaggaatttacttgctgatcatatccttaacgtaaactccacactacttcagaaagctttgcaaagtattgacacctcatcgaagaggtaaattaacttcaagaaatttcccaaccattgcgagaagtgtgtcttctcatttttcatttaaattatgatgaattagatggaatgtaactgaggaaatcaatgcactgagagctagagtatcggaatgtaatctgagtgtgtcacgagaatgccttagttttgatgcaagcaaagagaacatgggtgataacttcagtttccttcaacaagggcaaaatctgttctctgagggtaaagtttctatttgtttggttctcaatgatcacgagaatgaagaaccagaaggtgagaatggtgtagtctcgtaccttcatgcactacttgatgaggagcagaggttcataaaggttagctgatgcatacttaaaagctatgagattttcttgtcatttagttatgattttacaggataactgttgggttatgtgcaggaagaagatcgcgcttgcgtgccacttgtcatagtttcccctgaacataccattgaagctctgcagaagctatttcaggataatgatcattttggatttgagtcagaaaaggttaaggcttgaattcatccaagaatagttttgcatttcggctatcagattctcacaaagtatatgtctttactaatatatagatctggattctcaaagaagaaacgcttccagtagtttgcagctcacccgaggaaccgaaaaagcacaaaattttgatgaaatctccatgggagatacttgagtccccggttggctctggaggagtcttgagcatccttgcttcacatggaattacagactctctttccaccctgggaatcaattatcttcaggtatcgatatctaaagatcatcgcttaatctctttgaacttgactcatatccagaaattgttcctttctggttctctccttcaaatttggtaaaaggcattaagctttacgatgttggcatttttctataggtacacagtattgaaacaaaaccacaaccgtcacaacattacatcaatcccatgcttgttggtttcgtgagcgcaagaggagcagagattgggatccaagtgaccgaagaatctgaactcaagaacttggaaatgacattctcaatgaagtttctgaagagattaaagggaaaaatcgagtttgaagctgtcatgaagatgaattcacatgttcagaatgttgaaaaggagtgggttgagtcagtaccatcagaaccaaactcgtttgagtttcgttctgatatttacagagtcttgagtgaatgttcttcatcagctaagatttgtttgatgaacattaccgtttagaacttgtacattttgctacttagttgtttgtcctcacatctaaaaagcttctagagacgcaatttatgcccgaacacattactcaagcaagagagaacatcattgtagcttttgacaaatcgatgataacaaaaacccaaaccaaagctattgctctttcatagcacaaaaaaatatattttttatcaaatttcaaaaatatatccctctttttgggaaacttaagatccaactgttgatttgcagccaaaaaagatcgaaccgttgattctattgaccaatctctgatctttaacaaaattacatttttgaccatcacacagagaaccctaatttatatatttataagaaacttcagtcttccgaaaaacatcctatcacattgcggcggaggaagctctaatcaccgtaagcttctctctttcactctctctgaatctcatctttctgttagtttatgtatatatatctactgaaatcgatgcttcgtctcacgcgtaccttttgttgattttgtagaggaagaggagtaaaaatggcggttccgttgcttattaagaaggtggtgaagaagaggtggggcaaattcatcagaccccagagtgatcgcagaatcaccgtcaaggtactcactttttctccttttcaggtttagagattcaacttttttcatgggtataagtttgttattctctggagtttaggctttgatagtgaggaaaaaatgattgcttcctctgtattatcattaggtctaagtctatcatcattaggtctaagtctatcatcattaggtctaagtctagattgttttcagtatgatgcattagggctatgagattgtgcatctagataatgccctgtggtatctggtagccagaattctaattctgtttctggttacttcgtttttacacgggcagaaagtgaatctcctacaggtcttgcgacacagtttgcttttgatttgataagcttactgttactttaaccctgttgacatttctcatctatctcattcgtttgaaaagcttgttttgattctctgatgattatgcttaatcttcattctctgattgttcttttgtttttcaattgttattgttcaggaaagctggaggaggcctaagggtattgactcccgggtgagaagaaagttcaagggtgtcaccttgatgcccaatgttggttacggatctgataagaagacccgccactacctcccaaatggattcaagaagttcattgttcacaacacctctgagctcgagctactcatgatgcacaacaggtaactattatgactccttggtgttatacaccacaaggatttgatagattttttaaagcaagattctcatggtgtgttttgctttggatttttcacaggacttactgtgcagagattgctcacaatatctcaacaaagaagagaaaggccatagtggagagagcttctcagctagacgttgttgtttccaacaagcttggtaggttgcgtagccaggaagacgagtgaaagccctaaaagatatcatctagggattttcttttatctgtcgttaactattccgaattatcttctttttttttttttttttgcgttttggagagtggctgaatgatattacaacttgggttctcgtttttatgatattaattcagaatcagacacagtctcagaccataatttattcctcaatttatacctaaattttcagaccatcgaaatttaacttgagttcaaaacttttatcgatactgccaagtgtaactaagttaggatagctgagagagacacactccatttcgtgctttaatccccacgttgtccagaaagactcgatgagagaatctcaatcttgttccatctcctcacgtgagtcgttacaccaagatgatttggggatacacgaggaacaaaaaattagttgatgcgttgaatctgttcgacgaaatgcctgagagagagatgtaaggagatgaatgtagttgctgtgaagctaggttcaagggtcgattcctttgtggctaattctgtggttgtgatgttcagtggaaacatgaacgacgccgtttcagtgttcatagataattggaggaagaaccttgtctcgtggagttcatccatcgtgggtttctacaaaaaggaagaaagctttttggttacttgtcaagcggaccaaatcatatctagaaagattaaacactacacttgtaaggtatatatcttgggaagaaaaatagatgttgtgatatcgtagtgacaggcttgctgttgcatttgggttggttagtatagttgaaggaagtaaagtcactatggttttttgaagattgtcacacagtgattaagtctgatcttaagagttgtgggaactgggatgtgagattgttttaagagattcgacttggtttcatcattttaagaatgggattttttcttgtggttattggtagaggagtacttgagaaagttgcaaagtttgacttgtgatgtgaggataagagggtaagagactagaaatgtgattgtgagttgtgtggtggtggtaaagtcacgatccattccaaaggaggagccttctgtcaagttggcagaaaagtctgagaaccacttgtggaattgctagtcaccactttgcctctgctaaattatatatgggcaaatcacttctcctctgatatttttttccagaaacgtctaagattgtttcctcctctgttaatggcttcttcgtcctcctcttctcgcaattggtcatatgatgttttcccaagcttcagtggagaagatgtccgcaaaacattcctcagccactttctcagggagctggaacggaaatcgatcatttctttcaaagacaatgagatcgagagaagccagtcacttgatcccgaacttaaacatgggattagaaattccagaattgcggtggttgtgttctccaaaacctatgcctcttcaagctggtgccttaacgagctactggagattgtgaaatgcaagaaagagtttggccaacttgtgatacccattttctacaatttggatccatcccatgtgaggaaacagaccggagactttgggaagatctttgaaaagacatgccgatgtaaaacagtggatgagaaaatccgatggaaggaagctttgaccgatgtagctaatatccttggatatcatattgttacctggtacgactttatgaatcatattatggttatttaacgaacattattacttgttgtttagcaaacatggttgtgaaatggtctgtttccttattagggataacgaagcaagcatgatcgaagaaatcgccaatgatattttgggtaaaatgaatatatctccatcaaatgattttgaggacttggtcggtattgaagatcatatcacaaagatgagttcattgctgcacttggaatctgaggaagtgaggatggtcgggatatggggtccctcgggaattggcaaaactaccattgcaagagctctatttagtcgactctcttgtcagtttcaaagtagtgttttcatagaca

SEQ ID NO: 22 - DNA, 2582 bp, Arabidopsis thaliana landsberg
ttgtataatgaatatatacgaacaattactatcttgtagctgtgaaatttgtgaattacaatagtttttcttttttctttttcgaacacctacaatttgttattattcactttattttacacatatatttatgctacatggtaaattttcacggatcaataatgggattgccacaaaaaaacttatcccattgttggatgcagctttttctaaagtgattacaagattgagtactttattttcttttgattattgattttactcttttcaatttagcaagtagtaatatgcaatttcaatttgtaaactgaatctagatcgcaaatttgtcgtccgagaagaatgcattcaatttcaacttgggttccctatatactatcgttttagggtttagttttcgtgattaaaaacgattgaaattttcagggaaaataaaggaagaaaatcgacaaagagaagaagaaacgaagatgaacaacgaagaagaagaatagacaagggcaaaatagtccatttatatatcagcaagtatccattttcgtaagcccattaagaatgttccttctttctaatttctgggctgaaaagtacccaaatcaacaaaatccccaaactttcactatatcaacatttttatcaaaaactttgtgaataagtaacattttttcaaaatttgttaagaatttatataatcactaaaggtatagtattctattaaacgacactattattgtagtgtacatatagtaaagaaatctgcttaaattttcccaaacacactttcaatactatttgactttctgcacatccgataattcgagtcatattcactgttgatcattttgttgtgtggtaatatttcttttgtcgttgtgtggtaatatttcaatttctaaaagtatatcactatcaaatttaggaagttaattaaaagtatcactgttaattttatgtcgtacgttttaccatgattttgcggtagagtaacatacattttgcaacggttaaacttatcatgttaatttctgtggtgaattatattgatattggatgatttccaacaaagatgctcttttatttcttttaccttttttgtagggatttaatggaatgtttccaacatttccagcatgcatgactgatgtgttgtgcactgggcaaagccatgctttctatttttcgtacttttacgggaaaagattgattggtctttggaacaagctcaatacaacaatgattacattaaaatattcatttaaaaaggataatgtgaaatttatatcaagtttacttattgcacacatgccatcaatatataataatccataaatctaaaaattcaaatttccatggaatttcaacaactcaatgtctcaatctatcacttggttactattttagatttgaacttataatatatgaaaagttaataaactagaaaaattccagttctttgccagtagcttgaaattccactgcaaatacttgtattcgtacgtcagaaaatatttagattactgttataagcctttttaaaaaaataataagatattgggctatttacctaactgaaagggcaatttatcattaatcattaatcattatacacttccaaagtttttgttttggccattaattataatcttttctggcagttttctgaaagtgcaattttgtttttgtatagtgtatggtttagattttagaacgttttcaacatttccagcatgcttgagcatgactggtgtatagactgggtaagtaacgtgtttctatttttctactttcccggtaaagcttgttttggtcttcgaacaaaagctaacaatcatctaattcattaaaaaaaaaaaaagagaatgtgggatatatatcaaatgtagttgttgcacacatgatatagatatctaatgaatatacaatccataaatctataaagtcttaattccatggaatttcaactatattcaatcgactactaggatctcattttatatttgactgtattatatacattttttttcttgaaaagttaagcaacaagaaaagttccatgtagagctagtagattgaagtttcaactgcaattacttgtatacatcagaaaagcaataaaattatgttgtaagatttatgtttaatgtcaacggatacttagacctatttatatatgaatggacactatttcatatttgcatcaatattacattttcagaaaaatttaaagacacaaaaaaggttcataagtattgttgccattataatccttctttaccaggccatcgcgatgggtgcactcttatgctatcacaaggaggaggaggcgaagtcatctcctccaaaagataacgtcaaaaaaggtgaaacgacgggaaaaaaagatggaggtcttgttgttgtgtcgtcttcggaaaaaagtaagaccaaaggctgttgttgcggcggaggagggtgtggtggtggtggtgggcgtggaggctattggcggacacgagtctactattcaacagccgtcacgtctttgacactactctggaggaatggtcacactacacaacgatgacgatctgtgtgcattatgc

SEQ ID NO: 23 - DNA, 1214 bp, Arabidopsis thaliana landsberg
accgtctctgtgaaacctctataccgaacacccaagtgtactcctgattccagctgcccatttttttcatattcaaactctatgtaatgaatgccttgacgaccacctcctacaaaaatcttggtaacatcgtcatggtcggatccatcatcaaatgtatagccttctgtactgcctatcacttccattttttgtaccgcggccaactgatttgaattttcatacatggaggatgagtatctattgtattaattctccattcatttattttcatcatttctcacattatgtaatgaataactacaaaatttcctatgaaatttttcctacgataagaaaacattgtgatttttttttttgtcaaaccgaaaacattgtgaattactacgaaatttcctaaggaaaaaatgatgaatactacaaaatttcctcccatccattctcagctgatggttgccgttttcattgactcaagtttctttgcgccttatctagagtatatattatcacacaaagcaaaaaatatatagtagaatcagtaggattgtagatctaacctcaatggcatctctatttctctccgccaaacgtcgtcgcattagtattgaaaggagatttctttccatattttctttgcttccccaatgctgtcttaagatctacacatcttacaagaaagcacttggacaattagttaccaaaaaaatggaaacttacaccaactcagtaaattgctttcactagatagagatgaaggagtaaagaatatatctgaatcgaatgaagcatatatgtttaaccttgtccttgtgtagtttttatcaatatcatcaacatatgtatttacttccatttcttaaaacatatagtttggttccatcctggttgtatttggacagttaattgtcctcattgcttttcttggactggtttaaacaatttgtgattctgaggacaattaattgtccaaatacatatagtttggtttgtagggtatcaggtttatcaatcattgagaggaactggaactcgattcttatattcacaatgtttccttcacttaaggttcataatcttcccatcaaactacttgttgtaaatcgactaattctctgggaatttgtctaagttcttagtccccgatcatgtgatgataatcatgatataaaatagtaaacgactgtacaagactaagaaaatatgaatatgatcat

SEQ ID NO: 24 - DNA, 1069 bp, Arabidopsis thaliana landsberg
catgatcagcttgcaatgttacaaagggtgagttccattatacgagtaataaatattactatactaaagcaatttcattaattatcttgttaatttgtgcatgcgttgatctccagtgctaccctctgattggactcccgatcctgtgaagaattttgctgctgatgatgatgatgaggaaaccaaagcaaaggatgcaacaatggttctgccttttgtgaagaagtcaccggtttggaagatatatgaatcaatggaggtcttcaaaagagtaccacaaagtcctcatttcagcccattgtttgaagcaaaagaagatttccgtgaaggttttgctttgggtatgatggtgactttttctggggtattagaaaaagtagaagatctgaaaaccgacgttcccatacgccaactaaatagccttaaagactcatttaccgagctagagaagcatggattcacggtcacagcgcctttatctcggatcgccaagctgttagctctcaaagatagacaactaaaaatattggaggaactaaaagttttcgacaaagagatgaaagatgaatctagcaaaaagcataaagctgagcaagagtttggtgagatggaacgcaagattcttgaagtgaaaaacaaggttctggagctgcagaagcaagaagcggctctggaaaaacagaaggatgcaacctatgaaaagatatgtaaaatggagtcacgtgcaagagatcttggtgtagagcttgaagatgtggagtgagttggagacaattctgtcagctccctggtaagttaagaaaaaaaacaaaactataatgatctattctgactcaaaagatttatctgagttcgttgttcgttataggttatgatgtttagcttttaatcttgaagccattagcttaacttcattttcctttttgtggatttcaggtgaaaaaacaaaacaaagaaggaacaaaagcgtaaagggtttataggatcaagatcagagtcaaggagagaagctgacgtggcaaagacttgtgagtgattaagtcaaagagagaagctgacgtggcaaaga

SEQ ID NO: 25 - DNA, 1097 bp, Arabidopsis thaliana landsberg
  unsure (1)..(1097): unsure at all n locations
ccacctttggtatgtacagcatcaacgattggcttccatgccttcacatgctctttagtccatatcccatttgtatttggatacctacaagatcaaatcacacaaatgtaggatgatcagcaataacccacaaataaaaacgtaaactttaatgaaaaggaagggtttttgagttacccttnnnnnnnnnnnnnnnnnnnnnnggcttcagcgatgagaaaacctcccggtgacgttctctgagagtaatacaagatagcgtgaggctgaggaacgcttccgaacgatttctgactcgtcaatggtgctagaacaaccctagatgaatcaagcttcttaatttaaggattcagcaaaagtcaacaaaacataaagaacggatcaaaatttagattacctatgagaaagattgaatcttcccatcttataaggggtgagaagagggacactctgttttgcttctgcgtttaccattttccatgaattcacaacggtggattttgtaaaacctatatttctctcaaaaacacttttcaagattgcgtaagataatggacatattccgaacatatttatacacattgattgatcagagaatcaggaacgcaagtgtttctttctgtctttaacgacgtggtcgtcattgatgacgcatccaaccacttagatttttttatttcttcataaagacgtattcgttgagacgacattagagtgtaaccactttgaacttaccccatattccatgctgtcttctacctagcatgatagtatcatcttctacagttgggattctacttttgatccattggagattacataacataacaaatgaggggcctcaatatgatttcaacagattcttccgatgtataactttgaccaccgaccaaaaaaaattaggtatagttgggaggaaaatgctctgttttgttctgtgcagcatgtgaaaggagggaagatagcatcatgagaacacactggattgcggcatgatcacatcaaacagaaatcaacaatcaagttaagttatgttggtctctagaaagcgcttttgtgataatgtgtccgtggaaatttttgtgaaggtttatgac

SEQ ID NO: 26 - DNA, 985 bp, Arabidopsis thaliana landsberg
tcttacttgcttttatttttcttcttcttcttcttcgttgaagtctcagcttcatatatcaaaaacatatgtctttattaatcaaccattctcagaacaaagaatcaaatcgagaactttgaaatcaccactataacattcctaaactccaaatttttcatcatctactaatcagtaacacaaaaagatcaaataatttctcaatgggtacataaattaaagacgcaaagacaaaaccaagtgatcaatcagaacaccaaaaaaagagctaatcaattaattcacctttgcttccttcttctccatcgttctcctcttgaccatcttctgcaatctcaagcttcttcgaaagctcagattccaattgttcctctttaccattagaggactcagcgccgccattctccaccaccggagctacaacagcaacatcaggactttcgctcgccatcttcaaatcgattttcaccttgataacaaagcactaaccaaaactcgatgagaatcgcaggaaaaagctacacgcacacgaagaagaagtaaaccagtctctcttttgtttaccctttactctctcctccgatacctttgtacggcaaacccttgatagatttttgagaatttgcaaaatgagacaattaaaactatattatttatgttaaaaccccccgtatagtgtttcgttaattaatgggccttaccaaaatttcttaatgggtcgggcttggtttcttgtaaatattctctaaacgattgccggtgcctatatcttattcttatgttaattttcttttttgcttttgaagtttttgttaagttaactttttacttatgttcgctttgattgccaagttgtggagataaggaaattatgaattgtatatatactagtagaaaaccttggtataatgacacaagaaagaaaaagaaaaaagagaaagaacaagttttggtgtggtgaataacaagatgatgttcactcgca

SEQ ID NO: 27 - DNA, 970 bp, Arabidopsis thaliana landsberg
  unsure (1)..(970): unsure at all n locations
atgcaccctctgatataccctgaggcaattagccaattagctagagcattagagcaaacaaagcgataaaaagaatatacacaaactcatccaagtttgctaatatgcgaaagaagttgtcgaaaagaacaaatacgaaaaatatcggggaaagaggtcactctcaatcctattcttacaatcgacttgaagatggtcactttaacttgtggcttaatgacatgtgtcagttataggaataatcattcttgaacaccccatatacatagaaaatgtaattaaacatcctctgtttttacagcaaagaatatgaaagcaacttaacctccaaattaacttaaagtgaaacactggttttggagtgattagaactcaaaaggcattcttcttaccaataagccacaaccaatccaaagcaactcctgcaaatatccctcctaacagaaatatcaccagcaagttccctaacgcattctgctccggacccttcaccaaatcaaaaacccccacattttttttggtgagattacttgtctcaaacgcaaagattgtattcgtttgcatatgcaaattgtaaaataaatagattaccttgtatcctttaggagctatagtcataatgcaaacagtgagatgtccattagtcaaccccaaaacagaaatgagcataatcatccatccctgatcaccatatttcgcagtgaagtagaacgccggaatgagaagataacgtgacaataccgcaattgtgatcaactttctattctcaatcttgagccatttcaccagtggtgtgtacctcccgaccaagtcccaacaattgtacatcgctactaagacaagtgcgtaccaatcgcctagcccgtgttgtcctgtgttttcatacaagaacccggngaaaatggataacgtgcaaacgtagatgaggaataaaatcactgcatagtctatgttttggatcaacagctct

SEQ ID NO: 28 - DNA, 3755 bp, Arabidopsis thaliana landsberg
aaaatttgtgaaactatagcggattcgaccaaaaagacgagcttcgcgaaatcctcgaccaacgggtggtcatagacggctcgagcaaacaatgcatacaagcttttagaaacaaattccaaagaggaggctgctggataaaaaagattgagaatactacggtaaccacttttccatggaaatgcggttataatgccgttcttcttcaagcttttaaaaatttgagaactatccttgaacttgatgatttgcacatgaacgagctcgataatcaaaggaagcggggatgaagagttgaaaaagctacggtaatcaccgctctgtggagacgggatcatagtgccgttcttcttcactcttttggttttatgaaaaatctctctaggtgcttcgaaaggcagggttctcgagatataattgtaccaacaaagcaacattgaccgaatatgttccaattgttgtccatgaaaaactggtttcaaatatcgacgccaacgttggctaataatggacaaataagatttttgatcaaacctagatttttgcagaaattgattaggatcacacctattggagttgggcttcaaacaccttaaaggcccaaataaatgaatttgccaagacaaggaacttgatgggccgaactggaacaggcctaaaaccgaaaaccctagttttcttttggcatgggcgatgagactttgagtgtggcggctagacgacggcgagcagaagatcggagttgaaagagttaccgccgagggatgtggtactggaggagataaaggcgagagacagcggtaccaattggtttgatggattagggttaatccattcgtcgacaacttcgtcactgggaccaacgattctaaaacccaatgagaacgttggtcgatgagggtagcggagcagctaggcttcatggatctaggcgcaggtgacaggttaagctcgagatcaaccattttcgcagatttagctttcaagcatctcgccaatagcacaacgggataggtttcatcaagagtatccagcagattagaggaccaaatgggagaagaggttctgggcagcctgaaaagtggatctctgaccaccaaaaccgaaagcaaaaaggaagcgctgtggtggtcgggagagtgacaaaaggggacaaagagtttgcgagatgcggaactgagacaagagaattggaggagcttaggtacatcccgacgccggcgagcaaaagctccaccggcgttggaaaatagattcatgaggatgtcttcgattttcgtgcttgggagagttcactgtttttttttttctcattttcttatagcttttctcagacgactgccactagattttaatgtttgtttttgataattagaaaaaaaatcttcgaattaaatatttgacatttaacaatcttccctaaatctctccacattaactacacgattaattactaaaataaaattttcaaaatatttaatatcatttaattactacaaaattatcatttttgatattgcttttctccatgactataataattcgattataatcatcaaaccgcagagatatttgatagcatttaattactacaaaattacaaaatatttagacaataattcataaacatatcataaatatgatcaacattaataatataaatagtttttttacggggcgggttggcgggacgttacttaataataattgtaaactataaaataaaaatattttatagatagatataatttgcaaacttttatatatactgattttaataaaataaatagttccgcggtgtaccgcgggttaaaatgtagttattatatatatgagcaaagattacttccccgagaatattacaacattgaaaagaggccaatcctactcgaacattaggtggtaggatatgtttttaaactgtgttttgcagcaacttgtctccaactatagagtatagatatctcgcactctcaagcctgtcattagagtgtgtcgaagatattaatggttgattatgtatgcttctgttgttccacatgcaaatagacgaaaggaagggtttgtactactttttttttggctttttctctccttcaattgtttcgtttgtttatagctttgagaattgtaatatgcagagtaagagaaatctgtgaacgattcgccgttggaaagtcagatatatatgacaaccgttgcattccgaaaggacagtgaggttatattccacttgcatcgaaattgtttcaatttcttttatttgcgtacaatggtcgtattgaattcgattttctactctgtaaactctatgtgatatgaaagtggttgatctgtcgttaaaaaaagaatatatatgacaaccggtgcatttggttctaacgcattattggatatctctgaacgtaatgacatcatgtctactaaaggttggcatttgaataaactacagagagacaacatgtaatcttaattaaggaccaaaaaaaataggtttttcaactagtttaagaccacatttccctattctttgcacttaaacaatccatgtacgtgttttggataagcattcacatatgtaactcttgaacgtgtcaagagaatgatttattcatgtatctcgataaacttgaatttcttaataaattagtggaaaattataaatctctattcatatgtgtaaagatgcaataagacgagagcaagcatcctcccttgattggttcaacagaggcttgaacatctcaagcattctattcttaaggtatatcaacttgattggtgtttcaaagagagacttccacaaatgaagaatgttagactttatctcatccctaacaaacccattcgcttgtgaaacctctttggcagacctcaaagtctcctctagcttattcagctcttggttatagtgttctaaatcagacgttttcacttcctcacaagaagagctttctctctttccgagaatcgaaacaatgcgatccatttctctaactccaaaaacaaatttctggctagactctaagataagtcccattggttcgatttgccatcagcttgatagactccattcttaggtttgatatatgtttcaaacacatgtagaacaacacaaagcaaccttcctacaaccacgggtgcggtaagacctttgttccctgcatccttcaatagccaaagacagaagagtaacatagaacgtaggtcatcagataataagaacattgcttcagccacaaagagagagaactcaactcccaaacgtttagcctcatctttcttcatctccttctcaatgtttaggtatgtctctttactataaggagaatatctagactgttgtaatttcttgttgtgacagtgacgcacaacacggtgattcattgacatagattccatcttttccgagatgatcaagatgtttgaagaattcatcgtggagggatcaagatgcagtgagtgaagagagaaaaaccctagatcgtaacttgaatcgtcaatacgaaaacccttgaatggtatcaaatctaagttccttgaaagagaagtaacgatgcaatcgttgtagtgcaattgttctctgaaaacctagccaatcaatctaatttttttttgacaaataatagaatgtatatagcgtctatctaaataaagaggagaagaaaaggagattagttctttacactcataacagaaaggaaaatattttttttcgccgcgaggataaggaaataatttttaaagtttaaatt

SEQ ID NO: 29 - DNA, 931 bp, Arabidopsis thaliana landsberg
cccaacacttaactcgcaactcgcaatgaatacttcatacgtggctgtggttagggtgcgtcatactttttttttgcgaattgtcgccgccttctttctagagtatcttcaattctctttagaatatattcaatcacaggctttgaaataagaatcacaccaagaacagttaaacccatggaggcatacttgaacctcctgccaaaagaaagagatcttttagaatttttttcaatcatagttttcgaagaaaagaataggcaaaaacagagaaaagaaacaaccttgacaaatctcccaatttagagatgagctgatctagcggtatataagtgacgtagaaaggtccttgctcaggtttttgaatcctgacattccccatgccatccctaacagcctgttaacatggtaagcaacataacaaagagagatataaaacgtattttggaccgctaacagataaaagacatacctcaccaacaactgtaagcggtgtaccaattgggacaacacgctcaacgtgtcttactccaagtatctatagacaacaatggtgccacaatgtataagcattgtcaaaacaaaagcaaatcaatgaaaagtggtaggaaaggaaaagaaaagaccttaaagcctttaagataacccaacgctccttgaacaagcgataccggctctgccttttcaaatacatcactaccaaccgtcaacgccaagcctaattcaccttgagatacatctacattcacatgacctgtcccgtcgtcctataggcaaccaatatcatattttgtaaatgactttagaaagtaatacactccaatcaaagtccaacagacataccagataccaggggacttccttagtcatcggctgcatcaatgtactatttcgacccatgaaaatctcaattacgtctcaaaacctgttg

SEQ ID NO: 30 - DNA, 1791 bp, Arabidopsis thaliana landsberg
agaatgcaaatcttggagtctccaatagcacgtattactatttatttcttcactcgaatcatatcctactacaatgcgtcctctatctcactcacgttaaggttcaggtaaagtggaaagcgtttcagggtaggattccaaatcacgagctgtttcgaaccttccaataaaatcaagccgtgcacgtaataaccaagaggttaccaaaattagggttcttagattgatagcttccgagacaagaaagaggaccatcaaaactacttttatctagcgaagataagaaaacgaagagcatattgcctttatagacgtttagcagtacaaaagatcgtgatgccaaggatcgatccgccaacgagttgataaaatcttgattggtggtgatggccgaccagagcttagagacggagcgaatgcaggaagtcttgagagtatctcaatggttaaatccagaggaatatgttctgattgagatatatcattatcatgtgaggacattgtcgatgaagattgtgttcttctctggatctttctcgtcttctcttccattgctgaccgctccactatttcactttctttatattagtcaagagagcttgatttattcatttagagaacatgttgaagtgtgtataatctaatttttgtagaacatataaaatgtatagaatacatattctaatttgaaaagaatgtgtattctaaacgttatagaacaaattttatctactcaaaacgtcaataaaaaccacatatttttgatatttatatatcctcatgttttctttatcatttttctacaatattttcttaattatttttaaaagaattggttcaatctaatgaaggaatagttgctatttgttcatagaatgcatatatggacaaatgcttatatatttgtcctttattttcaattttcccaatcataaaacatgaaaatctaaaccagaaagcattccaaaatttaccaaaataaatggaaaagtattaaaaaaaactccaccatgcatcactgagtttttctgcattctacactgattaaagctcaacgagagcaatcaatgacaatgtcaatgatagggatttttccatatattctccccaaaacatgagagagatctagagatatagaaatatacttcatgacatgaaataaatttgacaactacaagtctctatttctttataaaaaaaacaaaaaaaaatgtgccaaatacaaaagcaacatgaaataagttcatgtctacataaagcatagaatcatcagttcatcacacaagtagatagcctaaccaaaacaattaatacaaagagataaaatatgaagcaacttgcttgatattgattggtagtcaccgtcgtgggcgatatcttcatctttgtcttcggacacaatttcagatttgtctccctcttcattttcgtctttattggacgcttcatcatctattcgaggggtagcaaacgccgccgccgaatctgggaaagtaaaacgagacaacggccgtgaagatgaggctgttggatttggaatcggatctagcttaggtgaaggattcaagcagatgtcttcatatgcggtgggagcagattcgtagtcatggtcttctttgtcgaatgcttcgttggattcatgtgtatcccatagatcatcttcttcttcttcttcggattcatttgtatcccattgatactcttctttttcgactgcttcttcgtaggatttatatgtacgccattctacattttcaaataaccctttgttgctttcgtccgtttcgtcca

SEQ ID NO: 31 - DNA, 1860 bp, Arabidopsis thaliana landsberg
aaaattggtcagagtttaccgtagaagattgcgaaagaaatttgtcgccaatacaatagaaacatcaagtggtggtataaaaagtaaaaaacatccacgtatagcataatatataaaaatgttcctatgaaagtattttaaggatctgacacataccaaggatataaaaagtgaaggtaacatagttgtctaacgaagattattggtgttaagaacctctaatctcaaggcagcttctctctctaacacggttcccgaggtgcaattttgaatctagatctcaaatccagatctagtttttcgaacggtgttgacgagacgacggctctccgacattcacctagtttgcatcatgagccttcgcttctcaattgacaatgtccggatctccggctccctctaagctggtcctcttcttttcaaattctcactaagcgttttgctagtgaagacctttctcaccccgtggtgaagatctttctaccctcctgattcggcgattctacgcttctagacatcatgtctcgcaaatttatctactctgagaaaggaaaaggcattgcttccccctgcctccccccaaagatcccaagagtgtctgttccagcttttgatgactctgaactccgacgtaaacattctctaaccattattggaagactcaccaaccctcttgcccaacgggtttggggaatgattccctttctcgcagatctgtggaaaacttccacacgtccgataggcgcggacctagggcaaggacgctttcagtttcaattctcctcggaacaagatctttttcagtgcgttggagaaccaaccctaccactatgcaaaatggatggtgattctccaaagatgggaaccgaccacatcctcctcatttccttctaagatccccttttggaatcgatgttcaaggcatccccatccacctttggtcggaagaaatgttcatcagcgttgcaaagggagttggatctttgaaaaggctgagattactaacacctatgccagaattcgagtgacggtgaatggactgaaaccactcatcaagaagatttttgttgactttgtggatggctcagaggctttagctgatctagtttacgataaacttgaacgtcattgcaagagatgcaataaattggatcacgacgaaaaggattgcccggattctcaaggtctgggagatagaaaagaacgtctcccctctcccccctcttctccttctaaggatcgtcaggatcaaccttctcggcatcttcaaaggaactacgatgatagaaaccagaagcgaccttatcaagaaagatatcaaagacaacgaagccctgagaggcctagaagatcggatcatggacgctactcaaattaaagagaatactctagatttgactctagaggtagatatgatctttccaagaccttgaatcctagagaaccagttcgggagacctctaggcatcaccagggcagtcgagctttggtggaagtctgagatagctctcaaggcctgagtgggtgtaaagaaagatcttcgagaggcttatcctccacttccaggattcagaatcctttggctactttgctacctcaaaaagcgttaaatatcgctatgggagagctcagagacgttatgatccaatacgtcaattgtgcagacccgacagagagtgctgcctggaaagagcgtctttgacaagctgccgatcatggacaatctgacgaaaccgctggtcaaataattaaggacaatctcagtctcccacctctggctttacaagatctatactctcaacgaactggctctcaagagccaattcctatatctcaaagattatgccctgttcatgcacc

SEQ ID NO: 32 - DNA, 535 bp, Arabidopsis thaliana landsberg
  unsure (1)..(535): unsure at all n locations
acttccaggttaggtgattatctggttttatcttatttttccgcaattttatattgtatttcaagcgaaaaaatatattactcccttaaattagttgtcatttaagttttttcactagtattaagaaaatactcatttttatgttttatctctaattaatgtattattttggttgatatcatcaattaataaatttaaagaataaagatagaattgaaaaatctgtcaaacaaatacattgaaaatcgagaacgacaactaattcaagacaaaatttaacttctaaaaacgacaactaatacgaaacggagagagtatagttttttaaaaaatattttgtcagtatatttgaaagtgaccactgattttgaatgcattattatagtagttaatgaaaatataaaaaatgatctcttgccatatatctttcagtttattgaatttaacaatngatcaagtgtttattcacataatataaaagaattggctttatcgacaactttntacattgtatatgtgtaacaatcttaaatta

SEQ ID NO: 33 - DNA, 601 bp, Arabidopsis thaliana landsberg
atctccataataaatgtatatataatttactgctatttttccccttatttctttgaataatgcatactacaatttactctaggattctaagaggaaagcttggcttcgtctagaactatgtttgctagccaagtgataagaacggttatcgttgaattaatgcatggtggtgacgcgtttaagtttcttcttgttctacaaagcattttccaatttggaaaccctaagcggcgaattcaaggctctttcttagggtgcaaggcttctctgctctgcctcttcatcagagtcaccagatgtgttttcgggtataactaggaaaaactggaaattctacatttagtcattaaggagtattaattagattaaacttatgcatgtagatgtactgatgtattgatttaaatgtattttcgggtataactaggaaaaactggaaattccacatttagtcattaaggagtattaattagatttttgatacttcatgcatgtagatgtactgatgtattgatttaaacctactcttttttttgacatgcatgcatgtagtgattttttctttttttggggaaagatgaaattttatgctattatagag

SEQ ID NO: 34 - DNA, 476 bp, Arabidopsis thaliana landsberg
tttattagggcgaacgacctgagtccccctcgtaagttacatatagcacttagaactacacaaaatatgaacctagaccttgcactacacagataaagagaactaggcctatttctccctacattgaaaggacggatcctactaacacacaaacgtacgattaacagcattataacagaaactgcgattataccacttaatccaatacgagacccaaacaaaagtatgacccatcatctaataccccattagacccgactccttctccgacatcaccttccgattacaaaaccaacatatacatcgacagtctgggaactgaaaatctccgcttcgtcgtctatcgaagaaattgaagaatacgcctccattggatttgcaaaaacatcatttgtgaacacattacttagaaagagcattgcggatatatgaattaggagttaagccaaactcaaattctagtctatgactgaaac

SEQ ID NO: 35 - DNA, 1823 bp, Arabidopsis thaliana landsberg
gtgcccttccctgagtaattcaggtaaactcggtgaagctgttggtgcgggagagcccgaattcaaagtactagtcgagctagtgggaagtggtgagctgggtgaggatggcgaaccaggagtagagtgtggtattggtgcgatgaattggaagtgactatcggagtcggagtggacgaaaaaggattaaccaacgatggtatatgagtaacattttgcggtgaactccaatcatcatcgtgaaaaaatatagatgagtttggcagaggaggtgattcagttggtggtacgggaggaggagtagcaaacgggaagacagtttcttgagaaatgacgtcacgactaacaaagaacttattgttttccaaatcatagagacgccaacctttcttcccataaggataaccaacaaatacacatcgtctacttcgttccccaaatatatccttttcacgggctcgatgatgaacatagcacaagcaacccaacatatgtaatgctgaatatgagacccaaagagtacttcatatggagatttcccttgtaaaatcagtgtaggtgtgcgattaataagatggttagcagtcaaaatactttcgcccaaaaatttgcgaggtagatagctctgaaaaagacatgcacgtgcaacattaaatacgtggcggtgcttgcgctcgactcgcccgttttgttgcggtgtatctacacaagaagcttgatgaagaatactttgttcttgaaaaaacgatgtgagacacatgcgagtatcctttattgatagtatcctttacgcgagaggcgttgagattttgttcatctcggatcacacgcgagtacacttgtgtgagaggcagtaaaggatcttgatccataattgttgagcgaataggtctgaagcgttcatttaaatttaacaagaattgatgaaccttgtcatcttctgctagttttgtaatttttgcagttctccccaaagcttggtgagccttccataataggcaagatcaagttgcccatcttgcttacatgccgatatttcatctttcagtatttgttttcagactccgttgctggtcgagaatcttagcttgagacaatcgcaaaggtcttttacatcagatacaaaagagacggtggaacgaatcgttggatctatggatgttcaaatccatcctatgatcatagaattagcagctttccaagccgccaagtgcggatctgttgttggctttggtatggtgccatcaagaaacccaagtttttgcttggcttggagagaattcatgagctcggtagcccattcagagtaattatcttcctttaagataacagaagaaattaaagcaccaagattatcagatgcatgaagagacgatagctctggacatcgtgatgataaaagggacttgcaacgacaaagcgaaagtaaagaaaaatgtggcagtcaaaacaatgatggcagcaaaaaaaattagggtttaatgactctgctctgataccatgaaatatttgggaagaggttgcgtttattgattcacatatcacaagtatttatacatagagatcagtaagggttttctttgtacattaagtatcgaggtccattatagaacgaaacgtgtggaggtgcacgtgtgagaagtcaagtgggatagttgaaaagtctagagatgacacgtggcagccggagattggctaatgaaagaaggttgttagagtgaatgagttcgtcttcatttttctttatcaaatcatttgtaaaattattgagctaggtttctcttatcttcagagctagcgtttgatcgtttcgattgaaatag

SEQ ID NO: 36 - DNA, 991 bp, Arabidopsis thaliana landsberg
tttacgttatctgctaactattctgatgcatgtgtttttgtacatgattattgaatcgcaagtcaacttttgttaccttttaataataatgttatcgtcttcgcctatatatccgtataataatcatattgtagctatgtcaattttgtaattaatccaaatatgatggatatttttggtttatattttctttctctttcatacttacctaatttttaaattatttctcctacttttttaatttccacttcttatgagtatataaatttaattcacccatttttaaaacataataattaaacacaagatttcaaatggatagaacatttttctttttttttggtcaaaaggatagaacataactaatgacttttatgtcttccactattttacgtgaatctctttttttttacaataaaactttacgtgaatctctatgatgaaactcctaataatgtgctcgttaaacttatattatatttgggattcttcttcatgtatgggcattgggctcaatgaatccccaatagattaaggtttaataacaaatagctatatgcggttattcacttaatatatctccaaatgaacatccgtttttttaggaataaatttacaactgtcaaaacttttggtcacccccatgctagccatatatgtagtgaacgtgtagcaaatctctaaccatgccaacaagtaaaaaatatcatcaattccttggacaagaaatacttcagattctaagaaaatattgtatggttcctggtcttagccctgaaaaccgtgtagaaaggtgaggcatctgctatgaaaaaactgtttatatcacaaacttctatgagcttttactgcacttcctccatcgaagatttctgttggatttgcgaaaaatatatttcataacagctttgcaaggaaatatgagttcggtaattaaactacgatttagtgataactcagtatcaaagcagcatattttatacaaatttga

SEQ ID NO: 37 - DNA, 685 bp, Arabidopsis thaliana landsberg
ccttggtgctggagtgatcgaagaggtccgtgtccagcgagacaaagggtttggttttgtgagatataacactcatgacgaggctgctcttgctattcagatgggcaacgctcagcctttcctctttagcagacagataagggtatttgcttcagttaatgttacatagatctatctgttgttgcatctacgtagacaaccaaagtctgcttgtaattggtttttaccagtattcccctaaacccatttccttgtttctgtgatttattgcagtgttcctggggaaacaaaccaactccatcaggcacagcctcaaacccacttcccccaccagccccggcatcagtcccttctctgtctgcaatggacctcttagcctacgagaggcaactggctctagccaagatgcatcctcaggctcaacattctctgaggcaagcaggtcttggagtcaatgttgctggaggaactgcagctatgtatgatggtggctatcagaatgtagctgcggcccatcagcagctcatgtactatcagtaataaaccctcttcactggctctgagatacctttttctgtttctttctttttcttcttcttaattttataactttcttgcttattctagaccttccttgttcaagagtctttatgtatgtgtctctttcatttaagccattattttt

SEQ ID NO: 38 - DNA, 953 bp, Arabidopsis thaliana landsberg
caacatacttcaatttggggaagacatagagttctgggtcatccttgaattctgtgtcaaattgatatacttagacttactacttatcagatattatctcagggaaacaaaaatcttacaataaatactactgttacatccataactatcagaatctcaaactctatttcaggtgaatataaatacggattcctaaattaccagggttgtcgatcattggagccttccacttgcccttgtaagcggggttcttaattttctacagaacaatacaacaaccgtgagaggaatgaagataaaatgaccatcttaaatactctgttcaagagcaaaaccaacaaaccttgggcttccattcaccattgtactcggggttgggaatggtaggggcagtccactcaccatcttcttcatcatcccagtcctcaggctataaacaaaggatcaaaatcaaaacctcgagacgataaatcagatttggttttgcatcaatgcaagaaaaaaattcaaaccttctttgcgtcagtgtctggaatctcctttgggatgtcatcatatcccgctggcttagtgtcttctggatctggaatgtactctttgtcatcccagtcctcaggcttcttagcacttggatccttaatcttctttgctgggagaagatcccagtcagagtaaaggctaccagtttgcttctcaacattatcaatcaaaatactgtaagtagcatctggacggaggacgaaggtgtacacgtgagtaagctgatcagtctcacatgggacctccttcttgatcaaatggctggttccattgtacagaaggatagcatgtactttcttagtgctgtagccacaaatatctggcccaaacataatgctgcacattaaaaaagagcgataagcctggtgtttgaatgtttgaagtttgatatgaaagtaaccgaaaaacacacc

SEQ ID NO: 39 - DNA, 643 bp, Arabidopsis thaliana landsberg
aaaggtcttgtcttcctccattaatacattataggaatagtgcgagcagatcccttaaactcggtcgtgatgctcctagtcctggatatttttttacaagatcttgtcttgatccactaaaacttacggggtatatatagattgttggcttgatcattattaatatatttaatgacatttatgttttaactcttatcacatgtttctttggtattttgttttttccatttaactaggaatctcttgacaagtctacacatttactttcttggattcatgaacatggattccttatcggtcgtgatgctcgaatctaaccgatttgaagattgttggagtgtaagttaaatttttattttttttcttactagctatattccttgtatgcatgtttaaatttcatgaaatgtccattttttttgtcttttatttctttatagagaagcatcttctattgaattctttgagaataatatcttttttttttttctttgtcaggaatgttttgttagagcctatattagagttacttgcgagaaagtgttgcttgatagagcatctgttcttagataactgttatcaaggtaaaacttacttttgtgtctggttgattttgattttaggcatgataacatatccaacc

SEQ ID NO: 40 - DNA, 1725 bp, Arabidopsis thaliana landsberg
gaaaaataaaaagcagtatgttcttagacatcaaattttcctttgccaaaaatcaatatatcatatatttatattctcttaatatgtttttgtttgaaattttaggttttaaatgaaaagtcacaaaatgcattaatcacattgaatggcataagttttgtttacataaatacagatgttataaaatgttttaaaagagacttatatctaattaaaaaaaatatatatttctgcttaaatccatatactttgaatataatttaataatttggaatcacatgttttaatatttttatagacaagtagaaataataatatagaaaaatttcctaaaatagtgttatatttaatttagacatgggtttcaccctctccatattatttggcccaaacaaatatttaagagtttaatgggcaatttctccaccaaatcagcccactaaacgtgaagggtaaaacggtaatttgctgaaggaacagaagaatctttaggtcagaaagcttgtcctataaataaagcattatttgcgaaataatggcacacaagataatacctagagaatcaaagcaatattcgaactaaaacgcattgtccttcggttcgtttttgttctcggttcgtttttgttctcggttcgtttcagttcacggttcgttttattctcaattcgagtcgtgttacgttgccgatcgatagaaattacgtgtagctattcgatcgatagaaatttaccttacttattcgtagttacaacctcgatacaaacaattggcgcccatcgtagggcaagttcgaaacttttcttttcaccgaacgagaacgagtaacgtaaatgtccccagcgatccacaaaactgaagaggacatgatagacacatcaagcaaaaacgggtccgacgccagccaacaacagccagcacttgacgcaatgcaactgcaaccagagaacccagcactcgctcaaactggcttgaatcccgcacgtgccaaaccacgccctgcaacagtagcagcggcagtgggagacaccgcgcttggcggcgacactgcacctgcgaacaagggtttccatctggatgacctcgtgcaaacaatcttggattgactcgacggtcaggacacacgaacgaccaaacaaatcaatgtccttgtcgcaacgcaaattgcttcccaaaatcatatcgagcgcctacgacaccgaagacttgactctcagcctcgcgatgatcacgaactattgccatctccccaaactccatgtgcggaacgttctcaaaaccgacgacatacatcggcatcagttatcgtagaatctgttggcaggcaacctcatgatagcctaccgaacaaccgcatcctaccgagcagccaaagtttgctgaaccgaccttccgataacgtcgaccaaacacgcaacctggaaatcgagcgcatgaacatggtcatcaaagccatgtaatccaaaatgcaccgtgccattagctctgctccggaactggaaaaagtattggaagaaacacaactatcacctttcacggtacgcatcttggaagttcgtgtcagacacataacgaaagtcaaactggttccctacaacgatctcaccgacacaaagatttttctaaagtctgttagcctcgcaatcaaccgtaatcatttctcccccgaccaatgcgacgcgtacagctgccaatatttgtagaaaatctgatcgaccgacgatg

SEQ ID NO: 41 - DNA, 3824 bp, Arabidopsis thaliana landsberg
cggctccatgaaatagtcgaatgtgaaagccatggctcgtgccgcggctaacctatcctcagctgattctgtataaggtaagttccaacctgcattcaaagctataccgacttgacctttttgagaagccttatacttttttctatagactttgattgcttctccgtgagctaggataaggttgtgaccaacgatataaggctcggtggctccattcccggcggtgcagttagggtttgtaaattttgaacaccttcctggagccataacacctgcaacatatccttgttgcaccactgttaatggctcgttcaatgtaatccaatgtttcactcgatctccaaagctcttgaaacaaatatcggcatagtcgcgaaaatcgttaacaatttctgccccacggaatcctccgtaagcatcttcaaggtcttgtggtgtgtcccaatggaaaatggttgcgaaaggcttaattcctttagacaaaagctcattgatcaagttgttgtaatagtcaataccagcttggttgattcctcctttaagattcccacgaggcaaaatccgcgaccacgagatggagaatctgtaggcattgaacccaatttgatgtaataaacccacatcctccttgtaaagatggtaagagtcatctgcaatagatccgttgctaccatcttttatcttttgtgggtatttttcagagaacgtatcccatatactaggtcctctaccatcttcatgagcagctccttcaacttggtacgcagaggttgcagctccgaaaatgaaatcttctgggaaatcagtttttcttaatttaggtgttgaagagtgtctcttggcaacaacttcattggaagccaagatgatgaacactagtacggagaaatatttacttgtcattctaaatttttcttttgattattgaatctttgtttgttgtaatataatgaattatgtctagagttatataggcaagagatttgtttttacattgggtatgtgaatctataaatagagaaatgtaagatagagatggtgtaacaaatcttttaatttttacttgtccataattagtgaatagaagactattgaaatgatcttatctagttgtctttctagtaggaaaaaattagaaacacacttgtaaatattttcctttttcttgtaactactttttttatccaacaattttgtaaattcccaaaataattcaaataactctctcaagactccattataaactattcttttttttgttaaatccattataaactattcacaatgatcttaactagttatcgtctttatgatttatgtctcgagagagttatttgaaatatctaagaaatttacaaaaaaaaatgttttctgtaagtttcaaactagttttagaaaatcgtgagtgtggatttgcataagatgatcaagctgtgtccattttcttgttaacgtaggtctcttattgcaaaaccaattttttcttcttcttctcttcatgctacgagtcttttctctctcgctaaggctaatctccctttattctctcaccattcttgtaaaagcaaagaacatgagcatcaagaaattaaattattgaaggtccgacatggaagtgaaatttgtagagttgtagttaaactttgaaatacgaggccgaaatcaaactaatcgttggagtgacatagagttgggcttcactttggatcgataataggccaactcatttcagtaggaagtacttggagtgtttttcttttgtactacacgcatgtactacttttctttcatttcacatccaatagagtactactttaacacacaaagctgaaaactcccaaaatttggtaggatacaagattacaaaacaaagaaaaaaaggacggaccaaaactaatcgtgcacataaagatctcaatgaatttaatgagttaattatttttatacggttcgatttaaaccaaaaatcaaaaatggcatcctctaaaagaaatttttgcatgaattaaagaccagtttggttcaatgttttgtcatcagtaactatacaaacaaatacttaaaatttaatatatctacaatagtttttgtctgtattatttgtttctaattgactttttttacacctgcctaacaatctcccttacacgtaatgaacttccaatttacacggagaaacaaccacccctgttgacacgtgtcatcaccacaccgaccggcggtgcatcacccttagctaatccggctaactccaaacgtcgatgagccgaaggacggggaagattctccggtacgatggtctctagcgagttctcaagccaaggcggacacgtcctcttgtcactccacctccgcggcggcaccacacccgcagccatctcttctaccggcgatttcacaaccgcagcttccactgatgcaacatcattgatctgaatcccgccgattacgacagttgccgccacccccaagacaaaagaacacttgtttttccgtggctctgtctcattttctgttctcctactaaacaataaaagaacaaagatcattgatatgaaaaatgatcaggtaaataataactatatcatgaatagaagagataccaagagatctttgacgttgtcttgagcagtgaagctaatgattgtgcagaatttgaatctaggggaggaagatttagacagcagcttattctccctgccattgttattcctctgttttcgtttccttctttttcttaagaatccacctagaacaaattttattttattcctttcacctccaacatatatataactactagcccattcttacttgggtcactcattttttcttactatatatgtatcctcaaattattacatttcatatgcatgcaatacaaaccacatctaaattttttcttccaatatgttctttctctatacttaactaaagcccaaagaatgaacttaacctagaaaagatggacttgacccaatagcattggtccgttggagatgttaggtccatactccatacaaagacaaattgaacaaaagtcgtgaatctgtttgctacgtctgaataacaacgtacacgtatcacgccttgcgaacaaattatttgacaatgatggccaattagcatgtgtcatcacttgttaccacgtcaacaaggttcttgtcggtccgtttaattaatagtaaccatcgttttcaggaaaaaaatccacaaaaaaagtttctaatggcgaaacaatattcaaatatttcctaacaactaccatgagactgattctttttctcttccgaaaaattaatgagactgagtcctaatttttcttatagttaatttggtgaccatcaaagaatgtaaaagtatttaggaaacagcacaaataatctggcaattacggtctacaacatgtttatttacttatttttaaattatagaaaaatttaatattttaatatcttatatttaatgccctaaataacactaaatcacacatataaatagcagagatataaatatagaaaaacattccaagcatttttcagcacttaacatttatacagaaaaacaattaaacatttttcagcacttaataattaacatatgtgagaaattcataaactctattaaatattcatgaaaataatgtatttttaattttataagtaatatctcatgtgtcgactttttttatataaaaaagatgtaaaaaaggtcccaagttactaaaattcaatttgtcaacttaactcaaaatctttttgctctttgtccaaaatttatgatttcctttcttgctatttttcaaaatactatgtttcttctca

SEQ ID NO: 42 - DNA, 1496 bp, Arabidopsis thaliana landsberg
atcctctcgtactggatggtctttttcaccagatctgactgatatctcttttcagcaccaccaccaaaatctggtacctttgaggccaaattatgattctcaaaatcagaatttggatactaatcaaaaccatttggtttacaactcttcctcctatgaaattccatcaaactacccattcatgagtatcaaatcctactcaaatattgatactcttgagcaatctatgaataacatagtcaacaacggaaaaatccatatgatcgataatcccccaatttttgcaaaccctaagggtatattcgaaaattttcatgatttgcaggaatacactatagggaatgagattgtacacaatgaagaactgactaaaaagggttatgagccaactcttgataaggtaatgggtgaacctcaattatttgatgtgccagtgctagaaggtatcaaaaatacaaccaacgaaatcatgaatcaacttgtagatgataagatgaaaaaaacttatgagaataaaaaggaggcgagcacaagcaaatatttgaagaaaagtgacatcaccaaaaaaagatggacagaatctgaggacatgtaagtcttcattttttttctattctcaaataaatttaaaaactattattcaatttcctccttgggaattctcatataacttttttttattgtatgccttttattttattttttgaggatgtgaaaatatattgtaatgtatatagaaaattgaaagagatggtggcacttgaacccaaaaaatggacaaaggtcgcaaaacattttgaaggacgaacaccaaaacaatgcagagagaggtggcataaccatgctcgtcctaacgttaaggtgttcttttctttcatctgcctatattcttattttcataatttaatataaatgatcatcacagcttatatgtgtgtgaaagcaactacgttcttacaatgttcacgcacacatgtatagagtatagattgaaattcatatagttgaatagtagtgtggctaacgatttaatcacaacaattttaaaaatttatatttaggagttacatgtgatacttacaaataatctcatcatggatacaaaatacattggcaaattttgttttctcatagttattacgaggggttattaaaacgtgcatctttatagtttgtatcttgcttccatcaataaaagtgtcatatacatacaataataagagaatgatttacgtatatgtgatttcagaaaactacttggagtgaagaagaagatcaaatactaattgaagtacacaaagtaattggtgccaaatggatccagatctcagagcaacttccggggaggagctataacaatgttaagaaccattggaataccacaaagcgtcgggtgcaaaataaaagtggtcgaactgtcaaccgtgtcggcaataacatccttgaaaactacataaggagtatcacaatcaacaacgatgatgaatctgatggtg

SEQ ID NO: 43 - DNA, 1259 bp, Arabidopsis thaliana landsberg
aatgaattaccattcacaccatcttgtttccccacacagcccaggagtaggtggactggacctcttttggaagcaagaagtggaagtgactattctgacttcctccacaaatttcattgacacacatgttaaagctgcgaattattttttctttgcctctttaatctatggtgaacagatagagcaaagagaagagcaatttgggagaaacttactattgtagggaaagacacaagtgatccctggtactttacaggagacatctcatttgaaaagcaaggaggctgtaacgctcgcgatcctcaataggatcgttggctgggacttggtccgaggaaaaaaggtggagtctcggacaagttgggaaggagctggccataagctcggacaaagggatatcatgcagactaagctaggatcgtaagagaatcagcagggtcagctcatccgaagctcaagctcagctggaatgagtgaaggttacttgggtcaagtgatagtccagttcgggcagctagatgagtgacggttgagctcaaggtagttggtcgactgtctgaccagctgggcttttatccggacggttacttgggcagttacggtcgaacggttgtttgcccaaagggtggataagggcgagcagttacgggcgaagagatgcaactcttcggaaaggtgcaaggaacggatgtgttgattcgggaagcatctatttctcccctaaataagggagggcgcccacgaccatttcattcaccacaacacacagaaaacaccgaaactcaccattaaactctcgccctctcgggataataaatcgtcggagggtcgaacaagatgtaccgtgaccttaaaaggtactaccattgggtaggaatgaagaaaattgtggccagatgggtggccaagtgcccgacttgtcaactggtcaaggcggacgatcaagtaccaagtgggttgttacaaaatctacctataccggaatggaagtgggaccatataacaatggacttcgtcacaggactgccaacggggataaagtccaagcacaatgcggtatgggttgtagtggaccgattgactaagtccgcgcacttcatggcaatctcggataaggatggagccaaaatcattgccgagaagtacatagatgagatcgtgcgattacatgggattctggttagtatagtgtcttaccgggacacaaggttcatgtcaaagttttggaaggcttttcaaaaggccttagggaatcgagt

SEQ ID NO: 44 - DNA, 1403 bp, Arabidopsis thaliana landsberg
tgaagtaaatttcaaaaacattacaccttaataaagcttacaatattaattactaacgaataagccatgtataagcaatccgcatgtgttacgaatttacgcaatgggtgatgataaattcatgtttgattatactttatgcaaatttgggtttttggtttagatgatttacgcataaaattttatgggattccttacctaaaggatcacttccatgattaactagtcggaagtttcaacaaagtttcgatatttgatatctatagagaaaaaaactattttctcatgaggtttttatattcgttgaaacttgtaagtaattttgttgttgttgttgatacactgatactcatactcaattactcatacaaacgttacatatacatatgctcagaaaaaacaaaaacaaatgggccgatgatgtttgtttaagcccataataatttaatgaaacacattaagacatcttagcagaaaaaggaaatatgggccgataatgtttatgtaaagccataataatttaatgaagcccattaagacatcttaggagaaaaaggaaaatttccttttttgctggctgtttccttttttctttacaacggtcaatcggatcctatttaaacagcagatgtttctcaatctcaccattctcgtctttgtttttcctctcgctctcgtttttcttcttccatggagagcgattaagagtttctccaagtttgtcatcaccaccgcaaggtttggttttatctaatttgttaagagtttctgattgtgtattccatgaacttttttccgattcaatgtttgttcttatcgaattcgaacctcttttattttttgattaacaatccaattgaatcttcatattagggttttagaatttgaagtcgggtttcaattttaagattttaaaaccattgctttgtttcaaattagggtttttttgttttaagattttcaaattagggttttgatttcaaacctgttttaagaatttcgtttgttgcaaagaagctttttcaaaacttttttttttgttaaaaatcttagcttttttaaaaaagtttcatctgttttattcgaatcttaggtgtttccaaagttttgtttttggttttcttaaaacccaaaagaaagggatgacaacacttatgattgttgtatgtccggtttctacttgggaaaattgtccctttatcggtccggtgttgcctaaacaagcatgatcatgcttgaaaacagagataaacgtcctctcaagtaagggctcgtcaaaagtatgtatcttgctgagctgggacagcattgatacaatattcaattatctgctttgctgagctgggacagcaatatactattcaatgatctgcttattaagcgatgaacaattgtccttttta

SEQ ID NO: 45 - DNA, 672 bp, Arabidopsis thaliana landsberg
gaaaagcaccacgagaggcttaattgaacgattctacgagcctacccaaggagcggtgatgctggatgggaacgatatgagatactagcatcttaagaggctaagaggtcatattggtttggttaatcaagagcctgtcctgtttgcaaccacgattcgcgagaacattatgtatggtaaagacgatgccacctctgaggaaattaccaatgctgcaaagctctcggaagccatctcattcatcaacaacctaccggaaggattcgaaactcaggtatgtcgaacatcagatagcttagaacacaagaaattaacaactgtaaaccctagattttgcttgttattcggtttacaggtaggtgagagaggaattcagctatctggcgggcaaaagcagaggatcagtatttctagggcgatagtgaagaatccatcgatcctcttactcgatgaggcaacaagcgcactagatgcagagtcagagaaaatcgtgcaggaagcttttgacagggtgatggttgggagaacaacggtcgtggtggctcatagactctccacggtaagaaacgctgacatgatagccgttgttggaggagggaagatcattgagtccggaagccccgacgaactcatatctaaccctgatggagcttattcttctcttcttcggat

SEQ ID NO: 46 - DNA, 3782 bp, Arabidopsis thaliana landsberg
  unsure (1)..(3782): unsure at all n locations
ataatcattcaattgtaattttagaatcttgacaccattgacaacccatattcccacaaaaatgccatcgaaaaacattcatctcacatttcttcaaacatatactaatctccacaccacttatttcatccttcctcgctgacatagaaaactcaccgttttggtaaagagacatcatttaagtgtgaaccggtcttccccacccaaaatccaatccatataaccaatattggtttgacccggtaacagttaatacttgtgtacccaacttcatgtgtttagttccttcttcgtacacttcccacaatgactcaacacttcgtgaacccaaacttttgatggaatcacttagaatctccacgccattcacaaacccatcttctcccaaaatgtatgtcaattggtaagacacaattcccaaagtatgtcaaaggaaccggagggtctaaacggtttctaaaatcagcagcgtacataaaccgaattggtctatctacattgcctccacgcgccttaaccacacaagtcaacacataagcatacttgactacaaacgtttacaagtaaagatcagaccgagttgactcattcttggttcgttctttaagtttcttgatattctcttgagacagctggagcgtgacccggacaaggtcgtcgtcaatctctttagcgggaggagactttaaggttcttgtgtcgttgtctacgtctcctgatagatacgacaggagctgcaagatcttaaattcgagtccgacagaaacattgatcaccgtacgatctgaatgtgtaggtaaaacaaaaccttgtggtatggttccgtatttacatatatgagcccaagatttgtgaaaatttgttgaggttttgccgtccatgatgacatgatgggttgtgagcccaagagagaagccttggtttgggaagagagtgatttgtagagcaagaatagatgaagagttagaggaagtttctaacgtagggataagagaacgtaacttgctctcgagacgaggctctttgccggagagtcttgagaagtcagcgtcggactcaaccacagagaagagacagtgtcttgtgggaagatgatgacatgtggcttaggatcttgtggatcccatttgatgtgaccagagagtgggaggaagttagtgagggcaagggagagagattgctcgagctttgggaggattgtggagaagaaagagtcgtgagatgatgactcagagagtttgtaaaaggtgactcgctcgatgggatggtgttttagccaaagtaaatcaaagaaagtgagtgggaggaaaagcagggtgactgaagttagttgcatggctgactcgggagattttgatcatgttaagagccatcgttgatggagacaattccacttgtactcaatttcaggtttttgtttcaaaacaaaatttcaccttagccttctatctcagttttttttttagaaagtggcaaagtgagctgggccaatcaggttttagccatttgggcttaagtggatgaatataccctccaataagaaatgaaacgaggcggttcagtttggttttctttgtttttctgtttatgaaaataatatttaaactttaaaataaatcaaaaacaagttaataattttaaaactaccaaaaaaaataaaaaaaaataaaaaactcttttcgaagacgcagaacaattctgacgaaacttaaacccatattgaaagtgaaatttcgattgaggctctcttcgagttcaagtcgttgcttaagtggaggaaattttgatcgagttcgtgttaaagtgtctaacaataagaggatttttgggtttctcaattcactgtttatagaagaactcaaatggcggagatgaagaagagtagtcggcggcgaggagtttctgaatttagtgtcgaagacgcaaaatcaaaaactgtttcgtcgaagacgcagaacaattccgacgaaacataaactcagatcgaaagtgaaattttgattgaggctctatgcgagttcgagtcgttgcttaagtggaggaaattttgatcgagttcgtgttaaagggtaacaataagaggattttcgggtttctcgagttactgtttctagaaaaactcaaatggcggagatgaagaagagtagtcggcggtgaggagtttcggaagttaatgtatcatcgtcggcgacgacaaatctaggttagggggccctaacttcgtttggagaatgatttgacccaaaatctaggttaattttagagatttcaactcagaaattttcaattgacaaaggggttttggttttttccgccaaaaatagttgattgagtgtaaaaggtttcggcgtacgtgtatatgaatatcgagtttatgtttagttggtatttggatatagcgtacgtgttaagaacttcttcgtcttgttcaactttcaggaagtacttctaatgatccgggtgaattaccacagaggttgtttgcactcgatcactaccctagcaaggcgaagataaatgcgtattccagaccggagtacattggtcannnnnnnnnnnnnnnnnaggacacaccagaaatgacgttccttctagattctccatttggtgacctctttaggatccctactaacaaggcatccttttcagttagttacaaagaaacgttatgagatgtggatggtattccgctggtcatcctattaggctcggattaagagaatgggcacttataactggtttggaatgtggaacctatcctaaagataaggatgtagaaagtgttatgcagcgtgaggaaggtgaaaatacagtttgggctactctatttggagatgataaagctaatccaacagttgaagaattaagggatagattgatttctgaaactgacatgcctgcatggaagaaattagctctcgccctaattatcattgtggatagggtgctaatatgtgacaagtctcctcctttgagaccaaatgagatgacagttgagctgacgaagaaccttgatttcttctgtaaatatccctggggaaggacatcatttctgcttactttggagcgtatcgcaagtttcaaaggagagaccaacgttaaaaaactccggagtggttgcaagcaacattcttatgcactccatggcttcccacttggactccaactccttgcatttgaaactataccgtctattgctagtctcctaccttctgaaggaaataccgccgtctttacagaaaggactattaaaacctttccaaactgcgtccaatcaagacatccaccatattggcgtgcgagtctgctgaacaggtttgtgcagttgttgttgtacgtacattggtataaaaaaatgaagtacatacactctgaaattaacaatgatcgtctatgtaggtggatatcacatatattgtggacccagcagacagtaattgcccaaaatcttttgtatggaggaaagaaaaagaggacccaagagttgataacattttaaggatgttgaaatctgagcaggagtggaatgagaaaatatgggttggaggcgatgatgcgcctaagaagcaagtccggccctcagcaactggagagagaggtaaccatatcttttttcgtataacttatatcagaattaggttcctctaagagtagtaatgcatgatttaaccgtttaatatagttattttgaagaggcaaagacgggtggcagatccagttgaaaacaaaaaaaggaaaattagtcactctaatgatggtgtaggtggcccagtggtggtgat

SEQ ID NO: 47 - DNA, 1296 bp, Arabidopsis thaliana landsberg
tttctacagtgcaaatatttaagtgtttaaatctaatataaagcaattatgttctttgtgataaatcagatttgagttatgttttgaaccaaccttctttcccattgtaacaactcttggtcgtccactcgtttcctgtttgaacttctttcaatgtattttctttcttctctcttctctccctcttgcagaatgacgacaatgatacctatatttatatatctaatttattgataactgtagttaatattactgttttatggataacaaccaagcctccttgttatatatgtaacttataaatatgttatatttataaaaccaagtttactatatggtgaaggataaggtttgtttctttttttccatgaaatatttgtaaaaacgcccgtttgtgacattgcgttttagtttgtaacagactcaaactttcgatgatatcttagccattgtacatcgtctttaataaaaccaacttatattgaataatatagatttaaacgaagtctatcacaaacacctaaccaaacctaactcgacacatatgtcagcttaccattaccccatttctggtttgttccatttgtattgttctccacatatcgccgatggagcaaatcttgaaattttagatttctaatggaaaggagttagtatgaaacaatttataatgtttttttttttacctttctatatttttatattaatatcggcctgtttgaccacatggataaattatttcatattccttcgcgtaatatatattttatgatataggtaattagagagtacatttatatttactaaggtttagtatatggccaaatatttatccgggtctgtgttgtatccatgtggttcgtatcagttatagctatatttttaccattctgttatggacaactattattcgggtatatatgttatccatgtaggtttaatgcatatttttcttctaacatctaaccgattatactcattcagtatgcctcagtctattattgtattctacaaatagtgtatgaacatctggataggtaggaagtacttcctcactttcgctgctcgccgacatcattaggcggatcgaccgtcagggtttcggggagcttgctcctttcatcgccgctggtcatgagtggctggatattgcttatagtaatgaagttctagtcgacgtttgtctggacgagtttatattctacagcaccctcgggaatgttggatctccttgtcgccccttcctactatggtgtttggccgatcaaaacttcaccgcgtaatacggcgaagggg

SEQ ID NO: 48 - DNA, 712 bp, Arabidopsis thaliana landsberg
caaaatcaatgcttcgtcccctatagatttgattttgctccattttgatgacttaggatccaacttgtagacgaagaataagaacgtcccaggatgtggttccactctgctagcaatgaccaaaacttctccagacaaagtcacaacaggacttttgtgaaactccagataaaaaataaacttgcacattccattggagaatcactacgggagaaatcaaacacagtgactcgagtatcactaaacacgtaaagcttgctttctttacacaccatatcaacgcatcgttgattctttaaaggctcaatcactttccagctattgtttccatctccattcttgcgatatgcaaaaatgtcaccgtaactccaagcaactaagtaatctctgcttttttcatctacccacaaaaccgcagtgtctagtctattcgtaatattcatcggaaatccatcggttgattctagagacggaagaggaatcctctctcgagtaaacagattcaaaacgtggaaatcgttgttatagtctaacataaggaaccagctatcggactggccaaacaacgactcctagccatatcaaacctgagatctcttactatgtaggaactatagttacgaggatcatacaacttacatgaatcgttgtttctttcaacaaatacgttcggaaagaggatgatccatggagttgatggtcctccgatgca

SEQ ID NO: 49 - DNA, 1288 bp, Arabidopsis thaliana landsberg
cgaggttattgttctcggcaccggtctcaaggagtgtatcctcagcggtctcctttccgtcgatggtgtcaaggtctccttcctctctttccccgattcgtttttcgtttttcttctctcttatttttcaattgaacctttgaattcatgattgaatttcgcataattgctttgatccggattcaaaaaaacggatctcggtgagattagattagatctccccgattgtatgatctgagctcaggttttcgatcttgataatgatgatgagatttgattatctagtttgagcatggagatgattgaaaatgttttggggcttttacatatgtacattgacctcttaatgttcccgcgatctgattattggttttgtggatgtgacgagtaggtgcttcacatggacaggaatgactactatggtggagaatcaacttctcttaatctcaatcagctttggaagaagttcaggggagaagagaaggctcctgagcatttaggtgctagccgggattacaatgttgacatgatgcctaaggtattatagctagctgccatttgttttgtttttatgctaatcttatcaatgtcacttactaactcttgtctctcaatgccattgaccagtttatgatgggaaatggcaagcttgttcgtacccttattcatacagatgttacaaagtatttgtccttcaaagctgttgatggaagctatgttttcgtcaaaggaaaggtacacaaacttctcatttgatgtatttgttgctgatattttacaatatctttttgctgataactcttaaattgttgatgaaaattttcctgcaggttcaaaaggtgccagctactcctatggaggccctgaaatcttctctcatgggcatatttgagaaacgtcgagccggcaagtttttcagttttgttcaggaatacgatgagaaggacccaaaaacacacgatggaatggatttgaccagagttacaacaaaggaactgattgcgtaagcttgatgttctaatgccttctagagtttatggtgttactgactttcaagtgaggatatacgtggctaaccatttatgtgacacttttgcaggaaatatggtcttgatggcaacactattgactttattggtcacgcagtggcacttcacacgaatgaccaacatctcgatcaacccgcctttgatactgtaatgagaatgaaggtgaaatattgtcagacttatctttcttgttataacagttgtacattttgttctgaagcagctaagttgatattctt

SEQ ID NO: 50 - DNA, 5549 bp, Arabidopsis thaliana landsberg
  unsure (1)..(5549): unsure at all n locations
cattaatattacacatattcgggtacggatgacttttttctttaactcatgcaacaaaacatctagtcatcttccatctctgagtcatagggcattctcgtcatagtaccaggccatgggttcgtctccgtgaagataatgaagggcgttttagtcatttacgcacacatttgaatcttcttcattcttcgaatcaagctcgcgctctttctcctttagatcgcttagaatgacggaaatgctcatcaccggcgtcagaaggtgcaaccgaaggagatcgcttgtaccttgatggcttcctcttgaaatgtctgtcttcatcatcacttgaatcgtattccaccatctctctttctcttcgactgtgatgacgacgacccgatgaaactggggcgactgagctctctggaggcgctggagaagactttgatgtctttcgttgtttgccagaagattcctctggaaagcttatccgagtgaacacgttagacttattgttatcgtctatctctacagttggatccgatgatggcttttcggatctcttacgatgcttgcgatctgtctctctgggacggtcacggcggcggtcgtgttcggaatcgaggtcatggtgacgatcacgctcagatttcctgctggatgatcgaggaggagaggtgaaccttcgagatgactgacgctccggtgacaatctatccgatcgcctgcgacggtcgtaatcagacgaaatcggcggcggaggtccttgtctctgtttattcaagaacaaggccattattggtaaaataacagaaaagaaatttaaatcttgagcccaataagagatatattgggcccaacccatttatcttttactttactctaaatagcttatttaacgaagaaacaaagaaaagagaaagcaaacaaaggtttatactttatagcttcccagtaaaatcttaattttgcaggataaagagtgaccactactatccttacacgtggattacaaacgtgttttggtttcaaaatataaaaagacgtatttaatatagtcctgatttaatatgattttgatatcagtatttaacgtttactttaaaaataaagtagatcaaatatctacattttaatagataacaaaaatttaatattgtaacaaaaaatttcgtcaaaaaaaaaaaaaaaaaaaactatttaagtaaaatataatgttagaaaaataatattttataaggtcggcaatataaagccaactggtctgtttgggaccacgcttcatgtaagtctatagagccatattaacccgtacgataagatatactaccctgaaattaaaaacatttcctacgactttctacttaagtcttttgttccctacaaatttttctgtcttgaagaggccaaaaattatgggatcagtcgagcattacttgtgaccaaactgccaaggagaagactatgtggaaataactttcaattcatttcatttatgcatatattctatcgcaagtcaatacattttatggtgtcaattcaatttctacatctacctcattctaatcttaaatgtctctcctttgagttttacccctaaaccaaatcaactataaagcagacgcctatttagcaattgtggaatcaacccctttcttttttaacgtaaaaggatatgcagagagcgaaaaatatagaaataaaaagagagaaagagggtgctgagaaaacgtcatctcttgcaaacccaaaaccaattggccgagagagagagagagagagcgagagagaactgaggcaacaaaatgatacatacagattttggcttcacgggtgaggaagtgactgccgagttgttcattattctgctcttttcactgtccctgacgacattccctctgtaccacacaaaaacaaacaactagtcaacatgctgcagtatacatacataagcctgaaactagtgaatgcacagacagtgctttacccttccgatcgtcgaatctcgttttcacgctttcttttcatctcagttttcttagcttcaaattcttctctccccattataggatgctggagattcatacgattccccatctccgcaaggtccctgctcaagtcacatgtcctggttactaatagctataatgaagatacaaaatcacaaactatctatgaactgagagagcaagtctcagcttctcagtacctataaggtggtggtatattagggaacccaaagccctgtgcagcgaaaggatctggatgcatcacaccgccaaatccatagccaacaaaaggaggcatcgcaccaggaaaagggcctggaaacccattaaaaccatgatgaaagccattgaacccaggttgaacgccattgaacccatgttgaacgccgttgaagccgggttggaaaccattgaagtactgattaccgggacctgggcccatgggcatcatatagtcagggcctgctagatctggcaaaggaaaaggaagacaaacaatctgttaagcctctctatacagttaacatagtctgggaagaaagagcatgggtagtccacatcaaaataagaaaaacctaccggttccactcatccgaggtttcttcttcttcctttttcctgctgaagagcaaaagtatgcattattactttactgatgatactaatcgccaaacatcaatgtatattatataatgtgtaaacggtgatgctttctcttctttaaatgcataagtttctcgtgctaatgggacaatagccagtgattaccttgctccccagaagcaacctgctgcggcatttcttccttggggggctgcgtattcagttgtgaaactgctgcttccttgccatttgaggatccttgaatgtttgcagatgcatcaactggcttttccactttaactatttctgcagacgcccgaggagcacttgtgatctctgctatttctattgacggctttagagttgaagtctcattgttgttactaggagctggtttcttttcgcctccagatgcagcagatgtagtaggagatagaaccttgggaggtggacaccgtacagactccatatctagatttaatactcattagtttaccaatgatggtacacacaaatataaaagactgcgaatgagagtatgaaataccttggacttgacacatgctgccagcgttctcagcactactgttaccagactccaatatccggtttatagtatcccttagggttttgttaggtagaagatcatcagctaggacatgagttgctccacaaacacacattgactttgcaatgatgtgatctctaatacctgaattgtagataatgattacataaaaaggcgtttgtggaacagcaaaaggaatcagaagtattggcaatttgacaagagaactaacacttgtcacagtagctcttgaggcagcatttgcttgccagtgcagcatctctcatcacttctttacacaatgggcattttaattcaggaggaaattccccgactgatcgtgttgttgatgtcaatccctccatttccttctcaaacgcatccctagatttgtcaattgacataagtgatcaacattactaataatttatgtgaaggtactaacaaacaactcgccatgttaatttagtgacaacgtactcgtttggttttaaaactgctactgcgccacttggcaaggagtaagagccatttggggttgccatcagcatcgacttggggataccagtaggtggtttaactctcttaacatcaaagttaggattaccgtttgtggagcagtgttgaataaaatgtcctgagacagaaaatgatgttcagaacattcatttctcggtaataaccgtacacactcgagacattacttaaccaaattaaaaatatataaagattctctaagtcagtcataccagaaacattgcaccgatggcaaacatagcctggtggcggtgttgtcctctccattcctactcaaacaaatacaatcagtctctatatcttacatttcaaggaaagagcaaacaaaatatttggacaataataattaacagaacatccgagtctcaaagctaaatacttggggagactgaagcatataagtcaatcatatacagaaatataattaccaaaaccgcggccacccatccttccagccatacccctcccataacctctacccgggccaaaactatctgcaccttgtctgtaacatgaaagaaaaatacgaatgttatgcaaaatgtatgtcaagatctcatttagcatgctaatgtccatcagttcaagaagattacttactgatgccagtctagtgctggagtgtcaattaatgcctttagcttggtttcttcatcatcagctggtgcagaatcatgacataggttattagaatggactgctggggcatcaggaattgaatacaaatcattcccaaactcatcgaattcatcttcaacctataaggtagattaagttgtaaatcaatatatgtgtagaaggattccatgccaataaaaactgagaaagccaactcacgggagatgcatcagcagtaataacattgttcatatcagcttgaccgttttccactttatcctcgactctcggcctgcaaaatgtagtcatttacatcatgacacatgggaatctggtataatttcacacaactaataatgaaatgcgcagcttagagcgaaagaacgcaaagattgaacaactcagttgagaaattaggtattaaagttatatagaaattactcttctctggtaataattctgatgcgagggcgtccagggacccggcgaattagcacagaagtattttttggtattaacagtgcttcatccagatattctgaaattgcaaaaaaaaaaataagtatgaaggccaccacatatagcaactataccaacagagaatcgtagttaagggtttctttctaatgattcacaaccacaaccaatcaagaacagtagtctcagaagtaatcacatttaacatataagctaatacagtacgcaagaacttcacttttattttttttattcaactaacaaggaagtaccaggtacataacatccattttactgaagcagttagatactgaacaatccatggccagattaacagtgctaaatgtgattacttcggaagaaagccataaaccatggaaattttgacaaagcaagtaataaccatatattttgataagtgaatactgatcacaatcagaccagaatccaacctagataacaacaaaacacattgcacaatatcttctaggtgaataggataagaaggaggaagacaaaccttcattagtttgggcattagagatgacaatgtcaaggtctttaccacttcccaaatgcttagtttcgtaaattttttctttgagtaaaccaactgttataaaaggaccatccatggagatggtatcataatccctcgcactcttaaactngtaatatattgccattggcattaatctgataatgaataaaatacaatctgtttactaacttataaaacacaccagaatctactc

SEQ ID NO: 51 - DNA, 3190 bp, Arabidopsis thaliana landsberg
gcagttgagactgatctgcaagctggagcacactacaagtatgaagtgcgttcatactctccttccctcgcttttatcttatactagtttgcattttttacaaaatcatgatttctttctttgtaataacagttactttggatcatattggtggcctcatgtgcggctttggtgattcaatctctggctgctaatcttggtgttgtcacaggttaccacaaaaatccactcttttcttttagttttatgatccaagtttactaaattccgctacaggaaaacatttggctgagcaatgtagagccgagtactccaaagttccaaactttatgttatgggtcgttgctgaaattgcagtagttgcttgtgacataccggaaggtatcacacttgtttactcttttcagtgtgattcaatactaacctctctctgttgatactaattgccaaaatcggttttcttatatatatatatatatatagttatcggaacagcttttgctctgaacatgctctttagcataccggtgtggatcggtgttcttctgacaggcttaagtacgctgattcttctcgcacttcaaaaatacggggtattagtttcatctcttgttctcgttcacggtgcttatatgtaaggtgaattcttatgaatgtttggtataatacaggtgagaaagctggagttcttgatagcgtttcttgtgttcacaattgctatatgcttctttgttgagattcattactcaaagccagacccaggagaagtcctacatggtctctttgttcctcaacttaaaggaaatggtgcaactggtctcgcaatctctttgctcggagccatggttatgccgtaagctcactctctctcttcaccaccattcatcataagattctttgctgagaacaacatctgttctctgcaggcataatctcttcctccactcggccttggttctctcgaggaaaatccctcgttccgcttctggtatcaaggaagcttgcaggttttacttgatagaaagtggattggctctaatggtggcctttctcataaacgtctctgtaatatcagtaagcggggctgtttgtaatgcccccaacttaagccctgaagatcgagctaattgtgaggatttggacttaaacaaggcttcgtttctgctacgggtaaattgtttgcttccttgttgttctgtttcttttccataacatttaagtgatgtctttcctctgttttcaaacagaacgttgtgggaaaatggagctcaaagctatttgcaatcgcgcttcttgcttctggtcagagctcgacgataaccggaacttatgctggacaatatgtaatgcagggctttcttgatctcagactcgagccatggctcagaaacttactaacaagatgtttagctataatcccgagtctaattgttgctctcatcggtggttcagctggagctggaaagttaatcatcattgcctcggtactaaaatcatttctaactctagttatcatgtatacttatatatatgacttacttcatgaaatcaaatcatcatcttaaaacagatgatcttatcctttgagctcccgtttgcgttggttcctcttctcaaattcacaagttgcaaaaccaagatgggttcacatgtcaacccaatggcggtatgtaataatcaaacacattttcattcaaagatgagatactttgatcatctctgacttcatatatatgttccctttcttcacagattacagctttgacttgggtcattggtggtttaatcatgggaataaacatatactatctagtaagcagtttcatcaaactgcttatccacagtcatatgaagcttatcctcgtcgtcttctgtggaattcttgggttcgcaggcattgctctctatttagccgccatagcttaccttgtcttccggaaaaacagagtagccacttctcttcttatttcaagagactcacaaaatgtggagacacttccaagacaggacattgtcaacatgcagttaccatgtagagtatctacctccgatgttgactgagtcatcattaagcttaggattccaataaaattagatctaaaccaagttcataaaaacctttcgatagtgtactagaataaaggttatatgaatcggtttgcgtcttttctttaaccagatcttcgtaggaaacaaccttctaataacacatggcataataaaatcattgcttccattatcatatcatactcatgatgtttcatattctcaattaccaaaaaaatcagaaaagaacaatcagctatatagatatatgtaacgatataagattaaacaataattagagtgaaaccattcacaaagtctttttcttttcgatagactttataagaatcgttttgtctttttattttttaatcagtctcatagggtttgtataggaacaacgttaaaataacatcggataataaaaccattgcttccattatcgtataatacatatgcgtaacatattctcaattacaaccaaagaaagaaagaacaatcagctatatataatgatttaagatttaacaatactttagtcaaaaccaaaacgtatgtattacttaagaataaagcttttcatgtaggtatgaagagattctagggtcgtggatcgtgtcctaaggttcgatgatgacttcgttttggttcgaatcttgaggtagaggaagatgacctttctcttgcaagctcttgacagattcgtaaagagattgcttgatgggtttaaattccaagcctaagtcttttatcttttgggtagtaaacttgtatggcttagccctcggattcttctcgtccgaacacctagtaacattaaaacaaacaatacttttgttaatcagcagaatacgaaatgtgaaaaggatttcttgtatatcactttgaagtaacgtattaattattgaactaactaaaggagacacacaagtcatgaaactagtgaccaaatattggagtaggtgaagaaaaaacattcacacacccgtacgtgtttgtcaaatggaatttgacccaaacacgtgtactataagatcttgtaagatttcaacgtcagcagtaggtgacagatgacatggactttgtgatgtgagagttagtacacaccaatctcaccacaaccacaagtgctctgttttaaaac

SEQ ID NO: 52 - DNA, 1493 bp, Arabidopsis thaliana landsberg
tggaattagatcatctaaatgttataaattaatagtttagatttgtaaatgctagcttttcgaaacaaattgttacgaaaaaagtggtgattggttagactgtatttttataatacagctccaaaaaaacttaaaattctaattttgaaccaattaagctttaacttttctaaaacatctcatagcccaaaacaactttttttagtttttttaaatgtaactcttaaattttatacaacatatctttaagagtcttttctttctttcatattgaacctcaagaaacagagagctttgacgattaggatttatattgcctctatgtctagtgttgttcgaatcatcatctcattatttcataaaagctgcaccaaagattgcagaaagtataagtcttttaaccgacgaagataatagtgcaaaccaaaccatttggtgaatcagattaataatcttgggaaagaagaaacacatgagagattcctgaaacaatttgacataagagttcaaacttgcctcaaaatgaacgaacaaaagaatgaatgtcaatccagaaatggttagaagaatctcaatgagtgtctttcaagttgagaagctgattttctcttgaaaaccaagaacgacaacaacgaagacctgcaacattgcaacaaagactagtctacaaagacttttcttgttctcttactcggtgtcctactggcgaatggatttatgcccaccaagggtttgacaaaagttcacaataccataattcatgatttcttgtggcataagcaatccttaatatattatcacgtgaccctcacgtgaccaaaataactctgatcttataaatcatttcccttcgtcttcttctctctgttccttttcttgttttctcgagaaactcaagaaagaaaatcgccattgttgtcttttcctgtttttgctttcgttcccagccaaatgatggagaaagacgaagatatcgacaagaaattagatatgtaagtagcaaagtctcctctttagagtatatctatgctcttttccccatataagaattcttctacttcgtgcagaggctacgacgcagaggaatcatcacttaatatgatactcaaggtttttcaaaactttaaaatccccaaagaaaaaaacaaaacaaagcgtgaatctattttgatcgatcttgttttagttttcaagaatgtgatttttttgcagtctctgtggcaaattagcgttttcgcaagacagaacatagtacggcaaagcttcacaggctcatttcttaaacgttcttatggtatgatcatcactgctgattcactccgagaaaccaaggcaagtcattttttttttgtctctaaatcttttaagcgaacaagtctttcatgaaagtgaggctagaaacgtatttggttatcgcagggattattcgagaatcttacattcgaaaagatcgttcaaatcatcaggataagcttaaagatgccctgtataag

SEQ ID NO: 53 - DNA, 1374 bp, Arabidopsis thaliana landsberg
ttcgctgcttgccatattgaaagataattatgtaaggaaatagtaaaagttccatgacattattctgttttcaaatcctcaaattctcatatgtttcatggtgtacaggttcctttggtactcatccagaagatacacactcaaactttctcgttcgtcaatgtgcaactatttaacaggtaaataatacttgagaattacatctaatggtttctacacaccttatcatcgatactcgtcaaagtacaaaccttcctatggttgatatttctcaaattcctatggaagatataagccaagatcactagtgttttcttacttggttttttccttaacatcttacaatagccttctactgcgtaaagagtgttgtacattcagcaatggagaatttgtaaagtctgggcttgcagagctagaattgtggtgcggccaagtcaatgaagtaagttcctacctcacgttttccttccggaaaaagtttctttcggctcattatatcattctttgattttgcagtatgctgggccatcttgggatgaactgaaacacatcagacaagctgttgggttcctggtatgttttactcttgtttaatactaacttgtggaactcttgtttcttgaatcttcaaaaacgaatacttctcctctcgtaacttatcaggttatccaccagaagtacagagtatcatacgatgatatagtacatgatctttgcccggtaaagctccttcttagtttctagaaacacgtttttgcctagactccatacttaatggctttcttgtttcactttattacagatccttagtgtccaacaactttaccggatatgcacattatactgggacgactgctataacacccgaagtgtgtctcaagaggtaatatcgagcatgcgtgcgctcatgacagaagaatccaacgatgccgacagcaattccttcttgttggatgataattccaggtaactcgaatcatttcttaaagattaatatcagtagtagaaactaaaaccggtttattgttcgcagcattcccttctcaatagacgagatttcgaattcgatgcacgaaaaagactttgcgagtgtcaaaccggccaaagagctactggaaaacccagaattcgtattcttgcactagtgagaagctcggattctaaaaaagctcttcctctgtttctttttagtctgagtgggggaggggtgccttcttgaaccaaaaggaaagaagattacaaaagtgtaaatttttacttcttgtggggttgtttctttcttgcaaaacctctgtgatttctctctcaccaattcattcatttatttatttgaccccatttcaaagttttttctccattttagacccaaga

SEQ ID NO: 54 - DNA, 542 bp, Arabidopsis thaliana landsberg
cgcgcttttatctctctatgcatcaaaaacaggatcaataccggttgctaggagaaaatgtagccaagttacggattgatatgatgaaagaatagctctccacgttccgttcccagcttgaagagttcgctcgtaaacacaaggtcgttatatgttgaatcttatatatatattttgttgtggttgttgtggttgttgttgttttgtcatcgccttgatttcgtaataagaacatgtctttaataacatgttcctgaatttgaaacaattgtggtgaaaagaagcataattttttctttggttgcagaatgacattcgtaagaatcctgccttcagtgctcaattccatgaaatgtgtgctaacattggtgtggatcctcttgcttctaacaagggtttctgggctgagctcctccagattggtgactcctactatgaacttagcctgttcagccccactgaagaagatgcttctgatttttggttagctataaaatatatcgcgtacttttttctcttttttagaaattttctggaattcc

SEQ ID NO: 55 - DNA, 2925 bp, Arabidopsis thaliana landsberg
  unsure (1)..(2925): unsure at all n locations
ataccaattgctcatactccacatatataatagggaaaaaaaatttcgttcgtgatgtgcgtgggagccctgaaactagctacaagttattgttcgcttatctgcacattttaaggcctgtgaatcatgggacaataacggaagcggaattggatgcagatgacaggtttaagttcctattcatcgctttgggcgcaagcattgaagggtttaaggcaatgaggaaagctatagtgatcgatgcannnnnnnnnnnnnnnnnnnnnnnnnnnnnnnnnnnnnnnnnnnnnnnnnnnnntcctaatcatcatcattaccccattgcgtttggtgtaattgatagcgagaatcatgctagttggaactggtttttcataaagttgaattccattatacccgatgacccggaattggttttcataagggtcagacatggaagcatcatcaagggagtcgcggatgtgttcccgaaggcatcacatggacattgtgtatggcatttgtctcaaaacattaagaaaatgctggcatgtgcaaaaaagcaggtatggccaaatttatggaattagctcatatttatacagcgactgagttcaacattaggtatgcataatttaggagaatggatcgggcaattgggattgagaaatgggctaggtgctattttcagggagacaagtacaacatagatactagcaactccgcagagtcaatgaacgcagtgttttcagaagtaaggaagtaccatctgttaccgatgatagatgcgattttggagaagttttctgagtggttcaacacacatcgcaaagattccgcgtcttcatcgaacacaaggcaagtggtgcatgttgtggagaatatattacacacgcgctgtccaattggtgcaaagctaaatgcaactgaactaaacagcttccgacaagaatacaacgtaattggaattgatgtttttcttatttggtggacttggaaaggaatacttgttcttgcagagaatttgatatagacaagtacccgtgcgtccatgctatagctgcagccataaagcgatctaatatggattggaatagccgttcaatcttgaatgtaagtatctatggtctttgctcgaagtattacttgatcgagacgtgggcattggcatattacagaacgatttatatggtgccgcatcaggctcactggttctttcctcctgattatgtggagaaggttgcaaaaccgccggattacactccaaaaaaaggaaggaatcaagaaacccggtttccatccacaggtgagaagcgccgaaagaagacaaataacaaagctacgcgtggcatcaacttggagaggtggttgcagcctgaaaccaattatgattgacgttaactcgtcaactagtacaagaagttcaactacgataaagtctttgtgtgtaaatttgtgtttctcggaattgtcaaatattgttcgataggttcaattaagaacgatcctttgtttttaaatttgtgttttcggaacttttaagcatatttaagttttttagttcaacagaattgccaaacatagttcaacaggttcaactacgaaccagtcgttgtttggcaaacctagtacaacaggttcatctaggtcaactataaacacgggtggcatcccagtcaacgcgtcagttgaaataccaatcgtcgcgtcggttgacaggtggcactgcgagtaccaatcgtcgcgtcggttggaatattatttaagacaggattacaatcgattttacaccattcatatttcatcctatccaaaaaaagagcccaccccactaataaaggaagccgttgtttgtcaacatggatgatatcattctgtttccgaactttttccgactatcagtggatgggactatttgcgtttttgttgtgaatgtgttcaagaagtttgtggcaccggatgagttcgaactgggcgtcatattggcagatcaaacggtaatatattgcgaatatgtttaattttgtttctttcacataacttgcaggtatatagttaaaattatttggtgtagggtccccgttcccgaatcaaggctaccattcctcgtcgccttgcgtcattttactttgatcgaatacgagaatatgagtatgagtggataattaccactaatttctcggtccgaaacgacgctgagtctgtgagagcaacatcccatgactaccagatatggtttattgaacaaactattgttactaaagctttgaaaacggatgcactctcgttttggaattttactccttttgacaacatcatagagaagacggttaacaagaatgtgttggtcggtgagttattttaacaattttatagtattttctttgagaaattgtacgaatacttacttctattattatacacaagatgcggtaggtgcgattatttggtagagccgattgaccgaaggcatcgagggtgtgaagttttctttcaagataatgaatcaacagtaagtgcctccatcttaacttattataatgaaacttggtttctattttgggattagttcaaatggttcaaatgatatagtttaaacggttcacctattttagttcacatggtgcacctattctagttcaaatggttcaaatgctttagttcacatgttcacctactctagttcaaatggttcaaattgctatagttcacatggtgcacctactctagttcaaatggttcaaattgctatagttcacatggttcacttggtctattctgatggttcaagtgctatagttcaaatggttcagcagacctggttcagatagtcatgttcacaatttctgatcaagtaaataatttctatgaattgcagcaatgaagttctctattgtgaagcacacaatcaacaagctttggactttcaagctcactttcggagtc

SEQ ID NO: 56 - DNA, 4146 bp, Arabidopsis thaliana landsberg
gcaggttgagcgagctaacgggatgatactggaggcactcaggaaaaaggtcttcgataagaatgaaaaattcgcaggaaagtggataagggaattgccctatgtcgtttggagcctaagaacccaacctagccgagctctgcatggaaacacccctttcttcatggtctatgggtcggaggcagtgcttctcgctgatctcaagttcggggcaccaaggttgatcttcgaagacatagcagaagtcgaggccaccaggctggaggacattgatatactcgaagaagaacggctgaatgcggtaatccaatcagcacggtaccagcagactctaaggcgctatcatgacaaggctgtgcgacacggatccttctcagtaggagatctcatcctccgtcgaattctaacgggggaaggacggcacaagttatcgcccctatgggaaggacccttcatagtagcagaagtcactcggcccggatcatatcgcctcactcagatggatggcacagaagttgggactcctggaacatagaacacctcaggaagttttatccctagctgtatcgcaaaaagctatcgggacgacgatgtactccgtaaagtggaaatatgtcatcaataaaaaaggggtttcaaagatactcagtttgttcatgatatgacttgcattcttacttaactcggggtgaccactatgccctgctaacggagcaatcggcttaagtcggcaacgacttaaggcggtgcaacatcgtcgcgcttacttaacttggggtgaccactatgccctgctaacggagcaatcggcttaagtcgacaacgacttaagggggagcaacatgctcgcacttacttaactcggggtgaccactatgccctgctaacggagcaatcgacttaagtcggcaacgacttaaggcggtgcaacatgctcacgcttacttaactcggggtgaccactatgccctgctaacggagcaatcgacttaagtcggcaacgacttaaggcggtgcaacatgctcgtgcttacttaactcggggtgaccactatgccctgctaacggagcaatcggcttaagtcggcaatgacttaaggcggtgcaacatgctcgctgaaagggaattaggcttacacctagtccctaattaaattttggtggttgaattgcccaacacaaacaattggactaactagtttgctctagtatataagttatacaggtgtcaaaggctcacaacaagccaattaaaaagaccaaagttgggttcaaattagaaagctaaaggcaacccggatggcaccctggtctggcgcaccggactgtccgtggcacaccgaacagtgtccggtgcaccaggggactccgacttcaaactcttcactctcaagaatttccgaaggccactccgctataattcaccggactgtccggtgtatctgcgggacaacggctacctgcagcgcatttattgccgccaccgcgcatgaagtcaggcacgcccatgctggcgcaccggacactctacagtacatgtccggtgcccaccggacatccaggcgggcccagaagtcagagctccaacggtcagaacccaacggctttggtgacgtggctggcgcaccggacatgtccggtgtgcaccggactgtccggtgcaccatgcgacagacagccccaccaaacggctagttctggtggttggggctataaatacccccaactacccaccattcattgaaatccaagttttcacacttccaaccacttacaagagctaggcattcaattctagacacactcaagagatcaaatcctctccaaattccacacaacgccctagtgattagagagagagatttgcttgtgttctttcgagctcttgcgcttggattgctttcttccttcttgattctttcattgcgatcaaactcacttgtaattgaggcaagagacaccaatcttgtggtggtccttgtgggaacctttgtgttccaagtgattgagaagagaaagctcactcggtccgagggaccgtttgagagagggtaagggttgaaagagacccggcctttgtggcctcctcaacggggagtaggtttgcgagaaccgaacctcggtaaaacaaatccgcgtgtctcacttcattgttcgcttgcgatttgttttgcacctctctctcggactctattatatttctaacgctaacccggcttgtagttgtgattatttttaagaatttcagtttcaccctattcacccccctctaggcgactttcaattggtatcaaagcccggtgcttcattagagcctaaccgctcgaagtgatgtcgggagatcacgccaagaaggagatggagaccggcgaaaagccactacaagccacgggagcacttcatcggaagagtcccgcaccaacaggagggagaagaaaaagagctcctccaacaaagggaaggagaagaaatcttcttctcaccacaaagagaagaaggaaaaatcttcttcccacaagccgcatcggagtggggacaagcaaaagaggatgaggaaagtggtctactacgagaccgacacttcatcaacatcgacctccggctccgatgcgccctccgtaacttctaaacgccaagagcataagaagtttagtaagatcccctacactatcctcacatttctaaacatgcacctttactttccgtcccattaggcaaaccaccaacttttgatggtgaagattatgctaggtggagtgatttaatgcgatttcatctacctcactccacaaaagtatatgggatgttgttgagttttgtcacaggtaccatccgtaggggataaagactatgatgaggatgaggtggcccaaatcgagcacttcaactctcaagcaacaacaatactcttcgcctctttaagtagagaggagtataacaaagttcaagggttgaagagcgccaaggaggtttgggatgtgctcaaaaccgcgcacgagggagatgagctcacaaagatcaccaagcgggaaacgatcgagggggagctcggtcggttccggttcgcaaaggggaggagccacaacacatgtacaaccggctcaagaccttggtgatccaagtgcgcaacctcgggagcaaaaagtgggatgaccacgaggtggttaaggttattctaagatctcttattttccttaaccccactcaagttcaattaattcgtggtaatcctagatatactaaaatgacccccgaggaagttatcgagaattttgtaagttttgagtgcatgatcgaaggctcgaggaagatcaacgagcttgatgattcctccacatccgaagctcaacccgtcgcattcaaggcaacggaggaaaagaaggaggagtctacaccaagtcgacaaccaatagacgcctccaagcttgacaatgaggaaatggcgctcgtcatcaagagtttccgccaaatcctcaagcaaaggagagggaaagactacaagtcccgctccaagaagatttgctacaagtgtggtaagcctggtcactttatagctaaatgtccattatcaagtgatagtgacaggggcgacgacaagaagggcaagaggagagaaaagaagaggtaccacaagaagaagggcggcgatgcccatgtttgccgggagtgggactccgacaaaagctccaccgactcctcctccgacgaggacgccgcaaacatcgctgtcaccaaagggcttctcttccccaacgtcggccacaagtgcctcttggcaaaggatagcaagaagaagaagaaggtaaatctagatcctccactaagtatgcaacatctagtgatgaggctagctctagtgatgatgaggatgatttattcacactttttgccaatctaaacatgcaacaaaaggataaattaaatgaattaattagtgctattcatgagaaggatgaactcttggatagccaagaggacttccttattaaagaaaacaaaaagcatgttaaggttaaaaatgcttatgctctagaggtagaaaaatgtgaaaaattatctagtgagctaagcacttgccatgatgttatttccaaccttagaaatgaaaatgccaaattaattgctaaggttgagaaatcaaatgtt

SEQ ID NO: 57 - DNA, 1898 bp, Arabidopsis thaliana landsberg
cctggatcaggtggacggcggcttaggcccttccacaatcgatgcagcagctgcagctggagccaactgtatcgtcgccggaagttcagtgtttggagctccaaagcctgggaacgtcatatcccttttgcgggctagtgttgagaaagcacaaccctccacttaaggaagtgggagtgccctacctctaagagccaaggtcttaagctaatacttttttattctttgaaatggaataaatcttaaatcttagttacttgttatacaattgcaatgtgtctgagagcttttgccctagcgatgaaattccataagaaaatcaccggagatagaattttttgttaagaaattgtttattatgtagcagttacattttagtctatcagacttaattagataatccagacgatggtacaacgacgatgactcaagttccgaaaactcaaaattccaagagatgttaaactttggaattctgaaatcagcaacttcaacttcatatctcggaatgtgactatctatcataatcattgacaagactatccaatccatcattctagtcgggaagatagaaatagattgagaattttcgtttggtatcatcaaggccttgttggtatggtagtccaaggaccttgaaaccatcgcaagccattatatattgactttcatagcttctcatgaaaggcacatgtacttctttgccttggtgaaactcgttgtctttggttgaagacttgtcaaatttgtttttccatgctacagtgcgtttccataaacctgaacggtttcgcttttaacggatccacgaggaagaaggtctatgatgagaccattggtgtgatcgggagcacacttatgcagctcttgacgcacttgtacagccttcaaaacacaaccaaaaaccatgtcagagaggattattataaaactacaagccttatgtttaacaaatatctcaaaatcctaaaatattcttaaaacattataataaagttgagcaaaagtagccttaaaaaatttctccaacagatcctttaaggagggatcaaaggggagtgattgcagagattttggggccgcccttcttactagacagcgttaagcttgtcggagccaggactatcaaaatcgactatcgatttccatttcgttttcattgaaatcgcatctgcatcttcttcaatccaatctctgagctcgttatcaccaccaccaccgtctttcctctccggtaagttgtcttgggttaattttgttcatcgccgatgggaatatcagatttgagcattcatactctgttttaatcttcacagtaccgtttatgttctccaattcgagcttctgggatcattggattaatggaatctttgaaaatagtctgaatttgttatgcttaagtcttgtatttggtattttctcttagcccaaagtccaaatgataaatgggtcacgatttcttctttataaaaatctttggatcttcatagctttacaaaatcatatacttgcattgttatcagctctaggatcataaccaaataatttttatcagttttgttaactcagaaacttgtacaaagcttcgtagattcttctatggatacagatatgcatacaagcatgtactatgagtttatccttccttatagctttgctttttggagtcatccaagtgaaaacttgtgttttttcccccttaaatgttaaaaccacttaccacaaaatggttttacttagtagactaacaattgtttttttctctttagctgttccttgttgatcctgtttctgaacttaatctgtattcataagccttttgttcattggttacataattctttttgatggctgctctggcgttactttagataccggtgcggaagacttgtcccaaa

SEQ ID NO: 58 - DNA, 1025 bp, Arabidopsis thaliana landsberg
catgctatataaacgtgaccttggtgttgtttagagctcacaacattcttctactgtcgaatacaaaaccaaaaagctattcaacttaatacatgagatcgattagggtatagattattacggtggcgaatcctggccgtggagacctgtaggagaggcgttggtacaatggatgacttcgagacgaccaatggggtcgatcccatcgagagtttcgaagatatgggccttaaagaggatgttcttcgtggtttatacgagtacggttacgagaagccctcggccattcagcagagggcgatcatgccaattctccaagggcgagatgttattgctcaagctcagtccggtacgggaaagacctctatgattgctctctccgtctgccaagtcgttgacacttcgtctagagagtacgttttctcttcctcataccctaattccaattttaacttttctgccaagttatctccaaatttattctcatcttatttgttggtatttctgattgcagggttcaggccttgatattatccccaacaagagagctggcttcacaaacagataagacgatacaagctattggatcacacgccaatgtccaggcgcatgcatgcattggtgggaagagcctcggagaagacataaggaagctggagcatggtgtccatgttgtgtccggaacacctggtcgtgtctatgacatgataaagaggagaagtctaggcaccagagctattaaccttttgattcttgatgaatcagatgaaatgctgagcagaggattcaaggaacaaatctatgatgtttacagatatcttccacctgatattcaggtttgcttggtttctgcaactctacctcacgagattttggagatgacaagcaagtttatgacggatccggtgaagatacttgtgaagcgtgatgagttgacttttgagggaattaaaaacttttttatttctgtagagaaagaggagtggaaatttgagacactatggatctttacgacacacttatcc

SEQ ID NO: 59 - DNA, 2295 bp, Arabidopsis thaliana landsberg
ggcgcttatgtgacacctagacaaccgtctaacccgcctaaaattatatatacctcattttagtgtatttatccagtttttaactaagtttatatttatataaatagttataactgttcatataatgtttggtgataataggtttttttaagatcaattaatcctaaaacactatcttatcgttgtattattttaggtgtcaaatccaaatggatgtgatgcaaacagatgagatgtgatcagaaatcactaagtcaagctaagcaataacagttttggggttctaacagtcctaagcgaacatacaaaaaacagaaattataacagaattactaatatcactcgaccacaactggctgatgccagaagcaggatgtggtcgagtaacaggcaggaaacgagacaactgtacttgactgcacagtctgttgccatacactgggtgtggtcgagtaagttggtcgagtaattgcaagaactaagaaacaggcaatgagaacgattaagcgataacgataaaacagagaaatcagatagacgagaaattcataaggatggggtaatcgaatagagtggtatcctagcctattcgaatggttaacaagcgcaatcaagctatccctagacaacaggttcaactatagatcaattcactcccgtgatagaaatcctcaagtatagctagacacagacctaattcccattagcgatctctaactaagaaggcaataagaactgactgttaaagccaataaccgctctaaacggccaatcccttgggatagcgcaaaattgataataggtttttagtcaattatcctaaaacaccaatcatgtcgttgtagtattttaggttgtcaatccaaatgggtgtgatgctaacaatcaagatgtgatcagaagtcactaagtcaagccaagcataacagatttcgatgtgttctagcaatcctaagtgaacatgcagaaaacagaaaatcaaacagaaacagtaaaacactcgaccaacacagctctttgcatagcactgggtgaggtcgagtgacaggtcgagtaacagacagaaaatgaaacagggatactcgactgcacagtctgttgccagacaactgggtggtcgagtatcaggtcgagtaacagtaaagaattgcagaaactaagcaacggatgacgggatgcagtacacagcaatagagtaaacaataaagatcaatcagataaagaattcctaaggatgggataattgagtagtttcgtttcctcagtttacaggtgattgacatgctcaataaattaaccctagacaacaagttcattaaccaaatctaagtgccaccgcaacagagactctcaagctaacctagtcccagactcaatcaccattgacgagagccaacctaacaggcattacgaatcaacaagtaaaagccaaaacgctccctgcaaccaataccttggtacagggtcacgaatctctggaattagtggttcagacatttcatcgaacaccttttgggcgcggaaatgcctgggctcaaattccagttgatccgaaagcaataggcattaagaacaactaatccagaagggatctatcaatcaatactcaatcacctagcatactgagaattctacactactctaacccatcctcagaaacctattcactaatactcaaaacgatgaagtatttggacgggttaagaactgtactcgacccagggggtcgagtgagaggtcgagtgaatagctggagtcttcttttcttccttgtgctcgagtgtctggttgagtgcggaatgaagaaggctctaaagctagtcatcgagtatgcagtcaagtgttgtgatggcgatactcgacctctaggttgagtgatgaggtcgagtagtggtctggcagtgaaggtgaaggcactcgacctgggggtcgagtgatgtgatcgagtggtgttagaagatactcgacttccaggttgagtgaagaggtcgagtggtggtctgatgatggaggtgaagacactcgacctcatggtcgagtgaagtgatcgagtgatggtctggtgatggagatgagggcactcgacctcgtggtcgagtggtgaagtgaagtggtgatgtcctctggctggacctgggggtcgagtggtctcttgagatcctgaagctcctactcgacctcttggtcgagtggtttgtcgtgatcaggtccgcttcttccaaatagctcgtcaacagctccaaatcacctgaaatcaacgcaaatatgcaacatgcatgcaaaactatcctaaac

SEQ ID NO: 60 - DNA, 3265 bp, Arabidopsis thaliana landsberg
gcatttcctggattcttttttctaattcagcctgcaaaaacaaatggaagctaagaaacggagacgagagaacgtctagacaacagaggttactacaagtataatcttaatatatctcttacctggccttctgcagtcaagtaaaaatcgtctacggatatcgtcgctgacttcctgagatattcttgcaatgttagtataagaatcactatagttacatgagatataagatgcagcagagcaatgtacttttttgttgtcttgaaaagataatcaagtgcaaacacaagtgtagtcttgccacatccttgaggagcgctaaatccaatctgcatcgtcaaaacacatgtatcagattgatccacccatcagtgatttgagattatcataagggaagaaaaaaaacaatatttagtaccactaaaggaggtacatcatctccatctttaaacttggaattatgcaaagcaatctgatcttcgcaccaaataaaaacgggtatgtagtagtgccatagcctagctttctgaggaattgtaagctttaggctcattaagctgaaacagtctacaaagttgtgagccgtagagtaaccatttgtcaatagactggccaactctttgaggagtgataccaatcttgtttacgagaggacccgagcatatgaattcaaaaagatctgacaccgaagagacatccactgtgtttgttgttggtaacgccgagcaacgcttggacgtcccattagttgttgtagcataatcatgaaccattgaattgtcttgaatccaggagcagccacacgctacacacgtaattaaaaaaagaaggtcacaatctgaaaacctgaagttgcagagccaaaccaacacaatggaaacaatcaaacccttaacaacaacaacaacaacaacaacaacaacaacaagagaacaaaacaaccagagaacgtcgaggagagtaataaaacaatctcatgaggaaattctaaagcaattttgcataaaatttacgaaatagccaaacaatcatcaaaagaaaagaaaagcaaacctcaaaaattagaaggaagcgaggaaaagaaaagagattatatttggaggcgtttaccagcgaaagaggaatgggttcgaattggagaaagcttggaggataaataagaagaggaagggttaacgacatggtcgttaaatttgggggaagaaggagagaacgaacgtcttttgaaattaaaagaattgcaaattggattagaagagtgacacggaatcggataatctcggatataaatccgattattataatgctgaagagtcgacgatatcaaactactcccagatattgcgaccgccattctcgaccccttttctctcttgactctctgactctctcaagcagagcgacacatcagcaacgaggaagaagaagaccaactggataattttttattattggtttttcgtaaaacgaaaaagcaattcttgccacatactatgtgagggacaatttctgcgttggataatgtgtaattaatgctttgtctctctgtcaactgtaataaaaagataaaatattcgaagcagaccagatattgccttgaataaaccgggggaaaaatgtacattccactacaattaactcgtgttaccgacaagaacaagtccggtttgaaagaaccaaacctgtctacaactaaaccgaactaacaccgaatccggttacttggtaatgatgagagaccgtgggaagacactgttttatttgacagacagatgaatgtggaccatcagaaaaatgttactacagattcgtgtgtcatatcggttaggagatgaatagcttgtccggtagctctccagaactgaataccgccacggatttgaactgtaaattgccaaaaaaaaaaaaaaaactgttaaaccgaaacagaccagatttcttcattcggtttaagaaaaccaaactaagattaataattttttaataccttgtcctgtctatacttcatgcgtatagagtttaaggaacatcctttggtgttaagctgtaaatcttgcaaggcgtggacagatgctttgagatcggaggctttgtacgttgtgtaatgctcaagagttggattctgttcataaaataaagtaaacaagagtgagattcaagattcgctgtgtttcttaatgaagaagatagttggtcaattacagacccaagggtggcttgattggtttaatgtccacttggcaagaaaaacagccgaagcagcgatgatcgaaggaaggaacttcaagaaagggtagtccattaacgtcaattccgttaggtaattcgccagaaactccatttccagactttgattctgcagacaaattaccaacaaagtttcaatctttctgctacatgttttatgagcaatagatatatctgatctgataaaagaaaagcacattaccgggaaagaaacttgagctgctcgaagaaatctcctgcaaaaatgaatgaatactctgagtcaccaaagactaaaaagcaacaacacatgataaagcatttgcactgtctggtaagattacctgaggaatgtttttgaagtgggggtgtaaatttgaaagctaaaatgcttgagtacttggctctccatttccaggacctgatctcttgtataagtgttatccgtgatgaagcagaactcctcaatgcgtggcgcatggatttcctcatacttcctgcaagaactcttttagatgttgtgttcagaccagagcattatttgattttaggtggatgaggaacttacgaagcaatgagcatacaagtgatgccgagcagttggaagttgctgtctttgcacgtagtttccatggaggaaccagtctatgagatacactgtgaggtagagagtgtcagatgcaagtgtgtattcttcagagacctgtgattgaaatcagacttttgtgagaacccggaaaaggtcatagtagcttcaaaagttagcatcaaaagtagaactaaacactaacctccacaagccaatcaaccagaattccccgcatggactgggtgacatccttctgtattctctccataaagtccggaagtggtctgcgtttaagctgccagaagagaagtgacacagaagcacaagcaataaaactttcagtcctttggctcaccaagtttctttagagactatcaaagcctagggattaacactgggtcacgaaaattgtagtggaaatcaggggcatagaggcagcgcagtaaagga

SEQ ID NO: 61 - DNA, 9601 bp, Arabidopsis thaliana landsberg
tcacatttccagtagttgataattgacgcggtattagtgaaccacacattataattttattcagcgaagacccatatattaaaggttgggcttagtttccttaaaggccggcccattgatgacttacggagtcccgtgatacgtcacattctccatatgggttctttggcttttgttcatttcaatccgtggccagtttggtctttctcttcgtcgactcttttgctgaatgtgatttcgaagttttgtgtgaatgaatcaaaatcttcagataagtcggaatcaaacttttaatttaatttcagacagtatgacacatgtgacatgtcatgtctctcccctcaactcttgccatgtcttcgtctgtaagtttcctgagaatattctccattttcctgcaatccaatcttctctcttctccaatgataatggcccagcagatctcggatacgctcttcttgcttaatcgaaattgaaattaaaataaaataacattttagtgctaacaaatgtttcattacactatgttcttctaggaatctagttcaaaacttcatttttttctcttaaacttgcttctaggtctgtaatgctaattttattgttttgtaatggaaaggatggtctaaccgacacatatataaaggagtggggcttggtttagttagcggcccattgggcttcctgacttggttgttttgggtagataataaattcgatgccgttattgattaactattcaaaaaatggatcagacaatactctctgtcttgtcttatcttgtcgtccctccaattttggacaagtcttttccccaaagtcaactgtgctgccattgatcattctctttatatttttctgggaatttttgctctgaactagtgttatttgctctaaatcggtgaagaaagcagtttgctattaaatctctctactaaatcatctgtttggttcctgatccaatgtcccctgtcgagatcactggcgctgatgccgtggtgacgcctcctatgcgtggaagagtaccacttccaccaccgcctcctcctcctatgcgtagaagtgcaccatcacctcctcctatgagtggaagagtaccaccaccaccacctccacctccgatgtttgatcccaagggtgcaggaagagttatttgttgtctacgtccaggtcaaaacaagtcttctctgaagcgatttcaatgtggtaaactaacaaatgcctgggaagagttacagagacatggagaagcacaaacgtatttagactaactttttatgtttgcgttcctttttttcttctgcaccaggcagatataattgccgagttattagacaattatatcctcatattattcctttttctttccatgatagtgccccagaatttgatctatcagagatagaggcccttttctctgctgcagtacaaaaccaggctgataaatctggaagtcgacgagaagcttttgaggcaaacccctataaacttcaactggtaatgtgaaatttatattcttcttttaacatttggttattactattgtcatatagctataaaaacaagcgactgaaaagcatgttatgaaatgccagaaatctgagtaattttaataagaatgtctctataagcatgttattaatttgaaattgccaacactctgtcttgtagtctgttcaaagtcttctgcaactgtgctttcacaagtctatgcgattgatcattctgttagagtaaaattcttttagaggtaatggaaaaagtgtttaagtgttttgagagagttttttaggaaatagaacttttattactttgctttaaacttgaatacaacttcacaacattgcaacatttgagagggggaggaggtatttatagcctccaaactacaaaatatctaaaatattttaatcctaagtctagagagttcttacataagatctaaattacattattcaaattatctagattattctattagagtatctagatttttatgtttaaggaggtggaagatgattctagaaaatttctagaatcttttaaggaggtggaaatgatgatatttctagagaaaactctagaacttggatttggccataattaattattggataattgatccaataattaaacttgattcaaaatcaagtttaactttcaacaccccctcttaaacttgattttgctactccaagcaaactcctcatcttgataaagtcttcacgcttgagaggcttggtaaaaatatcggctacttgatcatgtgtcttcacatactccaattgcacgtccttcttgctaacacactctctaatgtagtgatagcgtgtgtcaatgtgtttacttcgatcatggaagaccgggttcttcgccaaagctattgccgacttgttgtccacaaagatcttcgttggttcctcttgtggtaagcttaactccttcaagaggtttcttaaccaaatagcatggcatacacatgacgtagccgctacatactccgcttcacaagtggatagagtgacaattggttgtttcttcgacatccatgtgaaagccgtgtctccaatgtaaaacacaaaaccacttgtactctttcggtcatctacgtctccaccccaatcgctatcgctatatccaacaagcttgtaatcactagtagttgaataatgtaagccaaagtttacggtacctttgatatagcgaagaatccttttgccgctttgaaatgagttgttgttggatgctccatgtaacgactaacaactccgaccgcatataaaatatcgggccttgtgcatgttaagtatctcaagcttccaaccaagctcttaaaggttgttggatccactccttccccttcttctttctttgatagtttgattccgcattccattggtgtacaaacgggatttgagtcatccatcttgaacttcttaagtacctccttagcatagccttcttgagttatgaatattccattgtcttcttgttttacttcaattccgagatagtaagacatcaatccaatgtccgtcatctcgaactccttcgtcatctctttcttgaattcttcgaacatgcttggattgttacccgtgaatatcaaatcatctacatataagcatgcgatcaatatatcttctttttgaattttgatatagagtgcatgctcatatggacacttgatgaaatctttctccttgaaatacttgtcaattcgagtattccaagctcttggggcttgttttaatccataaagcgccttttttagcctcaagactttgtcttcttcacctttgactatgtagccttgtggttgctcaatgtaaacttcttcttcaagatctccatttaagaaggccgacttgacatccatttgatgtatcttccacttgttttgagccgctagtgagatgattagtctaaccgtttctagacgagcaacgggagcaaatacctcgtcatagtcaattccggctctttgactataaccttttgcaaccaatcttgctttgtatctttccacttctcctttagagtttttctttgctttatacacccacttcacgccaattgccttgtgtccatttggaagtgaagttaacttccatgtgtcattcttttgtattgatttgatctcttcatccatggcatttctccaagtcttcttttcaatggcttcttggaaatccatgggttcgcactccgcaaataaacaaaataaggtaaggttttcttgattttcggttacttcatagagctcttgtatacttcttaaacgcggagtcctttcactcgaactttcttctatttgagaacttgttggtgaagttggtggtgtagtaggctcttcacttggtggctcctctcttgttggctccggctcatcttcttcaaaatgtggaaagaagttataatcttcttcatttgagttccaatcccattctccttcttcatcgaacactatatttcgactaataattgtcttcttcgtatcgggattatagagcttgtagcctttggagttgttatcataaccaatgaagatatacttctcacttttgtcatctagtttgctccgcttctcatccggtacatgagcatgagcaatacttcgaaagactcttaaatgagaaacaccgggctttcttccgctccaagcttcttgtggtgtttttccggagacactttttgttggagatcgatttaatagataaaccgcacacgcgaccgcttccgcccacaactcttttggtagtctcttacttttgagcatgctccttgccatctcaagaattgttctattctttctttccgctacaccattttgttgaggggatcttggcaccgttaattgtcttcgaatgccgttgtcttcacaatacttaagaaactccttggatgtaaattctcctccacggtcggatctcatggttttgatcacaagaccactctccttctcaacatgggctttaaactttttgaaaatttcgaacacctcggatttttctttcaaaaaatatacccatgtttttcttgaaaaatcatcaataaagagaaggaagtaattacttttaccaagtgatttcggcttgatcggaccacacacatcggtgtgtattagctccaacggtttttgtgctcttgaacttgactcctttggaaagctcattttgaattgctttccaagtagacatccttcacacacttgattctgatgaatcccctaatgattttggtaaaaatcattaagttaaggtggatacacatcttgtcatatgatcaaatggtttcgcgaaaaatcaataatcagacaacaagatgtgcgaactcgatattttacacgactctctttaccaattctgccccgaattacacttaaaacgactcaacagcttaacgttggcttgccacgcattacttgactgtaaaactctcactcttaccgaacttggccgtaacctgccaaccaaagcgagaacaaaacataacatcaaacgaatcgaccgattgttaggtaatcgtcacctccacaaagagcgactcgctgtataccgttggcatgctagctttatctgttcgggcaatacgatgcccattgtacttgttgactggtctgatattcgtgagcaaaaacgacttatggtattgcgagcttcagtcgcactacacggtcgttctgttactctttatgagaaagcgttcccgctttcagagcaatgttcaaagaaagctcatgaccaatttctagccgaccttgcgagcattctaccgagtaacaccacaccgctcattgtcagtgatgctggctttaaagtgccatggtataaatccgttgagaagctgggttggtactggttaagtcgagtaagaggaaaagtaccatatgcagacctaggagcggaaaactggaaacctatcagcaacttacatgatatgtcatctagtcactcaaagactttaggctataagaggctgactaaaagcaatccaatctcatgccaaattctattgtataaatctcgctctaaaggccgaaaaaatcagcgctcgacacggactcattgtcaccacccgtcacctaaaatctactcagcgtcggcaaaggagccatggattctagcaactaacttacctgttgaaattcgaacacccaaacaacttgttaatatctattcgaagcgaatgcagattgaagaaaccttccgagacttgaaaagtcctgcctacggactaggcctacgccatagccgaacgagcagctcagagcgttttgatatcatgctgctaatcgccctgatgcttcaactaacatgttggcttgcgggcgttcatgctcagaaacaaggttgggacaagcacttccaggctaacacagtcagaaatcgaaacgtactctcaacagttcgcttaggcatggaagttttgcggcattctggctacacaataacaagggaagacttactcgtggctgcaaccctactagctcaaaatttattcacacatggttacgctttggggaaattatgaggggatctctcagtgaagtgtatccgttggctgctcgtgggatttgtacttaccatctctataagaacattttggtaaaattcaaaagaaaagatttgttccctctggtcaaaaaagcggcaaggtgttataggctgaatgattttactaacgcgttcaacgagattgaagagcttgatcctctactacatgcatacctccaaagagcgggtgttgaaatgtgggcgcgtgctcatttccccggtgataaatacaatttaatgactacgaatatagcggaatcaatgaacagagcactgtcacaagccaaaaatcttcccatagttcgactgttagaagcgataagacagatgatgactaaatggtttgctgaatggagagatgatgcgagcaaacagcatactcagctcacacgtggtgttgagaaactcttacaggtaactcagctgtaactagtgcataactcagtcgtcgaataacgataaccccgtcataacgagaataactcagccataacgagaataactcagctataaagagaataactcagtcataacttttttgttttgtttcttgtctcttctctttaatagacccgcgtcaactcgtcaagactactggatgtacaaacgattgatgcttcccgcgttcaagtagcttatggagcatctttgcatgttgttaatgtggatgaaaaacaatgcacatgccgtcttttcgacaaagagaaattaccatgcatccatgcaatcgcagctgcagagcatttgggtgtgtctcgtatatccctgtgcagtccttattataagagcagtcatttggtcaatgcgtacgctggtgcaatcatgccttcagatacagaagtccctgttcctcaaattgtaattgaccaaccgtgtttgcctccgattgttgcgaaccagccaggcaggcccaagaaactaaggatgaaatcagcactagaagtcgccgttgagactaaacgccctaggaaggaacacgcatgttctcgatgtaaagaaacagggcacaatgttaaaacttgccgtgcatagtactgtttgtactctgtatgtgtcttctttcccttgtttggcaacagtggtatgtatttcggtcattttacatgttatggccgagttatataattagggaagtcgaaaggttcggtcattttacatgttatggccgagttatataattagggaagtggaaaggttcggtcattttacatgttacggccgagttgagttcattttacctgttacggctgagttatagataaactatgttaacttacgactgagttatattcgtattatgttatttagtgtctgagttatttaattataatacggctgagttatcaaactgaattttgaaggcaaagacaaaatgaagttcccagaaatagttgtttgaaggatacataggaggaatgaaaagtaaacaatggtaataacccgattccttccatcttgcattactcgaggaccatttttaactcttgcacttcttcgatattggggtcgacagtcacatctgatatcccggcataattttggatcttcacgtgtttggggccagtatgatacctgaagatcttccaccatgtgagtgcaacatatatattgtcaataacaatactgtcattgcgaaatgatcgaaatttcctatgcaagtcaaccgccaattcgccaagagcctcacatttcaacctctccttactgaaacatataaaacagtcttacacttaagctaactcaagaaaaatacatgatgaaaagaaagaaatttagaagtaaagaaacaaaagaaattatactatttgtccataatctcgaaggtaagtctgaatccgtccatctcccaaccatcttctgtaatatttctcagacatccgacctcgacgagtgcaccaaccaaatctgggagtatgaaataaagattaaaagcaggcatgtgatttgtgaaagtatgaaatttgcattagatacgtattacttaccgaccaaattttcagtatgagcggtgtcttcaataatgtagtcaaaaggtgtgaatctgttaaataatacattttcccttgggtcggaatgatttagctcagttgcattcatgaactcaatcatgtatttgtgggttgttgttcggacaaaaccacagttttcgataacaccaaaagttcttatttctttccactgattctcttcaagcatgttgtagtaacgttgagaaaaccgacttccgattatagcttcaatttggataccctatgaaaacaacattggagggtgagttatatagggaataagacaagcagaaggttaagtatgccttgtatcacgagtgaagatcccattacccactcatcgacaaagacgacccgtagtttgaatgagttatttgtgataaacgagacgtacttcctaagaaccataacacaaatcgtccagcaagttatgcaaggattcaagtcgcggaggccgtcgtaacccatggtgaaattccgagtcgttgaaaattaaagaaatattttgaactcgttagcttctgtttgtgcgagtttagccttctggtgtttatgggagaagccgtttttataggtgtattaaaccgctggtaattgggccggatataaccgtacctcgggtagtcagtaaatcgaattgaacttcatgtttttattgacaactcagccataatgtgatttaaatcagccataacaaggacgatttatcgccaaactcagccgtaacacgcaacctttcgtcttccttgacttgtcttttttaataatttttgacaactcagccgtaaaattgttacatgtcttgtgtgtaactcagccgtaacgaatatattttgccgccaaacacagccgtagcacggaaactttttcccgccaaaacacggaacctttcgcattcctttacctgtcctttttaataattcttgacaactcagccgtataatagttacatgtcttgggtataactcagccgtaacaatatattttgccgccaaactcagccgtagtacggaaatttttcccgccgaacgaacagacacggaacctttcgcattcctctacctgtcttttcttttctatatatcagttacttgaactcatcatttagacgtctcatcctcacatctttacgacatggtgcctcacattgacggacagtttctaagagatgtcaaagccgtgctcaccgctcctgatcgtgcagatctcccagttctaaaccctggattgggtacatgggtcgacaaaaccactgttgcgtggttcaaattcaatcaccaactagctgtcacgattggtgatatactccagcgcaactttcaccatgcgtggccgacgtaccggatgattcccgttgttttcaaggcaaggtggtttttcctcctcacggtaaacatcgagtttttatataaagcacttcctgtaaaccgtaaagcaaattcttactatttgttctctttgtagcgtatgcacacctgggattcaaggcacacgctgacggtgtggacgcagtttaatttggtggctagaacgttg

SEQ ID NO: 62 - DNA, 3400 bp, Arabidopsis thaliana landsberg
ggagctagagacgcatctcgtcgttgcatttcccatggcggtggacgtagatgccataaacctgattgccagaagggagctgaaggtaaaacagtgtactgtaaagcccacggaggtggtcgcagatgtgaatatcttggatgcaccaaaggcgcagaaggcagtactgatttttgtatagctcatggaggtggtcgaagatgcaaccatgaagattgcacacgatctgcttggggaagaacagaattctgtgtcaagcacggtggaggagcgagatgcaaaacatacggctgcggaaaaagcgctagtggtcctttgccattctgccgagcccatggtggtggtaaaaaatgcagccatgaagattgcacaggatttgctaggggaagatcaggactctgtctcatgcacggtgggggaaagagatgccaaagagagaactgcactaaaagcgctgaaggtctttcgggactctgcatatcccatggtggtggtcggcgatgtcaatctattggatgcacaaaaggagcgaaagggagcaaaatgttctgcaaagcatgcataactaaaaggcctctaacgattgatggaggaggaaatatgggaggggtaacaacaggtgatgccttgaactatctcaaagctgtgaaggacaagtttgaagacagtgagaaatatgacactttccttgaagtcttgaatgactgtaaacatcaggggtactctcttctatctttccattatgtctctcttcttacagcaggaaatatattaattttttgtggtgactcatgttggatgtagagttgacactagtggcgtcatagcccgattaaaagatttgttcaagggccatgacgacttacttttgggttttaatacctacttgtcaaaggagtaccaaataaccattctgcccgaggatgatttccctatcgattttcttgacaaggttgaggtatgtatataatgtagtaaacccgatacctatttcatcatgatcaggtttaagattcatctacaatttttttctcggtgccttttgatcaggtagacttggttattttagataggtctttcctattttcttttaatagggggatttagttttcaactcaaggtaactagccggtttcccttctattgctcttctttatcttgactctgtatctaagcttaccaagtcggatgtgtgcttggatttgttttcccggttcttgttttaactcgatatgtaacaatgtgcagggaccttatgaaatgacatatcagcaagctcaaacagttcaagccaatgccaatatgcaacctcaaactgagtacccttcttcctctgcggttcaatcattttcatcgggtgaacctcagatccccacctcagctcctgattcttcactactagctaaacagtaatacctcaggtttaactatcatcgagcacatgtcacaacatcctctaaatgttgacaaacaagttaatgatggctataactggcaaaagtatgggcaaaagaaagttaaaggcagcaagtttcctttaatctattacaagtgcacatatctaggatgtccttccaagaagaaggttgagagatctcttgatggacaagtagcagaaatcgtctacaaagatcgacacaatcacgaacctcctaaccaaggaaaagatggtagcaccacatatctaagtgggagttcgacacacatcaattgcatgagctctgaattgacagcatcacagtttagctccaacaagactaagatagagcaacaggaagcaacaagtctagctacgacaatagagtacatgtctgaggcaagtgacaatgaagaagacagtaatggagaaactagtgagggagagaaagatgaagacgagcctgaaccaaagagaaggtaaagttataagctttgttgatgattgataatccatatttttggttttttgagtggagagatcatggaatctgcagaattacagaagttcaggtttcggaactagctgatgcttcagatagaaccgtgagagagcctagggttattttccaaacaacgagtgaagttgataatttagatgatggatataggtggcggaaatatggacagaaagttgttaaagggaatccttatccaaggtaatacacaaaaaaatcatcgatcggtatacctattaaactctttgaatagcggaaatcggtgatcaatatagctttatgtctcaaaacattcttgctaatattctctttttgacccttaggttttcctcctctaaagattatgatgtcgtaatcagatacggaagagcagatataagcaatgaggatttcattagccatcttcgtgcttccctctgccggagagggatttctgtctatgaagaatttaatgaagtggatgcacttccaaaatgtagggttttgattatagtattaacaagcacatatgtcccttcgaacctcttaaacattcttgaacaccaacatacagaggatcgagtggtttatccaattttctacagactatcaccatatgattttgtctgtaacagcaagaattatgagagattttatctccaagatgagccaaaaaaatggcaagctgctttgaaggaaataactcagatgcctggctacacattgacagataagtacgtgatccctgggttctaaatgtagaaagtctttggttttagagaattgaataaatttttatttggcaaagtaaggctatagaagattagaagtttattatactatcctctctttcgtctgatgtttgtattgtctactttattcttaaaatctcgcaggtctgaatctgaacttatagatgagattgtaagagatgctttaaaggtgctatgttctgctgataaggtgaacatgattgggatggatatgcaagtagaggagattttgtcactgctatgcattgagtcccttgatgttcgcagcattggtatatggggtacagttggtataggaaaaacaaccattgctgaagagatctttcgcaaaatctctgtccaatatgagacctgtgtcgtccttaaggacctccacaaagaagttgaggtaaaaggtcacgatgctgtgagagagaattttctgtctgaagttttagaggtagaacctcatgttatccggatatctgacattaaaacaagcttcttgagaagtcggcttcagcgtaaaaggatccttgttattcttgacgatgtgaatgattacagagatgttgacacctttttggggacgcttaactattttggtccacgaagcaaaattatcatgacctcttgaaatggacgtgttttcgtactatgttaaagcgatcatgtctatgaggttaagccattagatattcctgagtgtctactacttcttgatcgtgggacatg

SEQ ID NO: 63 - DNA, 485 bp, Arabidopsis thaliana landsberg
  unsure (1)..(485): unsure at all n locations
gatgcaatgagaaatctgtgtgaactacatacctcggggataaacaataannnnnnnnnnnnnnnnnnnnatttgaaacctcttacttttgatgtaaagaccggttatcttcctcttctcaagaagatcaactaagcttgtgaaattttcaattctccaactgaactttcccatgtatccatttccagtcccattcttagtaaagctactgaactctttgataacatcaaatgaggtgctaaagacagccttgtcatcgagtaaataccccgcgtccgggttcacaaagtcagacatcttcatgtaatcgttccatcccaatcctgtattgtccccactcttattatcagcagcaaacctcccataagactctttattcatgttagtgcaaccatgcttctgattcanagctgacatgctaaataaacaccaactgctcttggtcgataaaacactctttcggtatctgtactggtcaacacatg

SEQ ID NO: 64 - DNA, 2119 bp, Arabidopsis thaliana landsberg
aataatggcactctacatttgcaacaatcttgtcttcgtcatctcttcaaaaactttgctcaggatattgaatatgcagtaaaacagaccacatatgaaggaagagaatattgtagaaaaaaaacagtgagttgataaagcaaccagtacttactctgattgttggcctctactcttagatttgcgttcctgaaaattagtgaaattcataatcagaaatgaagcggatattttgagagtgaaaagaaagatatgaggtccttttatgttggattacaaatatatacttaagactatgcaatctctactgctcaaactaacttaacaattttttaagctaaagcagtcaagtgcaaagaaattaatcaactaccttaagttcatatctccagcgccatctttcttgagcctcctcgcaagaaagtggctctccaatgaaaaaacagatactacgtttgttctgctcttggacagcagtccgggttacccgtttaccctttctcttggttgatttcgttggattattcagatccagtgaaacgattccctcattacccccagaggagagggcagatccacttttgacttgtgtcaaattatctccatttaaatattcaatagaagacggttcatcactgtcagagagatagatcacagtagaatttacatgcatttcccgagtttttcccttatcagcagcaccacaagcactagttttaccctgaagtaaagactccattgcatcttgctccactaacgcagtcgtcatagttaatccattactagcaccatttttgctaattttcaaagagctagtgtgaatatcatccgtatttaggccagaagatctgggttttcctaacgttctgtccctacaaacatttacagttttcttgatgcaacccgaaggaaaaactaatagctcttgcttggatgaaactaggccatcaccttcacatttcttcatagcctcacaacagtgatcattcttactaatttgcaccagcctctcagttcccctcacctgttctgcaccacataatgctgggccacaatcttttcttctgttcaaagtttctgtgttgccagtttcaacagttccagatagccttgtagatcttcgaaatgagcaagatgccagagacatcccttttcctttagacttgcctagattttctactccctcattctccgttcccttcatgaatctttgagatctcctcattcgtttattgcttccgagattctgtttagaactattgatgcttgaagatgataatgtatcactgtcaactttcctcttggctggatcttgcaatcttgatctaccttcagcaacgttgttcttatattggcactcggaaatgatttccatctccaggctcttggcaattacagctatgtctctgcatcaatttttaacataaaatccccatttcaaggatgatttcccaagcaaaaaaaacaataacaaatgctgtgaagcttttacttacttgaatgccaatccatcagaatctgagctttccttctgcatcaacccaaaaaaaaagaacgacgattatactttccaatctctaactaagctgcattgcattgtgtggctactaacaagaacaaacgactaaccttatcgagagcactattactctttctcttcctcgacccaaactttccagtcaccggaaccgagcatacactgtcaaaatttccatccaccgccctaaatctcggcgacctccgaagctgacaaccgttcgtcaaagtaagcagcggctgtgacttaccacgagaggaattcctctgcgaaactcccccttcggtaaccggaaccgagcaaacattgtcgaaatttgcatgcaccggcctaaatctcggcgacctccgaagctgacaaccgttcgtcaacataagcagcggctgtgacttaccacgagatgacttcctctgcgaaactctcccttctcctccgttctcttcaggcgaattacaattaagcgtcgtggatctcctcaaactcatctctccgttgtcggggagctttatgagttctctagtagaggacggagcagcttcttcaggattgggccaccagaggccaggagagagccattccggt

SEQ ID NO: 65 - DNA, 495 bp, Arabidopsis thaliana landsberg
gggtattttgcctttcgaagagagttgctccgtcgaggaattcaggtacggtacctttgaaaatgaccgagtctttttttacagtcccctgagtgatgcagagtactatctaaattgttctttctttatattcccccctgaaggtggtgctagctgctaacgagctgccagctatcaacgatgtaacatatactgagcttacagatatcgtgtcgcaggtgatgaatgatgtaattcttgatattaactaattcatgaaaagtgaatctgatttattagacttaatctaccagttaaaggatggaaatggccaattgataggcgttgatacttcaaagcttctgattgcaaattcagggaacgatttagcggtaagacattagaaactccagagacagaaatgggtttattcattagaattcttaaggtttttttctttttccctctcgaaaatttgtttcaggttattgatctctcaagagtatcgcacgagct

SEQ ID NO: 66 - DNA, 1139 bp, Arabidopsis thaliana landsberg
  unsure (1)..(1139): unsure at all n locations
ctaaaacgcaaaaataagatacacacttaacaaagtaagactctagaaacagatcaaagaacactgtggaaatggatctatatatatacctgccaacaacttgagctagggttttgatgtagtaatcaataatctcgtctctagagagatttccatgacaacaaaccaatgctcgaaatcacaaccatcaagcaaaatcgtatcctttggtggccgattcgaccagttagggctcggatcattcagcgacgggaagtaacctgcgtagacatacacctagctagagatacaccggcacggaccaacgctgagaatccagcaacgagagaacgtgaacgattcaacaacgaagacgcagatcgagaaacagtaggggaattggcgagaggagatgacgaagagaaggaacgagtgaacagtgaggaaaaggatttagctggccggtgaaggatggaacgagaaatcggcattggaagatgataaaaatggagaggttttaatgaaaatggaaaaacccttatcataaatggggttagatggatcttttaaatttcaaggatattatgtaaaactaaaaattgtagtacatatcatttctattttacattattttcaaagtcgtcccattgttatttcaattgacatgagaaacccatttgtcacgaaatcatcataaacaaccatatgttgaattcttctctttcgtcgaggttagtagagaacatatctggttgctcagtgggagtgacattaaaaacgtcgtctatgtattgtagattaggtatttcaatgatacctagttgaggatctctcaaatagcttataatctttggtaggacaagatcctccatattcgtatgcaaatggacattggcaaagttatgtggtagctcatattcccgttctgctaaggccatctttttgtgctcttcagagcaataccgagattcaggtgcgtagacacatgtacaagaccagtacgcgaaggccttatctttatgcacataatgcataacacgaagattgacaacacccattgcagaaacctgctaatacacattgttaggtctagagaaagaaactctctctcgcaactttgaagattttgtttgctctttggattgtccagantagtttca

SEQ ID NO: 67 - DNA, 1892 bp, Arabidopsis thaliana landsberg
actaaaagaaagtagataaaataaagacttgggcctctccttgtattctttattgctgacttggtttaatgtaaaaattaatttattacaaagaataagcccttagctaaatcttgttaggtaagattttgtttgagataatatttgcatattttttgggaccaaattttatctatacaattctagagtagtaccattaaatagtgtcggtactcggtagagaatcgtatcggctctaaacaagtttcttggtatcattattcattcatttgtctcctttcctagtctttttcggggaccaatacaaataaatacaaattattctcattctttcttttttttgtttagtaaatatttcaatttgggtttaagtagaaaaatcaacatcagacagctattccacactttggctcaaaaacttaatttctttcaaacaaaattatagattatgaagttgagtattaagattaaacttagagaagtaattaactcaccaagtagccacgaaaagcggattgaatcttcatagctgctttatactcttgagaccaccgacgattactccgactgatttgttttaccgacgagtttctaccaccattggtgagtctcacgacttccgccgccgcacgagcagcagcgagtgcggcttcagccactgcagctgtagcagccgcgacggctatcgcatgcttgtcggcgtttaagacatcttcatccccacgtctcttgcttgaatgagaagacgaatcattctcgggatgtgaggatctagtagcgaagctccatcttcgtctgttcggtgttgccttttcttgcttcttacttccgaacagtcttccaaagaaacccatacttagttcattgtatgaactgaactcttgtcggaattttctacggttgagattttttttgttgttctttttgtttttgacaagtacaaaaagaaaagaagagacaattgggaatggagaagctaaagtgtgatacatatagagtaacctttttaatacggaccataggtcatgcgcgttgattacacgcgtcacaagattgcatcctttgactcttttagtcaataggtcagtggttccggtctactccaaaccaaatctctggtttggttcaaacttcaaaccaacgattcctttttacatcatttgattttgtcaatgtgaatctctctggtagtttttacttttgaaatctggtttaaaatttgaattgagttttgcctgaagttgcatatgttaacctaacacgcctattgtaaaagcaagactacaatgatgccaattatagaaaatattccgtaataatggtgaaaacgatattcaatagatctgtcataagtattgaacaaaccaaattcaaaacaaaacactaaatagtgtatttctcattattttattttattcgtcttgtcgtttgcagaccaaactccccaaatcctcggaactgaatgttgttcaactaggcacttatgcctgcacagttcacaaaacataagtccaaaaaatcatgagaacaaatataaaacaaacactattgatggaataatttataaaaatctagtaaaaaaggttttaatcgatggatcatcttaccacaatcaaaagaggggaggttacaaagagaggtaagtgtggtggctgctcgaagagcgttacatagacaatctttgttagttgcttggagggcagcgcagcaatttgagttcgcggcaggattgaccgcaccgggcagaagcagcggcgcgcacacctgcacattgctcagttcgtctctgcactgctgggctagaaccgtaggtccggtggcaagaaacatggctaggagaatagcagcaagggactttagagatccattctaattagatactatattgtttg

SEQ ID NO: 68 - DNA, 785 bp, Arabidopsis thaliana landsberg
ccataagcccatttaatctaaccaaaagtcaatatatctttttttctttacggccaaatatcttattaatataagaagagtttgctacatgctttggttaacccaggagattacatatggtgattcctgaattctagcgtatttgtagcttctttaaaatttggttttcatttaggaggcaaaattaaatttgttccctcgttccacttggagcgccctcgttccacttggagcgcgatcgttccacttggagcgccctcgttccacttggagcgcaaatttgagtaatctttaaaacacaaataaaaagttaaaaacgctaaaaataaaaataaaaaatcatacacatatggtgaaattgaaaattttcttttgatatccagtccaattgcagcgcaaattgagtatttttttataaatataatctagttttcggatggtaaaatttttaatttatcgaaaaactgttttggattcagatatcttgattttaatgatcacatattcaatatagatctgcaaatatatcaaagattgttttacgtgtttttgtaaatttattaatagaattcatataaaacaaatttctagtttaccccaattgttgattttgcgtttgcctcattgattcacaagctacttaataatgttagttcaaaagaaggctaactaacctcgatgcaatgtcgaaatcaaatatgagaatcaagaacttatttcctttgaaatttcaaatttgtgaaaaatttgaaaaactattatgcactcaattgttattatggatt

SEQ ID NO: 69 - DNA, 1281 bp, Arabidopsis thaliana landsberg
ctaaaagactctataatgggtaataacaaacgtatacactagtggttaaaatattacttgtcaatccatgaattaaatattttcatggatacggtcgtagggaaataaatctttccgtcagtcctaaaaagcctaaattattgggatacactataatctgaaaatcttaaatcacacgtaaatcaaacgtatttacccccacatggagcttaatcccaatctattaaattcaggtggcgatcgttcattggttcttgtctccagaatcccaaaggactcgtttccgagtataaaaatacgttcctcggtacaaagtactaaccaaaaacagaaccgaaacagaaaatggcgggaaaatcctttacgactccggcgattatgctcgccatgcttctccttatttcaccggagatttacgccggtcacgactaccgcgacgctctccgcaagagcatcctcttcttcgaaggtcaacgctccggcaaagttccaccagatcaacgccttaaatggcgccgtgactccgccttacgcgacggttcttccgccggcgtggatttaacgggagggtactacgacgctggagacaacgtaaaattcggattcccgatggcgttcacgacgacaatgatgtcatggagcgtcatagatttcggtaaaacaatgggaccggagcttgaaaacgccgtgaaagctatcaaatggggaacggattatctcatgaaagcgactcagattcccgacgtcgtctttgtccaagtcggagacgcttactccgatcataattgttgggaacgccccgaggacatggacacactacgaaccgtttataaaatcgataaagaccatcctggttctgaagtcgccggagaaaccgccgccgcactagcagccgcatcaatcgtgtttgaaaaacgcgatccaatatactccaaaatgctcctggaccgagcaacaagggtacttttctttaaagtttctttaatttcgtctttttgaaatgatagggaaaaaaatcgtgattttgtcaaaaaagtgttaacaattggttatatactttgcttgtgtgataaatattctcttcagtagtttctaataatgtttggttccgtactttcgtgacccacatgcattagtttagacctactatgaagtatgaactactttgtttttgttagaaacgtatgaactatttcacattacatcactgttacgaagttttgacttgtgtatattcgacatctaaaaaactaaactaattttatggaaaatgtgaatgga

SEQ ID NO: 70 - DNA, 1382 bp, Arabidopsis thaliana landsberg
ttaacactataaagctttaaaaaactttacaaggcttttattaagagtttttaaaaatgtacaagcatttttacaagcatttttttggctgagaaaaaatttgttacgagaaaatattttgggaggaacgtttttttttacggaaaagaaagtttggcagaaattttctttttggcgggaaaaaattttagtttccaattacatgttcttattagatgagggtaatttgttcactctgttcaagggaaagggtacttttaaaaatatagaacagaaaagagtattgttgcaaaaaggtagtaaaaaaatggtagttttgcaagtctccccataataataaatcctttttcatgccctttttatgatgacccttttcaactttatccttttttaaaacaattttcatttctaccctctctaaatttttaattaccattttatccctatttggaaattgttttacgttaacaaaatgaaatattaatatttttcgcctaaaattttcgaaaaaaatattctgccaaaaaaattttctcaaaagtatttttcccgcaaaaaaaaagctcatctgcaaccagctcgacagttgttgggttcgacgagagaatgttgctacactcagaagtatgatcttgttaccgttatatgttatgttttcctgagaaacctctagtatctgttgacatctctacgttattatctccaaatattttcttcatgcaagtgtttgtattttaatatttgctgatggcatgcttaaaaagtttgaagtgaagtcacatccacatccagagagacctgatcgtcttcgagctatagctgctagtcttgacacagctggtatgttgtcaggagaatatcagtatgtttcattttacaatatcatactggtgggagtaattttggtactcaccacatttgaatttttttgcaggtgttttccctggaagatgcttgcctattaatgcaggcgaaatcacgaaacaagaactccagatggtgagctgctacattactgtcttcgagacaattctaatcttttgttcattgcagtacttttgcaagcaattccataactggtttctatttgtcaattttgaggtccacacttaagagcatgttgatactacaagccagcttctctattggtttgaattttaaaccatttgttactttctttttttgtgtcaccgtgcatacccttgcttgttaacctgactcttcaaacttgaatcgaaatttcctttaccttagctgctcctgatttatatccttttgctcttaatcccgttcttttaccacttcctgattcttactgcatccattttcttgtactcgccacgtagctttttgatattgtttaattgcatttgacttgtgaa

SEQ ID NO: 71 - DNA, 567 bp, Arabidopsis thaliana landsberg
  unsure (1)..(567): unsure at all n locations
gaagttttatttttagaaaagtttttttttgtttgaaatacctcagtgatttgagttatgattttttacatgttacgttggttatttatagatgtcaaaaaaaattagggagggaatgtcaaggcgaattgcgagggatttgctaggaacttagctttattgctaggactttgcgagggaagtccacctaccaaccaaatcgataagattatttaaaacatgctcacctaactcgccaagacttgcacgtcacaaatattgctacagaataactacgcatcgcaatttgcgaggttttaatgatttccgcaaccccctcgcaaatttgcgatgcttttccgtgaaatccggttttccacgcaatttcggtgtaaaattctcgcaaatttgcgagggagttgtcctcttccctcgcaaacctctcgcagntctgtagcaatttgcgagggatatttgtcatcgtaaatttccctcgcanatcgactgttttcttgtagtttgtggttgactcattgaatagagcttgaggaaggttacaaaaaaaatgaatcattgatagcatgctca

SEQ ID NO: 72 - DNA, 10738 bp, Arabidopsis thaliana landsberg
atgcgcgatctctgttataccggcgaaaaccgcataggggccaagcgaatccagaagggttctaacctaatcttgaccacctaactaacctagagattaccctaatctaatccatcctcaagaaccctaatcactactcaagcaacattctcaagaacacaaacccaaaaattactgaaatcataccataatgtagatctaaacaagctaaacaactttacttaaacaactaaatggaaaaacgaaatagattaagagtaattaaggtttcaagattcataaacacaaagaaagactgaaagataaaagctagatcctttggacaaaccccaaagtgatctatttatagtaaaatgttgaaaccctagattcactagacgacaagagacttgaggcggtttgggcgaatacttgatcttggggatggagtaaagagggtgctgcagagtctgcgcttttgtgtctatgctccgagtgatcaattgatcgagtagatgattcttcctctcctatccgtatgctcagatgtctggttgagtggagaatgaggaggatctgaagacgctttgatagctcaacaagtcttgtagtttggtcacccttggtcgagtaaatgggtcgagtagaggatcgagtaggaggggcgagtagatcaatttgctgcttcatccgaggctgccttgatcgagcaagaaggtcgagtgaattgctgcctcctctatggctgcctggatcgagtgaatggatcgagtagaatgctctactgcttccctcctggttggatagagtagagggtcgagtagagtccttttaagcgccttctacacctgaaaacacaccaaaatatgcaatgtgtatgcaagatgatcctaaatgcctaagtgtgcaaaataagctaagatggtgcaaaatgatatgatacaatgagcaaatgcaaagctaaatgatgataaatacacacataaatgagtaaaatacagagttatcagtgaataagggaagagcttgcacaataggtagtgatgctcaaaacaaggtcctcaaaacgctcaatatggtccattggctgctcatgagataagccatggaaaggatgctggccaagtaaagcaaagtagctaggcttcagctcataatcgttcctctaaaagggtgagatacaatcgctgatcgattagcatagaacaggtcaggcctgttaaaattcccaagagtacgacgtggttccacagctggaggaatagctgcaggaatctggtgttggtgtcgatcgacacctctgttgtttcgttcgacaccaatcgcgtcttcattgtgctcccaaaggtgtcgatctataccttagttgtgttgatcgacaacgagccctgctgcgttccggcagctaattgcgcattgaggcgcgcttgatcctcattgacgacctcaagtaggatgagtccatgatcatccaatatatgaccagcctcattctaggcttgcccatcctcatctctcaaaactccttctgcatcaactctgatgactctgtcaaccattgctaatctttgagtttttcggttggtgtgattaagttttcccaagtctaaaacagacaagttgatcagctctttctgttgtgtgctccttgtttacctaggcatacacctgaaacacagaaaagaagaaaacaaaaaacgcgtgagtaccaaaatagaagtaaaaactagacgaaatctctaaacgaaactcaatggtgattcccaagaactttggcaacagcgtcaaatttgataaggttctctggaatttgtcttctgtaaggcaggctttggagtgtagtttgatgaactctagttccctgtaaacctgtttccattgaagttgccctgtggctgtccaaacgtcctgtagccctgaccatctatgtaaaagattccctcttcagactcagttttaggctcaatagtctcatcctcaactacaaagtggacatgcttctttcctgtaagcaagttatgaactgaatataagttggcattaacctctgccatttggttgtctgaaacagctccaacaatcttcttcctctcaaaattggcattcttggtattgttgctacgagcaagtttctctatcagagtagtagcatcagctagataacgtgtattgaagttatcattgctcgttgcatctagagccatcgggtatctccaatcaactcctctgaaaaaggtaccaagaagttgtacctcactaaaaccatgatgttggcagttccgctgatacttcttgaaacgaacccaagcggctttgaaaacctcagctggaccttgtgtgaaggtagacagcttgtttctcagctcctcagacataacaacatcatataaattgttcaagaaagctctcttgatgcttctccaagtcttgaggaaacctgctttgagttgtttcagccaagaagcagcttccccagcaagtgaataagggaagagcttgcaaagtagctagtccgctgagactccattagctttgatgctcagaacaaggtccttaaagcgctcgatatggtccattggctgctcatgagataagccatgtcaaggatgctggctaactaaagcgaagtagccaggcttcagctcataatcgttcctctggaagggtgggggtacgatcgctgatcgattagcatagaacaggttaggcctgttgaaatccccgagagtacgacgtgattccgcaattggaggaatagctgtagaaatctagggttggtgtcgatcgacacctcatgttgtgtcgttcgacactaatcatgtcttcatcctgctctcgaaggtgtcgatcgacacccctgttgtatcgatcgacagcgagccctgctgcgtatctggcagctaattgcgcattgaggcgcccttaatcctcattggcgtccttaggtaggatgagtccatgatcatccaatctctgactagcctcattgtaggcttgcccatcctcatctctcaaaactccttttgcatcacctcagatgactttgtcagccattgttaatttctgagtttttcggttggtgcgttcaagttttcccaagttcagaactgacaagttgataagctccttctgttttgtgctccttgtttgcctaggcatacacctaaacacacagaaaaagaagaaaacaagaaacgtgtgagtaataaaatagaagtaaaaactagatgaaatctctaaacaaaactcaatgatgattcccaaaaacttcggcaacggcgccaaatttgatatggttcaaattacctagaactactctcttaaataagaggtcaattgcagtattttaggattgaattcacggagttcttttgtttaaacagtgagttaaatgtggagattaagctagcagggtagtagtgaaaataaaagagaacaaagtaaaaagctagcagattgattgtgttgtaaacaatttattaaagagctaggaacagggtattctcaggaaactattggttagtagatctaatgaaagctaggttgttatcgaaccaatcttaaactcaaactctaattatggaataaccggtgggcgtgccgcgaaactccctatatctatagctaataataaccggagaagccgagaaactatcaacctaaatatgcattcttaacgagttcaattgttcatcttagtaaataggccgattcttattacacacttataaaccagactcatcaaataataaatataactacagatacctatggcgggcatatttattgtctggattcaagatctagttaattactctagatctagcattaagcataattaaagatgaagaattctatagataacctagcaaagggggcaatctaccaaaccatatgaatccctaatgagaaaccctattcctaacaagcagactactcagacatattgaatgaagcaaacaacatgattaagtgtgaaagcataaacacagtaaatagagaaggggaaagaagggatctcttcactgtatatagatctgaatgaaactctgaataacaatggatgaatagcttatgtctcttacaatagggttttgcaaagaacttgataaaagacttgataaaagaaacctaggtctaaaaacaatatatatagaccctaaaaacgtccagggactaataatgtaaatagggaaatcttctggggcaaacttgagcttctgggaactcgaaagcgtctagggtttttgttgggccgaaactggtgtcgatcgacaccaaaagtgtatcggtcgacactcctcgctgattcctgaaccaaaatcggccttagcttcctttttcttagcttttgctccaaaatgtctccttatctccattgttgtcccattgcatagaatacctgaaaatacactaaaaagtctcgagaaatattataaagactcaaactcctatgcctaaaacttagataaaattggtgaaaatcgggttatatcatttggtatttgtggtgatgtggaatacttgatggaattggccaatcttgaacattcatgagctgctaatgtgggggatacaaagaggagggctgccaactccttgcacccttcaaggttcatttttgtgttgatgattcagagaaaggagaggaggtcttggttacataactttcaaagttagggatgtcaagtatactcttgatatttgccatcttgataccatttttgggtttccaagtggagaaggaatatgccaagactatgatcaagaagagctgaaatctctttggaagacaatcgccggtccgaagcccttctcgccaaccaagagcaagagttcttcaattcgaaatcccatgattagatacctccaccaatgcatcgccaacaccctctttgcaaagaaagccaccagatttgttggtgaagaggagctatgcatgatagatcaatctttggtcttcattctaagagagacaacagatggggaaaagatggtgggtgatagagcggacacttcgctgagtgttgttcttttggatcacctattaagctacaaggagtatgctgcaaccatccatcgctcgagaattcgcgggagtctttgtgttggtggtctcttaacgccaatactgggagctgtggggatggaatttggaacctctgacatgttccccaagttcattgacctcgactatctcaaggggaaagattttcttgagaaaacaactttggcggatcgctatctcttcaagttcaaccatccgaagctttgaccttctcttttacccctaccatgcgagaaccggaatttggtgaagataaggcccaacatcaatttcatgccttgaacatcgacattggagtagctcaagaagatgaaccagaatatagtcaagctgactatgagcaacaagagtattttactcaagctgactatgagcagcaaatcgagtttgagcaacataacgatcaaccggaacaagggaccagcgaacaagagcaagctcattatgaagaaggtgttaaccaaggaggagatgagatagctgaagttcacaagaagctcagtgtgattgaagagcttggaaccttcatagcaaaacaatgaagggtttcaagaaaaagatgagaacaatgaagaagtcactcaagagtatggctgctttactcaaggacttccagagcaagccaaggccaccgtctcccacccccaaagtaagaagaagtggttcaacgagctcagctgcaaggagacctgaaaggatcgatcaaccctgagcttcatcttttgagcctcgggaaatgatcttcgagttgagagagccaaggagtaggcagagacgagctttcacacgcgcgatcgatagaacgagcaaaaccctcccgcctcaacttcagcccctgcctatactcaagagaatatggacgataaagtctccatctacttcacctgatcagtgaggtcacaccacctcaaccattgtacataccattagctttttctttttctttttgtgttttgtgttttggtcttgaattctctttcagatttttattacacaagggactgtgtaatttaagattgagggagggttcaagacatgtttaacattgtgttctctttttcttatttcaaattttgcatcatttaaggcatagaaaaaaccataaaaatttgaaaattttcagaaaatgatttcacaaaaacagagtgtcatgtagattccatctcattttaggattgtatctagtgtggttgcatttaggattgaacatttgcataggggataataatgatttcaaaccgttaaacatgttttgattcaatgaagtaagttcaatgcccaggttgttagttctttgttgcataaccgattgtatctctaacgtaagaccgcaccctgctttgaatttacaacttgactatactgctttgattcaaaacttgcttagctgatgccattccctatctaaacctgaactgaatttggaattatcatgtctatacattgtttgtgaactcttggctaccatatacatacttggattatcttattcacttcaccaccctctgttaatccaagtagctgactatcatttttagaggagtttcccatacccttagcctagccttatttcaagccaaaaatcatatgtgtgtgattgtgaggtcttttttgattgagcttggtataacttgttaggtatgagccgacaaaagcagtctttcatgtagacctagcccacgctttttgggttggctaggactaggtggagacttgtatttgggattgggattgtgtatggattgaatgagaatgagaatgagaatgataagaaaagaaaaaaaagagagtaagagtttagagttctaaagggggatacaacagtgttagtctagtaaagggtttggaattcaaagaagttaggcattgtgattcaaagaaaagggtaaagcgccctctatgctaagattagaagaaaagtcttaagtttgtcaaagtataaaaccaaacccgctagactcttgaatcatttttaaagaagaaccccttagaacttgaaccaaaaagaaagaaagaatgaggaaaagggtagagttaggacatctatgggacatggatcattttctgagctatcatactatatatcattgggtagatgggagtatattcttgtatgtgtccattgggttttacctttagcattctgctaaagctcaatcttttctctgagagtcccctgttactcgaccaaattattagagggaccatttttgtctcttagcctaagcccgaaaccaagtgagttcataaccatagcattgcttgatccactgttcgtgcttaatgaatgttaaagggaattggttgatgtgaatgcttgaatatattaaggcaggttgttaggttacattgtgacgagtatggctaacgtttttgagcaatgtctatcatcttgcaacctagaattcgctacctggacattgagcttacccattttataggcatgcttcggttttgaatccccaccttcaaacctctccttcaacataagattttttgtttgcttgacggcaagcaagagataagtttgggggagttgataacactgtattttactcattttaggtgtatgtttattaccatttagctttgcattgcaccattttagcttgttttgcatacttaggcatctaggatcatcttgcattcgcattgcatgttttggtgtgttttcaggtgcaaaaggagcttaaaaggactctacttgatccattcactcgatccaggcagctacagaagaggcatcattctactcgacctcttcactcgatctaggcagctacaaaagaggcatcattctactcgacccctttactcgatccaggatgctacaaaggaagctacagtttactcgaccctcctcctcgatcaaggcaacctcagatgaagcagcagtccaaaagacgatcatagacgtccagcgtccaaaagacgttcaaatggatgcctgatctatgaattccagaaatttgtaggctatagaccaagagattggctagtatgtttattggctttggtagtttgttgcttaaaccatgttttgctatgtttcatcaacgagagttgagattaggaagtggtagagttatgggggtctctgtcacgagagtgggagtggattgactcggttcttgaatctatcgtctagggtatctacctttgacctgttagccacctgttgaaccctaaagttgcccttatcaatgaatccatccttaggacttctattcttcttagatttatttgtattcacccattgattgcacttttatttacctgttatttgtgtcacctgttgattgcatttttaatttttaaatttgttgcctgttggttctactcgacccaatgatcgagtagggcttttaagtttttatttctgttgttcgaatcctgacctacgattgttactagaaaccaaccatcattatgatctggcttgacttagttgcttctgtacacatcttgattcctagcaataacagtggactgaattgacaccccctatagctgtattgacttgttagtgtttaaggggaattgaactgaacctcactccagaaaaataagtaggcctaaaaaacctatttatcattaagaccgaaagttatgatgagaatgttctaattggtacgtattttctaaattctctatcattagtttaactcaaaccagggagtgttatggattttaatattaacaaagtattctttacaatggcagacatattaggtcaagtggtgaatgtgagaaaagtggatgacattatggctcaaaacaaaccaaacaaaaaactagagtttcaaataagagatgctaggcaagtagaatattgttttcatataatttttgattcataataactatatctttaaccaagtagtattgaaattgtttgttactataatcaagcaatgagcgtttgtcttgtactttgtggggtgtgtttgctgagaaagtatttagtggtttaaaaagtataaagcatgatgagaagacagtggttctgatacgctatgctaaaatcaataattttaaaggtaatcagtcattgctgttctgttaaaatgtctaaagtataaataatggatgtatatgtgcatgtcttagttaacatatattgtctaattctgttaactaggtgaaattagtattacaagtgcttttgatgtttcggaagtcataatcaatccagttcatgttcctgaggttgaactgttcgtgaaatcgtaagtgcaaaatatattttgaccttctttgttttgtttaaattcacaaacatgttaaccagacaaatgcttatttgcagactcccaagtgatggtcttgctctcactattcaagataattatgtgaatcgtgacttaattaaggtgaaataagataatttttttgattatcctgccaaaacgattgttgatttacttcatgtgagagacgtaagtatatttccactaattcctaaattactgtgtttagtttaagtacctataattgtgattgtattgtaaatcaggttgggcaatggagaatacttggttccatttatgccattgataccgattggggatggttctattttggatgtcctaaatgtaacagaaaaactgagctggttaaagaatcaaccagtactggtaagatggtcaagacacctatgaaacctaagttctggtgtgacaaatgtcaagagagcatcactaatgtggaggcaaggtaataatgttgtctgatactcttttatcttgaacaatataacaaaattgtttctattggtatacagaaaatataaaggtttataagtgtatattaattatatatgtacaatacattttactccaggtacaagcttgaggttcgtgtaatggaccagacaactgaaattaaactcatggtgtttgaaaataatgcaaccaaacttattgggaaaacttttgaagagttagtggatggacaatatgaagaggtattaaatatatactgtcattcaagtattagctatatgtctaagatagaatgaagagtactaacgtaagacatgtgtatagattgaggatcctacgatcatacctgatgtcatcacaaatttgtgtggaaagacattccattttctggtcagtgttgagaaagccaatatttatggtggtaaagatatttacaaagtaacaaaagtacattttggaacagacatagcctaagaagaatcaggtttgcttaaagacactcaatatgatccatcaacaattgggtctgaggaacctgtatgatcatattcaccttaatacaattcaaactgcttatgaagtgttttgtattgatataacaaattatatttctcaatttttattgtatagggtcaattgatgtgaactaatagcagcaagaactgttctgatgataaaaacactgaactatttactccttcatctaagcgttgttcagctgagttgtctgatatggctgatcaatcgagtaccactaagaagttatgctctagggttaagtcagaaaatggagatgatgagattggaaccaatgtgatactaaaaaatgctgataaggttaaagttatttcagatgatgttggatgtctactgatagaaggagttgttaaagaccttgagtcacagacctgtaaaggtaaaggataaaccaaagtgaagacataaagatacaaggaataaagttagt

SEQ ID NO: 73 - DNA, 2303 bp, Arabidopsis thaliana landsberg
aaacagaataaaaaatgtgcatagtacataacttgagatacagagtagatatagaacatatcatttataactaggtgttgtactatatatctcttaatggttgatcaaaaattgtgatgtgtcatgtgatcaggtaagtatcaatatctatatagtattaagtaattcgcattcacaatcaattaaaatttaaaagcaatgcatctgtttaattagattcttgctatacaaaaaaaaaatctttcttctttgttggattcttgctatttatagatgcctggaaaaaagattctttctattttctacaaaatggacattggtagaaagttcaatggaaaatcaatgttgttgacgatacgagacgaggtttttataaacaaaactcgtggatgtttatcttcacttcttcaggggcttgcaatattgtttgtatattgattgcgtgggacaatcaaagtgaaaaatatgttcaatgtttttgatctgcaattttcattttctcaaagcattatcacatcatgaagagaggattaattgatgactcatatcattaagaatgaaatgatcagatatttttcaagtacttcaactaattaatgctgatttacatagatactatatcgcctctacttctgatcactaaagatcagaagaccaaaaagaagcaaagtttaaatctttttcttagatattaagctttcataagattagaatttagaaaccattgagacaagaccaacaagagtttgtgagtaccgctgtcaatgttctcgtgggaattagattgcaaggaagagcagagtctgttgaatcaccttcaagatcatttgaacatggagaagactctgagccatggatcgccacagtaacctctttccctccacaggaatttgttgagctctttaaaagtgcaaaggatgtagacgttgtcctcgagcaagggctttgactagtagttgattcatctaatagagcaatatttctgaaagcaattcaccaatctcatacattttccctctaacatgaacaattggtaaatttgcatattactccaagacaagtttcaaggttataaggttccacataagtcacagtgctcaaaagttgcttgtccttgagaatctgttcaactcgaagactaacaaagatcccaaaatctactgatcaaaagttgcttgccctttggggtcttcgctcttttatgccctaccacagtctccatccgattcctctgtttcttcctctgatactaagatgtaagatgcaaacttcttcactcctgtaggactaacaccatccaaattgtgaagaccttgaggaacgcttaaaacacacatgaagaacaagacaatcctttatccaaggaacaaacaaaacaatatgccacttgacactcaggtcagcttccagttccacgtaagaccttcctttgcagccagagactttcgggcaataacaaagaaggagagttatcaacgcgctaacaggggcgcgtgggtttcagatcctctctttgtcgaccaccaaggtccaccattagcatctgcaccgtacaaaacgtataagctccgattagattcaccgaatcacacaatcttcaaaatctcttccttccatgattccgttatcgtaaagatttgtcctttatccaaattttaggattttgaattcttcttctttccgattaccggattccaatggcgccttttgttgaagtctgtaggtataagccattaccgctttcattgagctctctctgtacatgcccttgccgttcctctccaaggaaatatcttattcttcctcaattctctgaaaagtacccgaaaccattgttgtctcattctcgctttactccgatttctgttaaccggagagttatcacggccgttgctcgagctgaatcaaatcaaattggtgacgatgccaactcaaaggaggtaactttactcctctttctcttgatgtgttagcttagtagtacgaataatcgttcttgtggattgctatgtgatgctgagaaacttatcatggcattgctgtaactattgtctgtttaggaacacaacatagatcaagaattgcaaaatgttgaagaagattcgagtttagatgatcagaagcaaaaatctagaagccagtttaagaaaagagtaactttcggtctaggaattggattgtctgtaggaggtatagtattagctggaggatgggtattcacagtagcagtagcagctgcggttcttctaagtgccccggaatatctcgagctggtgagaagtaaggaattgctcagggaatga

SEQ ID NO: 74 - DNA, 645 bp, Arabidopsis thaliana landsberg
gggtcaaccggtaaaagcctgtagatgaaacacttgtaatacttatatctatttgtatatatatccttgtttagtatataactaacgaaatcctaatacttatttgtaaccttgaaaaataaagtaaatgttgaaataccatctcttacacgaaatctcccctaactcagtggatggacagtaagagttaccgtcatgaggaaatacaaaaagtacgaaagggacgattctttcgaactaagggtaatcgttgcggatgaaacggtatgtgatttttccaacataaaatttcttcaaaacttcaacgttggagtaaatttctaatatggagtaaattttaaatagggaaagcgcatggaagttgtaattcaccgtaggttttcagcttactatttcgaaaaacttgaagagaacaactgacatcagctgatacaagacctactgttcaattcaacaatttaactcgattcgactacatactggagggaacttatgatactgaagtgttagttggtaaatttctttccgtatttgtttttgactatttggttttaacaatcataatcagtattggtttaaaatttttacaacagacctgcttgtagccattgttgaagttggtgtgctgactcacacagggaatct

SEQ ID NO: 75 - DNA, 1263 bp, Arabidopsis thaliana landsberg
  unsure (1)..(1263): unsure at all n locations
aagatcttgggctaatgttgcttcttgatgagagacaagaagtgttgatgcttgtcacaaattcgttaaaacagtatccttactaaattctagtattaaatcttgataccttggcctttgcatggattcttcttctatggaaaatagtatagaacacttgatttttgattgcattgctgttatgggaattaaggagaaaaatatttaaatagatttgttcttgttcaaccttaagtcacgtgcagagatcttaatcactcgaaccagtatgttgtaggacttgctctctgtgctttagggaatatttgttcagcagaaatggcccgtgatcttgcgccagaagtagaaagattaatccagtttcgtgaccctaatatccgaaagaaggtgaagtgttttctaattcatatacagggtctcctggagtttagtcgcttttttttttccttcattgcctttaccatttatgttgtattatatgcaggcggcgctttgctctactagaataataaggaaagttccagatctagcagaaaacttcgtaaatgctgctgcttccttgcttaaagaaaagcatcatggggttcttataacaggagttcaactttgttatgaattgtgcacgattaatgatgaagccctagagtacttcagaacggtaagtctataaatattatacagaacactctacttatgcatacaggagcatcgacgtaatttaattgaatatgcgtacatatgatactatattacctgtatgatgcttttgtgtactatttttctcttgcaataaagtttgatatctgtggtattcacttataaatagattactctgctgaaatgaggcagacaatcaggttgttatattgttttatcagaccgtcagttttgacaaacccttgtctttgttttgtctctgcagaaatgcacagagggactgataaaaactttgagggatattactaatagcgcatatcagcctgagtatgatgttgcagggatcacagacccttttctccacatacggttgctcaggctcttgcgtgttttaggccagggtgatgctgatgctagtgatttgatgacagatatacttgcacaggttagtcatagtttagcaagtgattctggatatggttgaccatcttcacatttgcgatgtaattcctttgttaaacatcaacggttaatggtttttgttccagttaccctacatatattntttcggaaaaatgtngtaagatagctatgctctctcatgtg

SEQ ID NO: 76 - DNA, 11874 bp, Arabidopsis thaliana landsberg
tcactaccatttgatgtcatttgagtattagggtttcagaacattttgctataagtaagttgtgttcttgacattttataatccggatttctcttaatctattcaatatttgctttacatttcatttactaagtagttcatgttgtatcattttgttattactttgttgctatgatgttttcattcatgtcatcgtttatgttttttgaaatgaagtctgagtagtgactaggtttctgaagatgggatagagtagtttagaatcctcggtctgttagctggttgagtttgatatatagtcccttctggaatagttgttcttaatgcctattgctttctgatcaattgaaatttgagcacagacatttccgcaccctagaggtgttcgataaaatgtctgaaccactacttccagagattcgtggctctgtaccaaggtattggttatagggagcgttttggctttaacttgttgattcgtaatgcctgttaggttagctctcgtaaatggtgattgattctgggaatactttaacttgaggatctctgttgcggtggcacttagatttggttatcaaacttgttgtctagggatattttattgagcatgtcaatcacctgtagactgaggaaactaactattctattaccccatcctcgggaatttctcatctaattgatttctctgtttactctgccattgcttactcctcgcttagcttttgcatttcaaagatgttatcattcatatactcgaccacacccaattgtcgtgtaacagactgtgcagtcgagtatctttgttactgtctgtgctatttactcgacttgttactcgaccacacctagtgcttggcaacatgctgtgttggtcgagtgttttaactgtttctgcttgaactgtttcctgcatgttcatttaggactgctagaaactccaaacctgttattgcttggcttgactatatgaactctgattgcatcttgattactagcatcacacccatttggattgacaacctaaaatactaggacgacaggatagtgttttaggattaattgactaaaaacctattattagtggttaaaatgagtaagaaaatccatgtattttagggtatccatgagttcaaatttgatgcagacatgataattaaaaaatcagattcaggttcaaattgatagggaatggtatcaaatcatgacagtgtgatcgagtatagcaatctaggcatggtgcagttttacttcaatttcattgactacacaacagacaactagcaacgaaggcactgagttaaacgggtgaaccaaaatgcttacaagcctatctcatcataatcccctatgcatatgcaacaatcctaaatgaaacactctagactcgatcctaaatgcaatgcaatctacttgacactctatttttgtgaaatcattttctgaaaaaaatcaaatttttatggttttttctatgccttagatgaatgcagactcaagattatatacaatgcaacacacacttcctgagccctcccccaaacttaaatcacacagtccactgtgtgaccaaatttggaaaagagtactcaggacaaaacacatcacaaaaacaaaataaaaacaagagatggtatattacaatggtggagtgaggtgcatacctcagtggaagaaggagcggagttggtcgtcaatagctgcctgtgattgctcccaggcgatcgaagaatctccctgttgtgtctcagcttccccctgggggtactcgacctctgctccttcgtcgcggccagcaccgctctgatgatactcgacctctcttcttctgctgcggccagcaccgccgtcgcgtaagctacgggactggagaagtcgtgtactcctgctgctagaccgagcgagtgcagccttcttctttctcccgagctcccgaggctcgaatgatgaatgcctcgcagggactggtgggactactcggtcactaggctcaggcctgtggtgacttggctcaggcctgtggcgacttggctctggcgcgtcatatctcctcgagggcatgtcctgaggaggctctccctgcggaatagctgtggtagaagaggagcagcttagcttgtctgtcagaaacttgatggccttgaagcacttgatgagtagcctatcttgtttcttgcaccacctatgcaacttactgttgtttctgtgagcttcgctcaagctcttgctctcccgcgctggaggtacatgctcactgaaatgatacatgctcgtatcgtactcctccttcctatcctcatctgtctcagcaatctcatcctctgtagcttctgttgtagggacgttgtcatcagtcggtggagcgctctcaaagtagaggtaatcacgcgcaggcttgaagtcaatgttttctccctgaagtatggttatggcctcggtgcagggaagcagaatgttggttgttcgggtcaaggagtgctcgaatttgtagcgatagaaatcgccaaccatgtcatgctccagaaactcacaacgacgcaaatgatctaaatccatcatcctcggatcaaaccctggagacgtgagaggtacaccacatgcaatcagaatcggtgtcacaacaccacctacacaaagggctcctcgcaccctcttcttctcgttggtgtgcgcccacttcctgtatccacacaggtggatcaacagaagcataaccgttggtgcatcattaaggtcgccctttaggaccttcttcccctttgttctgcggagaatgcccttgagtgcataatcaatcatctccatgtgtgtgttagacacggtgcctgtagattccctggggtacagaacattcgctactgagcgctgatagtagcggatcacagggcttcgaatctggttgctcttagaccttgtagagttgagtgccaaatcgttcccaatggttaaccacaaatccttcaactcttccctctcgaacttttgtgttttttcctttccactgggcaaaccccacaatccttccaagctcctgatagatagctggtaacgctgctcgctcactgaaaaagtcaagaaccccaacccttcactctccagctcatctgctgtaagtccctgatacatctccacttgtagagtggaaagaaactctattgtttccttcttgtaagcgacgtacgggtaagacatcagtgtctccagatgacacttctcgaataagtgctgtacgtcctccagtagccccagctgggctaaagtctgataacaagggtacctcgttccctagaagttgttcagctcgaaaagtctgatgtactcctctactgtaacttcatcaggcctgttcaacagcttcgtctctctgtgccatgactcaggctcatactcgacgtcaatatcttcgtcgatcgaactcatatctactggtcattgctctctttcctctagcaatctcagctctcctctcattgcgtcgagctactgagcgttgggtctcagctctgaagctctcataagcctgtcgctctctctctggtccagttgaccaagattcagcttcatcgacgttgtaatccgcatccatggaggattcgccactgtagttactcatattgatttcctgaaaaagaatgtaactcaaagccaaatatcaatatgttagtctaaataaaacgcaaacactaaaccagtcaagtacgcagtcgagtaatacggtcgagtacagtgaaattgtggctttggtcttttgttcctagaaggactgtagtcgagtgtttgcggtgcgtccggcgaggtcgagtaaacttctctgggaaacagtggcggtttgaagagcggtcgagctaagctcactcgagtgaatcggcttgaggtcgagtaagcatagatgatcgagagtcttcgaactccggtggagagatgagcggttgagtgttcgtgagaatgagagagaagctttggcggatgaacggcgaatggcgagaagggagaattggtcgtgtagcggttgagtgaagaggagacgcgagcggtgagaaatggtgaagttggaacggtgaggtcgagtgaacggaggtgacggggagatggcgaaagtccggcgatcgagtatgcgtcgattggagaggagcgtcgttgcaatcgagtgaagatggagaagacgttgagacggtgaagcttccggtgaagtgaaaggcggagtggtcgagtgaacggcaaggtcaagagtgatgagagatggcgaaaccggtcgagtgaaagaaagaatgaaggcggtggcgcgagcggcagtggctgtgtcgtggtcgagtgggaagggagacgaagccgtgagagatggagaagccggaggtgtgggatcgagtgagcggtgtggtcgagtgtaatggagtggccgagtgtttggtgaggaagagagatggtgagtgaagtttggtcgagtgagagacgtgagggagagtgagtcttcgaggttgagcgtttggagaggaagagagatgatatcggtgggaaaggatagggtgagatcgagtggtgggaaaggagggaagagattttgttatctctaaaaacgcgtgggggaacaaaggtgagaggtggtaggccacgctctgtctgtttgtcctgaagcattgttctctgttgactagaaccttcagtaatcctctgtaaacttgttaaactccatgcaagtctctgtagcttctgttggtcgagtataagtataatttcaaaattttgttttttaaaatcatcactaatactcgaccaacttactcgacctcatggcttcttagtgaaacagaagtttttcaaactcttgaatttttgacatactcgatcccctgttgctctgtagattaaattttaaaatttttactctacctccacgttgtttctctgttcctgagaatcacaaacacagccaaaaacaaatcaaaaataacaagaaaataaaagttttatttacagaaacagtcttgggaattcctcccaagtgagcttgtttaaagtctctagcttgactcctcacactcattaagaagaaaatgggtgatagagaggatctgcatagtcctctctgatctcattttcatattcagcatcctctcttgagagatgcgtagaagaatactctattcttctttcctccaaataggcctctttctcttctggtggataatctatctcctcagaccatcttgaagtaaacttttttctcgggatagtatcaatcctgcattttgattgagctttctcttgcatctgatccagtttactcttaagttcctcaactgtctgagctagcttctctatggtttcttcttgatcatcagatttctttttgagatctcgcaagtcaggtgtagaggttgtgcttggtctggtgattgaatctgaaggttgaggctgagccctgatcttttcttctagagctgtcctttgcgaagtttcgttgatgtcaaactgcagcttgatgtgcttcccaaggttgagacttattctcccgtctttgacatctatcatcgctcccacggagctaagaaaggtcttcctaggatcagaggattcttaggttctgcttccatctcaagcacaacgaaatctgtaggtacttccactccattaatcattactggcagatcttgtagcaggccaaagggtttccttgaggacctatcagcaacgatcaaagtcaggtcgcaaggcctgtactgagtgaattccagcttctttgccacggagagtggcattaagcttactgaagctcccaaatcacatagacaattgctgaagaccaattgaccaatggaacatggtagagtgaaacttccaagatcttccagtttttcttgaacactcctcttaacagtggccctagacggattagcatcacattcgtcttctgaatcttgataaatcttgatcctttccagattaactttctcacatctttgtgaggattcgggatcaggttgagaacttctattagaggcatcaccgcttccatcttatcaagctgcttctctacaagagaattgtatctttttatctatgctttcctgaatttccatggaagagcacgtgaaggtaatggtgttgtagaagctggttgttgttgctgctgtgtcaacccaggtggtggaagttgctgcggatagttgccctgatactgccgattaggaacatacccctgaccttggttgtatggaacaaagggcttgggttgattctgctgctgtgaagggtagacttggtcctgcgagtttacaacatttgtacttctgtaagacagattgggatggttctgcttgaagttgttgaaacctttgttgtaacctccttggttctgcacatagctaacctcttctgactgcagagtctccccatcctgaacttggaacgtctcatcatcacccagaaaatgaatgtgcttctgttgcacaaggagtagcttgtctagtttgtcattcatagctttcatttccctgtggtgcttctcatcagaatcagagctggtgcggatgcttctgtcataatcttcattgtagttgccatacgactgactggtcagcttgatctttattgagactgaaatcctttccatcttggtatgcactgtcctcagtgactgacttgggtcactctctagtggataactcacttccactccttatgttgatagtatgaacattagcatacttcttgggattcttaattgacttccctggaagtcccataactttgggagcagaggtagatgcggattgtccttctaagtatctgactttggaatttaacgcctccactttggcattcaggtcattgtagctgcagtccatcttctggtgcaattcagataacttcttagcaatttccatggagctagatggttgtccctgtagcagctgttgtactatctgtttcatttcagcatcaggtacaacaggaccttggtttgactgaggtgcaaacccaggtggtggtggttgttggtagttcccctggaattgctgcttgggaacaaaaccttgattgtagggaacaaaaggtttgttccgaccttgttcttgttgtggaggatacacttgatcctgaggattagcaacgttggtgttgcggtaacagacgttggggttgttcatcttgaatttgttgtaccctttgtagccaccttgattgttgatgtagctaacttcttctaattggttaacctccccatcttggacttgatactgcttgtcatcaacaaggaactgccatgcttctgctggctacgaagaatcttgtccagcttgtcattcagcgctttgatctccttcctgtatttgtcatcagagtcagttgtgcctctgatagttctgtcgcagtcctcgttgtaattaccatctgattgagcaaggttctcaaccaattcccagccttcttcaacatctttgttctggaaattcccattgctggcggtatccagaagcattctgatgcgtggtagaactcctctgtagagagtgttgagcatagaggctttagtaaagccatgatgagggcattggttggtgtaacccttgaaacgcttccatgcttcacagaagctttcaccagtcttctgtgagaaaccagaaatctcatttctgagtcttgcagttctggcattggagaagaactttgatagaaaatccttcttacaatcatcccaggtggtgattgagtcatggggcagattcttctcccagatgtgtgctttgtcgcccaaggagaatggaaacaaacggagcttgaatccgtcttcactgacaccattgatctttgtcaggttgcagagcctatcgaattcatctaggtggtcgagtggatcctccattggcagaccatggaatttgttcccctgaatcatcgagatgagaccactcttaatctcgaagttattgttctagatagcaggaggtgcaattcctttcctctgacggtagtcatgtggtgcatctccaacaccaatgttggcaaggtcattttgttgattctgttcttcagccatttcgagtggttgctgaggtacaaggttgactgtgtttctcctttctctgattttgcgagctatgcggtcaatattgtcgttgaaaaggaggttctgattgcctgttgatcgagtttgcgtatagaagaggtgtacctggatcaagaagataacaagaaaaacactcagttagtaattgaaaaaaaaatggaaaaagaacttgatctaagcaagtctgaaatcttaaatgtaacaaacaaacacccaattggcaacgtcgccaaattgataataggtttttagtcaattatcctaaaacaccaatcatgtcgttgtagtattttaggttgtcaatccaaatgggtgtgatactaacaatcaaaatgtgatcagaagtcactaagtcaagccaagcaataacaggtttcggtgtgttctagcagtactaagtgaacatgcagaaaacagaaaatcaaacagaaacagtaaaacactcgaccaacacagctcgttgcagagcactaggtgtggtcgagtgagttggtccagtaacaggcagtaaacgaaacagggatactcgactgcacagtctgttgcaagacaactgagtggtcgagtatcaggtcgagtaacaggagagaaatgcaaaaactaagcaacaagtaacaagatgcagtaaacaacaacaaagtaaacaataaaatcaatcagataaagaattctcgaggatggggtaattgagtagtttcatttcctcagtttacaggtgattgacatgctcaaaaaattatcactagacaacaagttcattaaccaaatgtaagtgccaccgcaatagagaccctcaagttaacctagtctcagactcaatcaccattgacgagagctaacctaacatgcattacgaatcaagaagttaaagccgaaacgctccctgcaacgaataccttggtacagggccacaaatctctggaattagtggttcagacatttcatcgaacaacttttgggcgcggaaatgtctgggctcaaattccagttgatcagaaagcaatatgcattaagaacaactaatccagaagggatctatcaatcaatactcaatcacctagcatactgagaattctacactactctaacccatcctcagaaacctattcactactcagacatcataacagaaagcataaacgttgaacaagttgaaaacatgataacaacagtgtaacagcaggatgataacagaatgaacaacagtaaacgaaatcaagaacaaaagctgaatactgaatattgaatagatatagagaaatccggattacaaaaggtttagaacacaaggtctgtggaataaaactagataaaaacttgtctgcgaaaatgtgaagtacatgctacttatagccaaatattctgaaaccctaatacttaaaacgacgcaatattgggacggattaagaactgtactcgacccatgtggtcgagtgaatagctggagtcttcttttcttcttgtgctcgagtctctggttgagtgcggaatgaagaaggctctgaagtttgtatcgagtatgcatcagtggtggtgatggtgatactcgacatccaggtagagtgatgagatcgagtagaggcctggtattgtgatgtattcactcggcctgggggtcgagtgatgtgatcgagtggtgtcagaagagggagatgaagacactcgacctcatggtcgagtgaagtgatcgagtgatggtctggtgatggagatgagggcactcgacctcggggtcgagtggtgaagtgaagtgatgatgtcctctactcgacctgggggtcgagtggtctcttgagatcttgaagctcctactcgacctctggtcgagtggtttgtcatgattatgtccgcttcttccagatagctcgtcaacagctccaaatcacctgaaatcaacgcaaatatgcaacatgcatgcaaaactatcctaaacatgtaaagtgatgacaaatgatgtgaaatgttataaaacagtgatgatatgatgctaaagtgatgacaaatggatgcttaaaacatgcaaaatacacacttatcaatcctgaatgtttccaagaatgatttgtcacaaagtttttaatgttttattcttggtacccaaacaattatttttttaaatgtaaaagataatcatcaataattatatctatgctaaacatggtcgaaaatattaaatcataagcatagtagtttaacagaaataagtataactataactatacttttatgtaatcgttgcaaactttgataggagtttgtttggagtttctttatgtcatatttgtaaactttgttaggagtttaacaaaaagtaagatagagaaaataaaaagggaatccaatacttaaataggttcaaaacataagcaaattgtttttaaaaaaataacttacaatgacaaagtttgcaggaaatttaaataagttcaaaacataatttaaataagaataggagatgggaggtcaaactcctaattctcttcaatcacttccatccttgggttctctggaagttcatcataatcttcgaaaccgcggctgtaaaagagaaaaaacaaaaattgtattgattaattgatgttatggttaacgaatacaatacaaaatgataaaattcttacatgtagctttgaatatctatctcagggaaattggttggattgaggtaaatttttgaacatccaaattcactcttcaaaacattctcacctgttccattagttttatttaaaattatataatacaaataacaatcataagtaaatagaattacaatagaaacaaaaataactaaccctaaatctcagcaattctccaaaatctcacaatggcaacaatgagctgatagttataagcggctgaactgatacattttgagaaatttgtaacaaaaagttcacagcatcttccaacagcatagcatttcattttctttcccctaaccaatatgataaaatattagactaagcaatgcattattaagctaatttttcagacagatgacacattactaaacatacttaaaaacagtacaacttacatattgtccaaaagtttgaatgagacatatcttgattcatagtcggtttcaccttggcgacaaacaaataaaaatttcttaatagcagagatatttgtcaccacacccattgcatctaagtatagaataatatattaataccatatttcaaaaataataacataaattactatcataaattaattcttaaaatgagaagaacatagattgactaaaaacttacccgtgacataatcccaatcctcaagacatggatacttaaggtcaatgggaaaaatgaagtcaaagaagtctcttttcacaagttccgggagagggtaaacacttgtttcccaaatgaatttgatgtgaaaacgaaaggacgaatacctaacccttgattgaggaacaacgacccgaaagtcagagatgtgaatccatgtgccaggcttgagaaacggacggaagggattgtgatagtttccttgaggaattgttgcatcaacacggttattctgaaaaagtccaaacaactcaaagattaaatagtttgtgatgatctgtttcaataataacaaagtaaattgggattaaaagaaaaaaagtgaaaatacaaaccttttcatcatgaagaatcatggtcgtaatttcaccatgactgtttggaggatgattcaaattgcaggatcttgacgttaatctccagttggttgagttatccctcaaatcggtgaggttatgaccagcatcatgtgtcatcgagaaagtttttttgtgttatgaaggataa

SEQ ID NO: 77 - DNA, 3033 bp, Arabidopsis thaliana landsberg
cacagttatacatatccggtttaagaaacaccattgaattggtcttatggtctcaacagacttgtctcaatagagataagaaataaagaaacccaaaacgcaagaaacggaaaagcatacattgttgattgtatttggggtctcgcccttctcaagaattggggtctcgcccttctcaagaagctcgttagctcgctcctcttcgtcaagctcttcagatcgcctttaagctcttcaagctcctcggctcgtcctcaagctcctcagctcgtcctcaagctcctcagctcgtcctcaagctcctcagctcgtcctcaagctcctcagctcgtcttcaagctcctcagcgaccaactcctcgtctagctatcagctcatccctcgactgcaaaactcatctacctcctcgcctagcggcagttcgtccattgactgcatagtccacctatctcgtcgcccagctcgtctacaccagcaaacaactcggtttgccaactcgtctcttaccacggttcatccagctcgtcgcacatttgccggctcgtcaaccacctgccgacctacctccaatgacggcctaggtcacttattctaatatgaactacgtgtggcttgatccctttctaagagatcccattttcgtacttgtgtgattcatgcatcaacagttggcgcgccaggtagggggatagtttgaagatatctctcaaaactacgaccccgcgacgaagcaaagtgacaacaaacagactacatggagcattcgataccgactcgtcaggctctggaagtaaaacactctattcgaggaaagtctcggtaatcgcgcgattcagtttccttttttacgtcgaggatgttcggtctcgaggtgacgatccgtgattcttgggataatacgattcggattttcttaagtccccgaactggatcacttcgaggacttggggggcaaattgtggatgtcggattcggtccatttcggcccaatccgcattcaatgggcttcaaggtgaattgggcccaattcaccgcccagcgtgagcctggccgtttatagaacgatccgacattaatatagaaacggaaggatcacgacttaaaccgcgcattaaagtcccgagttgaagattcgtgacgtacgacgttaataacgcgagatccgcggcgtgaagtcggcaagtattttaatacgtttgattcgatgtattgagtataaatacgagtcgatgacatttgtaaagtggacgataaaagaaaacactaatactatacacaaaattcaaaagcactttcttctcttttcgattcgatagttgttcgtttaacaagaccaaagatccccgtaaaaacaaccacaagattctaattgcggattccgacatccacaatttggcgctagaaggagggcaactttagtcttttacttcagagcaacgatcaatccaccatgagcaacaccgacgatcagagttccggcggccaagcttccactctcgacgacatcaagcagctgcttcagcaactttctgagaaaaccgacagacagcagctcgccgtaacgacgctttccgatcagctcgccgagatcaggtcagcacacaatgcgtatgccgagcgggttgattctctttctgcaggaacggcacggactacaggagctcgaacacgactcaattttcagggtgccgcgagcccaagcgtccagaattcgcaggaagcttctggtcagcaatctccttcgccaccggttgacgtcggagcaacgtcaacacaaaatccagtcatccaatctccgtcggcaggtcttcctgcagtctcagatgagacaatagctcggactccggctccattaggtcccgccatcagactcccgaattctaatcctcgaccagagccgagcacggtcaattcggagctgcaaaaccttcaagatcaaatctaggcaatgaacacaaaggttcatcaggctaccacgtcggcccccgaagtggaaaaagttattgaagcaacaaggagaacacctttcacttcgagaatctcaaagcttcgtattcgcgatttccgagacttcaaactccccggttataacggtaagggagacccaaaagagtatctgacttctttccaggtcatcgcaagtcgagttccgcttgagccgaacgaagaagatgcggggctctacaagctattctcaaaaagtttgtcaggtcccgcacttacctggttcacccagttagaagagggttcgatcgataactttaagcaactctccactgctttcattaagcagtacgggtactttatcaaaagtttctttcttgaagcaaagatttttttatcaaattctatctccgaaataagcttcgggtggatatcttcacgtccaaaccctcgcttcgaatatacccgaactaagtccgagacttgtgattcgcggtcataaatgacgtccctactaacaccgagtctacctcgttagggaagtcatctttgttttgcttaacttaattttctatacgaaggataaaccgagcttagctcgtaattcggaaaataagctaaaatcaaacaaaataaatggtctctatgacctcaaaaatcaagtacttcaaaataaaaggcctccgtggccaacattaaattaagtacttaagggcctccgtggccaatttaaacaaattcaagttttaaggtaaacaagtagggggcacttcgggccaaaacaaccccattattctgccctctcggattccttttcaataccaacagggaacatagccgcgattccagcctccgaggtcgagcccttgttggagcccctttcattgatcaccatcgcttcatcttgaggagcgctttccgcaatcgtctccgggggagtgtcagctaggagcgaggtaagctcaacagggtcaggtcggggagtcttcggttcggtagctcgttgcacgaactttgcttcgttagcgcgaaccgactcaagctccatagcgatgtcgggaatttcacccttttgaatctcttcgagca

SEQ ID NO: 78 - DNA, 1019 bp, Arabidopsis thaliana landsberg
cattgtctgatgcattacttggaacagcccggatcatgtatgtaggatcaatgtatttgagattcatcaccatcttattcttcttaaaatgatcctacaacaagaggaaataaaccctatgaggaaattttctgtaaaaggcataagaatctcatgatcttgaaagtttttaactcttaccttgatgctttgtgatagccacaagccgacatctttaagaagtttgttcccagaagcatccataggagtagattccatgcttttgcacatcaaatcctgtcctgcaccctcagcaagaacaatcaccatgtgaccatgatccttcagccgtctctctatgaactcaaagagtccaccttctccttcgaggtaaaatggtgactcgggaatcaagcaacagtcaacatctctgctggctaatgtagcatacatcgctatgtaccctgtagtacaacacccgcctagcattagtcagtaacaaatcgaaaaggtcttttaagttgtatgtttcaaaacaaagacttaccgctgtaacgacccataagcttgacaaaaccgataccattctcattactctcggcttcaacatgtgctgcgttaatcgctcgttgagcttcctccacagcagtgtcaaacccaaaagatttatctatcaccggaatatcattatcaatagtttttggaattccaaccacagcaacttttagtcgacgtcttctaatttcctacatggttatatacaatctaagttcagttgttgattgttaaaacttaaaacttacaactgttattctgaaatatcacaatggaattacctcaaatattactgaagcacctcgctgggttccatctcctccaataatgtaaacctaaatgataacagatactacatcaagaaaaggttgacaaactttttcacatacaaagtaaaaagcagtggctgtgtttattccctaacctgattgattcctcgatcttgaatgctatcaactatcttgttggtatcatgtccacctctt

SEQ ID NO: 79 - DNA, 1279 bp, Arabidopsis thaliana landsberg
catacccatactaggctgattgatctagtgaggctttctttttctcctctatatcagactcggtttgacgggtttcgccagattcttttgtggaaccaaacgaactatcaggaagagtattctccagactcttctcttgcctagtgaaatgataaataaactatttgttagaactaaagtggcctatttcagtaacaagaagaatttaaaaagctttgattcttatcactcattttacccttgatgttcttcgttgttggtttctacttgttcaagatctttctcacctgtaccactaccgcctgaccaaaggaaaacaagagaagaaaagaatgaataaacaccaagaaaaacaaagcttgaatgtagagagcacaataacaaccttccctgacttgagatgggaaatgagcgtgagaaccaatagaaggactaggctgatgatggtgaatagatttattctccatgccaggcaattgcagattcgataaccttcttatttggtcttctacttctatggcttgttgtggatcagcttgctcggtgtttctttgcagcatctcatgtgtctcgtttcgaaacctccttggtcctggtaacgaaaagagaatgagggagttactatgtcagtaagaaagaaacaaccactcggttttctcaagtctcttttaataaattgaaactaaccaacgcgacatcgctcctttgggtccattcccaacagaaaaaggttctctccaaccaacacctgctgtagttgctgccgctgccacctgctattgtttaaccaaactctaattagaaaccagacccaagagacgcaaggcaaaaaaaaactgagaaaaagtcaaaagagggatctagcattactttggagggattgtttctttcttctggtatggtctaacgttcacaggtgattcaccgatgagatgaggattttcttgatccaatatggttgtcacggtttcagcattagcgaaagagacaaacccatacacccgttccttctgatttggaatccttacgcttagcacaggtccaaaattgctatacattaacaaaaaacatgactgtcaaaacaaacaacagagccttcctcacataaataacacatatgtataaatgttttacccgaaataagttgagacgtgttgatcagtgaaggagctttcaggtggaaatgtcaagaaaatctgatgagaggctggtggatatcttctttcctgccttccttgtactccgaattgtctagatccttgtctaaaagaaagatcac

SEQ ID NO: 80 - DNA, 926 bp, Arabidopsis thaliana landsberg
cggtttcgagaaaatttggtttttgaaaataacttccttttttaaccaaaattaacttcggttcgggtcaatcggtgcatgagttatttggttatatgatttaatattaattccgaattataaaaattatttttctattttcgtttatttaccccaaattacaaaaaaaatagataacaggctaaaaacaaagcccaaacccattacatcattaaaataaagaaaaaatttacaacggacggcgacggccaatctctctaaatgcaacggttttcgatattgattaacgccttgacggtgacacgcgcaacggacggcggcaacggacggcgacgaccgatctctctacctgcaaataattataccaccgactagatctatcatatatcataatcataaacatatgcaatcaatcatttaaattgagaaaattgcgaaaatgtataaaaaaattgaaacgccaatgaagaacagtcaaatctagagagttaccagtgactgtagccgtgattttggtgctaaataagagattagtgagcaaagatcaaagaagagctactaacaatgatttgtaaaataaaaacgcgtgtaggagatgatgaaatgatgaaagtaaagaaacgttatatggcttatggattagatcggagaagaaaatgaattctcaagagatagaggcgcatatccaaagaagaaaatgaaaccaaattagggttaatgactcattagtgttatatatgggtgcatattctcggtttaaataaaaccgattatcgaaccgaaatccgattgcttaaattaatttcgccgattggtaaagaggactctgtttggtttataccgataaccgaaaatatcgttatgatcgggtcggttcaaacggtttttaccgaagttccagatctattttaatttaatgaattgta

SEQ ID NO: 81 - DNA, 1026 bp, Arabidopsis thaliana landsberg
  unsure (1)..(1026): unsure at all n locations
atctaacattaaaagactagagggaataaaaagagacgagcttttatcattgtctcaacttgttcaaatcaaagattctgaatcttgatttagtagaattgtgcttacgttgatcagctggctccaatcctaaactatatgatactcacgctgcttatatcattctctctatctcatctttaatgcatgtcttatgtctggctccatgaccttccttgtttattgtttctgttgattatgaattttcaagaagttaaaccaattagaagtgagttggttatggtccggtacaaagatcacaaccggagaacgataagtgatggtcagagttggttggttctgttgaaacaggaagaaaggtagagcttttttgacaatttgacgaaaatggcgaagctttccttttcaaacgacgccgtaatgagtcggaaacaacgaggacctctcgttttagaagaaaagagagcaaaaaaaacttatcttttgactttcggtgttgtgtgtgatgttgttgtcggccatggcgaagacagagcaacgatctctctctttttcctgtcttatgtgtctatcttcgaacagagtcttcagaaacgaagcagccactctttaaaactccatcggaaaagctttgtcctgttttgatatccatggctttaccttggtgcttaaagactggagttttaacgtctccggccgccggatttaatcttccatcggacagtggctttgccgttccgacgaagttactgagtattcgaaaaggtgatcgggaaagattnnnnnnnnnnnnnnnnntcagctttcctccaagaaacggtggagccgagaagcggaaacagctcaaacatgaacttgtcgaagccattgagccttttgaacgtggtgccactgcctcgcctgatgatcagcttcggattgatcaggttcttgatttctcttcctgtgggaacccttcagaatagttttggtacactagggtataaaaaaagtgattgagagactaatctgagtggtttttgtttt

SEQ ID NO: 82 - DNA, 1272 bp, Arabidopsis thaliana landsberg
gattccttttttgttgttgcgttcctttgcgtgttacaaaaatctgtcaactgctgcattaatggagagaataccaagtagatggccccggccagagtggcatgcaccatggaagaattacagggtaaaatccgtggctcagcattgttgctgcatcatacggattttggtcttttgttggtctccaaagaactctggtttgaggagttacttaacttacgattaattattcttttcacaggtcattcaggggcacttgggttgggtcagatctgttgcgtttgacccgagtaatgaatggttttgtactggttcagctgatcgtaccatcaaggtagcagagatgattgcttattcaatatgaattgtattttttcgaatatgttttcttgttatacttataagtcatgatacaagacttcccttctatggctagttactggagcttagtttagtgcattgccaaaaatccactactttggcgattgtagaagcagttccgactttggtatgtttgctgaatttattacttgtgttttattcactagatatgggatgtagcaactggagttctgaagctaacacttactgggcatatcgagcaagtacgaggttagcctttcaaatctgttctcgtttattaatatttgttagacttttcaataaataacactctcgggacaagttacaagtttgggctcttttgttttgaattttgttacaggccttgctgtaagcaatcgacatacctatatgttctctgctggtgatgacaagcaagtcaaatgctgggaccttgagcagaataaggttacaactctattctcttcattatctggatttctcatatctaatgctcttggaatttttgatttgataggttatccgatcttatcatggtcacttgagtggtgtctattgcttagctctgcacccaactttggatgttttattaaccggggggcgagactctgtctgcagggtaaggcaaaaatatttatatccatatttatatatcttctcgtttgaattcttgcactttgctggatttgtagtttaaaagtccatgtttacttatttgcaggtgtgggatattcgtaccaagatgcaaatttttgcactctcaggacatgacaacaccgtttgttctgtatttactcgtccaacagtaagtctcttttaatatggacttgttgttatggtttttggatttcttgctgaatctttttataatagtaactggaactccactttgatctgtagttgttgcag

SEQ ID NO: 83 - DNA, 417 bp, Arabidopsis thaliana landsberg
gatggtgtttcaattttgaccactgaagttaatgagcttgaaaatcgcttactcgacttatcattatatatacgagacaaatctctttctgttcttgatgaggtccgtgcaggccacacgatttagatcattaatcctcccttaacaatacactagtaacttctgttgtttcacactgtaagattttgctgattatgtttctttttttacttttagatgcgtggagttcttgaaataagactagcagcagcactggatataaaaaatgctgctgagcaagaaaagcaggaaaaagaaggtctgcacgcaaggcatttgctgaacaagaagcgatcatggaaaaagttgtccaagaatcaaagcttctacagcatgaggctgaagaaaattccaaggtaacatcactgccttgagatt

SEQ ID NO: 84 - DNA, 1040 bp, Arabidopsis thaliana landsberg
ttacatgcatttttctcttcctcttcgtaaacctcagcagtgcgtgacacaatatctacatcacttttctcattcttctggtaagactgacgatagaaacccaataaaaaatctttcttgtttgccatctcatcaaccaatccagaaaaatgtttctgcatcttattaacctccttgctatcaagcttctcaatatcaactccaacagtaggaataactcttttaggtttcaaaaactatatatactctctaagctctcatagttcgaatgctcactatacggtacaagatgaatctccatcgaatctttaaacctagccgcaaacttattccgcttcacttcataagtccaccctgtaggcacaaaacctacaaccttatcataccctctctcaaccataatctcattcatcttcacaaaattcggcctaaaatacggccaagtcacacccaacacattccaccccaccacatgaacatcactctcattcacatcctcggtaaacattccctcctcaccacaccccaaaaccgacaaaatcgacatcttcctcgcatccacaacgattttcctcttatatctcctagcaatctcacccaaaatcttctctttaccaacaacataagtagctacaagaaacaaaaccttctcctcactaattttatctatcacataaccacataatcaacagactcttcttgactcgggaaaacaaacttatgattacaatatgtagtatccagaaaaacaccatcacaaccaacaaaaccattaagaaacgaatcaaatctcaactgtaccgctcctggacaatgattagcttcaatcaacacaacttcaatcttaaccatttggttcatatgtaaagcgaagacgaaatgtgaaggaacttgaaggatttcttcaacgagacgagcggttttgtgtgagcagtagataattcctttagaccaagtagaggagagaccggagtagtgatcagagtggaaatgtgagaggaagaaagcgacggagaaggattggtgtgggaggcggaaga

SEQ ID NO: 85 - DNA, 3456 bp, Arabidopsis thaliana landsberg
  unsure (1)..(3456): unsure at all n locations
gagagtttggtcagaggtattaataagtccaatgcattgtccattaagcactggtnnnnnnnnnnnnnnnnnaaattatgcagatggagaacccatctgtagcaccaattcagagactacttccaataacatcctgaatccagtggatgttcagtttccaaacaatactacaggttcaggacgaccaacgtacgcaagctctagctcgcatgttgttcaaaatcataactggtggagttttggtgaatccagctctagattggggccttctgatcatttaaattccaatggttcaaagactgatcgacagcttctctcagatggctatggatttgaggaagggcaatcaggtatgttgttacctggagagtcctttttgcgtgggtcaagctctagtcatatgttaagtcatgtaaatctgggcaaggacatggacattggtagtggtctgcagacttctggggtcgttatccgccataataactgcgagacttcattgggaagctcaagtcaaaccgcagaggagagaagcagtggtccaggttcttcgttgggtggtctaggttcatcctgcaaaagaaaggctcttgaaggagctcctagccattctttccctggtgaaagtcatggttgcttttttcaaactgagaatggtgcttggaatgagggtcttgctcaatatgatgcttcaagtagcttaagtttgtctatgccctcacaaaattctccaaatgttaataatcagtctggtctaccagaaccaagatttggattgggtggtgggagagcagttacagcaagtgcttttccttctacaagaagcacggaaaccatctctagacccggcaggcggttaaatcctgggcagccaccagagtcagttgcattcagcttctcacagtccggtagttctgtgcgtcagcaacagcagttaccagcaacttctccttttgttgaccctctggatgcaagagcaataccagttacaggtagctcaagcagtggtgatggtcagccaagtatgatccaccttcctgcattgacaagaaatatacaccaatttgcttggagtgcttcgtctagttcgagagcaaacagtatgcctgaagaggcattgtcaccatgggacgcgccaagaataaactcagagcagccagtctttactacacctgcaaatgaaacgagaaatccagtgcaggatcagttttgttggagtttcactcgtggaaaccctagtacatctggagattctccctttgttcctcgagcaggatcgagttcagggatccatggtttgcagccgaatcccacttgggttactccccataatcaatcaagaatatcagaagttgctccgtggtctttatttcctagtatcgaatctgaatctgctactcatggtgcttctcttccattactacccacagggccttctgtttcctcgaatgaagctgcagcgccgtctggatctagtagtcgtagtcatcgctctcgacaaagaagatcgggattattactggaaaggcaaaatgatcatctccatttgcgtcacttaggaagaagcttagctgctgataatgatggaaggaaccggctgatttccgaggtctgtatgaactctttagcagttttagctgatgtggcatctgtctcagtggaagtcaattatttgttgatggtatttgctgatactagtaatgtcagtcactcagttggtactctcttgtttattggcagatacggcaggtgttgagtgccatgcgaagaggggagaatttacggtttgaggtatgattttgtcacataactgatttcaatcattccctcttaattacagttaacaggtaaaatcacattgcactttttgccttcaagtgttagttttagatcttcagaatgttggtatactatatgtgatctctgtcgacatctaagttgtgtaccatctttttagctgtatcgtatctactgctgctaatataattggtctcacattgtagtaaacgtagtgagaagcagcaattctctatcaacatatcttattggcatttgtataaacaaaacgtagtgcaagttcatccccaatagcattttatttttggatcatgattttcatttggtgatctgataggattatatggtattcgatccactgatctaccaaggtatggctgagatgcatgataggcatcgggatatgcgtcttgatgttgataacatgtcatatgaggtgagtgttcatttttcttttaccattttatctctatgtaccaatttttttaaacatggttcgtttgggaatgtaggagctattggcacttggggaacgcataagagatgtgagcactggtctaagcgaagaggtgatcctgagagtaatgaaacagcacaaacatacatcatccgctgctggctctcaccaggacatggagccttgctgtgtctgtcaggtaagacatgaaattactcttacaccaaggtcttttatgcggctccttggacctgtttatttgtctcttatggctgtgttgtttgcaacaaattcacttctttaccgtagtagatgtggtcaagccaaaacaggagtaatgtattatcacgtagatagaaacctgccacaatttatcacattttatcttgacattacactaaaccgtccatgtgtgtaacatgggttggttaggttcatctatattcccatttttgagctgatactcagctttaactcggaagctgatgtgaaaaccttgatgcatttttaacaggaagagtatgcagaaggagatgatcttggaacactgggatgtggtcatgaatttcacactgcctgcgtcaagcaatggctgatgctcaagaatctctgcccaatttgtaagactgtggctttatcgacataaaagcaccgttccttcatcctcgtcctctttccctatctcctcccaacctattgtgatccttgaaatgaaagaaaaaaggagaaaaagagatcgcgtaagaggtcgcttctgtcttacccgcattgatatcaagagagagttgaaacaaggaagggcctgtgatgaatgatcgatccttgtgtggaagcatcatgttgaattacataggagaagagaataataactatcatttgactcaatcttttgaattgttggattatgatgataagtcattgtttattgtcagtcaactcaaatctgaggtaccaattctgtatttgagagtgtcattgctctttagctttaatatttttcaggtaatttttgttgattcgttatcgtttgattgttgcggtaaatgaattctattgtgaaaaagggaaaaaatgtatttggaagagacacgctcggtggggatcgaacccacaatcgtctgattagaagtcagacgccttatccattgggccacgagcgcctttttgttgtcgttatcaatcaaactaattagtaaataaattaa

SEQ ID NO: 86 - DNA, 5476 bp, Arabidopsis thaliana landsberg
cattgcctactgatcaatctcctcaaacctcaccaggatcatcttcttctccttcaccgagaccttccggtggatcaccggcgagaagaacggcgactggattatccggcaagcactctattttcagggggattcgactacgtaacggaaaatgggtatcggagattagagagccacgtaaaacgacaagaatttggctcgggacttatccggtaccggagatggctgccgccgcttacgacgtggctgcgttagctttaaaaggacccgacgccgttttgaattttcctggtttagctttgacttacgtggctccggtttcaaactctgctgcggatataagagcggctgctagtagagcagcggagatgaagcaaccggatcagggtggggatgagaaggtattggaaccggttcaacccggcaaagaggaagaattagaagaagtgtcgtgtaactcgtgttcgttggagtttatggatgaggaagcgatgttgaatatgccgactttgttgacggagatggctgaagggatgttgatgagtccaccgagaatgatgatacatccgacgatggaagatgattcgccggagaatcatgaaggagataatctttggagttataaatgaatccattgaagctgctctcttttttattgttttccggtcgaatgagattttccccctttttttttttctttttgggtcgctgttatggaaagtcaaataggttattaatatgatatattaatatttttgaaacataatgagtttgaatttgaatttttccatttttatataaatatggtttatatgagggaaaaatagatacatatcgaagatataagaattgtttttctgctttatttttggtcaactgattatggtgcttctagaaaaagaacaatctttttaagaacaaatataagaagtatctagaagcaaaataatttgtttgtggaaaggcctccaattttatataacttaaaatctgaagatacaacacagtctaatggtttgtgttttctgaccccaaaaaaaacaacagcttctcatgggaaaaaatggtaggaaacttttttttttgtcaacggcaaacttaaattttagaaagataaactacgatataataacttccaagagaagattttttggaacttaaccatcagaccacacacacacatctttatcatcctatgaatatccaacgaatactactacatagagaagaatgaacatgttacatttatatcatgtttgactagaaacaaaacaacatagatcatttttcttgttaacctttgtataggttttcaatggcttccgcttctctctgattctttcttaccatatatactactagatctactgtcttaggattctctaacctttaggagttcaaaatttatctcatgagcttgaaagatgtcaattacttctccaaagtcgacgttatatgtgtcaagtactacattcatgtcatgacaaccttttgtgcataaagatacctcaaaagcttttttaccagtttcgtgtccttatatttttttttgcatacctcacattttatatggttttaatcactcatctttttatatattctcacccatccttataatttcaaattgaaataccatcatgtccaatatattctcacccatccttatgcattgtgtctcatgtgtctttagcatatttcatatccctggatcaacttgagttagtgaaacagttagaaagtaaaaaacaaaggtaaagtctctctcgtcaagaccctccgagtgtacaagaggctctcaaacaacaaaagcaaaaggataaacttttgttagctcagactatccacatagccgtcgtcttcctcgccggacatgctagaagataacaatccacacccaaacttacccagagagacaatctctgattcacgtccactacaattaccgaatctctccgaagccaccgatcacctacgctagtttcagtggcaattcgaagcttccaatgagtttgttctgtaattcaatcgaaaccctttatccaaaaccattcctttcacacaaatctcacttctttaccttctccaattccaaattccaaaaccctaaattcacaagcttcccacttcgtcaccaatggcggatcgaatcatgtctgaaatcagcatcttcatcagaaatcgatatggtaagaaacaaagaaggtatctttgcaccaaaggagaagaaagttgtagtcttatgggacttagacaacaaaccaccacgaggtccaccatacgaagccgcaacagctctccgtaaagtcgctgagaaactcggccgagtcgtcgaaatctccgcttacgcaaatcgtcatgcttttatccatttacctcattgggtcgtcgaagagagacgagaaaggaggaaccttgatttcatggagaggaaaggagaagtgactccaattgatccgtacatttgtggtgtttgtggtcgcaagtgtaaaaccaatcttgatttgaagaaacatttcaagcagcttcatgagagggagagacagaagaaagttaataggatgagatctttgaaaggtaagaaacgtcagaagtttaaggagcgttatgtttcagggaatgagaagtataatgaggctgcgaggagtttgttgactcctaaagttggatatggtttagaggctgagctacgtcgagcaggggtttatgttaagacggttgaggataagcctcaggctgcggattgggcggttaagagacagatacaacattcaatgactagagggattgattggttggttttggtgtcggatgataaggatttttctgatatgttgaggaaagctagagaggctgatcttgggactttggttgttagtgatatggatagagcattgggaaggcatgctgatttgtgggtgccttggagtggtgttgagaagggagagattggtgagaaggatttgattccggggaagagaccaaggtttgaggaggatgaggtgggatttggtggtaatgatgagttgttttcgttgtcgtatgatgaggatgagaaggcggagatgacggtggagagtgatgggtttgggaggtttaatgtatcggcgttttcggaagatgaatgggtggaggatgaaggagactttgtgttgagtgatagtagtgatgatgatagtgatgatgagcttttctgattcatggtgaattgagttgcatttctaagtgttgttaattggtttacgaatagagttcataggagctttggtcgatgtaattgaaatcaaatgtaaaaccattcttacataagccaagattttgtgcattcatgcggtaaaagccatgagaattcaagtttttacataaaccaagattttgtggtattgtggtttgtcgaattgaaatttgggttggagtaaaccggattcaaatacaacttttattttgaccggtttagagtagacggttgagaaggtaaaatcaagaaagaaacgataaattaaaaaaccgttatttcgcttcgttaaaattctgcttcaccattgttgtttgcattcttgcttgattgcaaaaatctttgcctctcccacatttcaagttgagatttctagggtttagtctttaagttttctaaattgctttgaagaggtcgaaaagaagagaaaaaagccatggcttggaaaacagaggtccgtttaaaactatctcacaagtaatcactctctggttgattttgtgttggactagtgaggtttttagggtttggattgtaggtgaacgaagtttcagatgatataatcgatggtctttggtcagatgatcctccattacaacttgaatccgttcccaagatcagacgtattacatcacagagtaaaaacttcctctgtttttaacattctttactttttcttgatctcggtttgaaagattcgtcttttatcatttactctaatatctttccaggagatatatcttgtgtgatacgatctggagttgtaccgcgtctcgttcagttgcttaacaaacaagttttccctaagcttcaagttagttgatattttatgatgatgatcagtgtaacctttgattacgatatattcagtgatctttgtttttatagtatgaggtagcttgggctctaacaaacattgctgttgacaatccgggcgtggtagttaataacaacgctgttccagtattaattcagcttattgcttctcctaaagattatgttcgtgagcaggtaagtattttacttcgtgtagatatgagaatgcttgtcacagactcacagatatgagttttgacattattcttgcaggctatatggacactgagtaatgttgctggtcattcgatacattaccgtgactttgttcttaactctggggtgttgatgccactgttgcgtcttctgtataaggatactacactcagaattgctacttgggctttgcgtaacttgtgtcgtggcaagcctcatccggctttcgatcaggtcttcttacttctctctctgtctctgtttcctctgttttgtatactttttaacatatgaagcatgattcaacaggtgaaacctgctctccctgcgcttgaaatacttcttcattcaaataatgaagatgtcttgaaaaatgcttgtatggcactatgtcatctgtctgagggttcagaagatggaatccaaagtgtgattgaggctggttttgtcccaaaactagttcaaatcctccagttagtacttctcagaatatgtatttaacccttttgtgacatgtttggatactgaaggctgacagttttttcttttttcagacgcccttccccagttttatctgctcctgaacttcgtaccattgggactctagttactggaaataatcaccagagccaagtatgtaattcatgttccacttatgttgtccatcttgtggagtaatcgtttatcaaaaacgataaatctgtcgaaagcttatgtttatcacaatgtctatagaatgtttagtagaagggatgcagtgcttactttgttatatgtcccttgtttacaatgttatgattagattttgtaaccaaacaacaaagtacgtaggctctgaataaacctttttgaacatattctttaggctgtaatcaattgtggtatcacttattgttttctatttgtatttcttgcaatgatgataacagttgcttattgatgcaaatttgattccatcgtcggtaatctggctctaaatgctgaattggacataaagagagaagctgtacgggtaattttaagggccaccgtaggtggttcgcctaatcaaatcaagtacatccctgtcttctctctttatcacttttttcatgcgtattgattgatcatcaagtaacaatctccatatattggtgtgattcagatacttggtgcagcagggttgcacaaaacttctatgtgatctcctggtatgtccagatataatgatca

SEQ ID NO: 87 - DNA, 907 bp, Arabidopsis thaliana landsberg
tctaaataaagaagccagctattggagccagatcctgaacccttatgaaagtgataaccaggtaagcttccatctaagcaaactgcgaaacatagtatataaatactccgaaagttaaaaaaaaagaaagtattggagatgatacagtacaagctcctctctctttagctttactcgacagcttcagtttaactagatcgctacggtcaacggaggggatagagtctgaagttgaattgaaggacaaagaaaaggaataaacgatcaagactattccgattgaagcgagaagccagtcactcttagaccatgttctgcattgtagcagagagcgaatcgccattgaagaacagaagcaaaggaagtgagcagtagtatgtaaaatggtgatatttgtgttgcttttgtaacttgtaaggaagtttctcagtgattaactgtacgtttgaaaaatctagttgtatcttattgaccaaagatctagttgtatcttatagaccaaagaaaaccgaggatctagctagttgtatcttatagaccaaagatctaacttatgccccaaggaaaccgaggatcttaataataataatatatattttaatagagagactgaaaagattgtattttacgatctttatatttaaattcttgaatgatgatgcttaagttttcgtcgatttaaaattctatgtagcgtatcttgcccttgacaatcgggtaacagcgaaaaaggagcagttagtgaaggaggagctggaaaaggtgacattttgggattaaacattaattactgggggttttcgaagatcctaacactaaacttgaatgtgctttctctgatatttgcaggtgaaataagcaggtacacaaacaaccgacatctgggtcttaccaccggattacgtca

SEQ ID NO: 88 - DNA, 958 bp, Arabidopsis thaliana landsberg
gtcgctaaatggccaatctaacacatagtagttattgcgactataagtaaattggggacacaatagtcacatataagtcgttaaaattataaatataataaattaatttttattatgatattcagactattatttttgtaattatcaaaatacaagtaaacattctaacaaattttattttaaagctttattttaaaaatgctctctttaaaaaattgtacaatgtatttatatatatatatatatagattaattcactctaagtaattaattaaaaagggatatatagtgattgaataatatttttggtatatatattctttatatataccaaaaatattacatatatattatcacatatctattctttatattggtatacataaaaatcaaattttggatactagcaaatattatggatcaaagttatgaaaacttatgattttcaaaatttaaaaatattgtgcgactgattaccgactaatttgcgactataatcaagtatattgggcttaattcaaaccctggaaaattttcgctacccaaactgaattaagactcggcccactaaaagcccagaataaatccaatgaaatcaagaaaaccctaatttcttacctctctcgatctctcttccaatctctctcactctcttcaaatccctaaatctctttcactctcttccaatctctctcactctcttccaatctctctgaatctatgtcctgatgcctctagctaagcgaggaaggaagagaaaagccgatccaaatgtttcacagagacctggagcgtctaaacccactactgtgaaaagaaaccctttacctagtgaatacaacttcacacccgcgggcgagattcctcctgctcagtcttcccaagggcgagtccgagttcaaccccaacaagcaaggtcagcagctccacgagtgtccgactatccgcctcctcgagt

SEQ ID NO: 89 - DNA, 1377 bp, Arabidopsis thaliana landsberg
gcagtaggttcgttaatgattctagcaacattgagcccagcaataacactagcattcttggtagcttgcctttgagcatcattgaagtaagctacgcatagtcaaaaacaccaaataaacaatcaatcaccaaatacagataataaatatatctctccaccacatatataacaacaacaaactaacctggaacagtgacaacagcgtccttgattttctttccaaggtaagcttcggctgtctccttcatcttagtcagaatcatagcactaatctcctcaggactgaaaaccttagtctcaccatccttgatcttgacttgaatgtatggcttaccatccttgttcacaatctggtaaggtacaagtttcctatccttttgaacctccttatcctcaaatctgccaaatacaataagaaagacttaaaccaacatatatcatctccaaggtgaaacaaacacagagaataagtaattactttcgcccgatcaatctcttaacgtcgaagacagtcctctctggattaacagctgcttgattcttagcagcctcaccaatgagcctctcagagtcagtaaaaccaacccatgaaggtgttatacggtttccttggtcattggctataatttcaacatgaccattcttgtaaacaccaacacaagagtaagtggtaccaagatctatccctatcactgatcctaacttcgtagcctcttcttttgcagtggacaacgcaaataaacatcctgaaatcgtaaaaattccaatcgtcaatacaaatcgagatctaaccttttaagatcgtgaaattgcaacggaacattgtaaacagacacattcagatccaggaacaacgaacaaaagttctgagattaagcaacaatgtagaggagatctaaatcggagaagaagatcggaaaatcactaaccgaagaagatgatcgccaacacaacggtgctgttagctccaaacgagcgagccatatcggaaacttttgcgtacgatctctctttttgtttcgtctctatagatcgaatgaacttgttttgaacacagagagagcttccttctggtttttaagctttgaagaagaagctttttatggaagacgaagaaatttaactatgtcatcagagatgacgtggaccaattatcttacgatgatctgtaatgtcaaccaatcagatttggtcttgtgttggagtaatcgtggccgttggttacttcggttcttcttcttaattctagacgatgagcttttgttgggcccagtcttcttctattagtatcactagggctgggaaaaaaaacctaaaccgaataatccaaaccggaactgatccgaaaaattggattcaaatctaagtttgaaag

SEQ ID NO: 90 - DNA, 883 bp, Arabidopsis thaliana landsberg
agaatggttacaccattcttatgattacgtctatttaattttttatccttttatatataaagtcactgattaggtcgacaactcttgtaaactgtatcaaattaccataataataatacttattgaactgtaattctgtaataaatcaattctttttctataagctaatctctcaaaaacaattatgtaaaaagtttaaaattaaaacttttttttctttcttggtcgtctttaagaagaagcatatccatggggatgagtcttttgccacttccaagcaacctcaagactttcttgaagattagtgtaacgagcagaccaattaagatctctcagaatctttgctggatcactgtaaacctctgcgtaatctccaggtcttcgaggcaaaaaatctactttgatatctactcctgtcgctttcttacatgcttccacaaactctttcaccgatcttccttttcctgtacctacattgtatattcccacatttctaggcttagctttctcgagagcttttacgtgagcatctacaaggtcagtaacatctatgtagtcacgaacacaagttccatctcctgttttgtagtctgttcctttgacctgtttgaatccattttttcagttataagagttgagtaaaaaagaagcatagagagagttttgagagatgagtgtgttttatttacctgaaggcctggaatcacgccacgagctgcatcgaaacaggcacccgaaatccgtccgtgttcacgtagctcgggctttggagcttctcctagtctaccttctggatctgaacctatcacgttaaagtatctgtggaagtaataaagatcatcagacattgtttggttgacaaatcagagtcagagacttgtta

SEQ ID NO: 91 - DNA, 630 bp, Arabidopsis thaliana landsberg
acttcttagctaccgcagcccatattatcgagacataattgcatgaaaagaacaaatgatcccgagtttccatagtgttcgtacataacacacagtgccttgaggctcttctgttccatataaaacatatgctccccggttgatagtctatcttgcaccgcaagccaaatacaaaacgaatacttaggtttgccacgattgaaccagacccctttgtgccagggaactgtgggagagagagctctgatgtggttccacgtattcttggtagagaacgttgctttgtacgcattattttttacctttccacatggctatgtcatcagcctccttttggttctccttttcaatttcattgaaatgaactagacgatgtcttcttagtcgtcttcctgtctaagccttttccaacgttgactctttacttatcctcttgcttctctctctcatcttcttgcactttcttgttcttatcccaagctttgagtctttcaggtacgacatcattttattggatcattactcttacttcattggtggtttttgttggtctaaagaatttaataatatcaatattctagtttgcattgataatgcaaaatcttatagcttaaagtttatttaatctcc

SEQ ID NO: 92 - DNA, 5598 bp, Arabidopsis thaliana landsberg
  unsure (1)..(5598): unsure at all n locations
cacccaaactagaaatggttaagagttacaaaattgaatcataaatcatatcccggttaaaccggatgctaaaaaccaaaaaaaaaaacctaatcatgtaacaatgtttagccaccgctagtcttcatccgccgcctaagttcaaccgaatttctttcgccgaggagttccttcgccggctgcaacatacccggtggagattaaaaaccggcactccactcgcagtacaagtcttgtgctccgccaccgtctgaactcttccgtcgtcgggccggaactggtgtcgatcgacactctctctgaatccggagtccgaaatcgtcctttagcttccttttccttagcttttgctccaaaatgtctccttatctccattgttgtcccattgcataaaatacctgaaaaacactaagaagacttgagaaataacataaagactcaaaatcctataactaaaacatagataaaattagtaaaaacagggatatatcaatacatgttgcgtgtttggtgtgttttcaggtgcagaaggagcgtacaaggaatctactcgaccctttactcgatccaggcagctgtagaggaggcagcaatcaactcgtccaattttcttgatcaaggcagctacagaggaggcagcagactctacttgaccccctactcgatcctctactcgaccagtttactcgatcaagggaaacctactctacaagacttgttgatcgttcaaagcgtcttttgatcctcctcatcccccactcaaccaaacatctgagcataagaataagagaggaagaagcaactactcgaccaaatgatcactcggaacatggaggcaaaggcgcagactttgcagcaccctctttactcgatcctcaagatcgagcaatcatccaaaccgcctcaagtctcttgtcttctattgaatctagggttttcaacattttagtataaatagatcaatttgggatttgttcaaaggatcaagtttttatctcttagtttttctttgtgtttttaatcttaaaatcttaattactcttaatctatttcgttctttgagcaaagttgtttatcttgtttgcatctaccatttggtatgatttcagtaatttctgggtttgtgtcttcattatgttgcttgagtagtgattagggtattgaggatggattagattagcgtaatctctaggttagtcaggtggttaagattaggttagatccctcctggattcgttggcccctatgcggtttttgctggctaatgtgggtattcgaccataggtcactacaagaaaacagttaaatacccactacacccggcgactacatacatagtcgctatatttggtgactatttgggtacaattatacgactaatttacaactaacaaaaatatagacgttagttagtcgccaaattaccactgtagaggcgacacgccttggtagtcgctaaagggcgactattatatgacacatcttaatgagtcgccaaatgtagtcgtaaattagtcgctattttgcgattaatatacgacacgtggtaatagtcgttaaatagcgactattctatgacaactgcggcgtgtcattaaatatagtcgcaaaatagacgtaatttgccgactaatatacgacacctcgtaatagtcgtttaaatagcgactattgaatgactacaacggcgtgtcattaaatatagtcgcaaaatagacgtaatttacgattaaaaaaacacatgtaattcgttttgtaagttgttgtacctattttaaacgactacactatttagtcgtgttttagtcacccaaaaattgcctatataatgaaaatttctcgtacacaatattcattcacaacacaaacacaatacaaataatacctttaaaaaaaataaacttttttgaagaaaaaaacgttaaaatatatttagtttcattattagtcttataatggcgggaaactacaattatggcggtactggcggtttctatcgagattggatgtacaagagatttgatgaagtgacggggaatttgtcagccgaatacgtcgcaggagttgagcaattcatgatattcgctaatagtcagccaatagtacagagtagtcgaggtaaatttcattgtccttgtagtgtatgcaagaatgaaaaacacatcatctcgggtagaagagttagtagtcatttgtttagtcattgatttattcctgattattatgtttggtataagcatggagaagaaatgaatatggatataggaacgagttacacgaataggacgtattttagtgagaatcatgaagaagtggataatattgtagaagatccatatgtggatatggtgaacgatgcatttaattttaacgtgggatatgatgataactatcgtcatgatgatagttatcagaatgtggaagaaccggttcgtaaccattcaaataagttctacgacttgttagaaggtgcaaataatcctttgtacgatggttgtcgtgaagggcagtcgcaattatccttagcatctcgactcatgtagaacaaggcggattataatatgagtgaaaagttggtggattccgtttgcgaaatgtttacagattttttaccagaaggaaaccaggctaccagttcacattaccaaaccgaaaagttgatgcgcaatttaggacttccatatcatacgattgatgtttgctcgaacaattgtatgcttttctggaaagaagacgaacaagaatatcattgtcgattttgtggcgcataaagatggaagcctaaagatgaccgtcgacgaaccaaagtaccatatagtcgtatgtggtatctacctattggagaccggttaaaaagaatgtatcagagccacaagacagctgcagcaatgcgatggcatgctgagcatcaatcaaaggagggagaaatgaatcatccttcagatgcggcagagtggagatattttaaaaagttacatccccggtttgcggaagaacctcgtaacgtttatctcgggttgtgtactgatgggttcaatccgtttggcatgtctcgtaatcattcgttgtggcctgtgatcctgactccatataatttaccccctagtatgtgcatgaatacaaagtacttatttcttacaattttgaattctggtccaaatcatcctcgagctagtcttgatgtcttcctccaacctcttattgaggagttaaaagagttgtggtctactggagtcgatgcgtacgatgtttcattgagtcagaattttaatctaaaagcagtactactgtggacgattagcgactttccggcgtatagcatgttatcaggatggactactcatggtaaattgtcttgtcctgtttgcatggaaagtacaaagtctttttatctacccaatggacggaagacatgctggtttgattgtcaccgtagatttcttcctcatggtcatccatcccgtaggaacaaaaaagactttctgaaaggaagagatgcttctagcgaatatccacctgagtctttgacaggggagcaagtttattacgagaggttggctagtgtaaatccaccaaaaacgaaggatgttggtgggaacggtcatgaaaagaagatgcgaggctatgggaaggaacataattggcacaaggaaagcatcttgtgggagttgtcttactggaaagacctcaatcttcgacataatattgatgtgatgcatacagagaagaattttcttgacaacatcatgaacactctcatgagtgttaagggtaaatcaaaagataatatcatgtcaagattggatattgagaaattttgttcacgcccaggcttacatattgatagtaatggcaaagctccatttccagcgtatacattgacagaagaagccaaacagagtttattacaatgtgtgaaacataatattagatttccagatggttattcttcagatttggctagttgtgtagatgtggataatggaaagttttcaggcatgaagagtcatgattgtcatgtatttatggagcgactacttccatttatctttgctgaactccttgaccggaatgtccaccttgcactatcaggtacaatacttactattttttattccaacatttttttaatttaatcatttaacttgcacatatattttaggaattggagcatttttccgagatctatgttcgagaactttacagacaagtcgcgttcaaattctcaaacagaacatagttttaatcatctgtaacttggaaaagatctttccaccatcattttttgatgttatggaacacttacctatccatctcccatacgaagctgaattgggtggcccagtccaatataggtggatgtacccattcgagaggtttttcaaaaagttgaaaggaaaagcaaagaacaaaagatatgctgcaggttcaattgttgagtcatatatcaatgacgagattgcttatttttcagagcactactttgccgatcatattcaaacaaaatcaaggtaaatatatttaattatttaacgattagatatttttcgatattaattcacttacatggatcagggttacaagattcaatgagggtgaagttcctgtatatcatgttcctggagtacctaatatatttagttctgttggtcgtccaagtggagaaatacgtgaagtggctatcagaggaagactnnnnnnnnnnnnnnnnnnatgttatacggaattgtgattattttcaagtaattgagaggtatataacaaaggtcatactcccattttaagttaattataaatgtttgttaactaacccttatatgttgtttttgtctttgtagtatgttcgaagattttctttctattaaatatccaggattgaacgaaaaagaactcttcgtgaaaaaaggcgaggaatatcatgtgtgggtgaaagattatgtatgtctaaataatttatctatatattatttgcatttatttattgttattcttatctataatgatgtttatttcaaaatttgcatacatgttacatattggaactctagtaatccatttccaacttgggtttaaggtttaggtttagtgttgaggagcaaatatacttcaaaaattaaagtaagcatagtatttgtaagcgttctggaatcaaatatcacaagatgataggtggatgattgagttttagggctaaaagcacaaccaaagctatgaacctaaatttatattttcttgttagaagatacaaagccaaagactcatatggactttagctacaccatgaaagctttgagaagcaagaagaaggttggttagtgttttaaagtcgaatatgacttcatgtcatgtgtatcattgagtataagaacttaaaccgaaacccgatcttataagcctaagtagtgtttccttgttcgaagacacaaagccaaagactcatattgactttggctataccatgaaagcttgaaaagcaagaagaaggttagttagtgttttaaattcgaatatgacttgatgtcatgtgtatcattgagtataagaactaaaaccgcaaccagatcttaaaggcgtaagaattgtttccttgtgagaaga

SEQ ID NO: 93 - DNA, 2243 bp, Arabidopsis thaliana landsberg
  unsure (1)..(2243): unsure at all n locations
acgtcttggaacttggacttcttcaacattcttggaactttatatacatggtaagtaacatctgtgcattaatgttcaccaagagttgctgatgatgaacggttcaagagcatagccttctttgatgccctaacgttcttcagagtcatcatcagcttttgtctctctccttcaacctctgcaaacttgaggcttagctgagaataacggtcatgcatttccctaagctctgtctccatagacgaataccggcctttggtatccaacatttcttcaattagattgtttatgtctctgaaactctggaagattgcttcgtcatcggtgtgttgcttcaagaaagagctgcaatttcaggcaaaaaggaataataagttcaacgtggtctagtatagttacaaaggcgaaaattaatagcagaatttttgaatcgtgtacctctggaaatgggtggttgattttttctttccacgcaatgcttcagcgagttctatttccagtgcaagaaccctttccaatgcgtttccgcaactgaaattctcttgagatagagggaagatactctgaagttcttcctttgcctgtcgaaaacaagatcataagacttctacagacacttatgcttcaattcattacaatctctaaaaggtaaacatcagcacctgacgcaactgcatcagctcctgttccaaacccggaaatctggtgtctgaatcattatcatcttgaggttcaagtagattctcattcttcatccgttctagctgtaaagaagacagaaaaaagacccaatgacgctaggcaaaatctttctgtagataattaccatcatgtagatattgtaattcagaattgccatccaatccaaactaagtcactgatattaacatttccaattaatttaactagtaattttaacccttaatccagtattacctcatcgtttaggtgatccatgctagaccttaaagtctctgccctgaatttatcattgatcaaagctaggctttcttcacgtttgtccagcgccattgcttctccggaaggtaattggtctctgtttccatttacactgctcgattgaatagtaccctgatgaacatacattaaaataagaaattccttatagcacctttttttacccgtcgagcacaggaaataacatccttaatatctaactagagaactatttacagaaaacatcgacatacgtagtagcctagtcattaccagcttgattaaatcacgtaaactagttttgcataacatttcataaagaagatgcagcagaagtttagggttggaacagaactcgttttaacttctatgataccatgaacttgaatattcttaacttccaaataaatgctaatgcaaacgcaatctaactgagggttacctgaattatcgacctgngactgatgatccgcactgtaggatcaatacaagcaacttccctttgcccgttgttcaccgagtcgcctgaagagactgcaattgtatttttgtcagccaactctgacacctcactatttaatctatcattttcttccatctcaatatttttctgagagctgcaacgttgtactaatcctctccttgattctagctctttggacattttcaaactctgctctttgcattgttgcagaatagcttcaagcttctgtttttcttctttgcagcactcaaggcttaataatgagcaatccagctctgccttcatcatgtcataagccgtggttttctcacgtttatcatagataacagattgtcgatcagcctccagttccaatatttttccctccagctctttagatctctttaattggctggattctgcctttttccttgcttcattctcatcaatggcatcttgtaatttcatcagaatttcctcaccatgcttcttggacatggtcagttgatattgaagttcctgcagcttggtgtcatactgttctttgatgaaaatgattctcaacgactcctgctgtggagttagcggggctttgtagtcggccttttcacgagcacgattgcattctgcttcagcattgtccttaagctctttcaaatgattggacatgcttttgaactcttctgttttcaaaatctgctcagagagcttctgagtgagatcactgcacctatttttcagtgtttcaagcacactggcacctttcccacaaagcccagttagtttatcttttagtatctcaactgtaatttcagcctccgct

SEQ ID NO: 94 - DNA, 8721 bp, Arabidopsis thaliana landsberg
ttttaggttagcggcataaaatcttttagtagaagaatgtaatgagggaatttttctgtgttgtttttgcctgaaaaggtgaaaagaatacaaaaaccatcctgtaaagtttgttgaaggacaagttcaggataagattttgatttggagattcactttgggtgtggatttaatgaaaattagaagtttaaagtaagttttatagaccaagttgttggacaagcaatcgaattgggagctatgttatgtcttgattatgcttacgagttcttttatgttacctatattttcacctatgtgaatacggccgttgtgttgactcatcatcctcaacatgaatgtggaaaaaattaaggaaaattagaaaatgaaaactgcttgaggctgaaaataaggcaatgtgaaaaacactgtacaagatatgactcaacacagtgagcttacgcctatatatagaggaccaagtgttcttcttctctaacacacacacactgacacacacactccttaagatcatctctctcgtgtagtgtattttgtcaataaaagttgaacagatggagcataagaatattggtgcagaagtacttcaagatacgtacgatgatcaacagaaatgggttcttgattcttctcttgatagcagaggacgtgttcctcttcgggctcgaactggcgcttggagagctgcactcttcatcatcggtacatagcccttattgagattgtatatactttataccatagaattataacactgaaagaagtgtactataatatcccaaaatattaaatctttgtgaagtcttttgtttcgtcttctctgcacagcgatcgagttcagcgagagattgagttacttcgggttagctacaaacttggtcgtctacctaacaacaattctaaaccaagatctcaagatggctataagaaatgtgaactactggtcaggtgtcactactttgatgcatctttttggaggctttatagccgatgcatatctaggccgttatggaactgtcctacttgcaaccaccatttaccttatggtactaatttctgagaaaccggataaataataatactcaaaaactattatcgatccttttcaatagtttaaagatagaccttcacatatacacacctcttctatactctcataaccgagtcaatgatacccaaaaatatcatgagttcaaaattttaaatatatatttatatatctaccttattaatatatatatctatattttatattttataatttatttttgttattttgttgtcggttttgatcggtagtaccttttggacactattataaaaaccagctctaataacttcatatcttatcacacacaacaaattttgagattagtcaaaacttgatatatgttttgtttccttgtttcttgtcttaatttgttgaatttacaaatttgcagggcttgattctgttaacattgtcttggtttataccgggattgaaagcatgtcatgaagacatgtgtgttgagccaaggaaagcccacgagatagccttcttcattgcaatctacttgatctccataggcactggaggtcataagccatcccttgagagctttggagctgaccaattcgaagatggccatccggaagaacgaaaaatgaaaatgtcttactttaactggtggaatgctggtctatgcgctggtattttaaccgcggtgactgtaattgtctatatcgaagaccggattggttggggtgtggctagcatcatactcacaatagttatggctacttcgttttttatcttccgtatcggcaaaccgttttaccgttatagagcaccttctggtagcccattgaccccaatgttgcaagtctttgtcgccgccattgccaaaagaaatcttccttgtcccagtgattcttctcttcttcatgagttaactaatgaagagtatactaaaggccttcttctttccagctcaaagaatcttaagtaagtgcttaacaactcggatgcttagtcttggtttaagttaggttttggtttggatgttttagttttttttttaacaatagcaaacaagtaacatatatccaaaataatatggatcgatttgttaccatttcggtcaggggtttaaaattagtcttgatcaaatatgcaacaaaaaaaaaaaattacataagttttgaatccgtttaaagcatattatagtatccaaacatgcatgtaagtgattccgattctgtttgcagatttctagacaaagcagcagttattgaggaccgaaacgagaacactaaagccgagaagcagagtccatggcgactcgcaacggttacgaaagtggaagaagttaagctactcatcaacatgattccaatctggttctttacattagcctttggagtatgcgccactcaaagctcaacactctttatcaaacaagccataataatggaccgacacatcacagggacaaacttcatagttcctccagcttcattgttctctctcatagctctctccataatcatcaccgtaacaatctacgagaaactcctcgtgcctcttttgagacgtgccacaggaaacgaaagaggcattagcattctacaaagaatcgggatcggtatggttttctccttattcgctatgatcattgctgctctgattgagaagaaaagattagattatgctaaggaacaccacatgaataagaccatgaccttgagtgctatatggttagctcctcaattcctagtcttaggagttgcggatgcttttacccttgtcggtcttcaagaatatttctacgaccaagtcccagattctatgagaagcttaggcatagcgttttacctcagcgtgcttggagcggctagctttgtcaacaatcttttgataacggttagtgatcatttagccgaggaaatttccgggaagggctggtttgggaaagaccttaatagcagccgcttggaccgcttttactggatgctagccgccttgaccgctgcaaatatatgctgctttgtgatcgtggccatgagatacacttacaagactgtgcagccgagtctggctgttgttgctgactgcggtgatgacgttgagacagccacggggacgaataacacgtccaagcttacgtaacttagctattggtttggtcatatgatgaccattttatgttctgtgtttattgtgtacttttgaaaagtgattttgtagtcattttaacattcgtgtggcgttagcctttagaaacgtatgtaatacatcttacagaactgaattccaagtccaaatttatatacaaaatagtttttaaattatgatatacgtattttcaaaacagaggtaattaatcataatggtacattacctctgttttaccattatgatttgggactttgagcaacccaacgaaccagcttagtacgatgatgttatacatcttacaggaaacatgcacagactatattatcggatctaatcttgtcaaaagacttagatactcgacaacgtgtatgtaacataagcatcacacagttgaaatcaagattcacttatactgaaggacaagaataaggcaacaagtaaaaatctaaactctcaaaaagcttcatgagaaaaatgttgagttgaaaagatattagggtgcaagcctttgagggtcgcgagggaagggctggttcgggaaagaccttaatagcagctgcatggaccgcttttactggatgctagccactttgaccgttgctaatatgtgcttatgtgatcgtgggcatgaaagacacttacaagagtgtgtagccgagtcaagctgttgttggtgacggtggtgacgacgtccaagtttatgtaacttttagctattggtttggtcatatgataaccattttttgttcctttttgtgtgtgttaactgtttgttgcacttttgaaaagtgattttatagtcattttaacttaataactaaaagtctaaactgaatcagatcaaattaagatggttaactttgcggagtaagtttttccatgaaaatatttatattacatgatgtgtttaactatttaacaaattaacattttaaatatctcctctggttttaaatcaagaaactattcgtatccatcgagcaatgctaggaactccctggttaacagcgaaggccatataatacccaggcggagaaacggcgccgttaggtggagccgtacactgaatcctataacgacctactccgtcaggcacagacggagcaacggtcaacttaacgagccgttgaccttgagaaaacgaatgagtcgcaaaaggcgcacttccccaattcatctgaattatccccaccaccagcaacggcacggtcacgaacacgtcgaaaacctctccgtaccgtatgatctgcgggatttcttggatctctggtcggagattagctcgatccggtgacagatactccggtgaaaacgcttcgatccgtagctccgttgggaattcggcgttgaatttgtagaaatagtgaggattgcttccggcgagaagaattctaccgtccggtaaaagattcgccgtggaatggtacattctcggtacagttcctgggttcaacgtcatgaatcgtaaaccaattggttgatcgggtcggtataaaagcgggtataaacacggatcggatcccatttcgaatccttggcttccggcttgagctccgtttatgatcagaatctctcccgtcggtaaattcaccatatctcccatgattctcccgaacggcatctcctccgtcacccaaacaggatccgccgcggtagctacgattcgtccgcaggttccatgcgccggagcatcaattgcacgcgctgtgaaggctccggattgtgctccgccgcagattagaatctccgctgtggtgaaatctccttggatagctagcatcgccgatgatccacctgacggataattcctcggaccaccgtctaacggtggatactctttcacgacggcgtttatccggtgatcgtatttaacggcgcgactgttggcgaagatgaagagattgccaccgtcgtcgtcggggaggagatgaacgtacggatagagattatccatttgtttgtcttccacgtcagcaagaaactgaaacggaacggcaccgttttcgcgtggagggtaatactcaaccgtattagttcctctaccaccgacgatgataaccgaaccatccggtaatatctggttagaagcgtaccagcgtccggttatcaattcggtatcttgaagctccacccaatcgcacgtttcgttcgggtcacagggttcgaatttacgtatctttttaaacccgtctttatccccacccgtttgtagcaacgatccgtcggataaaaactggcccgacgagcaccacgtgtcggtttgtatcatcagtggtctgatctgatttgtaccaaggtcgaacagaaccgagtgagcgtaacaatcgcgtttcaaagcggcgtcttttgggtctctccggcaccggtgacggtcaagagcctttctcgacggtccgatgttagttcggtctagaaggatgaccgtgttgaaccgggtcaccgccgtgtgcatagaagctataccggcgtcttgtacaatgagttcccatgagcctggtaaatcagcacgtacgatcgagaagagaaaaatggtttgaagtacaagtacgatccctgaccctgaagtgtagtaccaaggaataagttctgccattttttgttggctaagcttttggaagctttctgcttcacttaaaagaagattagagtggggaaaaggtgtacactgtaaattaatcacagccgtcgatttatctgtgatgatttattattcgatgatcggaaaagtacgacgatatgtgggtcccgcggactcatagttgatttcaacaaaagagatacgtaatagtggttcaaacttcaaactactactactactactactacaaaaaaaagtatttttattatcaggaaacacaatcgatcttgttttgtaatcagaggcagagccttgcaggtaaaaacaaaaattagtaaacgtatttttcagttaattaactagcaagtttccccctttattgctcagaaggtataatcatgaaaaaacataatcaacaaaagaaaactttttctactttttttagtcgataaaaacacattttgaatgatttttttgttaaaatagtttcagttaatatgaaactttggagtatacgggttttatgatttactctaaaaacaaaatggggaagagatctttgatatgcaggtggtccaaattacaaattagaaaagtaattttcatttcaaaaacttaactcataaacctaaacataacgagataggtttctataatttggaactttttttttgctgtacagctcaattcatttcacagccattcataaaatgattagtcctattggctaacgtatactttttcttaccttttctccatacttgtcttttttctaatatcatttcgtcatcttgatgcttggacaacaaaaataaatcatacttcttctacatgattagttggtaaattaatttattaattccctaatttagattagttgataagctttttggttgtgctgtctgcagccagtggtctcaaaaggtatgacccatttctaattgatgtcactcttataatatgtatcaaaatgtacaatcctattattgtcactctctttctctttaaatatagtcgtaaggaatggactagcttattagccttgatatagtccgacaagaggaacctatctcgatccgttcaagattcacgggtataagttaaatatgagattgttcaaaaacacacgcaaagttaaaatacgagtaggtttgatgatatatattattaccgtgactttacatttttatgtatcgtctattcaatctgattatcccttgcaagttacaaccatgccacaatggtaatttacatgtactttgtagtgagagaacctaggtgagatgacccacttctagaaacttaatttgcataataaggattaatcttcgggtgctataataaacttaactttgtttcctagcactttgatagaaatgccattatttcttatctcatgttacacctatctttttctcaagctagtttatttttgtttagctccatcttcttttggtttgagcaaatgcaagtgcttcggaatgatatgcaagctaatgtggtagtggaaagctgttccaattaatcatttcttatgcaagtaatttgggaggtgttcatacttctccatactctatatacagtatcgaatctaaacacaaatccgtcactaaaatttggaaatgtcaatttactaatcacgatctagacatttactgttatcatttaccaaaaatttacatgttagttgtttatttattacagtaaaaacaaaaaaaaaacacaattacaattaaatagctggttaagaagtagtctaataatttgtgttagtgttgttgatgtgacacgatccatatttttgttaaaatgttggcggttgaaaattcgaattcccaaaaatcaaatttgtgtttctttttcctttgccttttttttttttgttttcttaagttttgtcggaacaaatcttgctatatatatgtgtttgcgtcatcatattttacatattttaccaaaacacccttctgccttcgcagaccaggttttaggggtttctctagggtttaccttctccacgacgatttctccaatctgacaatctccgatcacaaaaattcagaaaccctttccgctttaattgatgcgaattcagcttccatctccgccgcatcaaccacagagtaatctcacagagagaaagagatttgaatatggaagctcgagtcggtgtagtggtggaaggaggacagagagctcttaatacagccaccaccaccgccgttcataacaccgtcgtagacgccggaaacaggaaacttttacagcaacaaccacagacgcaacagacacaaagctgtcatcaacatcaccaaagtaataaacagtcgttgaatcagcagcaaggccatttcggcaccgttgagcgtcttctcgccggtggaatcgccggcgcatttagtaagacatgcaccgctcctcttgctcgtcttaccatcttgtttcaggtatagtttttacaagttaatgtgaaatttaagaaattttcaggcatctgaatttgattcttggtatgattgtgtaaggatccagttatgatataaagttggaaactttgacttaccctaaggctatttgaagctgaattgattttattgttgtattgacagatacaaggtatgcagtcggaagctgcaatcttgagcagtccaaacatttggcatgaagcttcgcgtattgttaaggaggaaggttttagagcattttggaaaggaaacttggttactgtagctcatcggcttccttatggtgcagttaacttctatgcatatgaagaatacaagactgtaagttgcattcaagtctcttttagagtgtggtctgtagtagttcatgctaagccttgccttgctttttgtttgcagttcttgcactcgaatccagtcttgcagagttataaaaaaaatgcgggtgtggacatttctgtgcactttgtaagtggtggcttggctggaggaacagctgcttcagatacataccc

SEQ ID NO: 95 - DNA, 3335 bp, Arabidopsis thaliana landsberg
  unsure (1)..(3335): unsure at all n locations
cgatcaaagttaatctcgccgtcattgatgtatctagcgaatcgtcgagcattaatgagttttctgcttcgtttaaaggtgtttcggtttgcagaatcggggaacgttgagtttggcggaaccactgcctccatcccgtataccaaagaaaatgggttttccccgtgaccatctaagagtcgtacggtaagcccacaaaatgggttgaagctcatcataccatcctccctttagatgacttaggcgtttttgagattgctcaaaatagtcttgtttgcagcttcggctagaccatttccttgcggatacggcggggtagagtaactaactttgataccccaatccaaacaaatagcttcaaactcaagcgaattgaactgtggtccgttatcagtaactatctcgtacaggacaccatgccgacatataatattcttctaaatgaaaattttcaccgttgaatccttgatattgagatatgctctagcttcaatccagtttgagaagtaatccgtcaaaattaagagatattgtacgccttaggttgacttatgcaatggtccaatgatatccattgaccacctcatgaacggatacgaggcagagatagaagagaacaacttcgaaggttgatggactaaagtgcatgaagatgacaacgcttacacctttgggaaaacttaacataatctgtaatcatagtacgccaataatatcccagtctctgtatcttgaaagtcgtagcccttcctgacaaatgacttccacacagcccttcattcacttcgctcaagacaattttgacttcggatccagaaatgcatagaaggtaagggtcattgacacctcgcgtgtacaaagcacttttggctaaacaaaatgttgggctaatgattctcatttttcttgcttgccacttgtttttcgggagttcgcctgttaagatgtaatgcttaattggctccctccaatccttagcgtaattttgatttgtcttgtgaaatgtccgcggttcaggttcaggatgttcgttgggctcgagaattacttcttcacccgagacgacaagctcttcaagtaagttactagttgttttgccgggtattattttgctctaagtttatcctgaatccttttggattcagacgtgtttgacttctttgattttcttttcttgataggtggcaattccacttcaggttcagctcgggcatgttcttccccacaagacctcgtgacaataagttttttttcttctttgatgctcctctccgtgatgcattccaccgggatgatcctcttcaactaagaatccgatgttaacgccaatgcggcaaccgtatctacagttgtattctctcctctaggtattcggactaactcgaatttttaaatttttttgaataaatccttgaccacttcaagatgtacttccatcattgaaatcttggcttcatagtctccattgaactggttaactactagttgcgagtcacaataaatgattacttcctcagctctgattctttgtgccaatcaaagcccgacgatcaaggcctcatactctgcttcattatttgaggcagtgaatagtaggcggaatgactattcgaggatttccaaagtaggtgattccaacttaattcctattctggatccttgttttgacgaagattcgtccacatgtaacttccaagtttgatttttcttcaaaagtagcaacaaagcttcttttagttcgtcagtcaatgttgctccaattcaaactctctggtcgggttgatctttgtccagtgtcacttcaaccacgacatcatctactttttgtccgcttggaaacctaggaacaattcccttctttgcaggcttcgttaattgctattgaaccttcatccgatggcaagttaaataacatattcgtgacgcttccagaacaatttccttcttcgcaggataatgtgtaggttgatggcctattgaacacaacaaaatcgacgatctttgaaacttttccagctagaactggtaaccttattgtcccgagagacatgactgactcgcttgtatatgctactaaaggagatgggtgccaaatcacttcggtccaactaattctcattctttccaatgtgcttagaaaaatttaagtctaccgagctacccgtgtcaatgagaattcttgacacttcgaagttggcgacaactagggtaatgactaaggcgacatcatgcggtctttcgaggtgacaagtttcttcttcttccaacgagatcgaggcaccttgaaaatagacttcctcgcttcacattgttttaagtagaacatttcgcctatgctttttgatagcacttactgaagtattagatcttcttcgaatctcgaatcatgccacaatccttttcgaagagccgataacgcgggattggtgtgacacccttggaagttttgagagcactcctttaaactttgtaatgaaactacgagatgacttgtttggtccttgcgacaggtttcatatatcggtgtccgaagtgcttttatccataaggatggaatattcctttaaaaacacggctgacagctcgttaaaattaccaatagatcctggttccagctatgtgaaccacatcagcgcctgtccgcaaaggttttcagagaaaaccttgtagtaccatgcatcttcatcgacttcttctagatcgatttgcagtatccnnnnnnnnnnnnnnnnnnnnnnnnnnnnnnnnnnnttactcccggtctaacaactacgaannnnnnnnnnnnnnnnnnnnnnnttcttgattgctctatctccacaagcagattcagccgctctttgtgtgatctgggatcaagcatcaacctcatgcctaagtctgttgctgagagagtaggcatgactcactacaagcctactcgcattactcttctcattgcggatcgttccaagcgaatccctgaaagcatccttgaggatgttcctgttaaggttggtaactctgttatacctgctgattttgtggtcctggactatgaaaaggaacccaaggatccccttatccttggaagagcattcctagttacagctggtgctaggtttgatgtgaagagagggagaatctctctcaaggtttgtgattcggagatggagtttggcatggatggttcaaagcttactaagcctatcagttgcattgcttttagcataggcacacctcctcagactgatcagaatcccaccatagagcaacacacaacgctccaacacgttcagctcgccaatgagagttgtagagcaacggtgtcggggatcctctagagtcgacctgcg

SEQ ID NO: 96 - DNA, 3057 bp, Arabidopsis thaliana landsberg
agaaatatcttaagtaaggattgcttgttaatcacatgggtaatgtttgggactaatttagacttctagccttaattacaaaatttaaaataataaaagagaaagatcattattcattggattgcaaaagccgattggactcaaacaaggaaaaagctaagaaaaggggtttgggacccgttggggttggaaaagaagagagaacacgtgcatctctctgacatacgttgaaacccaaacacttgcctccattttcttctttcgaatttatgatttttgtaatctcatgactatttccatcaatttccatctatttccatcaatttatcatattcaatagtatcaatacagtataatgccaatatcttcactccttgaactttcattgaccattgttgtataatatattgcattccgttaattaagttatgtataatttgtatctattagtgaattactcatccatttttttttttacaactaattactcatccatttagatgacataattaggttttctaacaataaacatccaaaaagataataataaacataaaaaggttttgtgctcgcgtgtgatctgtttatgagctagaccccccacgaggtggtgtcttttgtagcagtctttgtagacttcccacgtgcggcttgtgtagattttatccaagagagcgggccaagtccaaccccaagaccgtcctctttcgtgtgtcacatgcatatttttctctataaattaaagtataaatcttataagattttcaaggtgactaaaaattttccattttgaaaaaaaatctgctatgtttctccagtcaaaaccaatatgccaatatatcgtaacgtgcaagctaacttgattttgtacagagacttatgctttagtataagtttttaatttgaatagaaaacaagattttggattaccgtgacgtggtcgtttgagcgttaagaatagatgatgaaatgatcatgcattttttactttaaaaggtaatttattgcgtcgattttaggcctagttgtagttccgtactgtatatgatgacaatattagacgctagctatgatggtccttctgacaaggatcgtgattgtgcgatcgtctcactcatcataagtttgtttcttgtgtagtagtggtgcataactgtatatactgatatacatactttactgtgaggatgacttatcttgcggtaaagaatctagatgcacgagatcacgcatggttaattaaaaaagtccaaaacatcaatcttttattaacaaacaaataaagtatttatgtgtgtatgtttgtatataatcttacaattacaaaactgttatatgtgatacaatcacgaagaatgagaaaagaagtgtatattctcaaccttctctcaggttacacaaatgattctatctgtataacaaaattcataagatttatcatgaagactttataattaagatttgcaataatcaaaagagtccaaatgagatatgtttgagagatgagcacaacaaactcgaaaagtaaattacccacaatgtcacccaaaagaaagaaaaaaaacacaaagtttttaacttttttttttgtaaaaggacttctactaagtgcaaaaaggttttatagagcgattttcataacttgcaaaagtaaacaatgtaaatgagtgaaaaatttgaggaatttttagttggactctttttgaacaaaatttgacatcgtctttatttttgctataatcttgatacataacagatacaggccttatgctgcaataaagttgcaggagaggattatgcttgaaccagcttgtaccaaattggtggtctggatgagatcagaaaacaagttgagacaggacaaccctttagcggtgaagatgaacttaactattgtgttaactttgtttacgttccaagtctggttccggttccagaataaaataaagagagagagactcgcgagatctcaactgtgcacttctattttatataaagaagatatttcaacaattacatcagtttgatgattctttctagttagggtgtagaatctgtgtactctcaaaatctgtgtatgtatatccggtttcctttgggatgaatgcagtgttctcatttctctagatttatttcatcatgacaccatcattgttctagagtctcaacgattatatacaaaagacttataaataaaacacaacaaagaccatcgaaagtttttcaagcagaacaaagttaaagactaaagagagtagtcacagggtctgatcagacctttcaactgtagagatcatcatcatccgctgctcctccggatgtggcaaacgggtcgactcccccaactgtggcagcagctccagggaaagctccagtagtccctgtcggcgcatctggaaacctgaactcgcttccaaacccacgtgattgctggagagtctgagcaaaagcctgatacttgcgaatgtctgcatcactcactgatctcctagcgtatttcatggattcctcaaagtgaccagctttaatctctgcaatctcctcctcatcctcttccattgcttctggcgactctgctctcttcctctccttctccatatccttctcgatgttttctctgatcgcatacttgcaagaacgctggcaaatctctgtgatgtccgcaccactgaagccttgggtgtacttagcaagagccctcaggtcaacatctttcgccacaggtgatttcctcaagcaagacttaaagatctggtaacgagactcctcatcaggaagaggaatgtagatgagctgatcgagacgaccaggacgcagaagtgcaggatcaatgatgtctggtctgtttgtagctccgatgatgaagaccgtcttcttagcattcattccatccatctccgtaagaagctggttcaatactctatctgctgcaccaccagcatctccaacactgttccctctctgttattaaaagagatgttcattaatttttctgagataaaggtaaagggcataagttgcctaagtagagagattaagaaaccaagtacaatacct

SEQ ID NO: 97 - DNA, 941 bp, Arabidopsis thaliana landsberg
tgttgtattatttagtatgtgattgctgctcttatttactttatagttcatgtgttttgtctaattgtttgagtttactcaattttgaggtagttgacaatgacacttcttactgacatcacttgaccaagacccaacttgttatgtgttttgtgctttttttacccccacagtttgataccacttgttttgtaagccacaagtacatgtacttttatttgataccacttgttatgtaagccactaagacatgtacttttgtttgatactacttgttttgtaagccactaggacatgtgcttttggtttgagaccacacaacaatactcggaacacaatttatactttagttcaatttctctcacttctctatatatacactcttctttaactccaacaatactcggaacacaatttatattctagttcaatttcttctcacttctcaatatgatgtatcatattatgcacattcggaatcaacctgttctccacaagtggatttcacctattttacagatatgccttcaaatcgatgtaatgtgatagccgctcgaacccgatttcgggataggactaagcatgaaaaactgaaagctgatttgttgaatatatatggcaaacaaaacaatcttccttaactccaaactatcttctatttcactacaaaacactcttcttcaacaacaaaacccaataaacactcttccttaactccaaaactcaagaaattctatttattctaaaatggcaggttcttcccattataatctcgacaaaatgatggatgacaagtttgatcaatgtatcgatcaagcattagaaaattatgttgattgtcgccaagccaagccaacaacaaaacatgctcatattgaaagataccgtgaacaaggacacatccagttgtggaacgattatttcagagatgatctgacatt

SEQ ID NO: 98 - DNA, 1565 bp, Arabidopsis thaliana landsberg
atgaacttatgatacctctgcttctgataaaggtatcatatagtcatgctcagggacttcttctactgcttgacgatacattcactgaaggaaatatcaacgtttcaagacttaagaagaggtgctaagaagctgatttggttggtataaaagaaatggaagtacctttggttcgaagaaaacaaccggatttggatcacggatacatgacaacaacagtccctttgcttctcgtggactccgagggataacaaccttaataccagggacatggcaaaagaaagcttcaggggattgtgaatggtaatgtccaccatgaccaactgctccatatggtgctcttatcgtaagtcctatcaagatccacataaaccgtaatgagtaaaagagattaccgatgtcaagtcacgaaataaatgtaaagatgaaagatttacctccacagttgaattggttaccacttcggtatctgaacttagccgcttcattaacaatctataaatcacaaaatcgttcaaaaaatccgaaggccgaaatcatatgcttgtttaaagagagaaaatctacctgatcaaaagcaggatatatataatctgcaaactgaatctctacaattgctcgattaccctgtcaaaatggaacaccaagctgaatctcgcaactgtacagttcacaacatgaacacaaacaagaactcaccattgctgctagaccaatgccaaatccaacaatgccctgaatccagtcaaaacttaaatgaatgactcatcaagaaacactaccttaagaagtgaaaacagaagcatctcaaagaacgatacctgctcacaaagaggagtattgaagacgcggtttttcccgaatcgttcagctaaacctgttgtacagcgaaagactccaccaaagccaacgtcttccccaaagacataagaccttccacaacaaaaacttaaagtcagactctaaaacgacatcatacatatttgaagcaactatatgtgtaaactaattaactaaattccccacattttttatctttctccacagaatgtattagatgtctataaaacctaaggatcaaatgtctagtgtaagcttaccgaggatcggtgtccaaagcgatgtgaagcgcttgattaatagcagagtatagattcaatggttttccagtttccgtcgataccctcctagctccgtgagtcaagctcggaaaactcagtttccggcaggatctgcctaaaagagccgccatttacacaaacccaccaacaatcaatctgaaaaatataggattgcgacaaaagcaagctctattttggcaactttcatccaactggtaagatttttaggtggcaaaggtttgctacttttggtgggtgaagaaagaaacagattctaagttaatcacgtaattacgagatagatgatagatactcctgccacgtcaaatccgacacaaatcaatatctcttcgcaagttttttttttttttcgcggtaattttgggtgttgtctaggatggggtcgcaacttggtgttacattaaggcccaaaaggctaagcct

SEQ ID NO: 99 - DNA, 1530 bp, Arabidopsis thaliana landsberg
taaagcatgtgtaagttgattttctcgctttgattcttcttggctaagttagatagaaacgataacggaaagacgaacgctgctcttccaaccatgaccagacccattaggattgagctcactgcgatcgatgttcccggtgtgtcactcacggatctccacttgtcaatgtccaaggcatccattccaacatacaagaaaataaatgtctccgcaagaaatgacaaagttgcaaaggtatgcctgtttcatcgaaaaaaatcataagataatcattgggaggtacaaagtgttaatctcagcaaaaggcggagaaactaaagtttgcatactttgttgttattcttgagctctccgttacattgtgccatgtgtaatgggacatcacaataccacagaaaaacacagtgaggataccgctcaagtcgaaaagctgcaaccaaattaatataacatcaatataatttgtgtttgaatgcaactgaatgaatatgttcgtgttatttaaaagaatctaacctcagcaagcatataagaaagatacgccataagcatcataagggcaacctctcggtcagttgagtgcctgtgacaattaatgtgaggccatctacgttagaccaaacaggaaacaacttaaagaaaacaagtcacatatatgacgttaaatatgtaccttccaaagtatagcttcttgataacatacgcacttatcagaccggtctgcaagatgaataacaaagatgtgaacaccagagcgtgcatatagcagctacaagaaagaatggcagggaagaaaacaatggacttactgcagcaccaagcaaggtacttaggagaaacaaatacaagaagtttccaagaagatgaaaagcagcttcgtggtttaggtgagtgagatcaaagctctgaatcgcgttgaagaccacaactgacgttgcatcattcacaacaccctctccgaatacaagactgtaaagcaaaggtgtctcgtcttgattcagaacctatatcacaacacaacaggaacagaaactttcggtccactatgtttcagggttttgaagtaatttaagtcatgttggagaaaacacattacctgcagtgtacacactgaatctgttgcagcaaatatggcaccaatagctgagattcaaacaccaaaagcaaatcaagtctcccgaataaagtaaagcaataggatccaaaaagaagccattagttcaggccttaccaagataatcacccaagtcaaaggttccaatgtccaacttcttaaagaactgtgttacacctgtttcaagaaccaccagaaaatcagtagagatatacaaaactatctcgacctaatccaaaaagccgcattcagcggtgtttcagccaatcgtaaagcgaagtaacctacctagagatatgattgtgcaagaaataatagtcccaacagcaccaaaaagcataatagtcacgaaattgcggaaaaactgcttctttttgacttgaaacctgaaatagaccacaacaaatctgaga

SEQ ID NO: 100 - DNA, 8184 bp, Arabidopsis thaliana landsberg
agccagcagaggcatgtacactcccttgttaaggacgagcagtatcaagtccaatatgggaggcgaaagcagttagaagaagttagctacatcaacattcaaggtggcgacaaagagtataacaacttcaagaccaacaaccccaacctctcttaccgcagcaccaacgtgtctaacccacagaaccaagtgtatccaccacagcaacaacaaggtcagaacaaaccttttgtgtatcacaattaaggttttgttcccaagcagcaatttcaagggaactaccagcagcaaccaccacctgggtttgcacctcagcaacaccaaagtcctgctgctcctgacgctgatatgaaataaatgctacaacagctgcttcatggacaaccatctggctccatggagatggccaagaagatatctgagttacacaataagctggactgtagctacaatgatctaaatgtcaaagtggaatcactaaataccaaagtccgttacttggagggacattctgcatctacttccgctcaaaaacagataagccaacttctaggaaaagcaattcagaatccaaacgaatatgctcatgatatcactctacgcagtggaaaagcacttccaaccagggaggaacctaaaatagtcaatgaggacagtgtagatcaaaatggggaggatttcagtctcagtgaagatcaagctgacaaacaactcgagcagtcactcgaccatgttactcgaccaccattcccagaaacatcaccaattgctctgaaaccagttgctgtcaaaaacaaagaaaaggtctttgtccctcctccctacaaaccacaacttacatttcctggccgtcacaaaaaagcgttggcagataaatatagagctatgtttgacaagaatattaaggagtttgagttgcggatacctcttgttgacgctctagcgctaatcccagactctcacaagtttctgaaagacttgatcgttgagagaattcaagaagtgcaagggatggtggtattgagtcatgaatgcagtgctatcatacagaagaagatcattcctaagaagcttagtgatcctggttcattcactctaccatgctctttaggtccattggctttcaatagatgcatatgcgatttaggagcattagtcagtctcatgccgctctctgtcgccaaaagattggggttcactcaatacaaagcctgcaatatatcccttagccttgctaataggtcagtaaggatccctcatggtctactcgaaaacctaccaatcaggattggagccgtagagataccaactgactttgtagtcttggaaatggatgaggagcctaaggaccctttgattctggggagacctttcttagcaactgcaggagctatgattgacgtcaagaaagggaagactgatctaaaccttggcaaagactttagaatgacctttgatgtcaaagacgcgatgaagaagcctaccatagaaaggcaactcttttggatcaaagaaatggatcagttagccgatgagttactagaagagcttgtagaagaagatcatctcaatagtgctttaaccaaaagtggttaagatgggtttctacatttggaaattttgggataccagaagctgttagactcccataaagcgatggaggaattgaatggaccagcaacggaggtaatggtaatgagcgaagaagggtcaacaagagttcaacctgcactctcgaggacatactcgaccagccactcgaccttgtctgccaacgaatctggggagccgatcattccaacttcagatgactggtctgaactcaaggcaccgaaggttgatctcaaaccacttcctagaggtctaaggtacgcagtccttggtccaaactctacttacctgtgatcattaatgctgagttaaataatgatgaagtgaacctgctattatctgagcttagaaagtacaggccagcgattggttattcattatccgacattaaaggaatttcacctagtttatacaaccataggatccatcttgaaaacgaatcctattctagcattgaaccacagaggaggttaaatcccaatttgaaagaagtagtgaaaaaagaaattttgaaactgcttgatgctggtgtcatctaccctatctctgatagtacatgggtttctccagtgcattgcgtccctaaaaagggtggaatgactgttgtcaaaaatgaaaaggatgaactgattcctactagaactataactggtcatagaatgtgcattgattataggaagttgaatgctgcatctaggaaagatcatttttctttaccattcattgaccaaatgcttgaacgtttagctaatcatccatattattgctttcttgatggatacagtggtttctttcaaataccaattcaccttaatgatcaagaaaaaatcactttcacatgtcctgatggaacttttgcctataagagaatgccatttggtttatgcaatgctcctgcaacatttcagaggtgtatgacctctatatttacagacttaatctaggagatggtggaggttttcatggacgatttttcggtctatggcccctctttctcctcatgtttgttgaatcttggcagggtattgaccaggtgcgaagagacgaatcttgttctcaattgggaaaagtgtcatttcatggtgaaggaaggcatagtgttgggtcacaagatatcagagaagggtatagaggttgacaaaggaaaagttgaaatgatgatgcagttgcagccaccaaaaacggtgaaggacatcagaagtttccttggtcatgttgggttctacagaagatttattaaagacttctccaagatagtcagaccgttaaccagactattgtgcaaggaaaccgaatttgaatttgacgaggactgcctcaaatcctttcaaaccatcaaggatgctttggtatctgctcctgttgttcgagcgcctaattgggactatccatttgagatcatgtgtgatgcatcaaactacgcagtatgagctgttttaggccagaaaatagacaagaagcttcatgtcatatattacgtcagccgaacgttggatgaagctcagggaagatatgcaacaactaagaaggagcttctagctgttgtattcgcatttgagaagttcataagctatttggttggatcaaaggtaactgtctatacagaccatgcaactttgaggcatctgtatgccaagaaggatactaaaccaagactgttaagatggatacttttattgcaagagtttgacatggagatagtagataagaaaggcattgaaaatggtgcagcggaccatctgtcaaggatgagaattgaagaaccccttccgatagacgattcaatgccagaagagcagctcatggttgtagagttcttcggaaagagctagtgggaaagagttccaccaactgaatgctgttgaaggagaatctccatggtatgctgatcacgtcaattacttggcgtgcggagtagagcctcccaacctgacaagttatgaaaggaagaagtttttcagagacatacaccattactactgggatgagccttatctttacactctctgtaaagataagatctacaagagatgtgtctcagaagatgaagtggaaggtatcctgctgcattgccatggctcagcatatggtggtcacttcgcgacgttcaatgataagtgtgtattttgtatgttttgagcatctatttgtcatcattttagcatcatatcatcactgttttataccatttcacatcatttgtcatcactttgcatgtttaggatagttttgcatgcatgttgcatatttgcgttgatttcaggtgatttggagctgttgacgagctatctggaagaagcggacctgatcatgacaaaccactcgaccaagaggtcgagtaggagcttcaagatctcaagagaccactcgacccctaggttgagcagaggacatcaccacttcacttcaccactcgaccacgaggtcgagtgccctcatctccatcaccagaccatcactcgatcacatcactcgaccatgaggtcgagtgtcttcacctccatcatcagaccaccactcgacctcatcactcaacctggaagtcgagtatcttctgacaccactcgatcatataactcgacccccaggccgagtgacttcatcccattgccaaacctctactcgagctcatcactctacctggatgtcgagtatcaccatcaccaccacttgactgcatactcgatgaaaagcttcagagccttcttcattccgcacttaaccagacactcgagcacaaggaagaaaagaagactccagctattcacttgacctctcactcgaccacgtgggtcgagtacagttcttaacccgtcccaatacttcgtcgttttgagtattatggtttcgggatatttggctataagtagcatgtacttcacattttcgcagacaagaagtttttatctagttttatttccgcagaacttgtgttctagactttttgtaatccggatttctctttaccccatccttattgagcatgtcaatcacctgtaaactgaggaaacgaaactactcaattaccccatccttagaaattctttatctgattgattttactgtttactctactgctgattactgcatcctgacacatgttgcttagtttctgcaattctttactgttactcgacctgatactcgaccacccagttgtctggcaacacactgtgcagtcgagtatctatgtttcattttctgactgttactcgacctgtcactcgacctcacccagggctctgcaaagagctgcgttggtcgagtgttttactgtatctgcacgattttctgtatcctgcttgtgcacttaggattgctagaacacaccaaaacctgttattgcttggcttgacttagtgacttctgatcacatcttgattgttagcatcacacccatttggattgacaacctaaaatactacaacgacatgattggtgttttaggataattgactgaaaaacctattatcattccactccaaattttatggttttgaaatgaatctcaaagacttgtccatggcgtgtttatgcacctaaggtagatttttctgacagctttcaagtgcgaaaggcaaatcagagacacacatgaaagattgatcaaaggcgtagataccaccatttagcaacaactcaagtcataggcgaacttatgcaatctcgttttcttggtattaaacgttgtccaaatgttgctgtgattaggaagttcttgcttgacaactatcattttagtatatcctactagaaagcttggtgggctagagaggtgataatggagaagtctttgggatctacggcaggcaatggcaggcaactatgcactgattccagcttacgctggactcctttagcaagcaacccatgtagtttgtgctttacagagtatgatgatgagccaaatggtccacgccgtttcaaatactaattcatcgccttcgcatcctccattaaagggtatgcctatatgcgcaaggtcattgttgttgatggaacatctatgaagagtagatacggtggttgtctcatatcagcatgttgccaagatgggaatttttagatcttcccaattgcttttggtatcattaacagtgagaatgatagcacttatgaacggttttttcagcggctcagcattatagctccagacaatccttatttaatgtttatatctgaccgacatgctagcatatacacgggcttgagtaaggtgagaaacaacattgctttgaagcattgtgttatatagtataccgctagatatgtacttattctacatatagaatctggttcacaattgacaagtacagtttgattttttgtctttggcatcaggtctatacgtaagccaaccactctgcttgtactgttcacctttggcggaatgtcagacatctctacaagccaaaaaacctctgctgactaatgtctgaagctgcacaagcgtttcatgtcactgatttcaattggatttttctcaagatacaaatattaaacccaggatgtgctgcctatttagttgatttgggtacgtttgtttttcagcttacatatattgttattaacgtggctgagatgaagtttactccataacctctgtactttgtaattcgtatagggttttcagagtggagaagagtgcattccaaaagccggcgttttaatatcatggatagtaacatatgtgagtcttggaacaacgttatcagagaggcccgcgagtacccgcttatctgcatgatggagtacataagaacgacgttgatggattggtttgcaactagaagggctcaagccgaagactgccctacaacattagctccgagagtgcaggaaagagttgaggaaaactatcaatcagctatgtcaatgtctgttaagcctatctgcaactttgaattccaagtacaagaaaggacaggggaatgttttattgtcaaattggacgagtccacttgctcctgtttggaatttcaggggttagggatcccttgtgctcacgcaatagccgctgctgcaaggcttggcgttccaacagactcgttagcagcaaatggatattttaatgagttagtgaagcttagttatgaggagaaaatctatcctattcactttgttggtggagaggtcgcaccagaaattgctgcaggaactacaggagagctgcagccaccattggttcgctggccaccagggagaccaaggaagatcagaatcttgtctcgtggtgaattcaaggcaagtacctattagtaaacattacaatgtacttcttatctgttaacaagctaatagcctatctacttttaatatgcagcggaacaggacaaggtcccagaggaggtgttcacgttgttgtggtgttggacacaacaaggcctcgtgccgtaatgctatataagccgtcaactactgctatggggtgctaataggtgttatgaagaaactttctggagtgggcttaaataatggttgttcccacatatcttgcggaagcgggtttgtttacttctactaatgcaggattaagtacatttattgaaatagtttggtatacccaactttgatgtataccttattattttgatttttatgtactacctgttcatcgtgtatatttgtattggtatctctaatcccgatgtaattaagtaatgccctgtaacaccgcttttgaaatgtatatatatgaaaccccgcagtttgtgtaatcacccttctctgcttctttcaagtgcaaaatcatccatatcttacttacatactatacagtataacgaattacgaaaactaaaccttaataatgaagtgggaacccaagcaatgatgcatcagtaattgtatacacagatttttcctgtaacataatcaatggggtaaaccataacaaaccaaaaccatcactctgcctttggaacccaagcaatgagtttgtttacacgtttgatgaaactgttggccgaataacatatgttttacttagtttcattatgctgtatgttggagatgcaatttcagtcaatcgcgagcttctacctgcaagcatcacgtttataaatgttatgattatatagccaaacgggcatcgtggatggcagcttcggcataaatagttttgcatggtatcctattctatttactacttactgtactattccgaaccatatgcaagattcaaataaaaaaagctcgttttacatcaaagaattggaggctaaaattgttttcttttgatgtcatgttttcagtatatatgtcgatattactcgttaagttataaggatatgcaagaacttgacatttcatttattagttgaatactttggagttataggagtttgtagttgtaggagttcagcatatctgttattgcatcactgtaatataacccaacacactaggctaatagactgaaacatttcacttcaaacataaatattcaaacatcacagttattagttgaatttcaatacaattggtctctgattacaaaagaaactccatgtttgttcaacataaaatacacattctacaaatcaaacaccacgttcttgtggagacaatgca

SEQ ID NO: 101 - DNA, 3571 bp, Arabidopsis thaliana landsberg
  unsure (1)..(3571): unsure at all n locations
tttttttagttcatgttagtattacactattaataatggaaaccataatcagtagatagagatacattaaatgcaatttgaaaaaccgaacatgaatattattggtcgtgttggtgctaaacccgcgtctattaaagtatgattcattacaatcacatctagtcatctagaaaacaatcaaaatcgttaataaattgacactttttattattagataggtgtaattggtacggtagatgaagaaaaaatcttaataacaattaagcactgtgtgagaacagtttctacttgcgcgagcaattaccatgtttggtaggacacaaattttcaacacgaattagaatgtgtcaatttaggaaaagaaagaaaaacgaatgtaagatgtaaactattattaacaaagatttcatggagatataaagaatttaaacaaaatcaaggggtcaaaacctaaacatacagaagttttaaaagtctaataatatgacaacgcgctaagatccgaacacgtgtcaagtgaaagacttggtaaactcgaaaaggtaacgcacgaaagagggcctacaaaagtccgagtcatcagctgacagaagcatatgacttccacatatatttgacacagaatgtagtaataaagtacgaatctcacttcttgtcgtaattttcgtgtttaaggttattttacgtgagattcacggtcttcatgaacttgataagctataaaaaaagttaccaaatcctaaatcatgaaaaaatttaagaaccacgaatatgttaacacaatccataaacttgacttgagccatgaatcttgtgggatacgggttttgccctccatgcccaattcggcccaaacacaaatagaacaagtcaagaaagctcttaacaaggaagaacggccatcagaacaacggcccatcagaatggctgctcggcccatcacggcttggtccaatctcttactttctggtttcccattctgtattttctggttttccgaccattaatatcggttttccaacctgtactttcggttctccgttctgtacttacggttttccgttctgttaattactgtctttccgttcgtcattaataaagaagttactccgttctccccaaaccccttaatcattattgttacaacctcggtataaacaaatccggagatggtccacataattatttttatataaatactaaatagtaaagtattcatgcaattgcgattattttttttaataaaaagtatttttaaggaaataaaatgaagatagtgggacatgacgagaggaattggttgtatctatgagatctacttgtgcttgtcttcttcatccgtattcaggaaaaatccgcacacttgagtttctagttggaagaataaaaactatacattatctttttgcaaatatacaagtaacaaatattcataaagatatataatgccaaaaccaaacgaaagtgattgaataaacgacaatcaaaatacattatgagatggatggatttgttttaggcaatgtaatgtgttcctgccaccaaattttgtttacgagaccgatctgatcaccaagcaaagtcgagtattgttaatgtttcaaagactttgatatagttcggtacaaactcatgtataaacatatgattttaatctctagccatgtcaaataggtgaatgattttaagctctagcaatgtcaaatacgtcaacaacaacatagattacttttctgagggatcaacaaataacgcataacacatgattatcacagtttttcaagttccaaaatttcgatacagtgtagaccaagagggttcaagtttttttcagggacaaaatcgtctggtgtctcagcttgaagatcctccgttcagctttcgttttttcggggatggcgacttaaataggtttcgaacagatgttaacggatcatctacctgacaacatcacgtaaagaaccatcaaagacatcagaaattggacatttatgacataagaactcatataaatgtatgtggttcttgttcgttaggatttgatcatttatctcatgctcagagagtatccaaagatatcaaatcaaggaaacgtcatgcataattttaacagggacaagggcataagttgcactctcagccaaaaaaagtttaaatactattagtcatagatcctgctattactggctacaaaaggaagttactatgatcttcttgtcgagaatacatgacaatagtcgcagttgagttatatctacccatctgtaattagctttaattccattctaatactaaaagcgagtgtaaggatccatgaaaaagagtgtagtgggatgtgttaccttgaagagggaagaggatgatggtggagtctgacaagatcctttatgccgttgtaatgcagacagagtctgtcgccatccagggcctcttctacccgttgaccagatccaaggacagaaatgcctatgttgcttgattggatcaaattccatctgtttgtttgatgtcgctgatttttctttataatcacaaagaaagatatgttaagcatagttagtgcttgtaaaaatcagagaaatttgtatttgcatttatactcttagcaatttacctgcagttgaatccctaggtttgttgttttcaggaagatttgatcttactaccatcatttgtttgtctttgttttgtagtgcaatatcactctctacatcagttgagtttcttccaccatcagccttctctcctatatcattcatcacttgattgctattttgtgtaacatcaccgttgttctctgcagttctactctgttgatcctgaatagaactgacatccccgtgatcatgatctctagagtacgaagcaaatcttgacctcaggttcctcccgataataggcagcgatattgttgctttgaagttttgctttgttgctgggggtcctcctgctatggtaaacttcaagcttgaaggttgatgttgaagggtaccacccttgggatgtttctctatattgatttcggtatcaccagtgactctacacaattctagtggtctcggaacagttgagaaaacccatagaccaacacaggccccacagagcttgcagtccagtacaacagaactaggatcagagtttaatgtgtcaggaagtgttgggttctcattattccctgatatgccatttggaattggggttgattcagagatgcttagaagctcgcgggtagcagtttctggcagtaaatcaatagtctctgtacccctagccgtctcactcaatttatctttgcagtccacaatataaggaagtgcccgcggttcccagccacataaactgataagtttttgtgcctggaaataccaatgcatcagcattacaatcagatatgactcaatattataccaaaaannnnnnnnnnnnnnnnnnnnnnnnnnnnnnnnnatcactagttaactgtacgctagtattttatcatatggacaacatcgaatgaataaaaacgaataatttggacggaccaaagtaaagtctgtagatagaggaacaataaaagaaggaacatcca

SEQ ID NO: 102 - DNA, 656 bp, Arabidopsis thaliana landsberg
  unsure (1)..(656): unsure at all n locations
aatctgggactgggaccaagtatcatgcaccacactcttttcccaatattatgggtttttaactgaggcatctgagtagaaacgggaccatatatcatgcaccacactccttcccaatcataagcttattgtaataagctagaatgggttttaaaaccgaggcatttgaatagaaaaggggccagtatcatcatgcaccacaactctttcccactcccaagcatattagattagcttccaatgagtttttacttttgaattaaggcattcaagtaaagaatctgagacagagtatcatgcactttactcttaatcatttataagcttactaagtaaggcaatttttagaacaatatggaatcgagaccaagtatcatgcaccacactctttcccaatcattttaactgaggcatttgaatagaatcggacactctttcccannnnnnnnnnnnnnnnnnnnnnnnnnnnatgggtttttacccgaggcatttgaatagaatcggaccaagtatcaggcaaccacacttggtcccaatcataagctgatcggaatagagcttagaatgggtttatattagaccccttcgaatagnttcgggctctctttcaaaatcaaaagcttngtgtgntnngntttagnntgggtttttccccc

SEQ ID NO: 103 - DNA, 5351 bp, Arabidopsis thaliana landsberg
  unsure (1)..(5351): unsure at all n locations
ttgacaattttcgatttcggagtttgaagattcatattgtacaacctggtttatctattaaatattctagaatttctaaatccaaaactcagggaattatgagccacctctcaggagcatcgaactcgtgtggaacctccgtttcccgaccaagaccaatggttcctggaattccaaagcagtgttggtgtggcgatgaaatcgttgagaggatttcaagatcaaatccaaatccgtaccgtcgttattaccggtgtggtttagctgcagaaaaaaaggtatagataaacctaatttgactagtcactaaaatacctagatttacctaatagaaatacctaatagatatacctaatagatatacctagtttatacatagatatacatgtgatttaacaatttttacaatttcaaaatgtagcttatgaacgacaatcatgtgtttaagtgggtagatgaggcttttacacatgagattgaacaattggaatttcaacttggtgttcttgaagaagaagtaagagtgatgaagatggaaaggaaccaagagaggatggaaagagatccgatggaaaagaacaaaaaggggaaggactttaagatggtagtcatttttagttctggatgtttaatcaccatggcaattgttggcatgttgtgtttgtcgtagaaattcaagcgtaagtgttgtaatgtttaattatgaagactaagtgttgtaatgtttaattatgaagactaagtgttgaatttgatgtgatgaatggatatgaatctaattataaagactaagtgttgtgttgaatctagttatttcgattaaaattcttttcttatcaattacaaaaacatataattgtacctagtgttacaaaacataagtagatataccaaaataaaacaaaaaacctaataaacatgttcaacagttgtaccaagttttcaaaagcttaaggagaaatacaaaaaaaaaccaagtaccaagtagcttcttatccataattctttcaaaaagtagcttctcatcaggagttggagccaagatactctgaatgtcctgtgcatgataagaaagtaattaatataacatacatgatagaacatacatgatacatgatagataactaataaatatgtcatcactaaccttagttgtaccgagtttgtcatacacatctgacattggaaaccctttcatagtgcttgatttaaacttcattttacacatccggggacactgaggatctgcggtttcaatatcttcgcagaaattttccctgagaactgggatcgccttaaatgctagatactacataaaaacaattctagatttttcaaaaactaataagtataactgctaataagaacacagttgtacgcagtttaactttcttaaatcaattcataaatgcataatgtaatgacatacctccaaaggcataacaaaactaggaaacaccttttgtggaccaactactccattgcactttttcatcagatagaaaatgtctttcacatttttttcaaatgcaaatcttccccacggaaatgttttgcacaactctagatcagccacagccctaaggaagaacttctccacatttggtgcgtttggtcctgtcttaccctttccaacgattacactacataaaaaatatagtacagctaccctcagacgagcatcagaaggttttttcatagacaataacttattctccacatcaagatactgaactgttgctccgagtccaaacatcttgccagcaaaagtggtacagcccaagctgtccaagggtttgggataattatggcagtataatcctgacataagtgcaaattcttcgagagaataccggatcggtacgccattgacaataaaccatacttccttcttcttatctaaacatgctgtacgaagaaataacagccacatacccatcaccttatgatttggatccttatgcatgtggaagaagtggttgaattgtgggtgctccaaaaaccacttcaactcagactctttaagatgagtctgcaataatccgactgccttatgaagataacactttgctgtaatcttgaatggctttgtatactcactcggaccgaagtacattttaagaggttgaagagcttcagtttcctcatcagaatcctgcaatcaacatagatatacctagattatacatagatataccttttagttttgaaaatttataagttagattcgaatatagatatacctagtttatacatagatatacattttagttttgaaaatttataagttaaattcaagtttagatatacctagtttcaatatagatatacattttagtttcgtattatttaatggtagaaatcagcatagatatacctaatatagatatacattttagtttcgtataatttaatggtagaaatcagcatagatatacctaatttaaaaatagatataccttttagtctctaaaatatctaagttatattcgaacatagatatacctagtttaaatatagatatactttttagtttcatataatttaaaggtagaaatcagtatagatatacctaatttatacatagatatattgtttagtctctaaaatatctaagttatattcgaacatagatatacctagtttttagtttcaaaaatttctaagttagattcaaaatagatatactcaatttatgcatagatatactaatttatacatatatatactttttaaaatttctaagttataatatcaacaaagatataccaaattcatacatagttatacttttttagtttcagaattttgtaagttacaaaatcgacaaagttctaccataatctgctagttgtgtaaagattaaagttcataccgctctattttcgttaaaagattgaatttggtgcttcagaatccacttcaacagccgacgctacaactacttggtcattgattgtctgtgaaacccaccacctccgccgcggacgccaccgccaacggcacacatgcgttctttgttcgagccatttctccaaacctacaaacaaaatcatttggattagcactactcttcaatcaatttcgatcacaaaacccaatctgaaacaactcgaatcgaatcgacgaacagttaaatcacttaccccaatttcttagtttcctgtagatataccaagatcgacgaacagttatattgttgtcgttgacgagaattgagaataattttactggattttacagtgaagaaataaagaagaaacaaaggaaaagagatgtgaatcgattttaccgcagagaattaggggaattagggttttatttggaaaaaacccgaaaacagtggacttgggttattttaggatccatttgccctggttgggtcgtaattaagcaatattcttagaattttctgagtaatttacttcttttacggaataaaaaaaatcaaaaacaaatttctttttataaagagagtatatgagattactcttcaaccctgagaatttgttccgttactgtcactgtcactgtccgctgcttctgtgtcgccaagatttttctcttcttcaaccttgaaaaaccctaaaagtttagtgccactgcataaggcaccgtaaattcccttgacaaattttccggacgaatctagaattcagtaatggcggctccgcgtgacgcgacaacgaagggacaggcgctcgctctcctcgccgctgccaaaaaccacggcgatttggcggtgaagctctcgtctcttaaagaggtgaaggagattttgctgtcattggaggagccgtctttgtctgctgagattttcccttatcttagagaactctgcttgtcccctgaagttttagttcgcagatcccttatcgagtgagttactcagaaattttacggtttcgtacctggttttactttcttctttcactacggatgatgttttcccttgctctacacgaactcgtaaagacttttgttttgttgcgtgtttagggttcttctctatttttcccaaacgtttgatctttccaaacccagctgctatgttgtagaaattatgcaaacgatgcctccagtctgcatgattgtttgtttttggtgggattaatttgaaacttccacagcaatatggtggatattactcgtccgcttactttttttttagttcacctcgcatagttttcataagttatgttaaatagttacttctgtagctattcatggtgattaaatttgtctgacaagttaagagacatgttgatcgatttcttctggatggcaggatcattgaagaggttggtttgcggatgctggaacattcttatgttctagtgagtgtcttaatacacttagtaggtgacaatgatccaactgttgcagagaaatctatttctactggcacaactttctttcgcagcatcttggagaagatggaaacgcaggtccatactgtttctcaagttggatatcttgtcgtatgcatatgttgttttgaaattccttcttgagatcttttcaaaaatcctacatttggagtcagtatttaccagcaaaagtatattttacatgctcgtagctgctgatgagattgaactattgttaacccatggaaactttcctcttgttttcattttcgaaacttcggttggtttttatgttggtgctacttatttgatgtttaaggctactgtcataaggctgtagggtaatatgaaatagtgaataaaataaagcactgcaagcattggtaattttctgtttaagtttttgttggatatcttatatgatactctcgctgatatgtattattcttgatgatctctgcagttccatcaccgtggaaagttgnatcgttggtgtggggaactgtggacatggatggttaagttcaaagatactgtctttgccactgcattggaggtatgctggctgtttatggcctctctttttttttgtctgtctgttcctctcgcgaggtatgatctttggttgagtatttgttctgcttctctctcaatttaaggttttctaacccaagtccgttgtttctttcacaatagcctggttgtgtaggggtgaaagttcttgctctaaagtttatggagacttttattttactctttactcctgatgcatctgatcctgagaaagcttccagcgaaggtattatgctctaatcatgcagtttttattattattattccgataatattgtatttaaccgggaactgcaccatacatgatttgttcattttgttgcgcgcccgtcaacttttcctactctactgcaggaagtaaacatatgttcaatatttcctggcttgctggcggtcaccccattgtga

SEQ ID NO: 104 - DNA, 684 bp, Arabidopsis thaliana landsberg
tatatatgccattatcttcgatcacgcgacaaagttgactggtatcttgtccccaaggtttgctgcccaactataaatacatgtgctgtgctcatcatacacttcactaacaaaatcatctttcctcaataaaccaaataagctaagtgttttgtgtaacgaaaacaaaaaatgggaacctcatgtctctcgttctcgtggctttgctcttttctctctcccttgctgttattgcggacacatccaacgatgccacacatggtgtgtgcaactctatataatataatttcccttcacactttcgcatgattaaatttttattttttttggtaacagatgattaaatatttgatccatggtgtataacatgtatatcacacgtgcagttaaagaagaagtgaagccgagtactgaagcaactgatgctatagaagccgaagtcgaggtcaatgacgctgttgtagagccccagcaaggcttgcctggtggtggttgtaggttcggatgttgcggtgggtactggtggaatggactgtgcatatactgttgccgcagtcaagccgaggccaacgaagttgtaaaaactgttgagcctcagaaggaagaagctaagccatgatttcgcatgtaacacaaactctatatgtttgtatgcatgcagtggtcaattaccgtatgtatgta

SEQ ID NO: 105 - DNA, 3828 bp, Arabidopsis thaliana landsberg
ttagatgttcttggtgaacttcccaagatttcgagtaaacaaggatgtcatcaatgaagatgataacaaactcttctaagaaatcccagaacaccccattcatcattttcatgaaggttgttggtgcattggtcaatctgaatggcatgaccacaaactcaaagcggtcgtaccttgtccggaaagccgtttttcccacgtccgttagctctatgggaatttttgaaaaccactgtgcgcctccaagttgatccatcaactcatctatccggggtaagggatatttgtttttcattgtaactttattcaatccccgatagtcgatgcatagcctaaagctgccatctttttttttcacaaacagaaccggtcgaccccatggtgagctactcggcctgatgaatcctttatccaacaattcctccaactatttttttagctccggcatttccgccggtgccatccggtacggagctttagatatgggggttgttccgggttcaagttctatcgtgaacgggtctgaccggtctagtggtacaccactaacggccgcaaacacgtccgagaaatcgttgacgatcggaatgtctttcaactccgcactcgcccccatttccttggttgtgatcgtggctatatatgcctcacattgtttcccgagcatcctttcagcctggattgccgagattaccaagcttcctgaggttgttcttattccttggaattttaacataccctcgtccctctcgaattgtatccgtcctcggtgacaatctatgtgagccttgtacttccccaaccagtccatccctaagataacatcatgtctctttagtggaacaatgattaggtccgcgtgcatattgacaccgttcactacaaccgagatgccccgaacaagtccggtcggatacattgcctgtccgccggccgctcgtaccattccataatcagtgtttggttctttcctgaacccacctgattcaaccaattaaggactaacaaaacaatgtgtagccccagaatcaaatagactgtgcgttactacgtcacctactctcaaggtccctacacattcccttagaatgctgagtacctcccctttcccatatgcatgatgcaatgcaaatgcagttattgaaataatgaatagggagttgtgggaacgtaccagtgatcgccctgaagtttccggcatcgttagcttcctccgacaactcataaactcgcggtgccacggcttgccgctttgggggaggcggcagtccgtttcccccgcgattgtccctttgtccggcctgcttctccgcagtcaacttagggcactctcgctttagatgtccagtctttcctcaatagaaacaagtctttgtctcttcaccgagaaccttggactgtcctggttccattctcgggcaactttggatcgcatggtccttgcttccacaccggctacatgcacctatggccttccagcaagttccgctgtggctcttaccacaggtcatgcattccccggtcttagcatcggacttggtgttatccaccttgtcaaatttccttttcttatccgcgggtttggtggattgattgttctggatcggtgctttctcccggttcaagtacctctcctcctcgatcccttcctcaatcattgctgccctttcaaccaattcggaaaccgagttgaatgtccggaccaaacaatggttgcggatctctatccttagtccacggataaatcggcgcacttgagcttgttcctcctcaagttcacgtccaacataacgccttaggcggttaaattcctcatcatattcacgcaccgtgcggttcccttgaactaggtcgaggtacgcacattcaagcctatcccaagcctccggtggaaagtacttcttgttaaactcgtcttcgaaatccgcaaaggaccggacctcgtcccctctacgtttctcgacggttaaccaccagttatgggcgtctccttcaaggaagtggaccgcaatgtccctttggtaatcctcagggcagcgggtagacttgaagttcctcttgagtctactcctccactcatcggccacaatcgggtccgtactgcccatgaagtgtctcgtgcccagccttgagacatgttcgagaagactcagatagtctccccttttccgtccatgattcaattgtggattcacttccacaacttccgagtcatcgtccttttggttatccacttttaggaccaccgaatctgctacaacggccttggtcaatgtggctagttacgtcatcattcccttcatcaaatctcactgttcttgggccgttggagtattgttccggttatccgtgctgtcccttgcaccgctactctccggtgcttcctcatttatgggtttcttcccggcctcaggtccggccgagtctgtcccatcgaacatcgtcccgactctggttttctcgttgatcatcgtttcctcctcaaccaaagtctcctcgacaatgcccttgtccttcttactctttcccgttttgctgctcttacccatctgcgaaacctccaaagttaatcaacataactcatagtaaaatcgcaaaagagtaaagaacaactaccgcgagattctcaagccgacgagtggtgataccccttaacccaatacctagtcctagaaccaagcatgctctgataccaacttgaaaggccccgatctggactgcctaagtccgggcgagatctctcgaccaaagccactaagtgactcggccctaaccgtttatgaggttcattcctagtgtaatccgttcatatgattctgtgattcaatatatgagacgaatagagtaaacaaacaatcggatactttattaattaagcaaaggattcgatacaacctatgagtttgcatataagctattacaagtcatataatcgatccctagactatccgaactatcaccacccatcatcccggccttgagtctctcgcgcctaagccaagtccttcccacgatcaccattcgttcctgaaagtcatagagccataagtaatcttatttacttaatcatatgcaagtctatgcaatgctctatatgccatacactactcggatccgtggagagaattcagagaggggaagatcgcgcatcagtccggccgattctcggcaggtcagttaagacccgccggtcctccgccgagccgcgtccccgcctcagccgatccctacccggaccgagtcttgtgtaggatgcacatgacccggatactactcagccctctagtcggtcctttcaaggatccgactactaactcacatcctagaacccttagactcaaggtctaggatcccttaccttccttctcgaggttaggtcgatccgaccctccttctttattgccggccacagcccggctaccgaatcctaagactatttattctcccaagagggagagagttttaatggtgagtttcttgtgttttcggtgtgttgtggtgtgtggaatggtcctgggcgcccttccttatatagggggcgaatggatgcttcccgaatcaacacatccgttccttgcacctttccgaagagttgcacctttccgaagagttgcgcccttccgaagagttgcaccttttcgaagagttgtatttcttcgcccataaccgcccagttcgtccgtcactcgtccagctacctcgagctcgtccgtcactcgtccagctacctcgagctcatccgtcactcgtccagctgcccgagctggactgtcactcgacctgagtaactgtcactccttccagctgagcctgagctttgggcgagct

SEQ ID NO: 106 - DNA, 6933 bp, Arabidopsis thaliana landsberg
  unsure (1)..(6933): unsure at all n locations
taaagctttttatcatcgagccgcctctttaatccgtcgaggatcgttttgtttgcagcctcggcttgggcgtgcccttggggatatcgtggtattgatttgctaagtcgaattccccatttatcacagaagccttggaaacgggtcgatataaactgcgagccgttatccgtgacaatctcatacggtatcccgtggcgacataagatatgtttccacacgaagttctggaggggagcgtcctttatactggcgtaagattcggcttctatccatttagagaaataggcggttagaacgaggactaactttttttgcttcgagggatgcataggtccaattatatccattgaccatcgcatgaagggatatggcgaggagattgatgacaagagctcggctggttgatggattgtcggcgcgtgcctttgacatttttcacattgttttgaaattttttcgcaatccttgatcatcgttggccagaagaatccgtggcgttttattttgatggctaaagcccttcccccagaatggtttccgcacgaaccgccgtgaatttccttcatgatcttgcaagtcgcttctccttccacgcaggtcatcaaaggtccggataatcgccacttgtaaagttttttccctagtaagacgaaacgtgcagcctgagctttgagtttacgagccctccatttatccgagggcaatttcccttcggatatatagcttatgatgggttccatccactttgggctgcattcgttcgggtcatcttgatccgtgctgatttgtatcgggaggaacgtggtcttcttcgccgagctcaatacttggtttttcaatgaattccactgggatgattcttctcaggttcgggtcggaggttgaggccagagcagctagggcgtcgaccgatgaattttctcctcttggaatccttgttatcttgaattcgtcgaaatgttttgctaacttttgaacatgaatcaggtaggcttccattttttcgtcccgagctgtatattccccgttgaattgattcgcgacgagctgagaatcgcaaaaagcgtggattttttcaatctttaacccccgagctagattaagtccggcaacaagtgcttcgtactcggccacattattggtagcttcgaagtttaacctgaatgactgctcgaggatttcacccgttggcgaggtgaggcggatgcctacacccgagccttgttttgatgacgagccgtctacatgtaggagccaagttgtgtcgagtgggttttcccgagcttctttggtgggtaattcgacgataaaatcagctaggacctgcgattttgcgcatgttttgttccgatattcgatgtcgtattcactgagctcgattgcccacttagctagacgtcctgattggctttgactgtgtaagatggcgcggagtggcatggatcccattactacgatggaatgggattaataatagggtcgtagcttccgagccgatattacgaccgctaaagcaagtttctccatttgtggatagcgagattccgcgccggtgaaagtctgtgagacgtagaaaatcggcttctgttcgcctctgtcttctcggaatagcactccgctgactgcagtatctgatacggcaatatacaaatataatggctctctgatcacgggtttggcgaggatgggtggtgttgctaggtacttcttgagattcttgaaaagcttcttcacatcggatcgtccactagaactttttgtttccccgtagcacatcgtaaaaggctaagcatttgtctgttgatcaaaagatgaaacggttgagggccgcacctctcgcttgttttgaggcgatgccattcccaacaatgcctcgatttgctttggattcgcctcgatgccgcggtgggtgaccaggtactcgaggaactcgccggatcttacatcaaagcgacactttgtggggttaagtttgacgttgtataagtttagttgtttgaaacattcgcgcaggtgggctatgtggtcttcccgatctgtaaggcgaaaattttgttaacgaagcgttgataggtcgccccggcgttcttgagtccgaagggcatcactcgatagcaaaaaattccttgctctgtgtaaaaagcggttttttcttgatcttcggggttcatcataatctggttgtaaccagcaaaagcatccatgaacgacagtagcttgtttccagaagttgattctacgaggcgatcgatgtgtggtaatgggaagctgtcctttgggcaagctttgtttaagtctgtgaaatctacgcaaactctccatttcccgtttttcttttttactacgactgggtttgcgatccagtcggggtatttcgcctaggtgatggatccgatcttcaataatttttctacctcggcttttacggcttctgctcgttcccgacccaattttctcctcttctgcttgatgggtttaaaagttgaatcgatgttgagctcgtgtgatacgatgttaacacttactccggtcaaatcctctggggaccaggcgaaagtattgacgttttctttgaggaaagtggtgagttcagctgttagttcttctcctagatctccgccgatttctacgcatcgctcgggctttgcgtcgtcaaggcaaattgagatgaccggatcgggagttggtatcgtagattcccgagcttcttcgatctttaattgctataactgctcggagatcgacttttcttcggttcggccaagtttggccttcttatgattcgcgtcggccgtcgattcagtgacggggttcctgagtttgtgcgctgccatgaagcagatgcgagcatttttctggtttccccagatggttttcacgccgtcgtttgtgggaaattttaggcataggtgatatgtcgaggcgacagctcagaactgatttaaccatggtgtgccgatgattgcattgtacacggtcggctggtcggtaacagaaaaatcgacgatttttgttacccctttggctcggactggtaacttgatggtcccgagagtcatagtggtttctcggagtggtaacttgatggtccagttctggtcgcggagttggtacaatttgcgtcaagtcgatctttatttctcgtagcgttgtcagaaaaatgatgtccagtgtgcttccggtgtcgaccagaactcattcgacgttgaaatcaccaatggttagtgtaatgactaaaggatcgttgtgcggacgatccaaaccgttggtatcgctttcatgaaaagtaacttcgtcatctgatccgctaaatggccgcgtccagttatgatttgagtcggccttcctttgataagctttgattgatgccgtcgtgtcttgacagaaagccgaatctcctaaaattgtgaagatccttcctcgagcagcttctggcttgtcgtcatctgcctcgcgattgcctttgcctcttttgggtccttcgaggttcaccgcgggagctgcctgctcgagatttgccacagcattgacatgctcgattttggctttctccgcttctaagtcctcgatggttacgcccccaccgatttcttctaagtcctcgtcctcggcctcggggtgtatcaacttgataattatgggttccggagtaattccgtccttcatggtgtacgaacgtccggccttgagcgccctttttgtggtttggagcgctaagttgggatttttcgctacaaggcgtttgcttcggcggctcgtatcttttcgatagcagttctatttcttcttcatgaaaaacatagtctagtgcttggtgcaatgcgtctcggattgtttgtggtttggacaaatttaattccttttggaattctgacttgtaccacagcgccttcttcagagcagagagagccgccacgtcgttgattccttctactttggctagggtggatcggaattttgcgaggaaatctcgaagtggctcaataggctgctgagataatgaccatagatcggcgtctgatgtgccgggatcgattagcaccgaatattgctttaggaaaagtgtcgatagctcctgaaaactatccacagaattcccttcgagtctcgagaaccagtccagggctagccctttcaagtgctcgacgaacaggtgacagagaccagcgtctctttcttctggtctgaatttggctcgggccacggagatgatgattgacttcaagtgtcctttcgggtcggaagatccgttgaagtattcgatccttagctttccgggatctgagattattgcgttggagatcctgtgtgtgaaagatgtgttgtgggactcttccagaatgccgtcaatgttcgaggccaaggagactgcgttatgcatttgggatcttacgagcttcatccgttttctgccttggctagggagagcttgatagcgcttatttcctgttctctggcgtactcctcagcccaccgaacgttctcttctgaatcttcatcgtccaagaccccgatctaatcgacctgggcaatttctgctcggggaggaaggagttgcggatcatttccttccgctagattcgtttcccgatttcccaagattgccggctcggttcgatctcttccaatttccggtccggttctgctgcggggccttgtagtattgccagaagtgtggaacacgagccgtgttgggttgagatctgctgctgctcgtcgatcctgaaaatgcctcgcgccgaaacgagtagtcctgatctgtccttgggaggtagctgcttcgagttgttgtgccaaggatcgatttgcctgttcttgatcgttcaccttctgctaagttgagccatcatacttcttagttctgctagggtcgcgggagcagcggcttcaggaacgtctgtctggattggagggattgggtttccctctgcatcaactgtgttaccggggatttgattgttgaccattgtgaattgggtggttggttctgtgttccgggagtaagagaaatctcaagtcccctccttctagcgccaaattgtgagagtcaaaactcgcacaatagaatttatgttaagggtttcttcacagaacggatctttgtgagattctcaaagaacaacagaattctcaaataccgcggacggtgtacttgattgtattaatgagaaagtaatgattttatcgtacaagtgtgttagaatatgataaataggtgtttttgccttcaaagttagagcgtttttgatagcctgaagttaagagcgtttttctgcgtgtcctccttctttgttctctgaggtgctttttatagggtccgagaatatcacctctcgcgatattctcggaagattcctctttatctttatcttgttgaaggagattgtctttatcttccgaagattctgggatttctgtatccggtgatatcttcgaagattatctcttccggggttttcggaggtgaagtgttttgaacttacatcggctaagtcttttgaagtttttcctcgtctaacccgagacctttccgagccgtgattaagctggcctcgggtcatgatcgggatgctcggtccgcggtattcgaagacaagctccgcaggtgtcttggagcccgcctcgggacgatttgccaggtcttatgcccgaggcgtttcgaggtcgggtcgggggaccactttatgagtgctccgaagcgttctcgacatcgccttggtatggattcttgacgaggcctccgaggtgttttgtggtctggttcgggataattcatcgatggttcccaaggcggaggtgtggtcggctcgcttatcctgggggaaatccgaccccaatagtttgccccccagctcaatgatttagcagaaagatgagcttcatgaatggatttcccgagccggctgttcgccttctagttatgtcgcttcatcttctcggacggccaaacttctgtcgcgtgtcgccgactactcttgaggagtggaaacgtttttcgcttgttcccgaggatcacgcggatctttttcttctgccgagcccacgcgcttgaacgcgttttgaatgtttaatgcggatctgacgcgcctttggaaaattctatatatgtagcgagccactccttcaatacttcatttgaagtttttcgaagaaaataaacaagatttgcttccttctctctgatcttgatatttctatcgttttttcttttccggcgaagttccgtcgttcttcttgttatttttgatttggccgggatagaaattctggttttccggttgtttcccttctcgtctaaagtcccgagccgagaatgagttcttcgcaatcaccgtcgaccctgagcgcttcttttgtcgattctagcgattcaaaccatccagacgatctccctccgatctataaacggagatcagtttggacgtcttctgaagatactgtttcttcatcgaattcccccgagcagacgattcccttcatggctcgggaagacaccaatgccgacatcgctttggaattggatttacccgacgatcccgagccgcctctcgttcggaggtcttctgctcctacggtcgacgaagctgggacatccaattggcaagatgtgcccgagcccctcnnnnnnnnnnnnnnnnnnnnngaatttnnnnnnnnnnnnnnnnnnnnnnnnnnggatatcttgcgtcttaacgagcagaaggctttcgagaaagctgagaagaagaagaggaaaaagaagaaaaaggcggtaatgccagatcctcccggtttgtcaatgtgtaccgagcgatctctctcggatcttagggctcgatttggtcttggcgctgtaaccttgcgtgttctgagccctgaagagcgagccgacagtcctcctgcaggtttctatactttgtacgagggattcttctacggctgtttcttatg

SEQ ID NO: 107 - DNA, 500 bp, Arabidopsis thaliana landsberg
acccaattaagagtataatatatttttaaaaaaataattaaagtaaaatcctatatataaataaattgattataagagatttttactatgttaagattaagattaagattaagggaaatgaagacatatgtgatgataaaatttttacttttctccatttcacaaatatttaaatttgtacatatattttataacccagttggaaatataataaaacataaagttaatatacctgtaaaagtttttaaaatatattttactacataaaattaaacaagtttcactaaaatttaacaaatggcgtaactataatatatgatattacgacatataattattatataaaatatctggcccatatagttttaggtatttcggatggttgatttattttgtcgcatacagatttcgagtgtttgcaatagtaagtttttttttccggtaaacatgtgaagatagcaatagtaagtttttttttcccagttaacatgtgaagatag

SEQ ID NO: 108 - DNA, 1397 bp, Arabidopsis thaliana landsberg
tgcaggttgctcaatgttgtgttcagcgcaccacgaaaagatgagacttctgagaacatagtttggtgtaagcgtaaagttttcgagtttctgctgagtcttaggacatgttagattcccacagtcgatccatctctgtatgtatgccctctcgtaagtctgccattgtagagagacaatatcaataaccaagcaacatacagtcaaattcattaaaagtgctataaatctcaaaaccaaacctgtcctgtggcaacaatgacaggatccttcatcagttcaagcgacaccggacaaagaaaatcaaccggaatcgtgagtttatcagatttcttcgattcatcagtgttcttgttaaccattttgtctaatctatcagtatcagcatctttggacaaataataagccaaagaaatggaagagcttctccttagaggcggcgaactttgtttctcctcctcctcaccaaaatgaagtgtttctgaaacactctcaagcttttcctcagctttgatctttataacattactaaaaccatctctctccattggctcagataaagcactcgagaacttgttcgaattcaacgatccatatctctgcattgctcttcgcaactgtgatctcgctagctccacttgttctccaacttcgtcagagatatcataaagatcatatggaagattgctcaatgctttctcaagcttccatgtaacacattggaactgaaatgagattctcttcgcagcaccatcctttaatcaacaaaattcaaaatctttcagctaaatcggagataaccgtattgtaaccaatggtctaattacatttaaccggtaattctaatgaatctgggaattttcatgagattgaagaacaacaaatcgtgatttgattttttttaaggagttagttagatttttttgcttacagaggaatcgcgagcttggaatcgagctgtggagagaagacgcttcgcggcttgaagtccgaccacgagatcagaccaccaatcattctccgacgacgacgaagcggcggaatcgataggagttgagtctctaatctcctctaacaaatgcgttaagagacaaactcgtcgagtgagatctgcgcaatccttcttgaacattccggtgttgagtggaatctcgacgatatcagcgattaggtcgagtagagaggccggtgagacgattcctccggccattatgccgtcgccgatcaacctccgtcgatcggaaaaattgaaagaataattgaaaaggaaagaataaatgagctttgggattggttctttactcagaagcgactaacgttgcttttatttattcacgcgaccattttgtcaagcgagaggtccttgttacggcaccgttttaaggacctacgtgttg

SEQ ID NO: 109 - DNA, 1998 bp, Arabidopsis thaliana landsberg
  unsure (1)..(1998): unsure at all n locations
tcccataccaaaaacacgacaaccaaatcagagcaattcagacaccattcacaaaacgcaaatacaaagcagttaagacaataaaatcatttcagccaacaaaaactataatgacttaaaagtcaacatacctgggtataaatcatgttcttggcttgaacatataatccacctgaagcgatgctctttgtannnnnnnnnnnnnnnnnnnnnnnnnnnnnnnnnnnnnnnnnnnnnnnnnnnnnnntgtagatctcttgggactttccatcgatgaaagtcccatcagcttttctgtgagtctcatctaagagcacaaggaaatcaggagtcatttctccggtcttctcacactaaaccacatcaaaatataaggttagttgtcattataacattgcatattaagaaatggtatgaaagttgatacttaacttacatgttttcgaatccgagctttgtaagaggtctggccagaacggtgtttagatatgccgaggccctttggatcatgatatcgagcttgccaactttttatactctttaactctgacttcggatctttccaatacctaacaagaccagcccacacctcaggatcaagccactgcggcattgcctcatctcccttcaccatccactttcccttccagcgacagatttgatcgcagattctattcttcagctttgcttcaaagtctatcctaactctcttgtttattgcacggtcccagttgtatatggtatggttcaaattacctagaactactctctcaaataagagatcaattgcagtattttaggattgaattcacggaaactccttcctctgactcaggctcaggctcaatagtaacttactctctcaaacttcctgtatccctgaccatctatgtagaagactccttcctctgacttaggctcaggctcaatagtctcttcctcagctgcaaagtagacatgcttcttccctgtgagcaagttatgaactgaatccagcttagcattcacctctactatctgatttcttgaaatagctgataagtgtgtattttgcatgttttgagcatccctttgtcatcactttagcaccatatcatcactgttttataccatttctcatcatttgtcatcactttgcatgtttaggataggtttgcatgcatgttgcatatttgtgttgatttgaggtgatttggagctgttgacgagctaattggaagaagcggacctgatcatgtcaaaccactcgaccccgaggtcgagtagaagcttcaagacctcaagagaccactcgaccccctggtcgagtagaggacttctcgatttcatcatatcactcgaccctgaggtcgagtgtcatcatctccatcacctgaccaccactcgatcacctcacttgaccccaaggtcgagtgtcttcatctccatcaccagatcaccaccgcgatcacacctctctacctggaagtcgagtatcaccatcaccaccactcgactacatactcgatggcaagcttcagagtctttttcattccgcactcaaccagacactcgagcgcaaggaagaaaagaagactccagctattcgctcgacctctaactcgaccacctgggtcgagtatagttcttaatccgtcccaatactgcgttgttttgagtattagggtttcagaatattttgttataagtagcatgtactttacattttcgagaacaagtttttatctagttttattccgcagacactgtgttctagaccttttgtaatctggatttctctttatctattcagtattcagtattcagtatttgttcttaatttcgttttactgttgttcatcctgttaccatcttgctattactctgttgttatcatgtctccattccattcaacgtttatgctttctgctatgatgtctgagtagtgaataggtttctgaggatgggttagagtagtgtagaattctcagtatgctaggtggttgagtttgattgata

SEQ ID NO: 110 - DNA, 1294 bp, Arabidopsis thaliana landsberg
cctgaaggtgaaacaatggtgataggtctgtttgaccccagttactgtatctcatgcctaagactgttgacctgggaaaataaatagagctcaggcaagaaactattgattcacgataaatctatgtcctcagcaagtctatattatccagctccatccgatagcttatcatcgccaatagattaatgtgaaacttacctgggccacaagtacatcatcgtggggtttgctagctgatttgctaggttcgtcttgtttcagttgcctgaataccatctgtccacataaacaaaacccattgcctcattttgccaaaccgcatcatacacatgtgaagtcgccaaagcttttgcacaatatagaaattagaataccttaaaagcaccagaaaccaaattggagacatctggtaagcccccttctttagaaaatgctgatccaataagaccttaaagtaacatttgcaaaaatcacagtatagttagtaattgcagtaacttggacgaacattaagcatgtacacgaaatcaatcgactcagcaagttcacaataattgtactagtaggtgcattcacagagaaactaaacataaacttctcctcagatgtattcagagaatagctatactccaataaagtcttaaactttgagccagtcaagtacactgatcaaagggtttatgaaaaacactaacttcttatcctctaattgcgattacccatagacgaaaccaataaaaaagcaatggagaactagagcatagtcactacaagaaataccctataaaagtaccgacctgcaccgatgaggatggtgagcttcccgagcggaagagccatggctagagacgagcttatacggcgaagaactaagatggcaaacgaatccgcgtgagaatatctaagagagtattggtaagagagagctgcaggaacgtaccggtgaaacagaggcgttttttgggacgatgaagtgaggcagcgagagagatacgacgtgcgactatattgttcgcttgttgaggcaacaaaacagagttgcttctaaaacccgaaccgaaatgtccggtctgattcggtctaaatcacgattaggttcgttttaaaacctaggaggcaataaccggaccggatcataaattcataatagagacagacaaattggtccattattaaaatcacttgggcatttggggatgattcaaatgcccaagttctctcaaatttggacgattcattcacctaaaacaaacttgagcaacaacaaagtgaagtccactgtcatatcttatgt

SEQ ID NO: 111 - DNA, 852 bp, Arabidopsis thaliana landsberg
ctgcttgctttcttatctgcgctcgctagtcccttcttgcggaggtactcttgagctttgaccatatcgccctcactctctgaaagagcattcttgcagtccatcattcctgcccctgtttcttctctcagctgcttcactagagctggtgaaatgcctgttacatttttgtgttaggagatggaatctcacatgagccattaggtcatgagtcaggaagtaaaacaggaaaaggatggacaaaagaaggacctttgatgctttcagcagtagcggtgttgccactttcctcagaagaagcttctgtgactacaggtgcaggagtcttgacttcatcaacaggtgtttcggcaaccacttgctccttctcaacctcttcacttgctaaagcttctggagatgaaacttcatcagtggctgagtttggaggaatagagttctcaacaatttcctcttcacctggtcaccggtagaagaaaagggtcaatgctagtaatcattacacaatgaactaaaatgtctttatctttgtggtcttatatgtttcttatcaccttttgctccatcaaacaaaacttcatgaatttgattattctggatttttttagaacacgtagttcatgtgactatttatgtggttaaggtctctactataatttggagtatccccaacgctttagctgtatatgttaccttggatagagttctaagatacaaacattgtataatctttttaaatgattctgataaactgatactgatcataataaaccaatatgagaagtagcacacaaaaaaaattacaatctagtgatttttagtcaacttacttttggtttctggaattggagg

SEQ ID NO: 112 - DNA, 1777 bp, Arabidopsis thaliana landsberg
agctcctggcggctccaatggtggcagtttcggtttctcaattcctccttcaagtcatctccatggttatggctggtcatttggacgagctctcgctctcagctgttgcaattgccacttccctcaccaatgtcactggtttcagcctcatcgttgggtttgcaggtgcgttagacactctttgcggtcaagcttttggagcagaacaatttggaaaaattggtgcatacacttacagctcaatgctctgtcttctcgttttctgttttccaatctctattgtatggtttttcatggacaagctcttggagattttccatcaagatcctctcatctctcaattagcttgcagatactcaatctggctcataccggctttattcggattcactcttcttcaacctatgactcggtatttccagtcacaaggaataactcttcctctcttcgtgagctctcttggagctctttgttttcacattcctttctgttggcttcttgtctataaactgaaatttggaatagttggcgccgctttgtccatcggtttttcatattggctcaacgtatttttgctttggattttcatgagatactctgctttgcatcgtgaaatgaagaatcttggtttgcaagaactcatctcgagcatgaagcagttcatcgccctcgcgatcccctctgcaatgatgatatggtaatttacatatctacatccaaaaaaaaacaaatctcagcaagatttaaaagcttcttggtctgactctgatctacaatgaatccataaatccttttgctctttgctcttccatattatgtgtgtaagtaaagcctgaaatggcggtcgtttgagattctactactaatgtctggactcttaccaaactcaaagctcgaaacatcggtgatatccatttggtacatacataacattttgtaaaataattcaaacagtcaaaaagcttgtgatattcctaacttttattcatggaacagcctcacaacatcggctgtgcatttcgttctggtgaatgcgataggagcatccgcaaggttttatagatttcaattgttcacaagaatctgattttttcatgtaacatagtatctcttaacctattttatcctgtttaacactatagcacacatgtctcaaacgagctaggagctggaaatcatagggcagctcgagccgcggttaattctgccattttccttggtggtgttggtgcattaataacaaccatcacactttacagttaccgaaaaagttggggttatgtattcagcaacgagagagaagtggttcgctacgcaacccaaatcacacccattctctgcctatccattttcgttaacagctttctcgccgtgctctcaggtaagacgattatactttgtttcttgaaccccaagaaactaggttcaaatcaagaattctttcatatttcaggggttgccagaggatcagggtggcaacgtataggaggttatgcaagcttaggatcatattatcttgtcggaatcccgttaggatggttcttgtgttttgtcatgaaattgagagggaaaggactttggattggtatactcatagcctccactatccaactcattgtttttgctcttgtcaccttcttcaccaattgggaacaagaggtatataaattactaatcattttacttctagttacggttacagttttgaatctggttttggtttgtgtttcaggcaacgaaagctagagacagagtattcgagatgacacctcaagtc

SEQ ID NO: 113 - DNA, 1205 bp, Arabidopsis thaliana landsberg
gtcaaataacattggttatgtgtgaatttgtaaaagaaacaaaccacgcttaccaatggctcttgtcagattcaagcttccattgattctcccagcgtgaataaagccaccagctttcaatatcctttctttttcaacttcaagatcaggcttgtgatctttagaaagattgtaagcctgactctttcttgatatcacacaacgtgagtcaccggcatttgcaacaaagagcttcttatctttaataagagctacacacgctgtgcaccccgaggtaggtcccgtgaaatcagaatgaggaccctgtataagaagaaagacataggtaagaggtcccaactcaatcgtgtacagaatacggaagaagccaagtaaagcaggtatatgaaaagatttacatcttcaagaggccaactatcgggttggttattggtgtcaccgcttcttggtgaccatataaatccttcaatcatgccgctaaatttgttcatcttgtcgccaagtacagctaactctcgccatcctctttgtccttgcatcatgtcatccattctacaatattcacaatgaaacgcttttaagtggaacatttgttgtaaaagtaaattactatacaagaatgtcaaatagaaaataaacctaaagaatgctcttcgaagagatgtttcgacgtctccagttttatacgcttcattactgataacctgctggtgtagatacttggcacagaactttgcaacgactttacctacaccagtaaagaaccaaacatcgaaaaatgtaccaaaagtatattacacagatctaagcaactaaaatctttgcaattctagcagatttgtaacaccaactgaaaaagactctaaaacttaaattcaccctagaatatgattaaggagtagagacagtagtttcgtacctccatggccatcatacacaccgaagaacgatgtcttatcatcaagatcaagaattgcagcatgctacaattgaagcaagagatgtgatcagtcaggtagtttgatactaatcaacaaggaaaatataagattatgttttgactaaccgcgtcttccatggtagcgcgccaaccttgcatagacgataaaccaaatctgagcttatcattctcaccatcttctgataacttttcagttttcggagaacttaggtatgtacccatcgctttcagccaaaacaacaac

SEQ ID NO: 114 - DNA, 560 bp, Arabidopsis thaliana landsberg
aaaccgagtgaaggtttatcatgaaatttagtcccattttaaagttgcagggcttcgttagtttgttgttacttggtgtgcacttttttatttgtggtgttgggttttgtctaattgtatgtgatgcgtgttttatttcgcctcaggcttttacctgactactacaagtgcacagtatatcggagtagtactttaggatcgaatccataaggagagaagtagttcatagaaatcatttagaagagagtgaagctaggaccaaataataagaaaaggggttgttgtatgcaatgagtaaatgaaataactaaaataaacgataagcaataagagagaagcgttatttgaacttaaacgataagcaactaagttctcgaaacttgaacttaatgctttcgggggtttctctggttggcatggttcaaataaaaggtatacatcctaatttaagtgataacatggttaggtttgtttacttccaaattctcggacatacgaaactcattcaagaccagctagccctaacgactagtaggtgaaagacgactattctcactata

SEQ ID NO: 115 - DNA, 1649 bp, Arabidopsis thaliana landsberg
ctctcagaaatccacaaccttgtattcgaaccacgatatgccccgttcactatcttcaccattcctcctatttgtggaagcacagtctttagctccacctgatcaactctcaacacatgcttagattcaagcatctcgatctccccaacatacttatcaatcactctcttcacaacaccctttctctgccaaagccttactcatcaccttcacaatgattccttcaaacaaccagtagtttttcctattcatcctctccttcttcttctcttcctccttcatcaactcatccaaagctgatctcttcctcttatcccctctctcaaccttgtcattctcttcatccccaaacacaagtttcgagctttcccctctctctttaacacctaaaccaagagcaaacccaaccttcttcaacctaaagtcttcatctttcttcttctcatcatcatcatcatcatcatcatcatcaaccacaacgtctttaccttcacaaccagcagaagctctctcaatctgtttctgaatctccctctcttgcttctcctcctcagctaaaccactcttaactctcttattcttcaaccttacacttaccagttttcccaagatactttataaactcagtcaaagttgcccactttgtcgaattcatatgaacatgaagtctatcgttaatatactcattgtagacaacagtggcggcgacacgagagaatcggtggctccgcgcatcagatcgagaaacgtctgctcgaactcttgagagtaaccattaacaacacgagtcggattctgacccaaaacttgcatctgacgctggtgagattcgctcatacaatgacacttgaatccattctcgtctcggcattgtttctcacacatctgaaataccatcgaagcttttgaagtcctttcgcttttattcgattcgacatcgccttcggggttaacatatcgttcttgcccatcgatgatgaagattccattagggattgaagaggaactcataacaaacattgttatggtgaataaggcccactaattaaagcccatacggtactgggcctaagatttagatatatattgggctatatgattattgttgggccattctctagtattctgcattcgtaccataatttactttttaagttttgacttctttttattttctttgggagcgttttcctcttttaaatgaccgaatttttagggatcatgaaactagcgaggactataatattactctctcatctaaactgaagcaaaggaatgacaaataaagctatcaagctattgttaccaacaccaacatgttggttcctgaattctcgatataatttatcgagcttaaggttcaggcttggtttcttgcacataccccacattttgatatggaaaccgatacatctccgccgatttcattaatgtgttaaagctagataaggactcgtaaggcattttcatccatggtagaactagcatcattaaatctatctcatgtcaagacaaatgattacgaaggctttgtagaataacacactaataaaaaacagctttcgggtaaattacggaatcccaaaatgcctatatagatagtgaaaattcatatgcccataagcgctagccccagcccactctagcta

SEQ ID NO: 116 - DNA, 2135 bp, Arabidopsis thaliana landsberg
taaagccatgatgaaatttataatccaacaccaaattcagttatacaatttgacaagtgcttatatttatcaatttgtgaagcaaattctgtcatactcaagttaaaaacaccaagcacacaatcactttgctaatctcttatatatatatatataagagagacattcacacataccacaacgttctagctggtctgtttggatgaagaaccggcatcaatctccttgattcttgagctagcaaggcttcaatggacatttgaccaaggttaccccttccacggccacatccatgtcccataaatgcagcccaaattcttcctcttcaaaggtaaccaccaccaattccacagccatatccacggccaccaccacggccatctcctccacagccgttatcacgtccaccattaccacgaccattagcacgtccaccgaatctagaaccaccgaatctagaaccatcgttaagatttatcttgcactagatacatcaaaaaaacaagaatagttagtacggcaaaaagaaagaaaaactgtaaagtcaaaaatctttggttaaactgatgaaaaaatattactgacttttttttacatctagggtttttataaaatatcacaaactcgttaaaaagtcgatattaaaaatctgaggtttcaaaaattatacagcttaaaagaaaaccacacacaagatttatcaggaaaaaaaaaagaagatcgaactttaaaatcaaaaagaagaaaaccacgggttaccttgaaattgaagaagtagaaggctgagaaaacgtcgaagatggattgatgacgagagagacagatcgttaatactggatcaagaggttacgagtctgttcgagagagagcaatcgagcgtcggagatggagagaatatgatcgaggacacaaagactttgatgaagctagaaagtagtagatttgagagagaagcgagtaaatcgccggtgtggggagagagatatcgagagatcgagacacatgcaagatcgccgttagagagaagtgagaagagagtaaagctggttagggtgttcaaaggtacagtgaatcgtttccgcttcctcgagaagataatattaatgaggcattcgagaattattttaaattttaaaaactttgctacaacattgtcgtttcgaactgtgagtacacgtaatgattatttagacgacttcacggcattatgaaatgactacggtatatgacgctgcaacttccgaatgcaggccacatggagaaagttttacagcgtctatttgttactaacgagttacaaattataatgtaactaatcttattgggttattgaatttttaaaagcccatcacggtagcccaaaatttttggatgtttgatacttattcattattcatgaatttattcattattcaattatttttatttttttgaattctttagttaatttagttagattttgaaaaaattaaaccctaattatttttattgttagacttcatattttgtttaacatggtacggtttttttaatatttatactaaataatctattgaaattttaaatacattaaataaactaggtgagtgccacgctatgcatgggttgttgttttgaaaattgtttaaaaataattatgtttaactatttttattgctaattttggttattttgtgtatgttattatgtaaataaagttgtatattcataacttttttttgtatagttagattcacttttgattcaaatatcaattctattttttcatgtataaatcttcttatctatatacccaagattctaatcttttttaactatcataattacatcaacaatatatgatacaatggtatacaattatgttacttatttggtttgaaagttgcttaacttgattctaagcaaacaatttgttattacatgcattctctcctaatctagtattacaatcacatcatgataagctcatggctaagtattggagtgacataatttaaatagcaaatgtataactaactattcatttgttttaaaagttttcacacccaaccgaaaaaagaatgcaaaaattaaatagactaaaaggtcaacacttttaggtttctcttttttcatttgcacagagccgtatttac

SEQ ID NO: 117 - DNA, 12897 bp, Arabidopsis thaliana landsberg
  unsure (1)..(12897): unsure at all n locations
ggtgaaatccgatccgagattggagaaagaccatagggttactcgaaagagaaccaacgggaaatgcatggtgagaaccgatggacgaaacagatgtttgacccgcgagtaaaccaaaggccgacggacgaaggatttcatgggcaagcctacgatgattcaatggttgaatccacggacccttgtgtgtgataaggatatcgttcggatcgtatggatggatcgataagccaaaagtgttaccgaccaccatggaccggacgggtaaatggttagtaaactgtgggcagtcgtaatgttaaacgaccgaatcggaaaactggatggttcgataagccgagggctcaatcgtccaccatgaaacccaaggggcgtacgtttggaggacggatggaccaataagccaagagcttgattcggccatcgtgaaccaagggaatcgtacgatccccaatctctatcgttgtacttagaccagtggggttggttggttgtatggctaagtaaagatagggattcgttcatcaatgcacgatcggatacgaatcattgaacgaatagaataaggcgacaaacgggctagggaatcaaatccgcatattggccaaggtatgtaacgatctagcttactagttaggatagacgtttgggaattgaacgtgaaaatgggataaaggaatatgcgattgttaggcctagaatggttagcaaacaatatgcatgtcttgaccaagtaaaggatcgatctaagtctaagggacaaagacgatgaaaccggtacaagagttggttagaattaaaccaaggttagaaagacttccgctgtgtaataagaaagtaattatacaatttagcctcgtaaaggcaattctatgttgaatcgcgaaaaattaagaggtttggccaggaagaggcgcgaacgtgagtccaaggttgccggacgccgagacgtccagggtcgggtctcacaacttataacgaccgcgtcccgcgttcataaagaggtcggtttgttttaggagaaaacaagataatggtcggggaacggaccaaaatactaacaaggaagaacgagaaaattcaagttaaaccaggtaggtgagctggacaagctggatgaactagctagctaagctaggtgagctaaaccagctggaagactagctagctcagctaggtgagctgaccgacagctcgactgagctcggtgagctgatcgtgtactgacccagctgggcggtccagtcaactgacccagctgagtggttcggtcagctgacactcaagctggtggactgtggtacctcactggtgaagaggtgtctcggccaaaaggtgtaaggtcgagcgggtaccaacgaacggttgcatcgcccaatagatgcaaggaacggatgtgaccgtttggaaggatgcaaggaacggatgtgacctttcggaagggtgcaaggaacggatgtgatgcttcgggaagcatccattcgccccctatataagggaggacgcccaaggcctttgggaatctcacatcatctcacaacatccaaaacaccataaaacattcttaaaggagtaccaacacatcctagagttgttggacggaaaggggtgcggctgggcgagtataactcgaccgaattgatgcgcatactacctcccggtccaacggtttgatggagtgtagaggatggagagggtagaccgttcgtcttagagacgaatcggatctggtagaccgtcggatcggatcagccagaccgatcgtcggacggatcggatcagccagacggatcggatcggacagatcgatcgtcggacgggtcggatgggacaggccgatcgtctgacagaacgggtcggacagaccgatcgtcggatgggatggatcgagaaaattgttcgaggaagcacaaggataagtgcatccgaacacacccaagggtcgcccatggatgcaatcttaccgataaagggagaaagcaccaagaatgggtaaggaacgtgattcaccatataggatcaacatcgcggctgtcttcatgtatttatctcctcaaccatggtgaaaccgatcagagatcggtaagaccaaagggtgactcgacggataaccaacgggaaagtccacggtgggaaccgatagacaaaacggatgttggaccggcgagcaaacctaaggccgacggaagaaagatttcatgggctagcctacgatgatccgatggatgaatccacggacccttgggtgtgataaggatatagctcggatcgtatggatggatcgataagccgaaagctttatcgaccaccacagaccggacggataaacggttagtaaaccgtgggcggtcgtagtaaacgactggatcagaaacatggatggttcgataagccaagggctcaatcgtccaccatggaaccaaaggggagtacgtttggaggacggatggaccaataagccaagagcttgattcggccatcgtgaaccaagggaatcgtatgatccccaatctctatcgtagtacttagaccagtggggttggttggttgtatggctaagtaacgatagggattggttcatcaattcacgatcgaatatgagtcgttgaacgaatggagtaaggcgacaaacgggctaaggaatcaaatccgcatattggccaaggtatgtaacgatccagcttactagttaggatagacgtttgggaattgaccgtgaaaataggataaaggaatatgcgattgttaggcctagaatggttagcgaacaatatgcatgtcttgaccgagtaaatgattgatctaagtctaagggacaaagacgatgaaaccggtacaagagttggttagaattaaaccaaggttagaaagactttcgctgtgtaataagaaagcgattatagaatttagcctcgtaaaggcaattctatgttgaatggcgaaaaattaagaggttcggccggggagaggcacgaacttgagtactatgtcgccggacgccgagacgtccgggacggggtctcacaggatctctcaaaaaaaatgattaagctttagtagaatgctaaaggtaagtcccaagctatgcatacagagataagatcccatctacccagagtatatcaaatgaagctctaatggtaatcccatctccaatcccaacataagaacttaactctaccctttgcatttatgaatcttttaaaccctttttctaatcattcttttcttttctcttaactctaggagaatctttctcaacactttgatacatctagcggatttggatttctttaacaactaaggttcctgttctttacattttaaaaccgagggattttgcccatcttcaatagctaacaagaactctttcttttcttcacaaatcccaaaacctttactagactttttctgcttccttagcttacttcacctagagtcttttaccttttctcatcaatgaatcaacccctttttttcttttaaacaaatcccaacctaaagtataaccgcccacctagtcctatctagtccgaaaaacgcgaactagaactacatgagacactctctctgtcgttacgaacctaacactttctaccaagcttaatcggaataagacctcccaaacactcacaagtgatataaggcttgaaagaaagtttaggtttgggttcgggtttgactgctctaataaggagagtcagctacttggattaacaagagtggttaaatgagtaagataatccaagtattttagggtatccatgagttcaaattgatgcagacatggtaattgagaatcagagtcacgttcaaattgatagggaatggtatcagatcatgatagtgtggtcgagtagagcaatctaggcatggttcagttttttttttttttcaaattcattgactatgcaacagacaactagcaacgagggcactgagtttatccggtgaatcaaaatgcttacaaggctatctcatcatcatcccctatgcatatgcaacaatcctaaatgaaacactctagactcgatcctaaatgtgatgcaactacatgaacactcttttttttttatgaaatcattttctgaaatttttcaattttttttggttttttctatgccttagatgaatgcagactcaaaattatacacaatgcaacacacacttcctgagccctcccccaaacttaaatcacacagtccactgtgtgaataaacttggaagagagtactcaggacaaatccaatcacagaaacaaaaaatgaagaaacaaatcacaacatacggtataatacaatggtgaagtgaggcgcttacctcagtcgaagaatgaacgtagttgctcgtcaatggctgcctgcgattgctcccaggccatagacgaacctccttgttccgtatcagctccagcaggtgggtactcgacctcatcagctctgtggcggccagcaccgctctgaggaaactcgacctctctccttctgctgcggccagcaccgcggtcgcgtaaactacgagactgcagaagtcgtccgctcctactgctagatcgagtgagtgtggtcctcctcttactcccagattcacaaggctcgaatgatgaatgcctcgcagggacatgcggaatctcctgctctctaggctcaggcttgcgccgacttggctcgggcgcgtcatatctcctcgtaggcatgtcctgagggagatgtccctgcggaatagctgtagtggaagaggagcagctgagcttgtccttcagaaacttgatagcccttaagcacttggcgagtaacttgtcctgtttcttgcaccacttctgcagcttgctgttgttcctgtgagcttcgctcaaacttttgctttccctcgcaggaggtatatgctcactgaaatgatacatgctcgtgtcaaactctgcctcatctatatcatccgtctcatcaacatcttctgttgtagctccttcggtgtgactaaactcctcggttggcggactgccctcgaaataaagatcttcaagcgcaggcttgaagtcaatgttcctgccctcaagaatcctagtagcgtcaatgcaggggagaagaatgttggcaattctaatcgatgaatgctcgaacctgtagctgtgaaagtcgccagccatgtcaaactccaagaactcacatctgcgcaaatgatccaagtccatcatcctcggtgctaaacctggttccttgaggggactccacaagcttccagaattgcgtcacaacgccacccacgcatagtgctcctctcaccttcttcttcctgtttgtcaacgcccacttcctgtatccacacagatggatcaacagaggcattactggtggtgcgttgttgagatcgcctctcaagacattcttccccttcgtccggcggagaatccctataagcgcataatctatcatctccatgtccgtgttagacacggtgcctgtagactccctggagtaaaagacgttggcgactgatcgctgaaagtagcggtagattgttccctatagtggcccacaaatccttaagctcctctctgtcagatctgggtttggttccctttccactagggaaaccaaacagttcttccaacttcttgatcacaagctgataccgctgttcatccactgagaacgtcaagaagcctaaccccatggtatccagctcaaagtctgtgagtccctcatacatctccacttgaagtgtggaaagaaactcgattgtctcctccttataagcaacgtaagggtaagacatgagtgtctccagatgacacttctcgaacagatgctgcacgtcctctagtaaccccagctgggctaaagtctcataacacggatacctcgttccccagaagtcattcatctcgaagaatctgatatactcctccactgtaacctcgtcgagtttgttcagcagctttgtctccctgcgccatgactctggctcatactcactttcgatatcctcatcaatcagctcatacctacttgacatcgccctctttcctctggcgatttcagctcttctctgattacgtcgggctgcagagcgttcgaattcatccctgaagctctggtaaacatgttgctctctcggtctagcggaccaggactcagcttcatccacattgtaatcagggtccatagaagattctccgctgtagttactcattacgaaacctgaaaacaaatgtaactcaaaaataaacgttaatacgttagttccaacaagactagaaacacaaaacacacaaaccaaaaacaggtcgagtgtaccaaatttttttaatttttaattttatttttttttcggttgggtgaactcgcggtcgagtgattccttggttgtgcttggcgatcgagtgacctttagaggcgagagatggtgaaacggtttgaaagaggtcgagtttgtttgcttaatcgagtgaaccggcgatgacgagctttcgtggggatgagagcagcggcgatggaaacgatggagaggcgttgagaagcggcgagatcgagtgactacgcaaggtcgagtatgttgagagatggcggtgagagcgatgaagctgtgaaggagccgcgatcgagtaactagtgggtttgagacgagctgcggtggtgattcaagagatcgagtgataatgagatagagaggcggtgtgtaatggcgaagtaaagtggctttgaaaggaaggagaggagcggtcgagtgaacttgagctcgcggaagagatgaaacggtggtgttgtcgagtgatggctggactcgagagatgagagaacgatggtgataaggagtcgagtgacgttgttgatgttggggaatgacgaagtcgagtgtttggtgatgagagacgatcttgaaagagatggcgaggagcgatcgagtggtagctcgagacggtggtgaagaggcgagtgagaagcggtcgtgtgcctggctttgatgaggatgggtttgttggttgtgatgaataaggggaatggggtcgagtttaataggtgtggggatggtgatggcgtcgaggtcgagtaaaagaagaaaaagggagcgttgatttaagaaggatggggtcgagtttatcgggttatggaggacaaaacaaggtcgagtgatggaggagaaatcgagtgaagatggggtcgcgtggagatcaagtgggagtgaagagattccatgtctcttggcctcttgcatggaagacatgggcgtcagcggcgggtccctccatgtcttcttgtctttcttttgtgctctctattcactgtaaaatccccaggaaatcccgcaatcttctttaaacttaaattccttcttaacaaatctttcatgtcaatcatattatttggtccaacaacttgatctctcggtgaaactttgtctgactcatactcttcttgactactacagtcaaatatatgatcattgaattcctctgaactatatgtagacagaagaaaacatgaaagtagcacaaataaaacattttatacagtttatataaaggtggtaattctaaaagtatgattaacattataccactatcagaatatattgcttcagaatgataaatttcttcatcattgagcgtgttgtcacgtacaatacttgcagcattctcctttgattgtaatttagttgaatgggggactgctaacaatcaacaaaaaaaattattaaacaatataatttttgtttgactattggacattagacaaacatactaaaatataacataaatagctactttcaaatataaatcgaaccttgatcatttgatactttttccttcttattggacattaatctaatggtagagacgatggattctccaaacatatttgttatatccgataagacatttccagagtaatataccccaaacaatgtgtttacatttggggtagtttgattaggagttaagaagtccggtgatccttctgagaaaacaacaaccaaattaagaaaaataataatattaactaatatgtattgtatctagtattaaaaaaaaaaaaaatttataacctgatgggtttgatatttttctggccattcttttaacagcaggcaatcttctaataggtgttttgttaacaatatcaccattgttggttgttttgacattggtcttcttacgaagtgatgatggtatactttttgttttcgataaatttcctgcattaaaaaatataaaaatcaaaaataacttataaataaaatactatttttataattaaaatttatatgataatgttgtatatcaaatagtatataacttactaacctgattttctagtttttgcggcagctcttgtaaaagttggattaataacttctgagctattagatggattgactatattttctcttgtgtgtggtgtattataaattactctgtctcctttgaagtgcaaaaatatatggttcaatataaagtcgaaagaaacgatgatgatgatatatgagaatactattctaagagttgaattcaacgaattaataggagtaatgggtgaggaactcccattattatttgccgggtatagcagtaaggacacgggagtatgaggagtttgacttcttttggtaagatcgacattggtaatgtcactaagcactctaccaaaaacagaaccgacggaaactaaattttttgacccaagtgcttgattatgcgaaggaaagttggtttcatcgaacaaacgtcttgttcttttttttgttttctggtttttttgttgttgatgtacatcattttcatcattatcctttcttttcttcattgtaatcgatgaaaaaataacaaaaaatgtttatttgttttcagtataaagctaaatgtatgagaaacgaaataagatgataaacatagtcatgctaaaaaataggaaacaatatatatgaaaatatattgttaaccaaaatatcaataatctaaatatattttggcacaatatacggaatgtatattcaaatttattttttctactatatttttgtgcaaattggaacacaaattaaaggatgatagatcaattatctcctcgttgaaataattgatgtgtaaaaaggaaagaaatcgtctacaaccaatccaagatcttatacgttttaacaataattatgccatttatttcttagcgtgttaaaaaatattataattaataaaataagaatctatgaaaaaatagaaataggttgttttgtttgagttatcatgattaatcatatttaataagacggattatttaaattacaaaatctttgctatttttgattttgtagaatatttaacacaaaattaaaaaaattgtttatagttattagtatgattaacattataaaaaacaaatgatgtgtttcttaataatagtgtagatttttttctgaaaaattgatgttttgagtttttttcttctttcatcaagatttatgttctacaacaacatcattactatttttattgttaaccaataaaagatgagagaaatataactaatactatagttaaactaacaaaatggtgaaattgagtgagggggtgttattcttactttgtgtcaaaattgtacaacattagtgtttggtgagactaagagagtaatcaaatctcagctctttgtattgcacaaatttagatttaacaaaactaaatgacatataattgaaataactttattatttccaaaaaaaattccgcaaataaaataaagatagtttagatcttaaaaaataaaacaactctgataactttaagcaaataaataagaaagaacaaaacgatcaaagctggagtagtcattgagcatcattcgccggagcgttcctcagacatggtcatcgtagaacacttcttcctacttgtggaagcctgatcatttccatcaacatcatctgaatcttttcgttttgatgatggagtagaggttgacaacaaatcgacatcagaaaggtcaacaccattagtgagtataagggaaccgtatatgaaaatacaaaaacattttaataagacaaccctaaaaaattttgagaaataattggaatagtttaatgttattnnnnnnnnnnnnnnnnnnnnnnnnaaggatgatggatcaacgtatgcatcagagtcttcttgaacgatttcatcgacaatgttaccggtgtagacttgggcaacagtgaatgaatcatatccaccaaatatgttctccctttgaatgcacaataaaaactgaaaagtcttccctttcaatctcattgataacatcaggcaaaacagttgggtcttcgatctacagaaaaatatagattattataacatgaacgtagacattttaatgaaagatttttttttttaaaaggcaataaacctcatcaaatgacctagaaagcaaatcatgggcagtaatgccaagaatttcctttgcatgactatcgaataacatgcatctggcttcaccactttggtccataatatgggagatgtaaccaaatcctaaaagttaaataggattattagcttctaaacaccaaattataaatcataatacattcaatataaggatttcataaagactaacttggcaacaacagattttgcaaaactattgcatatttcacaccaaaatcttggcttttgaggtagcttgacatcttcaagtttgataacttcttctttgacaaccttcttgttgtgagcacgacaacaaaaatagtaccacggccaatttgtatcaattgccggattaaacaaactgttttgcacttacccactttcaaatgaatataaagaggaattaacaaactaagtttcaaatatgaaaatgtaataaaaaggtttgccaccacataaattaatgaatggtacatcataagatgcgtggactttcttgattgtttgcctaggataatcaccatcgtcatcgccagttcttggtgcatagtgtcttatgtggaaagaatccgaacttcccaaagttaacccatcggttggtatgctatatattaagaaaatatactttaaaaaactggtaaagcatgcaaatatatttagtggcaaataaataaaattacttttgcttaaaaagactcaactcagccaacgtgggatccacgaagacttgtaaaacatcaaaagaattggaaacactcatattatctgttttataaataaaaggacatgtctaaaaaataatatatatatatatatatatagtagtacatatcaatataattaccgttgtacagattgatcttcgcaaatcggattaagcaaacaacaataccatcagttgacttcttgcaagctttgtcaacgatctcaacatacttcccccaagtgtacatgccaagcgagtgtcactaaatatggaaaaaagaaaattattaataaaaagtaaaaaaacaacaaactttaaataagaatgaatatgaatttcgattgtttgtactggtgatctctcaaatggaaatcgatttttttggtgggcttgttgttagcgttaagatcttggatttcagaccgatcgacaacctgacccattacatctgtatagtcaaatagaagaaatctatgaatatattgactatataaggaataatgcatgtatgttctaaaataaaatgaaaacttgaatctaaccgtgcaagatatttgagttagcggatctagagaggatcacatcaaacttagcaagtgagaggaacaaagcatcagaaacgttatcacatggagagaccgtggttttgaaaacaaaatcaatcttgtatttcaagtcagaaatacgatactggccacttgtaggatttagagtgattgtcgtaatgatcttccaaacaccctcggttaagcacctttcaaacttcttgatctgctctcttctcacagcagcatacatcttatcaccctatatgacaaaaataatttaaataataattagtaaagaaaaatgatgcttgaacacactataaggtcaacgaaaacataaagttgtaactataatacgtacagcttcataaaccaaaatcatttcgatggattcaccaggctttacagaatattgtctccaaacatgaagcaatctaacctggatacaccatgcgtccttgtaaggttttagcgatttcaagggagtgaatggaagaggattggcgagcatcatttttaaaaatgaatttggaaatgaaactgtttgagtgtaagctgagtgagtagattgaaatggggcgtccgatatttataagaatgagtggttaggtcaaaaaaagatgcgcaaaagatattatccttggagttcaagtttattcgatatcaagaatccgatgattataggaaaatatttttcatttccgtaaaagtatgtatgaatatagggaatatttaaaaaaaaatgtaagataggtgcaaaagagaatcgaaacgaaatattagatgtgttagaattatggagaaatgtaaaataattccaaaagaagatcacaaagaaatattagatgtgctataattatggagaaaatgtaagataattccaaaagaagatccaaacgaaatattatatctgctataattatggagaatctcatatttttaaatatgcatgtaactacaaaatcggacggcttgaaataaatctattcaacgaccaggattaaaaggagaattccatatttttaaaaaaggaaaaaaagaagcgcatggttttttaagcgaagcagcgaaatcgaacggataaaaacaattcaattgaatggccaagattataacgtataacccaaaagttgtaaacccgggtcaaaaggattcgcgtgttctttaagtgaaggcgagagatcgaacggacacaaacacttcaatcgaatggccaagattataacgtatgacctaaaaat

SEQ ID NO: 118 - DNA, 712 bp, Arabidopsis thaliana landsberg
ggaagtaacacattgtattagtgaaaagacaaaatagtactgagtgaaagatacgcgcaatgaacaaaaaaagaatacgtgatgagatgtgaggaagaagagagagaataatgatgacataaccaaattagtattaccccaaataattttatttgttgaattattaattatcgttatacccctcactgattaactcttgcaatagttttataaaaacatagatttttttctgagtataacatgatttacaaattttaaaatctgatataaattatttaaaatagtgaataatgtttgtataaaacatacaaataaaatagtatagaataaaactaaatagtatagaacaaaacgtagacaatcaaaagaacaaagttaaaccgcttagctttgatcaaaaaatactataccctaagagatacaacattggcaacccaaataaccaaggtaaaccgtagcggtgacgttgacgatggtaagattctcacaaaatttttttacccatttgttaatcaatagtttaaatagacaaacaaatcgaaattgaatgaattggtttgtttggttgtaggataacttaatggaattagtaatagactaaacattgatgtcaaggatatgagcgattgtcccgtggagattttatggctttggtgatgcaaacggatttagcgaagagataataagtgagatgggtaaccaaattttttcg

SEQ ID NO: 119 - DNA, 471 bp, Arabidopsis thaliana landsberg
gtcgtccggcgaaaatccctgcaccggtataatattaaggtcaaatccacggtggctactactgctgacgtggctagtagaccccacaccttccgagttcgaaacgccaccatcatagtggcaccgcttgtggccgccgagagcttgaccggtggcgaaagatttcccgcaaaccgaacaaacgtgagatttcacggcggtggacggtgtcgatttatcattatctccaccaccgtagaaactccggtgactcgctttgtgaccaccgagagcttggtaagacgaaaacgtcttgtaacaaacgccacacttataactcggcttctcctcaaccgtcacagagtcaagatcgccgccatcccgagcaagaagcatgagacagaaagctagatactcctcctcagtgagacggtggttatgatgaagatcagatctcgaacgtttggatcgtttcttacatttggtccactg

SEQ ID NO: 120 - DNA, 4199 bp, Arabidopsis thaliana landsberg
gttaggtgtcaaagatggtcacagcctctaagagttaggtttgatgtgcagccatcatgaggacatctcggtaaacctccctcgtttagactgacttctatatgttccttcatgcactccacacagaagtaatgactgcataaatcagcggaaaacatgttctcacctttgataccatcgttaaagcagttaccacaagtcttcttccgaggcctaggtatgctgatgttagaaactagtgtttcctttgcaagtttatacacaaacttaatttcattactagccacaagaaaagggatgctagatgaaaattgttgtcttatgcgttgcacctcatccattagcaaggcgattttcttatccttaggcacagatctccccatgacctaattattcaaggcaaaacatcgattacgatattgaagcaaacgcatgtgaacctaaatgaacagccaagaaaacttaccaatccaaccatctcaggattatcacagtatattgagatatgagtgatccccaaactcacggcttccattagtcctagcttcaatgccataagttcagcctccaaaacagtaattgcggagccatgaattggtccattcagctgaaacaagatatcatctctatgcccgcaaattgcaaccccaaatccagccaatgagtcatcgccaaccaaacctttgaagtaaaggctgcacaactgaggactagtgcttgagcgagtaaatcccttgagcatctttttctctggttacggaagagtaatatgatcattcattcatgtatacggcgagaatccaaaataatcagggaaaatatactggtatagatttctattaaacaatcttaacattaaaattagtgaaaaaaaattaaactagttaataatatcccgaaaataaagggaaggttctatcacactcaaatctttttagctttttttataacaaattttcttgttgggaactaactgcgtgacattcataagtttgaataaggttgtggtttttttttagtcaacaccataaaaacactataagtctttcctgtgctgaaacctcagctttttcagttaattacagtttgacacctttacaaaatcaacagccaatataaacatttcgtttaaatatagatcatttttgttgaccaatcaaactttagtatttggacatgtcattctattatgaaaactaaattaaaattagcccaatccaaatttttttaaaactaaactttttatgttctaacaaattttagattagcccagcccaagttgtttaaaaactatttttcctatgttattacatgggctatactttctatactttctatgttatgttctttaacctgtttcgtttcaaactatccaactacaaatttttgtgaagccagtcagttataagatgatatttacgtagccagaatccaaacacgaaaccctaaaacctcactaagccgacatgaaattcacaaacaagccctagaaaaccgtctacaaggtacaattgaatcatctataaaccagaattgtaccttcttatcggcggaggaggcggaagctgaaggaaacatctgtgaagcaacaatctcagagatgaaacatgaatatgtgtgtgttgcaggaagcgagagaaggactggacgagaagggtggggaacgataggcacttgatatgcatagaggatccgtttgagacgagccatgatctgggtcgggtggtcgacaagtttagtatcagagtgttgagggaagagttcgaaagagctgcaaggattatgcatcaagatcctaacccatgtgccaagcttttggaaccatatgttcctgaagataataatggacaaggccacaactgaacttttaaaacatttgaatcgcggattcgtgtggcttgtatatatttatgggtagaagattcatgctctgttctttttgcttttttggttgtgatttgaaatcttgcttgtgacccaacaaaaagaaaggtcttagttttgaagatttttgtatgatggtgatgtgggtggatttcttaaacgtgtcgtgttatttgcgtgacttgaaaaaagaagtgagataattttgaaaacaattttttaataataatgcaaaacagatcaatctcgcaagtcgcaacgatggcgacgagctcttccaccgagaaactgccacgtgtcctcatcgtcaaacgtcccgacgccatggctgtgttaggcgacggattcgtcgcctccaccaagttcgagatcctcaaagccttcgagtctccgcttcctcttcctgaattcttggcctatcactctgactccatctccgccattatagcccctgtagctgctccggtcacagccgatctgattcgcatcctccctaatcttcgcttggttgttactactagcgccggcgttgaccacgttgacctagttgaatgccgtcgtcgaggcatctccgtcgccaacgctggctcaagcttctccgaagatgtcgcagatactgccgtcggtttactcatcgacgtcttccgccgtatctccgccgccaatcggttcgttaagcaacggttttggccagtcaaaggagattatcccctcggttctaaggtttgcaacataacttgtgaaaaaaaatcaaattagcaacaaatatttaatgttaatggttccctctaatttgcagttggggagaaagcgaatcggaatcgtgggactaggaagcattggctcgaaggtagcgacaaggctcgaggcctttggttgccaaatttcatatagctcaagaaacagaaaaccatatgctgttccatatcattattacatggatatagaggagatggtagctaactgtaatgcactcataatctgttgtgaattgaatgagaagacattgcgtttgattaataaagatgttctttctgctctgggaaagcgaggagtgatcgttaacgtggctcgtggggctataatcgacgaggaagagatggtgagatgtttgagagaaggtgagattggtggtgctggtttggatgtttttgaagatgagcctaatgttccgaaggagctttttgaattggataatgttgttttctctccacatagtgcttttatgacattggaaggtcttgaagaacttgggaaagttgtagtagggaatattgaagctttcttctccaataaacctcttttaactcctgttctttgatgggtctcatcgccaaggttaagctgggaaagtttgagtcctacatttgggtcgcttgttttttcgctctttcatggcagttgtatgattgatttacatttcagtttcagtgtttcgaacgattgcttttcttatgtgcataggcaaattttaacgtgttattttgataggtgacattctatttttcacctttggttttattttttcttcaatgttattatgacgtaagcaagttgtattttgacgttcagttttgggcgtttcaactagcgaacgttggaattgtgtttttggctatcgatcgttaggagtatgggaaaaatgtcacatttaaatctaaatcatcagtcagtttactattttttgttggatctggtttaaattattgcatgaactctggatcatgtttaaattttcgaattcccattgacacttccaattcccaattttccaattctcattgacacatcgtaaatcctaaacatttttcaacatgactcgaaagttattcgattttgtagccgaagtctgcattgtaattcaattgcacattccaacttatagccgaaacctgatagatttcgaaagttttgtttttaaaggacctcatattagtgttattttagtgttattttgaagtcactttaataactttttcggttgttttttatttttaaagtgtttttgataatttcgacttagattaattttgtctttcgactcggattaattttgtctttcgactcggattaatcttgtctttgttagagtttcaactatgctttatttgtttttgccatttgttacaagtttcaacttcgcgttttttctttggctacggcccgcgttgcgcatttttgtccctcgtttgtctaacgttctacgctcacacactttactaatacgcccatctacacctacatattcatctacgcctatacatacatctatgcctatacattcatctatgcgcacaccttacacatcactaaac

SEQ ID NO: 121 - DNA, 2380 bp, Arabidopsis thaliana landsberg
tgataaaatggtatacaattcaataaaaattgtcactctctctgttttagattaaatgtcgtttaagattttttttagattttaaaaatataatgaaaaattcatttttcttctttgtttgtcaagttttgcaataatgttaatacattaaaatagtttttgtttttaaattaaaatatattttaagaatatgtagaaaactctaaaaaatttaaaagatagtaagctgctggcctgtcttcgtcggtttttttgttttcaccaaaatcacgttttccgccaaaattgaaatcacgtttttccactaaaatcgtaaaccgacattttcccgcaaaaaccgtaaaatcacgttttcccaccaaaattacgttttccgccaaatttgaaatcacgttttcccaccaaaatcataaatccgcattttccgctaaaattgcaaaatcatgttttcatctaaaatcgtgaaattgcatttattaccaaaaaaaacattttcccgtcaaaatcacaaaaaagtgttttctgccaaaattgaaaatcacgtttttcgccaaaagtgttttctcttcaaaaaccttaaacccgtattttctggccaaaaatatgtttttgcgtaaaaaaatatatattcactcataaaaatgtaaagtttaaataattattaatcctattatgttatatgggtctaaatgggtttaaatgggtcaatgatagtttaaaggggaaggataaatggagtataaatttaaatgaggttaaatgggtttagaattaatgaggtagactttaaatggggtgggtataaatggggtggattagtacatattaacatcactatttatacagtacagatgacatatatattatataaacgaagtcaaacgcctatcgtataacatcagcatcggataattgacatgagattgtggagctagttcacgtgaaaattggggcatatattcatgttatcgcatatgcttaaatcttaatttgtggaaggagagatatacgctagaatattaaaaagagtttcatatatccatggttttagggttgtaactttaaatcgtacttgatattttcatatatgcagatattgattaacgcggtaatgcgcacatggtagttgtgatcgagtgattggtgagactttgaaatatatgctaaaacgcttcttccagaatttgagcatttctcaaacaaaacttacgttcatgagggaagtacgggcttggattttggttttgacaatttacttgacagtccaataacaggtgatcagactatttcctgatattagtcaaaaataatttcaaatttatgttaggcaatatgatagccttttatgggaaaaaatcattatatagcatcattggtacgttggatcaatcgatataataaataaataaaaagtaacgattataaatattgggaagagtctaatgttacgttgctttctaagagtatctccgaaacgtatctgaaatgagattagtctcttttaaaactttgttcaacgtaacaaatataaataaaaaggattcttattttagtttggagaaaccaaaatttacatgtggaggataccaaaatctggataattcagattcttggcaacgaccgctagagataaaaataaaggaaataaaaaggtgaagattactgtaaactttgactaaaagtttaagactaatacgatgacactttcgtaaacagttaaaaaatttgtgcggagatcctctcaggtcaaataaattggacaacaggtttgtaatcattttgtcattccttaacatgtaaaactaagcccgtttcaccagaaatcgacacataagaaaatttaaatttatatcaattgtactatattatgattttaacaaatattgtatcacatttccaattatattagaactaaactaaataaatttattttgatgctacgtacgagggtgagaaagtgggcagattaacataggagagctactgaaagtacaacgtataacactataacaggaagctgctgtgtacgtgtaacatgaaatgactatttacgacaaaaaaaatgtttctaaactaataataagcaaaagcaatttggtcatttgcaaaaaggttaaaatggagaacgtaatttgagaataaaaatgaagagaagaaggttttttgaacttcggtcgtcacaaaaatggattttgaagattttagttcctcggagaaatagtgtacttaagattagatgttaatttgagtgtctaagattcactatgaatttgttggtgtcgaacgaacgagttttttagtgtcgagtaattccatttaggtgaactttggtatacgactgtttgaagaatttctatcaaaacttattgagggctaggct

SEQ ID NO: 122 - DNA, 9848 bp, Arabidopsis thaliana landsberg
agacttaaggcgaactccggctccagaaccgtgttttgaagaggcaccgtctacatgaagaatccaaggttgacttgggacatcagatgcagaagtagccaatgggagttcgatcaggaaatctgcgagaacttgagacttcaagcttgtccgtgcacggaactcaagatcaaactcactcagctcgattgcccattaagccaatctccccgactgggttggactatgaaggatggtccaaagtggaagcgaagttaaaaccacaattggatgagactggaaatatggtcttaaattccgagctgcggttacgacagccaaggccaatttttccatcattggatatctagtctctacatcggagaaagacttaccgacgtaaaaggtaggtcgttcatcacttcgctctactcgcaccaagacgccacttattgcattttcagaaacggatatgtaaagaaaaagtcgctctccgaactcaggctttgcgagaaccggtggctcggataggtaacctttcagctggcggaacgcctcttcacaacgcttgtcccacacgaaccccttatttgctttccgaagcaacgtgtaaaaatagagacacttatggtgcgaggtgaagacattgataagaacgcatttatttgccttggatttgcttcgattcctctttcggtgacaatataccccagggacagcgaaggtgcacttcgaaggattcagcttcattccgaattcgttgagaatatcgaaacattgctgaagatgatcgagatgcgaaggggagaaggccgatttaaccaacatatcgtcgatatatacttccatagttttcccggggagatctttgaacattcgattcactaaacgctgatacgttgctcccctgtttttcatctccgaagggcatccctttgtagcaatacgtcccgcgctcggtgatgaaagatgttttttcctggtcctccggattcatcaagatttgattataagcagaaaacgcgtccataaaagagagcatttcatgccccgtagtagactctacaagtcgatcgatgtgaggaagtgggaagcaatctttagggcaagctttgttgagatcggtgaagtccacacaaacgcgccacttcccattctttttcttgactaccacgggatttgtgagccaatcaggatacgtaacttcgcgaattaaacctgctttgaggagtctggtgacttcgacatttacggcttcggcacgatccggcccgagcttccgacgtttctgcttgattggtttgaaggttggatctacgttcagctcgtgtgagatcacctctgtactgattctggtcatttctctaatagtccaagcgaaagtactcctattttttttgaattagttcgcgtcgaaagttttcgcttagttcggccccaatgctaacaggctgatctgggtgatctggattgataaccactttctctacgaggtcatctcctacttttttgatcgggttcggagctgcctcgagctgtggttgctatttgatctttagcttttgcccggtcatataacacatcctcgaagtgcgctaactcccaagaatttgttaaactccaacaggagttgggaacttgacgcactaatgataagttgatgggacaaccttcatttcgtacagccacggagttccgagaataacgttataagcagctggacgattgaagacggtgaattcaatcatcttaacaactccttgtgccgtgacagggggtgttatatttccaagagacatcgaagtctcacttgtgaaggagacgagtgggcttggggcacctcgtatatcgctcttcgagattcccattcgtacgagggtatcaagaaaaatcaagtccactgaacttccagtgtcgatgaggacccgctgcactttgcagtttgctatatccaacttaattacaagggcatcgtcatgtggcttgtccaagtcgctggtctcttcttcagagaaagaaatttcaggccagtcaactcagcttgcttttggtttctttgctaccggagtaaatgtcctcctctcatgctgcttgatcgcattaatagagtcacgaaaacaatttcgatcctcccataactactttgaccattttcttcggacccttataggtttcaggagtggattcgcttttctgctttttgttcgggggtgaagttttttcggactccaacgcctcttgcgcctgctcaattgctgtaacatcgacttcggaaatttccccagatgcgtacttggcagccaaaagtcttcctagggctttgcaatctttggtagcgtgaccattcattttatgaatatcacaataagcgtttgggtcactgacccacttattactcggaaaagccccgtttttgccctttggagaaaaaggaggtttagatggagaagcttttggcgaagattttggtgactccttttctacggagaaggttcctgctgcgggcttccggagttcggtgggttttttcgaaacaggcgcaggagaagattttgacgaagcattaaacttcttagccagaagagctcgttcttcttcggcagttatccagttcgttgcccgatggagggcgtcttgaattgtttcaggttggtttactattagagattctccgaaacgcgactcatgccacaatccattttttaaggcggactgagcggctgaattggatagattaggcacttggaccatgatctctatgaacgcagtgatatacgtccgaagtggctcatgagcggactgagaaagattccaaagttgggcttcagtaacgtcggtcttgatgaagaatccgtattgcttaatgaaagcagtggagagctgcttgaagttatcaattgaaccttcttctaactgggtaaaccaggtgagagctggtccagacaagttctctgaaaaaagtttgcacagtcaggcgtcttcttcgtgcggttcgagaggtactcgctcggcaataacctgaaaagaggtcaaatgttcattgggatctccttcgccattgtagctcgggagcttgaaatcttggaactcacaaatgagaagtctcgagatcctcgaagtaaacggagtcctgcgggttgcttcgattactctatcaaccttggtggtagctcggtggacctttgcgttcatagcccaaatttgatctttgagattttgaagctcacttcttacaccatccggctcctagggagactctgaggtcagacgtctaagggagggctctactcaaaataatgatggagttggtgcggtaactccatcaataggaaggttgggatttaccggggtagtcagtaccgcctggttctggtttgcagttgccccaacttcatcttgatagacgagaggtaactgaggtggcggagtctactgacctgctcctgcctgtgaagtttggatgctcggactgatgtctccttgaaaatcaaggcgtgagcgaactccaggggtacatgacactccggcagacagaaagtcaactcgatctgcgtacgcgttgtgagctgtccttatttcagaatggctggtggtgagcgccgcgagctgcccactgcactgttcctgaaaagaaacgaacttatcagataaagaagttactgcggtttgctgtcgctcggtcttgtcggagagctcttgaagcagcttcttgatatcgtcaagggtggaggcttggtagccggaactttcgttgcccctggtgctcatgatgattcaaccgaagctctaaagtaaaaagtttagatgcccctccttctagcgccaaattgtggatgtcggaatccgcaattaggaatttgtggattgttatgagggccttaaactttattagtcaagctaagatcaaatcggacagtatttcagttaatcggatggttttgtatagtcattttctcgtcccttttacaaatgatgaatcactcctatttatacaaattaatcgaatatctacgaagtaaattaacacttgaatcacgtcgcgaatcatgtctcattaatgtttacgtttcacatatccacctcgcgcattaacgcattctcatttactccgcagatttccgttacgtgacgcttaaaaatgattcttcaaattgacctggctctggtgggcttatttcggcccactccatatttgacaatcctggactcatcgttgaggctttcactcaggcccatttaaagaatgatgacagatctcgggccaaagcaaagatatgagatccgacatccacagttagctacatcaacaacaaccagggtggctacaaaggatacaacaacttcaaaaccaacaaccccaacctctcttaccgcagcaccaacgttgctaatcctcaggatcaagtatatcctcaacaacaacaacaaggtcagaacaaaccttttgtttcttacaatcaaggttttgttcccaagcagcaatttcaggggaactaccagcagcaactaccacctgggtttgcacctcaacaacaccaaggttatgctgctcctgatgctgacatgaaacaaatactacaacaactgctacagggacaagcatctacctccatggagattgccaagaagatatcagaattgcatcataagctagactgacctgaatgcaaaagtggaggcattgaatttttgaaagtcaaatacttggaaggacaatctgtgtctacctctgcccccaaagttatcggacttccagggaagtcaatacagaattcaaaggattatgcaaccgcacaagccatcactatctgccatgatcgagagctaccaactcgaaatgttcctaagttaatcattgggacactgatgttcaagaaggggatgcttctactaagattgaagtctctattgttgaattcgaccactctgctggatctcgccatcaaattcagtccacctcggaagagaaagcagccataatcgagagaattgtaaaaagattcaaacctactccattattgatatggttcaaattatctagaactactctcttaaataaaagatcaattgcagtattttaggatcaaattcacggagttcttttgttcaaacagtgagttaaatatcgagattaagctagcagggtatgagtaaaatagtaagaaaacaaagtaagaaaacatcaagatgattgtgttgcgaacgatttaataaaaagctaggaacaaggtattcttaggatactattagttagtagatctaatgaaagctaggttgttattgaaccattcttaaacccaaactctaattatagaataatctgtgcgcgtgccgcgaactatatctatagctaataataaccggagaagccgagaaactattaacctaaatatgcattcttaacgagttcaattgttcatcttagtagataggcccggtttttattacacacctataaaccagactcatcaaataacagatccaactacagatacctatggcgggcatatgataacactagattttaaccttttaaagctcttgttttcatgcatttagcttagtttcaagtctcttttcatgcattcttagtctcttttccttcttttgcacattttgcattgcattgcatagcatacttgcatttggagtgttttgcaggtgaattaggtacttttggactcaacttggaggtttctagcacaagggatggacggactcgagttcgggggacctaaggaaggatttgaagtatactcggcctatgtactaggctggaggccgagtggagcacacgtgaagaacaaggatcctactcgaccaggcactcggctggaggccgagttgtgcacttaaggatgaagagaagccactcgaccaagccactcggcctagggccgagctgtgtgaccaagaccaagccactcggcttttctactcggcctatggccgagcgctcctgcgccgacttatcttttttgtcttattcccaattagggcaacctaggattgcctataaatagacctcttatgtttttgcccagaggatctttgttttgtccgctggatattagggttctttgattttcttttgcattttctagttgttgtgttgagaatttggatttgatttcttctgcaaacttgtttatctcattgagatctatcttttgctaagtttataatgatttgtgagttttatgaattttctgggttttgttctatgatgttcttgagtgttcttgagtagtgttcttcagagttcttgaggatgggttaggtttaggtggattcctctcttctttagctagctaagtatttatatgcatgattcccttctgttttaggagttcttaatgctattttctttctgatcaattgaaaattgatttcagactttctccatccaaaagatgtttgatgaaatgtctgaaccaactaatttgagagatttgtagattctagcccaaggaattggatgattagactgcttattgactttaatagattggtgtttaaagcctgctttattatgtttcatcaacggaagttgagattaggaagttctaaagttatgagaatcactcacacggaagtggcttgatttggttttgaatctattgtctagggatagcttgattgagtttgttagttagctaatggattgaggagtccactaagaccaattaccccattcttaagagctctgtgtcgtttatttgtgcaaaactcgtgtttttagtactctgttcgtttcgtgcaaaattggtgtttttagtattgtactcgacctgcttactcgattgctcgaccgagtgctttacctagtgcttggtttactttctgttcttgttatttgatttgcatgttaacctgttgcttaggtttagtagaaacacaccaaacccattcacacttggcttgacttagtattctctgatcatatcctgattgatagcaattacacccatttggattgacaccttaaatgctgcaatgacataagatgcatttagggaattgacacaccgaaatcctttgtatcagttgcggtttaagttcttatactcaatcatacacatgacatcaagtcatattcgactccaaaacactaaccaagcttcttcttgcttctcaaagctttgttggtttagccgaagtccatatgagtctttgtctttgtatcttctaacatgataataggtttttctagtcaattatcctaaaacaccaatcatatcgttgtagtattttaggttgtcaatccaaatgggtgtgatgctaacaatcaagatgtgatcagaagtcactaagtcaagccaagcataacaggttttggtgtgttctagcagtcctaagtgaacatgcagaaaacagaaaatcaaacagaaacagtaaaacactcgaccaacacagctctttgcagagcactgggtgaggtcgagtgacaggtcgagtaacagacagaaaatgaaacagggatactcgactgcacagtctgttgccagacaactgggtggtcgagtatcaggtcgagtaacagtaaagaattgcagaaactaagcaacagaagacaggatgcagtacacagtagtagagtaaacaataaaatcaatcagataaagaattcataaggatgggataattgagtagtttcgtttcctcagtttacagatgattgacatgctcaataaattaaccctagacaacgagttcattaaccaaatctaagtgccaccgcaacagagactctcaagctaacctagtcccaaactcaatcaccattgacgagagctaacctaacaggcattacgaatcaacaagttaaagccaaaacgctctctgcaaccaataccttggtacagggtcacgaatctctggaattagtggttcagacatttcatcgaacaccttttgggtgcggaaatgtctgggctcaaattccagttgatcagaaagcaataggcattaagaacaactaatccagaagggatctatcaaccaatactcaatcacctagcatactgagaattctacactactctaacccatcctcagaaacctattcactactcagacataataacagaaagcataaacgttgaacaagttgaaaacatgataacaacagtgtaacagcagtatgataacagaatgaacaacagtaaacgaaaatgaagaacagaaactgaatactgaataatgaatagataaagagaaatccggattacaaaaagtctagaacacaaggtctgcgaaaataaaactagataaaaaccaacctttttttgcgaaaatgtgaagtacatgctacttatagccaaatatcccgaaaccctaatactcaaaacgacgaagtattgggacgggttaagaacagtactcgacccacgtggtcgagtgagagctcgagtgagtagctggagtcttcttttcttccttttgctcgagtgtctgattgagtgcggaatgaagaaggctctgaagcttgtcatcgagtatgcagtcgagtgattgtgatgaagatactcgacctctgggtggagtgagtaggtcgagtggttgtctgatgatggaggtgaaggcactcgacctagaggtcgagtgacgtgatctagtgaccgtctggtgatggagatgatggcactcgaccacggggtcgagtggtgaggtgaagtggtgatgtgctctactcgacctcgttgtcgagtggtctcttgagattttgaagctcctactcgacctcttggtcgagtggtttgtcatgatcacgtctgcttcttccagatagctcgtcaacagctccaaatcacctgaaatcaacgcaaataagcaacatgcatgcaaaactatcctaaacatgcaaagtgatgacaaatgatgtgaaatggtataaaacagtgatgatatgatgctaaagtgatgacaaatggatgctcaaacatgcaaaatacacacttatcaaagaagaagaaggttcttcgagaactgaatctcaaatttatgtcaaaacaaagatttaaattgcaaaataaattacaatcttaaagaaaacaagggctcgtattctcgtattggtccagagagaagagaaagtatcgcgtagagtggatttgaagatattatgggaaaggtttttttctttgataaagtgagaaaaaaaaaagaaaaagagagagaagagatgggaaaaggaaagagaagagatggccgatgaaaaaatatagttaaacggtaaataagtcaaataattaagagaatattacatgtagaggcactttttagaaagtttggccgcaaataggcacttcataagcattagtaactttcagtgatcgaaattacccctttaccctgaaatcgtcggtttaagaaaacctaagaaatataaccggttttctctatcttcttttatcacgatcataaaaaaaacacgaacctagtaaaaaccctaatttattgtttctccacattgcgacgagaagcgaatccggccactcctctgactccagcgactcctccgtcactgtccaccaatccgcgactccggcgactctatcctctctgaaaataaaaaccaaatagtcatttcccccaaatctctgcaataatcgaattcgatttcgatttattgttttcgtaagccagatttcaatatcataccagttgattctgactgatcggaatactctgtggaaggtacaaatcatttccaatcatcttattttggtccaattgactcagaagaagaaatcctcttgtcgctgaatgtttctgcaaattttttttttaaaatcgaaaaaggttttataattgtttgtagctaagcacagacgattgtggttttagtattttgtccaaatactcgt

SEQ ID NO: 123 - DNA, 2011 bp, Arabidopsis thaliana landsberg
aggggcggtgaggacatggaggcgtatgaaacagctcataatggaaaggttcttgtctgaggtctatgaacagattctctataatatgtatattgaatatgttcaaggaaaaaggaccgtgaaaaagtataccgtggagttcctgcgattttcttagcctaatgatctaggggagacagaaaatcagaaagtggcaaggtacatcagtggattaaagatttctatacagaagaagatgggtttgcaaattgcgtggactctacaagaaacttctgttctagctttgaaagttgagttaatggaaaaatcgtcccgtaattttacttagtttagaagatactcacccccaaaataattgtgaagcaacaggagataaggagaagactatagtgacaagggatgctaacattggtaacaaaggatttgatagttctaacaatggttataataatgctcagaagaaaaaaaaaacatcaatctagaagcaaaataacacttatgtgagaccatccatcgataattgtttccgttgtcaaggacaaggtcgcaaatcgaatgtttgtcttagtaggagaactgtagcttttctagagggagaagaagaacttgaagaagcggatgagtatgcatgggttgaatttggtgaagaagagtcgaatgagattataaatcttgtacttcaaaggatcttattatcatctaaggaagaatttgtttagaacacgataatctattaacgacaaagtgtgtaacttaattgtggataatggtagcagtgaaaacttagtttctcagaaactggtggtattcatgaagttaccaacaacgttacatgaaaagccatattccttatgatgggttagtaaaggctctcaatttcgtgtatcactgtcttataaagttccaatctccatttgtaagcattacatagaagaggttcttagtgatgttctcaacttggatgtttgtcacatcatatttggtcttccttggcaatacgataatgatattacgtatcgaggaaaggacaacgttttaatgtttacatggaatggacaaaagatcactatggctcctgtttcacactttgatcagaatctagtgaagaaaaattctaacttcttgattgtgacacaaagtgaaaaagagcttgatgaagcaattaaagaaactcaatgtatatgtccagtggtgattaaaggctgatgagtgctataaaagaagacaaaacaattccaacagatatactagaagtcctaaaagatttcaaggaattgattgcatatgagctaccataggaattgcctcctatgtgcaacattcagcatcatattgatcttattccgagatcaagattaccgaatcttcttcgttaccgtatgagtcctaagcgaaaagagatattgagggaacaaattgaagatctgatgaggaaatggttcattcatgagagtatgaatccttgggccagtactagtccaccttgttcctaagaaaggtaatcaatggtggatgtgtgtagatagtagagccataaacaaaataactatcaagtatcatttcccaatttctcgattggactacaacttgacgagttaagtggttctaaggtcttttccaagatagatcttcacaatggaaacaatcatatacgaattatacatggggatgaatagaagacagcttgcaagagaaaagatggactgtacgagtggctggtaatgccctttggactgtcaaaattatttgtccgtttacaggttcttttgtggtggtttatttcgatgatctctgatttattgtaaaaccaaagaagaatatttggagcatgtgagacatgtgttaaaggttttagaagggaataaattgtacatcaatccgaaaagtgtacattccctaataagttgttatttttggggtttgttggtggaaaagataaagtgaaaaagccattagggattggtctgcccaaaaatcaatctgtgaagtacacagctttcatggttttgct

SEQ ID NO: 124 - DNA, 1940 bp, Arabidopsis thaliana landsberg
tgaaaagaagcaagttacgatggttgcaatcagattaaagagtattgctgctgtgtggtgggatacttttgttgtttaaagacaaagacaaagaaatggggcagtgagaacatggaggtgaatgaaacagctcatgatggaaaggttattgtcggaggactatgaacagattctctataagatgtatgttgaatgtgtatattggagttcctccgattttctgagcgtaatgttctaggagagacagaaaatcagaaagtagcaaggtacatcagtggattaaagagaagatgggtcttcaaactgtttggattgtgcaagaagcttctagtctagctttgaaacctgagttaatggaaaaatctgcctgtaattttactccgtttagaagatactcaccccaaaataattcagaagtaacagaagataaggagaagactgtattgacaagagatgctaacattggtaacagaggagctagtaatattaacaatggttctaataatgctgagaagaataaaacacagtccagaagcaaactaacccttatgcgagaccatccatcgacaagtgtttccgctgtcaaggacaagatcacagatcgagtgtttgtcctagtaggagaactgtagcttttctagaggaagaagaagaacttgaagaagaggatgagtatgcagaggttgaatttgctgaagaagagtcgaatgagatgataaatcttgtacttcaaaggatcttattatcatctaaggaagaaggacagcgaaggaatttgtttagaacacgatgttctattaacgacaaagtgtgtaacttgattgtggatattggtagcagtgaaaacttagtttctcagaaactggttgaatacttgaagttaccaacaacgttacatcaaaagccatattccttaggatgggtaagcaaaggctctcaattttgtgtatcactgtcttgtagggttccaatctccattggtaagcattacaaagaagaggttctttgtgatgttctcaacatggatgtttgtcacatcatacttggtcgttcttggcaatacgataatgatattacgtatcgaggaaaggacaacgtgttaatgtttacatggaattgacataagatcgttatggctcctgtttcacactttgatcagaatctagtgaagaaaaattctaatttcttggttgtgacacaaagtgaaaaagagcttgatgaagcaattaaagaaattgaatgtatatgtcctgtagtgattaaagggttgatgagtgctgaaaaaaagacaaatcgattcagacaaaagtactagaacttttaaaagatttcaaggaagtgattgcagatgagctaccacaggaattgcctcctatgcgcattattcaacatcagattgatcttctcccaggatcaagcttactgaatcttccccattaccgtatgagtcctaaggaaaatgagatattgagggaaaagattgaagatctgctgaggaaagggttcattcgtgagagtatgtccttgcgtagtaccagtccttcttgttcctaagaaaggtaaccaatggcggatgtgtgtcgatagtagagccataaacaagataactatcaagtaccggttcccaattcctcaactggacgacatgcttgacgagttaagtggttctaaggtcttttccaagatagatcttcacagtggataccatcagatacgaattagacctggggatgaatggaagacagatttcaagagcaaagatggactgtacgagtggcaggtaatgccctttgggatgtcaaacgcccctagtaccttcatgcgacttatgaatcaaattcttcgtccgtttacgggttcttttgtggtggaaatatttaaaatgataattctgatattatagtaaaaccaaagaagaattttggagcatgtaaacaagt

SEQ ID NO: 125 - DNA, 9938 bp, Arabidopsis thaliana landsberg
  unsure (1)..(9938): unsure at all n locations
catctgatccttcatgttgtattcccgaataatgaggttgatgatttacattcattgttgtctttgtctctcgggccatcatacacttaaattccttccagcttgtaggtgaattctttttcgagagatgctttatccattaaccagtctctccatccaagtttgaataaacaatttgtaacctctcatgctccggaatgttattctcaccataataactctcaaagttgcttagacatcttcttaggttttcatctgagggccttgatactctatcttccacctgttcctcttcaccatgtgaatcgttcactaatggagtaagtattttccttcctagcaactgtttggatcgcaatctagaatcaagcaaaaaagttcgagtctgttttccacgtctcttcctcgtacctttgacgttttcagttccaagtgggatcacgtgatgtctccttagtgttctcttttttatgaccttgtgatggctttgtataatagggatacgacctttgttgcgagattgattgatgatttttaacacaggagccaaaggaccgaaaggttcttctagtggtaaaacgcccaacaagtgttcgacagtattctcatgagaatttccttgattttcaccttgtataacaggtatcgttccttcctggcgagaatgatttgtcattggaagctcagaaattgtgggttctgaaatccacactagagatttgtaattgagattatgagagttatattgctaagaacgaatggactttttgtattgataatgacaaagcttttacaatgtgaaaggagattacaagtgtaaaagtatgtgtgtgaatgtaagctgaattgaatgtgtcttccaagtcgtccttgctcccttatataggtctacgcacgtggtagctccgtccgggatctgcggagatcctcctggatatttggcaggttagttccgagatatcaggtccgctccgcgaatatctcttcgtcagttcctaggtcattattcgcttatctccctgcatcaagtgactgggcttatctagcccaaatacccattcgcgtatgtgggctcgtcagctgcgtaggtcctctacttagtgggcttagtggacttttgtgggctggcttggtattttcgcaggtggattcctggagggaaatccagctccaacatttgccccctagcccaccgagtgagtaggtgagctcgatgagcagagatctgtgtcaggtaagattgcgaaaatgttattggtaatgtgataaacacaataggattcatcggttttgaggataagctcaataaaacggttaggatttggatttcctaaaccaaatgatttcgagcagatacgcgaggaaaattgttgctaacgtgtacagtcaagatgacgcgcctcttgattatgcctcatccgacggttcagatttgaggtgggaagagatctctacgatctcgaaaatcgtggtgatgctggctctttaaataactctccacgtcccaactccttttcacataaactcatgcgactcccaaggtaacttttctctcccccactatttttattgtagagatataaattttatctttcttcccccatctccttcgtatttcctctacagctcctcttttctcgatctgcttttctcttctttccttcacgacaggaaccagaagacgtcggaaccctaggcggagcaggccgaatccgaaggccatcgtctaaggtcgatcgacctaaaaagaagaaagctcccaagaagaagcaaagcttgccgatgacagccaacgacttggtcgaccttcggaggaggtaccgagttccggcgggggtaactatgatactcccgagttcgctgctctcacccgagaatgtcctggaaggatggtgttgcgcctacgccaacttctttgggaagtacaggctgttcttccagattctggcgtgtatcctcgagatgctctactgtctcggcctcgcctttccccatatgtgctcgaatttcgtcctctatgtgctggcgttattcacccgggctcgggaagtaaatagagaattcagctgccatgacctgctccatctctgccaggtcaagaccaatgctaggagcgaccatgggacgtactacatcagcgctcgtcccggatctctggtcctaggcggtttgaaggcttgtcgagacacaaattggcgatccaagtacttcttcttcagagtagatcgtcattcaatcggcagttttgatcccgcgaggatgacgagtctcttgatttttgtttttctttgttgtttgtgttgaatccctgactgcttttgctaaacgttagtattgatactaatgttatttttcttttgatggtttgcagcaaggaccaaggaagttactctttcagagacagaactccagctgttaacccttctacgacgtggtcagactgactgggccacttttagcagagatcctatcatagctgctctcgccgtagctcaagcagttcccacaatcgtccctccagcagcatagccagatccgatcgaagaggtcccgcggattgaaccgaaccccgaggcagacctgcctataggtacgagttccattatcatgccttttaatgtacaagtcactgtgatagccgtacgattcgagttgctaactaacaaatgttatgctttgtttgttaagttcctcctgactccagctccacttcagaactcccgctcatcagaagaagaatgaggcgaccaagccttcgtgttcaacaagccaatactgaggcttctgctcgtgttgttgatctgtcggccgcggctcgaaacactctagctgtctccagcacatctgcctcaccctctcatccatcgcttcctgaaatcaataccgaacctctgctgcagcaggtctgtcttataacaaacaggtcgctcaggtatctgggccatctgcagttgttcgttctgctggtgccccgtcttctccgaagagagctcggaccctgccagaggtgcacccggcggctgagttagtcatgagcgaccagggggtcgcctctcctatagaggagagggcggaacctgcggctgctaacctggaggcagctaggtccccggataggcagtccttgggtaggtcccaaggcggaagacgaggatgcagaggtgggggcaggtcgttgaatcggtctcaggaagtgaggcagacgtccaactctagtggaggatatgcaggaagcaggcctttctactggtcttacactcacgatcgtgatcacccgatcgttgaggacgaggctgggtttgcgaacctgcttcgccacatcaaagggagaaactgccaggttcccagagtgaagaacatggccaaggcggcggcttatgctgacatgatggcgaaggaggtccaggtaataatcgataactgcctccttttatttccatccttttgctagttgtaacttctgttttgccttcggcaggcgatagctgcaacgaacaagctggttgctctctatgagcagcgtctgagccaggtcccctcgccgagcgagctcgaagaaggaaagaccctcatctaggagctgacttcgagtgtgaaggctagtcaggagcgcgaggtttcgttccaggtatacctcggttctgacttgtttgtatatattttatcgatgatacgatgattctgacctgattgtgatttcaggcggagatcgagaggttggaaatgaagctgtccacttcgaaagacctcgagaaaggtcatgctgagaagatcgggctcatggagatggaggtcgggggattgcaagctgactagcagacgtcgagaaaccatattcatcgcttgcagcagaggagggaagagctctccaaaagggtgatggaccttacttcgactgcgcaaggagcgaagaaggtggttcacgatgctaaggttgaactggccactgcgtattcgaggttgctggatgggatcaaggaaaagtggatcgccaagaaggagtacacagtgctggaaggtcaagcggccgaggtggagtcaaacctgactttgatcgaccagatcacgaaggctgctatcgatttgaccgtggaaagacctcgattaaaagccgagctggatgacctggaggcgcagtgcaaatcgaaggaggtataagacttcactctgagcaagttggatatcctccaggtttcggagatgtcggtggtacgtctgatggacgtcgacaaacaagggacacgaatcggattggatgagtttgggagcaacaaagatgcgtttcctttaggtctcgcggagggttccggtactgtctttgccacgccagctggggagctgaaggagtgatcgcttacgctcctcgttttaggctctttttttttttctcagacttagtgcgtgggaaggctttcatccttttgtttgtttctttttgaacttggtgcctgggaaggcttttatcatttgttcagttaagtactttgatgccagggaaggcttttctctcttttaacaagtactttttgtctcttattcgcgtgttgatacttcgtccattttggtgtatgatcacctagttttgctcatgttccggataataattggacctgttttcagtccaagttatttcggatgtgatatggtatgttcttcgtaggttcaaacttgagtaagtttgagtggtttatctcgggaacctgttgaagtgtggtcacacaagggacctgccagattttgggagctgggcttgtggtatcgccagatcgcgaatgaatccttcgtttcttccttgtttagtatgttatgtgttgatagcgaaagaaggagttagatatggttgtagtaggtgagctccgatgaagtcgaagtgatgtgtttttataggtaaggttcattgtcgactttttggaagcgagatcacaaaatggatccgccaacattcggatgttgggctttgggtatcgtaagattacgaatgagttttaaatcatagtgtaaacgattgttttgcgaaacatgataatgagtatcaaaattttcttttattcttatctcgaaatcgttaagtacaaaaggaggtaaagtaagcgacgatctggcgtttggtcatcgagcagggacctcctcaatactgaagggagattgaactgtcaggtgaccggctgatcttcgttgatggaagatgtgatgtccgtttccctttttgaagttttgtcttacaaacggaagggttgaatggtagttgcgtttgcggaggtgactnnnnnnnnnnnnnnnnnnnnnnttaagcccttttgatttgattgaattggtggctgcgctcttgggaggagctgcctacgtaccctgccaagggatcaagccttatcgtagttcgattgtatttgagtacctattcgtggtatttcttgagatgcatggcattctaaggcgttaactcaggtactccgttgataacttttttgttcttatagacgctgtcacgtaccacctcggtgattcgatagggaccttccaagttagttcccagttttccggcgtttagctctctcgtgttgctgaacacttttcgtaaaacgagctctcccatttcgaatctccaaattttgatattggagttatagtagcgggcagtagctttgttagatagttttgaactcggatcattgtctgatctatgcgttcatcgatgaagtccatgttgtcctgtaacatttatgtgttcaggtccgagttagcaggactggcggtccttctcacgcttggtactatggtttcgacatggattactgcttctaaaccataggcaagagagaacggtgtttcttgcgttgatttgcgaggtgtagtttggtaggcccagagaactccgtggagtacgtcggactacattgattttttagaatcatgtcttttcttgatgttgctaagtatagctttgttgggggcttctacctgtctgttaccttgtgggtaacggggggtggacgtggtaagacggatcttccacttgtcgcagaatgctatgatttttcccgaggtgaagttagtcccgttatcggtgacgatctcatatggtatgccatgtcggcatacaatattttcccacaggaagtcctcaacttgtttctcggttacctgttggaaggctttagcctcaatccatttgttagagtagtcggtgaggaccagcaggttttttagtctcttcttcccactggaggcttccatgggacctacgacgtccatggaccacttcatgaacgggtaaggagaagatattgaggacatttcctcgggaggttggtgcagagtaggtgcgtgccattggcacttatcgcacctgagtgagtgagctatgcaatcggctagcattgttggccagaagtagccttgctttttgattatgagggagagggtacgtccactacagtggctaccatattatccttcgtgcatgcttttcatgaggtcttttgttttttgcccgtaggtacacactatatagggacctgcgacgctgcgttttataagtctcccttccatgatgtagtacctcgcactctatgctttgagttttctggcctcccacttctcgggggctgtgatccctcgttcgatgtaatcgatgattgggattctccagtcattgtacgtttcgggttcgtacggggcaagttgttcaggagtttcgtactttggctccttttccgtcgcactttgcctctgcaactgccacaagggctctagctgcggcggtggtgcttcaggttactcgtgtgaagttgccgggggttcagtcccagcgtgtttgactgttaggtcgatgcttgggtattctattcctttgaccggaataattcttttgacaaaatgatctgacgtggaagcgagagcttccaaggcgtctgccgaggtgttttctcctctgggaatcatggttagttcaaacgattcgaactgctaggccaaggttttgactagttcgaggtacgcttccatgcgctcgtctttagcttcgaattccccgtggtactggcgacgggttaggagtcgctataagagtttattttgcggatcctcattccttgagctagtttaatgccaccaatgagggcttcgtactcagactcgttgtttgatgcgttgaatccaagtcggaacgattgttcgatgacttccccggtgggggaggtgagttgtattcctactctagatccttgtcggttggatgagccatcgacgtggaggagccatttcttattagagttggttccatccaggtcggctaacgggagctcgattacaaagtcggctaggacttgtgctttcaagctggttctggtgcgatattctatatcgtactcgcttaactctatgtcccattttgcaagtcgtcctgattgggtcagactatgcagaatagttcagattggttgggacgtcatcactacgatggggtgtgattggaaatatggtctcattttttgagctgacatgactacggccaatgccagtttttccattgttggataacgagtttcagcgtctatcaacgttttactaacgtaatagatcggtttttgtccttcgtgatcttctctcaccaagacactgcttatcgcagttcgggagactgccgtgtataggtacagcggttctccttctacggattttgcgagtatgggtggttcggacaggtatgctttccattgcttgaaggcttgttcgcagtcctcattccagtcgaactttttatcctttcggaagagcggatagaaagggacgcatttgtcggtggaccttgatatgaacctgttgagggcggcgatatgaccagttagtcgttggacctcccgtgccgtttttggtgatggcatttcgatgagggctgcaatctgcttaggattggcctcgatgcctctttcggttttgcttcatttcgaatttgtttaggattttgaagcattcccttaattgcgggacgtggtcttttttgtgagctgacttgaccaggatgtcgttgatataaacctccatcattttacctagctggtcagcgaacattttgttcaccaatcgttggtaggtagctccagcatttcttaaaccaaagggcattactttataacagtaggtacctcggtcggtaattaaggctgttttttcttggtcatctgggcgcataagtatttggttggacccggataatgcatccatgaaggacaatatttcgtgtcctgtagtggcctcgaccactctgtcgatatgcgggagtgggaaactgtctttaggacatgccttattcaggtccgtaaagtcgatgcatactctctacttcccatttttctttttaacgacgactgggttggtgagccaatcatggtattttacttcccttatcgatccgatcttgagcaacgggtcgacctcatcgttcacagctttagccctttcaggacctagcttgcaacgtttctgctttatagatcggtaggtcggatcgacgttgagttcgtgtgaggttacctcgaggcttattcctcggaggttcgcacttnnnnnnnnnnnnnnnnntttgttttccttgagaaaggttatgagatcctctcgtattgctgggtcgaggtcgtgacgtatcccaacgcatcgcttaagatctgattcatctatggagacctgcgttatcattgattttcgaggtccacgttgagaagggtctaaggatctgactgttttcatttctgcgagtttgtcctttatcattagtactactgggttggcttttttgatatgctcgtagccacccatatagcattttcgggagctgtgttggctgtcgtatacgactgctatcctcttgtcggaagggaatttaatgcattggtggtaggttgaagggacggctttcatggcgtgtagccatggtcttcgcaatattgcgttgaaagaagctttcttattgacctcgagaaagttcgtgagtcgcctcactcctcgtgcgacggttgggagctggatggttcctagagaagtggtcgtatctccagcgaacccggtaagtggcgtttttctgccttgcagctcggaatcgaggtgccccatttttttgatggcgtcgtaaaagagtacgtcaactgagcttctcgtgtcgatcattatacgggagagttcgtagttgcctacatcgattcgaataacgagagcgtcatcgtgaggtttatcgaggtcggtggtttcgctttcccagaatatgatctggtggtcaggtcccatcatcgggctcttgccttttgtgtaggaatctgccttcctctgatgagttttgatcgaattgattaagtcgttgcagagctgagaccctcccatgatgaaatcgatgcgttacgggaagaggtgctcggtctcgcttttgcagaatttcgagaggcgtaatggaaacctcatgtttttcttatgcgggacggtggaaggtgtggtaacgtaccttcatgtccagccacataaatcgagtgctgcaaagactaggtctatgcgttctctcatagcaggtgggggagaatcacttccatccggtgttcgttcccgtttcttttgcttgggagtttgctcctcctcctgttcgtcgggaggaggggtttcaactttggggtttgaaccttttttagtctttcccctagctgcgattaactttttaaaggcgcgacactcctcggtggaatgtccccttttcatgtgaaactacttcaatgatggaagccgctactttcgttagcaagggtggtgaaaactttaaagaaaacccaagtatgtatttggtaccatgagttcaaattcgatgctaagacatgataattgcaagttagattcaggttccaattgatagggaatgatatcagataatgacagtgtgatcgagtagagcattccagaca

SEQ ID NO: 126 - DNA, 591 bp, Arabidopsis thaliana landsberg
ccccttctttttgactatctgataagaaatccttgacatttatcaattttattttgtagacacttcagctgaaggctacaccggaaaccacacatgtagcttcgtggtttctttgaataaaggattgccaagttcaacagatttgagtcctttgtgcttcaaacaagctttgtaaccaaagtggatatcctgcagctacataactttgccacctcattctagtaatgacactttttgctatctcagaagcaccctcattacattgacgtggttgcattgccatgaaccaaaaagctttatccttagcgcaatctaatagaacttgtaactgaccccttagtgttggccattcttttggtttatgcatggttttaataatatcatgagaagaagctccaaatgtaactctatcgaacttgagttgatccatactgccaacttttaattcttgcgtcaaagtgagaatgaacctgagtgtaggagcatctgctgtgcattaataccttgcccatcgagtcacgaactacccaagaagtaccagttatgtggtgctgtttgcaccaagctactgcaatgttacacttgatttta

SEQ ID NO: 127 - DNA, 7173 bp, Arabidopsis thaliana landsberg
  unsure (1)..(7173): unsure at all n locations
gttcctgctgatatataaactatcggtcgaacctacaaacaaaatctacgttattagcacaaacacatgatacttgtgcttgtaagaacaggaccagagagacgcataggcataaccaaggaagttagcacataaaccaaaatgttagcacggagtacaaaaacagaaaactaacttagtgcgagccacagagttcttagaatatcatgtgtacaaaatatttgaaccaaaaaaacaaacaaccttctccactcctgaaataacacacttttgtgcccaaccttaagaatggaattacacactttgtgctcagccttgacaatctccttaccattctacgcagacaaacttctattggccaataaggaaaggctttacattctaatggtaatgtgatggcaacagtttttgtgtcctcagtatttcccggatccttgatttgtcaacgccaaatacctttgatgatgcagcttctgcaaatgcgtcttggacagccttcatcatgccaaagtactcatggagtgtgtcctgaaatgaacaactcaaatataagaacagctcttagggaagcttacagtccagcacaatctccatatataagcctgacagttcgctagtctataatgaggatacacactaagcatgaggagatttagaaatcattactaaaacggtttgttccaagtaggatactacatactgacagaatgatgcataattcaactaacaaggatgaaattttacctgctgtgaggcattgataatttgctgctcaagatcatgcatcttctccttcttttccaaaaactctttatcttcttcaacaacgggaggttttgacttttgatccaccccagtcattagaaactgactgcctcagctccttgaataatctcagcagatccctacctcctcttgcaggctgacccacctcagtcaccggcactgcagaggctccgccttcaccgaacaactgttttgggagcttcaccgccccatccaacatccgagaggccacatcagtactcattggtagtggcaacttcccttgcacctgaagaaacactttcaactcgtcactgttcctaataacagggtgtgcacttagcctgcgcaagtatttctccaatgcaactcttctctgctccacgaactcttgtttctgcattacttggctctctacgacgctcttatctggccgtggtggtatgcagaaccctctatacgtctcagccaatcgatcagccaatgtgacaacatctctgaatcttcttcgcacgctaaactccgatgggccgccaaagtcagggagattcgttctggtcgtaatttggtaggtgatgtaagtgtttcctccaacaatggaatttgaaatctcctgctctttctgagggttagatacagtgatcttgatgtaatcagagcttgaagaagaaggagatctcgatagtgaatctgaccgactgactatgaccatcttctgagccattgatctcggagatatcatcgaaagggctgaagataacatccgcgtaagacggaggctcgaggtaagagctgactctgtcgccgccgtttggtttagaacgaggactccgagattcgctgtagtaagacggtggcgcaaaaagtggatcggaatcagctggagttacgacaatcgacgggtgacgcgagtcgaagagagttgacatagcgctgcgataattagagttggatttatcgccgttgacattgcttttggtcaagggatcgccatcttcgcggagaaagagtttctccatctcttctttggatgagtggagatgggactcttcgtcattctctgagcccatcatctctggtaaaggtgagctaattttagtaataaattcacaggaatttagggatttttcgattcggttcgaaatatcggatattacgaggatacggtggtcgtgaactgcaataaataagcggagtggctaagtcacggcggtgttggctccagatattgattagtagcgtcaagtctcgtcaataactaattggggaagatgagatggaaagagtaatatctttcgggtcacgttaaagtgtttagctgggttttgacccgacccgtagcaggccagcccagcccaatatgcaaattattcttatacttaaatgtgggagagatatctttgcattcaaacgacctgactataggtttacttggttctttcttccacgaccgtatcgagtcaactactgtaataagatttccgatgaactcagggactcgaaattggggttaccgggtccgagccatttgggaaactatcgattctatcttcaccttatgctcttctgtattcttcggaaatgagaatgtagtagtctcatggagtttccaatggcgagaagcttaaagctctgttttctattggagaagagcaaaacgcatgattatgatacggagacacttctttcgtcatatgagagaagagtaaacagttctcgaggttttagagaatttttatcactttcagtaatgtctttgaagcactcaaagtcactgaaatttctggagaagctgaggcagcagatgtctcatgtctaaaaaaggtagctgttttcattcttattcttcgtttttgaaaacacattgatgactgagaaaatcaaactcaacttggggacaagttgatgatgattgatgacgcacgcagcaatagattcggtttatagattttgggatagtttattaagatttctgatgcagtaatcttaattgggaaatagtaaagattctggtttaaggagaggatccaaaagcttttagagatttggtgtccgaggatgagaaaaaatcaaagaaaaggtactaaagtaggggggtaggggttcacctacatcttctggaacaagaatcatatttaaaactagaaagtagaaactgtttgttttgttgtttagttgttacaccaaatggtgtgtgctggttagactataagctctctgtctcctgcctataaaaagtatcaactttctctttctcttcgagtaagtgagcgcaatggagcaacttcggcccttctttctgttgttggctatttttgtagcttcacttgtcaatgcagaagttcactttcatgagtttgttgtgtgtttactacttcgaaatcttttttgttttcttccttgttacttacaaaagatgctcaacttagtttattctttttgtgtttggttagatccaagaaacgccggtgaagaggctgtgcagagtccataactcgatcacggtgaatggacagtttccagggccaaccttggaggtgaggaacggcgattcccttgtcattacagccataaacaaagctcggtacaacatcagccttcactggtaaactcactctttccttgcatcaaatcaatcaatgttttatcgctagatagtctgctaatcagaccatgtgcaggcatgggatacggcagatgaggaatccatgggcggatggaccagaatacataacccagtgcccaatccaaccaggagggagttacacctacaggtttaccatggaagaccaagaaggtacattgtggtggcatgcccacagtagatggctgcgagccaccgtgtatggtgctctcattatccgccctccgctctcttctcctcattacccttttccagttattcccaagagagagattaccctcctcttaggagagtggtgggacagaaatcccatggatgtcctcaacttagcccagttcactggagcagcaccaaacatctcagacgcctttaccatcaatggtcagcctggtgatctctacagatgctccagccaaggtacagatttagtttatgtttcccatgcgccacaagcagctacatcttagttggttaatattatgtgcttgtcatgttgcagaaactttaagatttctagtggggtcaggagagatagtccnnnnnnnnnnnnnnnnnnnnnnnnnnnnncaagaactcttctttggtgtcgcgaatcacaaactcacagtggttgcggcggatgcctcctacaccaaaccattctcgaccaatgtcataatgttaggtcctggtcagacaactgatgtgcttctaactgcagaccaaccgccagcacactactacatggcagcacatgcctacaacagtgccaatgctgcctttgacaacaccacaaccaccgcaatcctcaagtacaaagacgcctcctgtgttactcttcaagctaaatcacaggcacgggcaatacccgcacaactaccaggattcaacgacacagcaacagcagcagccttcacagcgcagatgaagagtccttcgaaagtaaaagtgcccctggagattgatgagaacttgtttttcacagtgggattgggactattcaactgcccaacccccaacacacaaaggtgtcaaggccctaacggaacacgcttcaccgcaagcatcaacaatgtctctttcgtcttccccaaacaaaactccataatgcaagcctattaccaaggcactcccacaggtgttttcaccacagacttccctccaacgcctcctgtcacatttgactatacaggaaacgtgagcagagggctatggcagcctactcgcggaacaaaggcctacaaactaaagttcaattcgcaagtgcagattatattgcaagacacgagcatcgtgaccactgagaatcacccaatgcatctccatggctacgagttctacgtagttgggacaggtgttggtaacttcaacccaaatacagacacatcctcctttaacctcatcgacccaccacgaagaaacacaatcggaacacctccaggtggatgggtagccatcagattcgttgccaataatccaggagcgtggctgatgcactgccacattgactcacatatattctggggtttagcaatggtcttcttagtagagaacggagaaggacatttgcagtctgtacagtctccaccattggacttaccccaatgttaagactgttatctacacacatatacacttgtatattctcaaatttgtttcacaaaacatgtcattcattttcaattacaaaagataaacgtatcaagatattttaagtccaaaagtatttttcaattttgcatgcaaaaaaaaaagcaaaactatgcaccagcaaggaatcgaacccgggtctgtaccgtggcagggtactattctaccactagaccactggtgcttgtatgtcccaagaggaaaatacacttatattaccaaacatataataatgcttgtagtttcgttcagttaaatctcactgagcacaagtagaagagacacaaacatcgttaccttcgccgccatggcctccgcactcgaatgctggacaacacgtaatgccgccggtggttgcgccgacgacgattttgttgaccaagtcctaatgtcctccgaagacaggtctgagtccctcactgctcctccaccttgcgatcaaacctcttccgctatgcaaaagcggtttcagcgtctcggccgcaacgtctccgacgcgatcgcgtcgctcaagaactctctcaacctcgattcgagtcgagacaaccaaaatgcagctaccggaggaggtagaaagctcgtatgggctactgtagtgagaaaccttgctaaaatgtatcctggaagccagttgcctgataaactcgtctccaatctccgaaagcattacgattctttgcctctcaggtaacaccagattctcacagacgcttaagatgttgcgtcatttttactcttcacctaatgtttattcttctcggtttcttaaattattaatttagtgttatgtggaagatacaaagcttagatctagatatgttgttgtattgggaatagatcatggagtaatgtggattaaatatggttttgttttgtaacagttatagtcagactggtttcgatatgaaagatgtatttgtacacataaagttgatagagcaagcttttggagatgataatcctgtgtttgtgattcaagaggtgtgtgatgaggaagctgatgatcagggttctgtgtttaagctcacatttgcttgtacttgttcccttccatggtcaaccatttcagggtctcttgatggtgctttgatttgttgtaagaaagtagaaatctttgagaagaaggggttgactcttggagttgttcttcttctggttgagtctggacaagaaaaaatgttcaaagttaaggttgagaatgcccttagatctgcggtgaggaagcccaagtcaacctctgtgaagctcccatttggtctttgtggctgtgaagaacagaatgctggtgttggagaattcggggatgttgatgtggagtccattgatcaatgttatagacatgagttggatgatctgaatactaggattcagcttcaaatgccacctccaagctcttcgttttctgtatcagtagatgaatggcagactatccaatcaggtggtgatgatatcagaaaatggctactgaattcagatgatctcgagtttagtggtcagttaggaccaaattcatttaaaggagtttacagaggaacaaaggtggccattgagaaactaaaaggctgtgagaaggggaattcctatgagtttgcaatccgaaaagatttcttggagctgatgacctgtggacacaagagcattttgcagttttatggtgtctgcatcgatgaaaatcatggattatgcgttgtcacccaactgatggaaggtgggtcactccatgaactgatgttgaagaataagaagcttcaaaccaagcagatactgcgaattgcaatagacatagccgaagggctgaagttcgtgaatgaccatggtgttgcttatcgggaccttaacacacaaagaatattactagataagcatggcaatgcatgtttgggaaatattgggatagtcaccgcttgtaagagctttggtgaggccgtggaatatgnnnnnnnnnnnnnnnnnnnnnnnnnnnctgaggtcagtattcttttactcttgtctttgttcaacagttcacttgaaaagttagattgtgaaacataatcatgttggccatattctgatcctttgtcacctccacgccaaatgatacacaaaactaggtacctacaagcttgctaagatatttttttggcccatatcat

SEQ ID NO: 128 - DNA, 19759 bp, Arabidopsis thaliana landsberg
  unsure (1)..(19759): unsure at all n locations
accttttctgcgacattcttgcgagtccctggagtaatataagcagtataaatgataaaacttattagcatccaataaacaataaatatttagattttttacacctatgcattacattacaaaagaaaaacaattaatatcctaaatagcaatctcaaagtcatccaccgtaacaacttgttcaaattggatttgtacaacttgtccttttatgacaagtgcctttgcacctcgagcaccggttctgctgcgtccttccagtcttaggtttctacatttaccatgtacaaaccacattatgcattaggttttaacaatcaattagaaagcaatactttatcttaaatttttcctaaccttgtattcccctgttgatggaattctggctacctttggcctccctgatggtctccttgtatatggtggcaacatcgatcggtgttcaagctcttatggtatttcttcgtctcttccaatagcttcacggaatactgcttcccggtaactcgaaacccatgcgtggggcttgaaacagtcatcaactaaagccttgtaggaaattttaaaactattcgcagccaccaaagcatgactgcaagggatcttgagtttaatcatacctcttgcaagtacattgcttcttctcaagatcaacaacatttcttccacctaacatgccatttatctcgtagctccaattggtaatcctcccaaccttgctcccattagttgttaacatggtttttgttatttgcttgtcaacttccggaggaacgggacctttatgttcgagagactttttcctacgcgcattaaaccatctagttaacatagacctgataaatcttatcaactccacaatatgtgacgatcgacctttgtttaacgccttgtttaacgtctccactatattgctagtcatcagattgaaacgttgtcccctgaaataatgccttgtccaattagccatccctatatcattaagatacttaccgcaattttggttcgtggattcaatttgaccataaagctctttaaactttgtaccggtaaacgcatatcctgcattttttactaactgcgtcaaagctttgttcttgtacttagcttggatattcctacaaaggtgaataatacaagccccatgatttgcttgcagaaaaaactcttttaacagcaacacggattgacgagtgtctatctgataatatagtcagagttttgctgtctgcaataatccgctccaacttcataaagaaccaagtccaagactcgtcattctcactgtccacaatagcaaattcaagtggatagacttggaagtttgcatcctgaccactcgctgttagtaagacccctttgtactttgctttcaaatgtgttccatcaacaaccaatatccttctcagatgcttaaatcctgctatcgaggcaccaaaagctaaaaacatatacaaaaacctctctttgctctcatctacaacatctctttcggtttctatatgtgttattgttccaggattagttagcttcattagatgcaaatattcagccagatagcagtatgattcttcagaagtccaacctcgcttgtaaccagaaccgatggagtcttatcctttgttgcaaacatgttcttattcgatgtagagtaacttaacagaggattaaaacccttgacgccaaacacctgtaaaattgcttcgttcaacgcaatcaatgttattccctcatgaattggtacaacccttgagaaaagttggttacatatctccaatttccactctccagtcgaagaacaaaaccactctccacaaataaccatgatatagtcgtccatcgatccctgtacatattaaaaaaaaataaaaatttggttatattctgattccccaatcaaatagaatgcacgtaatttcgttttagtttgatgatatcagttttcaataattgtacctccttggacacgacagtttgccaaagatcgatgattgaaacccagaatcttatgtgtttcaaaggatctcctattcagttttttgttactcgaaaagcaggggaagttattttgtttaatctcggccgtctcatctatttaaatcccacgctcggcgtcacgcaataaccgtttgttgctaaaccgaacgttataaccgtatattttaaaccaacaccaacggaaccctaaacctgtttgcagtgatatctcaatcgaaattgtggggatatatatgtttttttttactcaaaaaataaggcaaagtgcctctagtttttaaagtgtcttaagtgcattatgtttctccgaaagtgtctcatagtgtaacaaacccaatttgaacctaagtatgattttcaattatcatgtctgcatcaaatttgaactcatggataccctaaaatacttggattttcttactcattttgatcactcttgttaatccaagtagctgactctccttattagagcagttaacccgaactcaaacctagactttctttcaagccctatatcacttgtgagtgtttgtgaggtcttattccgattaagcttggtagaaagtgttaggttcgtaacgacagagatagtgtctcatgtagttctagttcgcatttttcggactagaaaggactagatgggcggttatactttgggttgggatgtgtctaaaagaaaagggtgaattcattgatgagaaggaaagggaaagaattctaggggaagtaagctaaagaagttagaaaaaaatctagtaaaggttttgggaatgttaaagaaaagaatgaggttcttgttagctaaagaagaagggttaaaagcctttggttttaaagattaaaaacaggaaccttagttgttaaagaaattcaaatccgctagatgtatcagagtgttgagaaagcttctcctagagttaagagaaaagaaaagactgatatgaaaaagagtttgaaagattcatgagtgcaaagggtagagttaagttcttgtattgggactcgagttgggattaccattagagcttcattggttatactctgggtagatgggatcttatctctgtatgcataacttgggacttacctttagcattctactaaagctcaatcattcttgagagatcccctgttacttaagcctattttgtaagggaccatctttgtctctttacctttaccttagccaaatgagttcattgatgatgcattgcttgattcacgttccaaaactaatgaatgttaaagggattggtagatttgaaaacatgtgttggtcgagcatatgagtcggattgattgataatgaggcatggctaacgtttttaagtagaattcgatcttgcagcttagaactttcaacttggacattgatttcatctggtctatctggtgagttggctttgagtccccgctttcaaacctcacttccagcttgttcttgattgtttgcttgagggcaagcaaagactaagtttgggggagttgataagtgtgtattttgcatgttttgagcatccatttgtcatcactttagcatcatatcatcactgttttataccattacacatcatttgttatcactttgcatgtttaggatagttttgcatgcatgttgcatacttgcgttgatttcaggtgatttggagctgttgacgagctatctggaagaagcggacctgatcatgacaaaccactcgacccagaggtcgagtaggagcttcaagatctcaagagaccactcgacccccaggtcgagtagaggacatcaccactttacttcaccacgcgaccacgaggtcgagtgccctcatctccttcactagaacatcactcgatcacttcactcgaccatgaggtcgagtgtcttcatctccatcaccagaacatcactcgatcacttcactcgaccatgaagtcgagtgtcttcacctccatcatcagacaatcactcgacctcatcagtcaacctggaagtcgagtatctcctgaccaacactcgatcacatcactcgaccccgaggtcgattgtcttcaccttcattgccaaaccactactcgacctcgtcactctacctggaagtcgagtatcaccatcaccaccactcgactgcatactcgatgaaaagcttcagagccttcttcattccgcactcaaccagacactcgagcacgaggaagaaaagaagactccagctattcactcgatctctcactcgaccacatgggtcgagtacagttcttaacccgtcccaatacttcgtcgttttgagtattagggtttcgggatatttggctataagtagcatgtaattaacattttcgcacaagaagtttttatctaattttattccgcagaccttatgttctagactttttgtaatccggatttctctttatctattcagtattcagtattcagcttttgttctagatttcgtttactgttgttcattctgttatcatcctgctgttacactgttgttatcatgttttcaacttgttcaacgtttatgctttctgttatgatgtctgagtagtgaataggtttctgaggatcggttagagtagtgtagaattctcagtatgctaggtgattgagtattggttgatagatcccttctggattagttgttcttaatgcctattgctttctgatcaactagaatttgagcccagacatttctgcgcccaaaaggtgttcgatgaaatgtctgaaccactaattccagagatttgtggccatgtaccaaggtaatggttgcagggagcgttttagctgtaacttgttgattcgtaatacctgttaggttagctctcgtcaatggtgattgagtctgggactacgttaacttgagggtctctgttgcggtggcacttagatttggttaaagaacttgttatctagggataatttattgagcatgttaatcacctgtaaactaaggaaacgaaactactcaattatcccatcctcgggaattctttatctgattgaatttattgtttactctactattgtttactgtatcttgtcatctgttgcatagtttttgcaattctttcttgttactcgacatgatactcgaccaccgagttgtctggcaacaaactgtgcagtcgagtatccctgttttgtttactgcctgttactcgaccagtcactcgaccacacccaatgttctgcaatgagctgtgttggtcgagtgttttattatttctgttttttgcatgttcacttaggacagctagaacacaccaaaaccaattattgcttggcttgacttagtgacttctgatcacatcttgattgttagcatcacacccatttggattgacaacctaaaatactacaacgacatgatagtgctttatgtttaattgactaaaaacctattatcaatttggcgtctttgccaacacagcttgggggagttgataagtgtgcattttacatgttttaagcatccatttattatcactattgcatcatatcaccactgttttataccatttcttatcatttctcatcactttgcatgtttaggatagttttgcatgcatgttgcatatttgtgttgttttcaggtgatttggagttgttgacgagctaattggaagaagcggacctgatcatgtcaaaccactcgaccccttggccgagtagatgcttcacgacctcaagagaccactcgaccccctagtcgagtaccaccatgagagtcactcgatcacatcactcgacccccaggtcgagtgacttcatcccattgctagacatctactcgacctcatcactctacccctaggccgagtgtcttcaccttcattgccagaccactactcgacctcgtcactctaccaccaagccgagtgccgccatctccatcactcgacttcatactcgatgacaagcttcagagtcttctccattccgcactcaaccagacactcgaccacaaggaagagaagaagactccaacttatcgcttgaccaatcactcgaccacctgggtcgagtgccgttcttaatccgtcccaatattgtgtcgttttgagtattagggtttcagaatatttcgctataagtagcatgcatttttcattttcgacaagaagttttttatctagttttattccgcagaccttgcgttctaaaccttttgtaatccggatttctctttatctattcagtattcagtattcagtttctgatcttgatttcgtttactattgttcattctgttatcatcatgctgttacactgctggcatcatgttttcaatttgttcaacgtttatgctttctgttatgatgtctgagtagtgaatatgtttctgaggatgggttagagtagtgtagaattctcagtatgctaggtgattgagtattggttgatagatcccttctggattacttgttcttaatgcctattgctttctgatcaactggaatttgagcccagacattttcgcgcccaaaaggtgttcgatgaaatgtctgaaccactaattccagagattcgtgaccctgtaccaaggtattggttgcagggagcgttttggctttaacttgttgattcgtaatgcctgttaggttagctctcgtcaatggtgattgagtctgggactaggttagcttgagagtctctgttgcggtggcacttagatttggttgatgaacttgttgtctagggttaatttattgagcatgtcaatcacctgtaaactgaggaaacgaaattactcaattaccccatccttaggaattctttgtctgattgattttattgtttactctactgctgtttactgcatcctgtcatctgttgcttagtttctgcaattctttactgttactcgacctggtactcgaccacccagttgtctggcaatagactgtgcagtcgagtatccctgtttcattttctgtctgttactcgacctgtcactcgacctcacccagtgctctgcaaagagctgtgttggtcgagtgttttactgtttctgtttgattttctgttttctgcatgttcacttaggactgctagaacacaccaaaacctgttatgcttggcttgacttagtgacttctgatcacatcttgattgttagcatcacacccatttggattgacaatctaaaatactacaacgatataattgacttaaaaacctattatcacactccttatgttgatagaatgaacattagcatactccttgggattctgaattgacttccttggaagtcccgtaactttgggagcagaggtagatgcggattgtccttctaagtatctgactttggaattgaacgcctccacttttgcattcaggtcattgtagttgcatgctattcggataacttcttagcaatttccatggagctagatgcttgtccatgtagtagttgttggaccatctgtttcatttcagcattaagagcagcaggaccttggttttgctgaggtgcaaacccaggtggtggtggttgctagtagttcccctgaaattgctgcttgggaacgaaaccttggttttagggaacaaaaggtttgttctgaccttgttgttgctgtggaggatacacctgatcctgaggattagaaccgttggtgctgcggtaggagaggttggccttcnttcttttgaacttcctgtaccctttgtaactactctagttgttggtgatgtacttggcctcttctaactggttaccctctccatcttggacttgatactgctcgtcatcaataagaaagtgcacatgcttctgctcgctaaaaagaatcctgtccagcttctgattcggtgcctctgatggtcctgtcgcagtcttcgttgaattaccatctgattgagctaggttctcaaccaattcccagccttcttcaacatctttgttttggaaattcccattgctggcggttaccagaagcattttnnnnnnnnnnnnnnnnnnnntgtatagagtactgagcagagaagctctcttaaaactgtgatgagggcattggttggtgtaacccttgaaacgctcccatgcttcacagaagctttcaccagtcttctcggtgaagccagagatctcatttctgagtcttgcagttctggcgttggagaagaacttggcaagaaaagccttcttacaatcatcccaggtggtgattgagtcatggggcagattcttctcccagatgtgtgctttgtcgcccaaggagaatggaaacaaacggagcttgaatccgtcttcacttacaccaatgatttttgttaggttgtagagcctatcgaattcatcaaggtggtcgagtggatcctccgttggcagaccatcgagatgagaccactcttaatctcgaagttgttgttctggatagcaggtggtgcaattcctttccgctgacggtgatcacgtggtgcatctccagcaccaatgttagcagggccattttgttgattctgttcgtcagccatttcgagtggttgttgtggtattaggttggctgtgtttctcctttctctgagttcgcgagctatgcggttgatgttgtcgttgaaaaggaggttctgattgcctgttgatcgagtttgcatacagcagaggtgtacctggatcaagaagacaacaagaaaaacacacagttagtaaccgaaaataaaattgaaaaagaacttgatctaagcaagtctgaaatctcaatgtaacaaacaaacacccaattggccacggcgccaaattgataataggtttttagtcattatcctaaaacaccaatcatatcgttgtagtattttaggttgtcaattcaaatgggtgtgatgctaacaatcaagatgtgatcagaagtcactaagtcaagccaagcaataacaggttttggttcgttctagcagtcctaagtgaacatgcagaaaacagaaaatcaaacagaaacagtaaaacactcgaccaacacagctctttgtagagcactgggtgaggtcgatagacaggtcgagtaacagacagaaaatgaaacacagatactccactgcacagtctgtnnnnnnnnnnnnnnnnnnnnnnnnnnnnnnnnnngtaacaagaaagaactgcagaaattaagcgacagataacaagatgcagtaaacaacagtagagtaaacaaagaattcaatcagacaaagaattcccgaggatggggtaattgagtagtttcgtttccttagtttacaggtgattgacatgctcaataaattatccctagacaacgagttcattaatcacatctaagtgccaccgcaacagagaccctcaagttaacctagtcccagactgaatcaccattgacgagagctaacctaacatgcattacgaatcaacaagttaaagccaaaacgctccctgcaaccaataccttggtacagggccacgaatctctggaattagtggttcagacatttcatcgaacaccttttgggcgcggaaatgtctgggctcaaattccagttgatcagaaagcaataggcattaagaacaactaatccagaagggatctatcaaccaatactcaatcacctagcatactgagaattctacactactctaacccatccttagaaacctattcactactcagacatcataacagaaagcataaacgttgaacaaattgaaaacatgataacaacaatgtaacagcaggatgataacagaatgaacaacagtaaacgaaatcaagaacagaaactgaatactgaatactgaatagataaagagaaatccggattacaaaaagtctagaacacaaggtctgcggaaataaaactagataaaaacttcttgtctgcgaaaatgtgaagtacatgctacttatagccaaatatcccgaaaaccctaatactcaaaacgacgaagtattgggacgggttaagaactgagtttatccggtgaatcaaaatgcttacaaggctatctcatcatcatcccctatgcatatgcaacaatcctaaatgaaacactctagactcgatcctaaatgtaatgcaactacatgaacactctttttttgtgaaatcattttctgaaatttttcaaatttttttggtttttctatgccttagatgaatgcagactcaaaaatatacacaatgcaacacacacttcctgagccctcccccaaacttaaatcacacagtccactgtgcgaataaacttggaagagagtactcaggacaaatccaatcacagaaacaaaaaatgaagaaacaaatcaagacaaatgatataatacaatggtgaagtgaggcgcttacctcagtcgaagaatgaacgtagttgctcgtcaatggctgcctgtgattgctcccaggccatagacgaaccaccttgttctgtatcagctccagcaggtgggtactcgacctcatcagctctgtggcggccagcaccgctctgaggaaactcgacctctctccttctgctgcggccagcaccgcggtcaagtgatctcctcgagtgaatgaggcgtgatctgctgctagatcgagtgagtgtagccttccttcttctcttgtgttcccgggattcgaatgacgaatgcctagcctggacatgtgggactctctgctcgctaagctcaggcctgtgcgtaggtgcattaattctcctcgatggcatctccatagtacgctgtacctgtggaatagcagtggtggaggaagagcaactcagcttatctgtcagaagcttgaaacacttggcgatcagcttgtcctggttcttgcaccacttctgcaatttactgttattcttatgagcttcagtcaagctcttgctctgcctcgctggaggtacatgttcagcaaagtgatacatgctagtgtcgaactccactgccctatcttcatccatcccatccgaggcagcttcttctagaagatcatcctcatccaatggtggagcgttctcatagtagaggcgcccaacctcaggccaaaaatcaatgttatctccctcgattatccgtggaacctcagagctggggagaaggatgctagctctcttgtctgtagagtgctcaaacctgaacctgtgcaagtcgtcaaccattgcaaactccaagaattcgcagtgacctagaagctcgatatccattgctcgcgggtcgattccatcagaagtgatcgggactccacaagcggtcagaatcggtgtcacaacacctcctatgcacagagcgcctcatgctctcttgtggttattgctgacggtcctgctcttgtatccacacagatggatcagaagaagtacagagagaggtgtgtcattgatttcaccttggagagacatgccattcttagtttggcgaagagttcccttgagagccattgcgatcatctccatatcagaattagtaacagtccctgtgatctctcgggagtaaagcacattggctatagaacgctggaagtacctgatgacagggctgcgtatctgattgctctttgacctggaagaattcagcggtacagagctgccaatggtgatccacaagtctttcaactcttctctgtcatacttgggcttagtacccgttccactgggaaactgaacaatccttccatgcgcttgattgatagcatataaccctgaccatacacatagaattgcaagaatctcactccttcactttccaaatcatcagaggtcataccttggtaaagctccacttgtagtgtggaaagaaactgaatcgtttattattcataggctacatatgagtaagccatcaaagtgtccaggtgacaactctggtacatgtgctgaacatcctccagtaatccaagctgtgccagcgtagtcgagcaaggatatcttgtgcagtagaactcattcagcttgaagagcctgatatactcctcaactggcaatacatcaggtttgtgcagaagttgtgtggctctgcgagtatgcgtaggcatatactcgtcctccagatcctcatctatcagcacatacctctttgtcattgctctcttccctcgagctacctcagcttttctcctgaagttatcatattctctctgttctctttctggccttgaagatgaagactcagcctcatccatgtgatagtcaggatccattgacgagccgtcactataattactcatgataatcctgaaaaagattgagaactcaaaactcaaatgtcaatatgttagtttcaaagaaaacaatgaaaccaaaatcgttatcaacagaaaatgaaatagaccaagttggtcgagtacagtctagtactcgagtaaacagagacgttcccgagttcttcgtttatgttttaacctagtagagcagaacagggtcgtgtacagccggtgaaatcggtcgagtagagtcgttggaatcgagtagctcttcccgacgaatgctctaagggtcgagtagatcctcaggaaaccataattaacgtcttgagtcttgaatcgttggtcgagtctcaggacgaagtcgagtggttggctgcaggaggtcgagtgctttacggtgaactggaatcaacaagactcgagtctttgtccggctgtcaagtgaaacttggaactcgattaaggtgggtgagtatttctttccctcagtggccgagtagattcagagaggtcgagtatagcttgatgtttcgtcggcttcagagatttgcttcttgtggtcgagtaagttctcagaccagagagaagcgatttgtggcgaattgctgcgaagaagaaagattgagtttggtcgagtggtggaaaaatgaagagagattggtcgaatgaaattttactccatggttagaatgatggcgatttcaaaaggagtggtggagattgagtttgagattctctctccattttatcttcaaggagaaagcgcgtggcccacactctgttgacttgtctttgaactttgttccctgttgattgggaaaacttcaggccctcttctgtaaacttgataaactccctgcaaatctatgtagctcctattggtcgagtataatcatgatttaaatttttttgggttttaaacatagcacatactcgactgatgtacttgaatgcaaggnnnnnnnnnnnnnnnnnnnnnnnnntaaattgtgctctccactgggctatacactcgatcttcaggccttttgtagagtaagagttttgaatttttactctatctccacgttgttcctgtattcttcagaaccacaaacacaactaaaacaaataaaaaataacaagaaagtaaaacttatttacaaggataatcatgggacttcctcgcaagtgagcttgtttaaagtctctagcttgactcctcacacttatcatgaagaaaatgaatgatagagagggtctgcatagtcctctctagtatcatcatcatactctacagcagaatactcaattcccctttcttcaaaataggcttctttctcttctcgagggtaatctatcacttcagaccatcttgaagtgaacttttttctcgggatagtgttaatcccgcctttaggttgagcttccttctgcatctgattcagcttactcctaagttcctcaacagagtgagctagcctctctatagtttcttcttgcttatcagacctctttttaagctcttttactttctccgtctcatacccttctcctgggatcactctatagtcttcagaggttttttcatcttctgttgactcttgtggaattttgttgatgtcaaactgcaacttgatgtgctttccaaggttgagacttattttcccttccctgacatctatcactgctcccactgaagctaagaaggggtcttcccaggattaagggatccttatgctctacttccatatccagcaccacgaagtctgtaggcacttccactccattaatcatgactagtagatctttcagcatgccgaagggttttctagaagacctatccgcaaggatcaaagtcaggtcacaaggttgtactgaataaactctaaccttcttgccacagagagtggcattaaactgacagaggctacgagctcgcacaggcaatcgctgaaggctaattccccaatggaacatggtagactaaaagatccaggatcttttaacttttcttgaacaatcttcttatcagcaactcgagatggagaagcatcacattcatcatctcagtcgtgatacatcttgattctttccagtattagatttctcacatctttgtgaggttcagtggcatcactgcttcaatctcgtctagctgttttgctgcaacagacttgtatctctccatccacgctttcctgaatgtccatgggagagtacatgagggtaatggagtaggtttgaatcgtttagccattctcttgattatggcggccttctcttccgaggtggattgaatgagatggcgagatccatcaggatggttgaattcaacaacagagacttcaatctgagtagaagcctccccttcttgaacatcattgtccccaatgattaaatcagggacatgtcgagttggtagctctcgatcatggcagatggtgatggcgtgagcagttgcatactcctttggattctgtattgacttcccaggaagtcttgtaactttaggtgcagaggtagatgttgattggccttctaagtatctgactttggtattcaatgcctccattttggcattcaggtcagcttatggtgcaattcagataatttcttagcaatttctgtagagttagatgcttgtccctgtagcagctgttgtaccatctgtttcatttaagcatcaggatcagcaagaccttggttttgctgaggtgcaaacccaggtggtggttgttgctggtagttcccttgaaattgctgcttgggaacgaaaccttggttgtagggaacaaaaggtttgttctgaccttgttgttgatgtggatgatagacttgatcttgtggattagcaaaggttgtgatgcggtaggagaggttggtgttgttggttttgaagttgttataccctttgtagccaccctggttgttggttatgtagctgacttcttccaactggttaccctccccatcttggacttgatactgctcgtcatcaacaaggaagtgcacatgcttctcctggctaagaagaatcctgtccagcttgtcattcagcgctttgatctccttcttgtgtttgtcatcaaagtcagttgtgcttttgacggtcctatagcagtcctcattgtaattaccatctgattgagcaaggttctcaaccaattcccagccttcttcaacatctttgtcctggaaattcccattgctggcggtatccagaagcattctgatgcgtggtaaatcgcctctataaagagtgctgagcagagaggctttagtgaagccatgatgagggcattggttggtataacccttgaaatgctcccatgcttcatagaagctttcaccagccttctgtgagaaaccagaaatctcatttctgagtcttgtagttctggcattggagaagaactttgacagaaaagccttcttacaatcatcccaggtggtgattgagtcatggggcagattcttctcccagatgtgtgctttgtctcccaaggagaatggaaacaaacggagcttgaatccgtcttcactgacaccattgatctttgttaggttgcagagcctatcgaattcatcaaggtggtcgagtggatcctccattggcagaccatggaatttgttcccctgaatcatcgagatgagaccactcttaatctcaaagttgttgttctggatagcaggaggtgcaattcctttcctctgatgatgatcacgtggtgcatctccagcaccaacgttggtagggccattttgttgattctgttcgtcagccatttcgagtggttactgaggtacaaggttgactgtgtttctcctttctctgagttcgcgagctattcggtcgatgttctcgttgaaaaggaggttctgattgcctgttggtcgagttggcatacaacagaggtgtacctggatcaagaagataacaagaaaaacacacagttagcaactgaaaagaaaattaaaaaagaacttgatctaagcaagtcagaaatcttaaatgtaacaaacaaacacccaattggcaatggcgccaaattgataataatttttagtcaattatcctaaaacaccaatcatgtcgttgtagtattttaggttgtcaatccaaatgggtgtgatgctaacaatcaagatgtgatcagaagtcactaagtcaagcagttctaattgaacatgcagaaaacataaattcaagcagaaacaataaaacactcgaccaacacagctcgttgcagagcactgggtgaggtcgagtgacagctcgagtaacaaacagaaagtatatactcgactgcacagtctgttgccagacaactgggtggtcgagtatcaggtcgagtaacaggagagaaatgcaaaaactaagcaacaggtaacaagatgcagtaaacaacagcaaagtaaacaataaaatcaatcagataaagaattcccgaggatggggtaattgagtagtttcatttcctcggtttacagaagattgacatgctcaataaattatccatagacaacaaaattattaaccaaatctaagtgccaccgcaacagagaccctcaagttaacctagtaccaaactcaatcaccattgacgagagctaacctaacagactgtgcagctgagaatcaatgttacattttgtgttaactctgctattgatgacctgatgcttaggctttagtatgttgatcctgttactcgaccttattctcgaccacccagttgtgtggcaacagactgtgcagtcgagtatctctgttacattttctgtctgttactcgaccacacccagtgcttggcaacaagctgtgttggtagagtgtttttattgttctgcttaaatttttattttatgcatgttcacttaggactgctagaacacactaaaaccttttattgcttggcttgactctgtgaactctgattgcatcttgattgttagcatcacacccatttggattgacacctaaaatactacaacgacatgattagtgttttatgataattgagcaaaaacctattataaaatcccaatccctcgtcgggcacttgggtgtcacgaatggcagctttgtcaacgcgagaggaacaacgactcgaccgacaaagaggaaagaatctgtcaaaatcatcgtctccatcggagatgggtagaggattagtttggggctcaagaacctgtaaccctttcctattcacagcacgaacttctttgccattgtcaaaagagccatttttctgattctctacagatatcaaagtgtttgcatgaaaccaatcagtcacacctttcatgatctttttgtattgagcagccaatttagcatctaacgacgggatagcctggtcatgtcaaccgaaacaatagtttcctcctcatttgtcaatgattgatgggtccttcgaatcccagttggattttataggattttgtcttgcttagaagattttctgccacgaccactataatgccccgtacgtggactatggacgggaaagcttaaaaccgaggtaaacgataattcatctgttccacgagtcatgttccaaggcaaatcaagtgacttcgactctgtgggaaacgaaaccttaggattagcttaggatggttagggggaagaaaacttagagatgggcgagaatttgaagttaggccgttgcgagaaaccggattaaggaccttctctgtggcgtgactaaggacgaagtgtgggcaacccgtggtggtgtgagttcggccaaggcggacgtgtgctcgactatgaccggcgtgtgcggtaaaggcgaggctgagagttggccacgtcatcgaccagcttgtggcggcgagcaggtgggtaatctgctccggttttctgtggttgaaaatcggccatgtctagccgccaaaattgagtggtccttgaccagccacgtaggagcataaggcgggccgacttaatgtgtggtcgaggacgttttgccgacagctaggcggtgactgggtgtcgctcccacaacgtgtccagtccaggtgtcgcccatcgagcgtggcttggtggcgacagccgtgacaagtgtcccccagcacctcacctaaccaactcgcccgaaaacctataaatagcctattttcgacccttagaatttacacctcgaatagaaaccacttagaaatgtttcgggaaaacagagaaccatcggagaagttcacggtccaaaaccttctgccgagctttgtgagtaaccgagccgtgtgaagtagcacacggattgggtttatttattatgtttaaattatgcatcaggttgctagtttatacttagtattatttcataatcatatatgcttggttgagtgattgattggttatgaaattaggcttaacgattgtgtaaccgttatgctgcctgtttgttagcgtaaccgttatgctatcggatagcataggaatagggttatgcgtgttattgtatagcaatagggggttaactattgttaggcgaatcatgatagtccatccgtttgttgtgtgttgcgtgaaactccgtaacgttatggcttacgaaggctcggggctggcttgcaaccgaccaggcactacatgacgatgtagtagtgaggaatgtgatctcttgtagactgtatgtgtctaggagtgtgtggggcattggggggggggggaaggatctgaattcgtagaggcctaaagtaggaagagtgtagaagtgtagattaagtcttatataggaggtgcattgtcgattgagtcttgcttgttgattgtagattgcttggtatagttaggtgttctgatagcggtataggtgaaaccctagagaccccggtctaactaaataattctatattactcatgatgctacctttttgttacaggaaaccttagcggggaatttgtaacctgaataagtgtgtaatgtagtatatatacacatattaggcacatttgccatttcccaaacggacatgaaactggataaatgaagcttaatcgaacttgaagactgtagagacctgattctagcttccgattatatttctcatcttcatccaactgaaaagtaaaacagtgaaatcagttcataaacagattcaagctcagaatgaaaacatcaaaatatgaaaatgataaaagtgaaattacctcaaggtcatcaagctcaagctggtctaacctttccgcctctgatctaaccctatcagagtatctgccaagtgcaaaacaataatgagagaggaaacacaactttgaggtaactgcattttaccatcgcgttcaccatatagaagccttagctttttaatcaaaatgcttaaaatggtagactactgaagagaaacagaacatttctattacctcaaatataattccatgagccggtcaatcttctcaaattcattctccacgaatttactcaacaatcgatctctcctagaaccccttaatatcccagctgaaagatacagccaacaaacaagaaaaccaagaaattaacatcaagaacatgcaaagaaaacacgtcacttttactgaaacatatgacttgccttcttaccaaataatgacgcaatcagggaaataacccgctcctctagctcctccttataccgctcccttttgattct

SEQ ID NO: 129 - DNA, 2270 bp, Arabidopsis thaliana landsberg
gaacgatctttacttccataagtatgccctacattcagccataatgtctcttcttcttccatgcctgctccaaaacccaaagaacaatagagacagacattataacatgttcctacacattcacgtaataaagaaaactaacaattcgcccacaagccaaaagaggaattcagagagtcgcaagttttgaaagtttacagttatctttagacaagcaacaagtagaccaaaaacaacccacgatcgcaccaacacacttaaagattaggaaactaaccttcgagaccttggaacgtttattgcatcaggagtccgctccatagctgtcgggataaacaaaagataaacaattagagaggttacttggaaagatatgaaacaaatcaatcagatctttgaagcgagagcagaatctagaagaagaaacacttccatcaccgacgattatacatacatgtaccagaaaatgttctaggcagatacgattaagcgttgcgacttgtgatgagaagagacccaaatcacaacgcatgacaaacaaattataaataaaggcgccaaatggtgccgtacgtttctcttcgtaacgtcgttgggcctaaattaataatgggcttttataggtcgaggttaggccttattgtaagtattcatctgcatttcttctttgttttatatttactaatatggatattttgttacagtttcagttgatgagcaaatactgccacaattggtccgtatatgaaaccgtgactgagaattttagaccaaactctgttctcaattgtttatttgtcagtattcgatatggattcttgttagaaatataaatatatttttgcttctgctatttttgtgacattttaatgaaatatatatttaatgttatgtgacagctttgaatgagagccattatatatatttttgtgacattttactatgttcatttgataagcttcttgcttctgctatgatgattttttgaataaattttacatgtcagacttttagaggtttttgtttatcattaagaatctttgataataaaaaatcagagcagaagtaatataatcttgacttcttgagtaatataatatttccaaaacatttgataaatcaaattcaaaccaaatctttgccaccagtcagtcacatggaatgagtagtgaccatcaataggccctcatgtaatttgcacttagtcacatgggtgtatatctataaatttaaaacaacaatatcaatgtgagttattgaatcatgtatcaaattaattcaaaagcaataatatcaatgaaacacctatatgttagtcacaatagtcaggtaacttcatcatgcaaacaataaaaaggacatgactaatatgtgacaaacctataaaattggtatcaagttggaaaaggccaaactttaggtcggcaatagaagacaaattccaataatcaatgatctttcccgaaatttctgcactttctcaaatgaagaaagtccaaaaagatctctatacaaccatatcaaagtatcggataatcaatacagttcatttgtgtgaaaaaccacgtaaccatctctatgacaaaactctaatttgccatgaccggcattgccgtggtctgaaattctcagtagataacaaataagttatgagtttctcgatccgtttagctccaagaccaggtttaataaccgacgtatcaccaatcaccgcacacggatcgctcccgttttccctcgtaccaatacaccaaccacccggagtgaccatcccgtgactccgaaacaatagttccgaatcaatcttatcgagaacaggctcatctctacggaatttcctagcaaaaggagcgttactgtccaccattctctggaaatcatctaatgtaagatggtgaggatgttgctttggaggattgtcccatgagatgaaatgtaagtcactgttaaccgttgtgttggtaaactctcgagcattgcaaatcacagtgtggaagtaaccttctggcgatgaaaggaagtttgcgtaatacattaacacaattcgaggaagattatcccatccccatatgaaataatccacaaaaggtctagataacatcatccacgcagatcctattaaccaacaacatcaaaaaaccattagagcctaagaattgttatatcacaccaatgagctgtaacaaggatcctacatttaaggaagactcaacatttagacattcccattatgttgattacccaaaacaggaaaggttatagaaataaag

SEQ ID NO: 130 - DNA, 8103 bp, Arabidopsis thaliana landsberg
tagattaggaagattactatgttaagggaaaaagagtatgtgacatgggtgaaggactagagatcaagggcatgtaaggtctacaagtccaagtttgcaatgaatatgattacaaaccttgagatttgcagctttggtgaagatgtctgccaattgatcttcacttctagtgtatcatggaagagtgagtccttcgatatgctcacaaaccttatgacagtctacctcaatgtgtttggtcctttcatggaataccaagttggttgcaatatgaatagcagctttgttgtcacaatgtgtaacatccccgatccaaactaggatcgaggggaaaggcccgatacaagacttaaagaaagtcgagtgaaagaaaagaggaaactcgggaagctgagtgggaagctaggacagctcaagggaaacttggccatccttggggaagctcggccagctcgtcgggatgctaggctagctcacgggactgttagctagctccgctagctcgacctagctggatggggagtgaaacagttacccggcagttaccgcgacggttgccgaacggttaccccaacagttatcttgagcggttatccgagggttactcaatagttaccgcgacgattactaggccataggaacgtgccacgtgtgtggacgggaaggaagcgacgaaaaggatctagaggcacccgttcgcccaagcgattactcgcccttccctatatatatatcccattcggccaagggaaacacataacaccattcaccaaaaacttacgaaaagggacgtaaatctttctaagggtgcgagcgaacggagggatggcggagattgagcctatgggtactcccgtttccacggagccgacggaggccgaggaagcgaagggtcaaatgaccaaggtgaggcataaccatacatgccttaggccgaacgaccttaaaaaagctcgaaaattaggttgatgtgttctttccttctataattctgttctaaagatttgagatatgtatgggagtgaaacatgtggagcatcatagcatatgcatgatcgctaagtgtaaaccacgacaatctcattattcgttaatttcaggatgtgaccatttttgtggaaaggatttggcttatcggcaaggatggctgtcaggacaagtgggtggtgtttaagctaaagtattggatcgaatgattgtaatagcctatagtgcaaacactcatgtcgttcgaaaccttatatgaataatgttggcttgtttctttatgtgaattcgtcactttttacttatgaatctcagaatttccgctgccaattacacttagagcgaattcagataggacccgaggacacttgagttgtcctcggatgggaacaacctcaccggacggacagcccaggatgggacgttttaagtctctcctgagtttaattgttgttagaatcaatttattaagtgagtgcgtgaccatgtgcttatctgagcgattgggttgtatgatttattttgtgggatgatatgtaggtgtggcgaatgtgtttttgggtgaattgttcaataactggttcgttatgttgtatttgtgattatagagcttttttttgcttgtgtgtatagctcgtagatgggaggatcacctcactaagtatttgtgataatacttacgcatatcttttttttttggtgccagtaaagataaagtgtgattgtggaatcatggcaaggaagagaggatgatctaggaactcgtttgttttatgtttggtctttttggttattggaacccggttattcttggttttgttgatcgaattatttatttattcataaaatagtatttctgacttgcggtttaattattatgttattggttggtttaattagatatttatgggaatatttaattatatatttttttaaaaaaatgggtccggttgtttcaatttggtatcagagcgattacggttctaggatgtgtagaaaaattaattgatgaattattttcctgatgattgatgtgggatgtgtaaagaccgcgtcccgcgttcataaaaaaggtcagtttgttttaggagaaaactagatcatggtcgaggaacggaccaaaatacttagtaggaagaacgagaaagttcaagccgaaccagctaggtgagctggacaagctggatgaactagctagctaagctaggtgagctaaaccagctgtaagactagctagctcagctaggtgagctgaccgtcagctcgactgagctcggtgagctaatcaagtactgacccagctgggtggtccggtcagctgacactcgagctggtggactgtggtagctcacgggtgaagaggtgtctcggccaaaaggtgtaaggtcgagcgggtaccaacgaacggttgcatcgcccaaaggatgcaaggaacagatgtgacctttcgaaaggatgcaaagaacggatgtgacctttcggaagggtgcaagaaccggatgtgatgcttcgggaagcatccattcgcctcctatataagggaggacgcccaaggcatttcacatcatctcacaacatccaaaacaccataaaacattcttaaaggagtcccaacacatcctagagttgttggtcgaaaagggggtgcggctcggcgagtataactcgaccgaactgatgcgcatgctacctcccggtccaacggttcgatggagtgtagaggatggagagggtagaccgttcgtcttagagacgaatcggatctggtagaccgatcgttggatcggatcggccagaccgatcgtcagacggatcggatcggccagacggatcggactgaccgatcgtcagacgggtaggatgggacagaccgatcgtctaacggaatgggtcggacagaccgatcgtcggatgggatggatcgagaaaagtgttcgaggaagcacaaggataagtgcatccgaacacacccaagggtcgcccatggatgcaatcttaccggtaaagggagaaagcaccaagaatgggtaaggaacgtgattcatcatataggatcaacatcgcggccgccttcacgtatctatttcctcagctatggtgaaaccgatcagggatcggtaagaccaaagggtgactcgacggataaccaacgggaaagtccacggtgggaaccgatggacaaaacggatgttggacccgcgagcaaacctaaggctgacggaagaaggatttcatgggctagcctacgatgatccagtggatgaatccacggacccttgggtgtgataaggatatagttcggattgtatggatggatcaataagccgaaagctttatcgaccaccatagaccggacggataaacggttagtaaaccgtgggcggtcgtagtaaatgacaggaacggaaacatggatggttcgataagccgagggctcaatcgtccaccatgtagccagaggggcgtacgtttggagaacggatggaccaataagctaagagcttgattcggccatcgtgaaccaagggaatcgtacgatccccaatctctatcgttgtacttagaccagtggggttggttggttgtatggctaagtaacgatagggattggttcatcaattcacgaccgatgacgagtcgttgaacgaatggagtaaggcgacaaacgggctaaggaatcaaatccgcatattggccaaggtatgtaacgatctagcttattagttaagatagacgtttgctaattgatcgtgaaagtaggataaaggaatatgcgattgtttggcttagaatggttagcgaacatatgcatgtcttgaccgagtaaaggatcgatctaagtctaagggacaaagacgatgaaaccggtacaagagttggttagaattaaaccaaggttagaaagacttccgctgtgtaataagagagcgattatagaatttagcctcgtaaaggcaattctatgttgaatggcgaaaaattaagaggttcggccggggagaggcacgaacttgagtactatgtcgccggacgccgagacgtccgggacggggtctcacaagttggtatcagagcatgcttgatcctaggatggataggtgctcgggatgtcatagtaagagtttggcggataaggaagttgagggatcgatgtgtttggaaaaggaaatagttatccaactcacgatcggaaaccaagatattatccttgtagtcaaaacttaaacatgacggaaaagtaggttgatatattcggaggtggaccgatatcaatgaaatttggatctagtcggaacttgactaagatcgggtacagacttagtcgggatttgactatttctggggttttgatcttctcggaaattgaccaagatcatggaaaaacgacaaggtcggaagagaactatgtcgggaatattgaccgagtccggtggggaccagggtcggaaatattgacaaattcgaaaaaaaagacttaagtcgagaatatgatcgagtccgagaaaggaccaggatcacaaatttgatcgaatgtcggaagagacaaagatcagaaaacgttgatcaagtccaggaaaggacaaagattggaaaacgttgatcaagtccaagaaaggacaaagatcggaaaacattgatcaagtccaggaaaggacaaagatctggaataatgatcgagtccgggaaaggaccaggatcaaaaatttgatcgaatgtcggaagacacaaagatcagaaaacgttgatcaagtccaggaaaggacaatgattggaaaacgttgatcaagtccaagaaaggacaaagatcggaaaacattgattaagtccaggaaaggacaaagatcgggaataatgatcgagtccgggagaggaccaggatcaggaatttgatcgagtgtcgtaagagacaaagatcgggaaacttgttcaaactcggaaatagagatttgatcaaatgtgatatctaaagtctcggagagactaaagatgggaaagcgttaaggagtaaacaaagatcttacacccgctgaattcgaggacgaattcagtttaaggggggtagacttgtaacgcccgtgtcccgagttaggaagtaagcaagatcttacacccgctgaattcgaggacaaattcagtttaaggggggtagacttgtaacgcccgtgtcccgagttagggagtaaccaagatcttacaccagccgaattcgaggacgaattcagtttaaggggggtagacttgtaacgaccgcgtcccgcgttcataaagaggccggtttgttttaggggaaaactagaccatggtcgagaaacggaacgagaaagttcaagctgaaccaactaggtgagctggacaagctaggtgagctggacaagctaggatgaactagctagctaagctaggtgagctaaaccagctggaagactagctagctcagctaggtgaactgaccgacagctcgactgagctcggtgagctgatcgtgtactgacccagctgggtggtccggtcagctgacactcgagctggtggactgtggtagctcacgggtgaagaggtgtctcggccaaaaggtgtaaggtcgagcgggtaccaacgaacggttgcatcgcctaatagatgcaaggaacggatgtgaccttttggaaggatgcaaggaacggatgtgacctttgggaagggtgcaaggaacgaatgtgatgcttcgggaagcatccattcgccccctatataagggaggacgcccaaggcctttggaatcatctctcacatcatctcacaacatccaaaacaccataaaacattcttaaaggagtcccaacacatcctcgagttgttggtcggaaagggggtgcggctcggcgagtataactcgaccgaactgatgcgcatgctacctcccggtccaacggttcgatggagtgtagaggatggagagggtagaccgttcgtcttagagacgaatcggatctggtagaccgatcgttggatcggatcggccagaccgatcgtcagacggatcggatcggccagacggatcggacagaccgatcgtcggatgggtcggatgggacaggccgatcgtctgacggaacgggtcggacagaccgatcgtcggatgggatggatcgagaaaagtgttcgaggaagcgcaaggataagtgcatccgaacacacccaagggtcgcccatggatgcaatcttaccgataaagggagaaagcaccaagaatgggtaaggaacgtgattcaccatataggatcaacatcacggccgccttcatgtatctatctgctcagccatggtgaaaccgatcagagatcggtaagaccaaagggtgactcgacggataaccaacgggaaagtccacggtgggaaccgatggacaaaacggatgttggacccgcgagcaaacctaaggccgacggaagaaagatttcatgggctagcctacgatgatccagtggatgaatccacggacccttgggtgtgataaggatatcgttcggaccgcatggatggatcattaagccgaaagctttatcaaccaccatggaccggacgggtaaacagttagtaaaccgtgggcggtcgtagtgttaaacgaccggaacggaaacatggatggttcgataagccgagggctcaatcgtccaccatgtagccggaggggcgtacgtttggagaacgaatggaccaataggccaagagcttgattcggccatcgtgaaccaagggaatcgtacgatccccaatctctattgttgtacttagaccagtggggttggttggttgtatggctaagtaacgatagggattggtttatcaattcacgatccgatacgagtcgttgaacgaatggagtaaggcgataaacgggctaaggaatcaaatccgcatattggccaaggtatgtaacgatctagcttattagttaagatagacgtttggtaactgaccgtgaaagtaggataaaggaatatgcgattgtttggcttagaatggttagcgaacatatgcatgtcttgaccgagtaaaggatcgatctaagtctaagggacaaagacggtgaaaccggtacaagagttggttagaactaaaccaaggttagaaagacttccgctgtgtaataagagagcgattatagaattaagcctcgtaaaggcaattctatgttgaatcgcgaaaaattaagaggttcggccgggaagaggcgcgaacttgagtacaacgtcccggacgccgagacgtccgggacggggtctcacaagttggtatcagagcaagttggtaccgctgaattcgaggacgaattcagtttaaggggggtagacttgtaacgcccgtgtcccgagttaggaagtaagcaagatcttacacccgctgaattcgaggacaaattcagtttaaggggggtagacttgtaacgcccgtgtcccgagttagggagtaaccaagatcttacaccagccgaattcgaggacgaattcagtttaaggggggtagacttgtaacgatccgtcccgcgttcataaagaggccggtttgttttaggggaaaactagaccatggtcgagaaacggaacgagaaagttcaagctgaaccaactaggtgagctggacaagctaggtgagctggacaagctaggatgaactagctagctaagctaggtgagctaaaccagctggaagactagctagctcagctaggtgagctgaccgacagctcgactgagctcggtgagctgatcgagtactgacccagcttggtggtccggtcagctgacactcgagctagtggactgtggtagctcacgggtgaagaggtgtctcggccaaaaggtgtaaggtcgagcgggtaccaatgaacgattgcatcgcccaaaggatgcaaggaacggatgcgccctttccgaagggtgcaaggaacggatgtgacctttcggaagggtgcaaggaacggatgtgatgcttcgggaagcatctattcgccccctatataagggacgacgcccaaggcctttaaggcatctcacacatcatccagaaaccacaaaacattcttaaaagagtcccaacacatcccgaagttgtggtcggaaagggggtgcggct

SEQ ID NO: 131 - DNA, 4141 bp, Arabidopsis thaliana landsberg
gttctctatgaaaactgactccaaatttgttttttttctcaacgttggtaacagtaaaaactgttaatagtgtttgggctggaaaaaattaagtgggcttcggttttagatttgggcttcaataacagtatgctttaaacaaaagaggtaaatgtattgggctttgttaattaccaagtttctaacaaaattattaatgttacaaacatatattgtttttagaaatttgtgacaaacacatttactaatttcaatttcaattttatgatacatcattagaatttcataattattattttaattacctgctgtccaaattaatatacattcttgagatatccacattgcattgcataaataaaataaatacaagtactaaatctaaatatcattatgaaaataaagtgtcacatacttatacccaccacagaagatatagtttttatataagaaaaaaaaacatcaacaaccattcaaaatcatatgcttatagaaatatacatattatatcaactaattccataaatccgtagaataactaatgttatcgtaaccttaattacgtgtcctttaattatacacacagccgaatatataattgagaaataaggaaaaaatacaacaaccatactaaatataaactacattgtcaaaacacaaaacatcaataattaaaataaaaaaataatcatgcggggtaccgcgggtcatatcctagtactgaatacatgagtacaactacaaaaaaataacttttattttgttcctatatattaattaaattaagcaaacgttttgttaattatgctcaaacgttttgacattcatttattaattatatgtaatcagattaatcaaatatgattaagattttaataactcttttgcattttattttgttcattgataaaatagtaaaacattaagtttcaaaattaaaccctataccttaaactttcttagaacatatttatttatttatcatttaataaaataaatcgaaaacaaataatcaaaaattgaaccatataccctaaaaatcatataggcctggatttccggttaaacccgagtaaagcaaaccggaagaaccgaatcattgcgaattgaagtagcagaggagtaaaccgttcggaaaaattaatttgggctatcggtattcggttcgggtcagttcggttatcagactccgatcgggttaacctaaaccgagtattagaagccctatataaggttaatgtttcaccaaccctattttctctacttctctccggctatctcgcatctcctccaaatcgaagtcgctctctgcctctctttgtatccggctccgtgtccatctatgtctccggtgagtattcataaatctgatctcagacaacattagatttcgattgtaagttctttaggtatgtagattttgagtaatgggtttgacaacattagatttatattgcccactcccacttgtttgtgttgattagattgtccctagaagtcactacttatcgctctttcaattactgtaatgttgaatttgggtttcatctactaactaagatgaaatcaatttgagaagactagtggataatagtgaacacgtttacatgacttttgacttgatagtttgcagttccgttggtatctgtgtaactagttataggatgcttgattttgatgttcatgtgtcaaatttgataatgtagcttttgcatctgattaattaagattctaatgcagttgagtttttggtcttaatattaggcattgtatatgataccaacgtgtgaagaggttctgttgttttcagaatttctcgtatgttgtgtttcattcagcaaaagtgtgtcgtgagttgatattcttttaggctgaatataaatgtatgtataaaatttggcttatattgtttgataagaacactagacctctttcaagttgagcgttatgttgatgtatattacttgactcattttcaattctcttgacaatatttgacattgcatttacatgtggttcctgtgtttgtttagtgttcaacctgaatgttgaagtttaagacataaaaatcatctatacttggttgtttcttgattttgaatccttaataagacatggaatttctcctctcatcaggtaagtcactgaaagatggggcgtgttagaaccaagacggtgaagaaatcttcacgtcaagtcattgagaagtactactctcgcatgactcttgactttcacactaacaagaagatccttgaagaggttgccatcatcccatcaaagagactccgcaacaagattgctggattctccacccacttgatgaaacgtatccagaagggaccagtccgtggaatctcactcaagcttcaagaagaagagcgtgaacgccgtatggactttgttcccgatgagtctgctatcaagactgatgagatcaaggtcgacaaagagactcttgagatgcttgcttctctaggaatgtctgacactctcggcatctctgcagtcgacccacaacaagctatggcaccaatccctgctttcggcggcggcagggcacccagaagatactaagatggacgattggctctcttttttcacagttagggacaagaaagacttgtgtggttgtttattgtttcttttgattatgtcttaaactcaatgtgagactctttcgtattaatggtttttgagttatgtggaaccaaaattggagttcaaacattgatgatagtctcttatcatatatcctagtttttgcaacctgttaatccaggaggtgacggaaaacaccagaatgaaatgtgtcccaactttgatgatagtctcttatcatacatcctagtttttggcacataagattataaaacaaaatagtaagagattcttgtcgtaagcagaaaagtgggaagtagttactgaaagaaacctcaagaagtactaacctcatgatcttttcaactaaacgatcatcctgagcgatatgatgaacctttgtagagctggtaacgttgattacccaagatcctctatcaacttcacagagtaaatggtaaagtttcacccaatcaccaggtttaacccgataaaagagatgactgcttagatgaactctcaagatcgttccaacggttggaaagctgagcagtacatctcttgacagtaaagtatgaacagagagactgctaaatgccttgtcttcttcacttctcctgtcgatagccaaacattgtacaccaaatagaagaagagtaagcataggatatggaaagcgtagagtcaagcctaaatgaatgactcaaaacagataatgtgaggatttaaaacttttttccttcgcagttaatactcacttagccagaatagatgctgggggtgcatcagtcccgtcccaaacaaaaacagcgctagtatcttcatcggcatggagaatctccatcacaagaaacagcaggaaacaaggtaggatcagtcaacaaaacataaaaggagccaaaaaaagatttgaagtaacaatgaagtggtatagaggaatgaagagttaaaaagctttctcacagttaatagagagtatagagcatattaccctgcacaccaaatcaaagcgttttcctatcttgatctctctcaagaaggaaaaaacttcggagcaaggttttgttctgtaagatatactctgcatagctaagtaccaaaacagtaaatgaaagcttatgagaatcgttccaagctatccaaagccattatactatatgcatagttgaaagcaaaagaagctcacagtgttacctttaataacttggctacaacccgcaaaaactttgcgtaaatcatccatggcactcttgtataatgcttcttcttcatgaaaattggtactacattggtaacaaacaaaatccacaccttcgaacaaggcaaaggaagaaacccatctactacaagcagcatttactctttttccactatcaaaagtttgcatctacacaataaaaatccaaactttataacctcctgcacaaaacacaaaaggaaaatgaagaggtctttgtaccttaatgcgagtaaacagaatcatgtcgtcgtggttcttgatttaggaagttgttcaagagtcgtactaagtcataccagt

SEQ ID NO: 132 - DNA, 563 bp, Arabidopsis thaliana landsberg
taccaagagccattgttgtaaagaaaaccaaagtccactagatcaatcaaagtaattgaaacttctccttataataatagtcaaagaaaagaaagagtggtttgatccaagataagaatgagaaaaaaatgccttgagtgcaagtggtagaactaggatcatattttgggcttgagggtagtactatctgctggtgtatacattgtctatgtttttaggtagatgagcattctcctaaagctcagtccttttcttttgagagtcccctgttataaacttgaaccaccagaaagggaccatctttgtcttctgaccttcagcttagccaaatgagttcattgatgatgcatagcctgattcacgttcctaaactaatgaatgttaaagggattggtagatttgaagcatgtgtaggtcgagtataagagtgggattgaactataataaggcatggctaacgtttttgagtagagttcgataatatcggatcctagaactgtcaacttggacattgagcctactgatttacctgatgctttggttctgaatcccaaccttaaacc

SEQ ID NO: 133 - DNA, 17001 bp, Arabidopsis thaliana landsberg
  unsure (1)..(17001): unsure at all n locations
agaaaaccaacgctcctttgccaaaatgagcatttacttaacttcgtaaatagctcatgttcccttagccgttctagcaccgcccttagatgttcttggtgagcttcccaagattttgagtaaacaaggatatcgtcaatgaagatgataacaaactcgtctaagaaatcccggaataccccattcatcattttcatgaaggctgctggtgcattggttaatccgaatggcatgaccacaaactcaaagtggccgtaccttgtccggaaagccgttttcctcacgtccgttggctctatgggaatttggtgatatcctgaggccaagtcgatttttgaaaaccactgtgcacctccaagttgatccatcaactcatctatccggggtaaaggatatttgtttttcaccgtaactttattcaatccccgataatcgatgcatagcctaaagctaccatctttctttttcacaaacagaaccggcgcaccccatggtgagctactcggcctgatgaatcctttatccaacaactcctccaactgtttctttagctccgccatttccgccggtgccatccggtacggagctttagatatgggggttgtcccgggttcgagttctatcgtgaacgggtctgaccggtccggtggtacaccactaacggccgcaaacacatccgagaactcgttgacgatcggaatgtctttcaactccgcactcgcccccatttccttggttgtgatcgtggctatatatgcctcacattgtttcccgagcatcctttcagcctggattgccgagattaccaagcttcctgaggttgttcttattccttggaattttaacataccctcgtccctctcgaattgtatccgtcctcggtgacaatctatgtgagccttgtacttccccaaccagtccatccctaagataacatcatgtctctttagtggaacaatgattaggtccgcgggcatattgacaccgttcactacaaccgagatgccccgaacaagtccggtcggatacattgcctgtccgccggccgctcgtaccgttccataatcggtgtttggttctttcctgaacccacctatttcaaccaattctggactaacaaaacaatgtgtagccccagaatcaaatagagtgtgcgttactacgtcacctactctcaaggtccctacacattcccttagaatgctgagtacctcccctttcccatatgcatgatgcaatgcaaatgcagttattgaaataatgaatagggagttgtgagacgtaccagtgatcgccctgaagtttccggcatcgttagcttcctccgacaactcataaactcgcggtgccacggcttgtcgctttgggggaggcggcagtccatttcccccgcggttgtccctttgtccggcctgcttctccgcagtcaacttagggcactctcgctttagatgtccggtctgcccgcaatagaaacaagtccttgtctcttcaccgagaaccttggactgccctggttccattctcgggcaactttggatcgcatggtccttgcttccacaccggccacatgcacctatggccttccagcaagttccgctgtggctcttaccacaggtcacgcattccccggtcttagcatcggacttagtgttatccaccttgtcaaatttccttttcttatccgcgggtttggtggattgattgttccggatcggtgctttctcccggttcaagtacctctcctcctcgatcccttcctcaatcattgctgccctttcaaccaattcggaaaccgagttgaatgtccggaccaaacaatggttgcggatctctatccttagtccacggataaatcggcgcacttgagcttgttcctcctcaagttcacgtcccacataacgccttaggcggttaaattcctcatcatattcacgcaccgtgcggttcccttgaactaggtcgaggtacgcacattcaagcctatcccaagcctccggtggaaagtacttcttgttaaactcgtcttcgaaatccgcaaaggaccggacctcgtcccctctgcgtttctcgacggttaaccaccaattatgggcgtctccttcaaggaaatggaccgcaatgtccctttggtaatcctcagggcagcgggtagacttgaagttcctcttgagtctactcctccactcatcggccacaatcgggtccgtactgcccatgaagtgtctcgtgcccagccttgagacatgttcgagaagactcagatagtctccccttttccgcccataattcggttgtggattcacttccacaacttccgagtcatcgtccttttggttatccccttttaggaccaccggatcagctacaacggccttggtcaatgtggctagttgcgccatcattcccttcatcaaatcccactgttcttgggccgctggagtattgttccggttatccgtgatgtcccttgcaccactactctccggtgcttcctcattcatggacttcttcccggcctcaggtccggccgagtctgtcccatcgaacactgtcccgactctggttttctcgttgatcatcgtttcctcctcaaccaaagtctcctcgacaatgcccttgtccttcttactctttcccgttttgctgctcttacccatctgcgaaacctctaaagttaatccacataactcctagtaaaatcgcaaaagagtaaagaacaactaccgcgagattctcaagccgacgagtggtgataccccttaacccaaacacctagtcctagaaccaagcatgctctgataccaacttgaaaggccccgatccggactgcctaaaatccaggcgagttctctcgacccaagccactaagtgactcggccctatccgtttatgaggttctttcctagtctaatccgtttcatatgattccgagattcaatatatgagacgaatagagtaaacaaacaatcggatactttattaattaagcaaaggattcgatacaacctatgagtttgcatataagctattacaagtcatataatcgatccctagactatccgaactatcaccacccatcatcccggccttgagtctctcgcgcctaagccaagtccttcccacgatcaccattcgttcctgaaagtcatagagccataagtaatcttatttacttaatcatatgcaagtctatgcaatgctctatatgccatacactactcggatccgtggagagaattcagagaggggaagatcgcgcatcagtccggccgattctcggcaggtcagttaagacccgccggtcctccgccgagccgcgtccccgcctcagccgatccctacccggaccgagtcttgtgtaggatgcacatgacccggatactactcagccctctagtcggtcctttcaaggatccgactactaactcacatcctagaacccttagactcaaagtctaggatcccttaccttccttctcgaggttaggtcgatccgaccctccttctttattgccggccacagcccggctaccgaatcctaagactatttattctcccaagagggagagagttttaatggtgagttttcttgtgttttcggtgtgttgtggtgagtggaatggtcctgggcgcccttccttatatagggggcgaatggatgcttcccgaatcaacacatccgttccttgcacctttccgaagagttgcacctttccgaagagttgcgcccttccgaagagttgcacctttccgaagagttgtatctcttcgcccataaccgcccagttcgtccgtcactcgtccagctacctcgagctcgtccgtcactcgtccagctacctcgagctcatccgtcactcgtccagctgcccgagctggactgtcactcgacctgagtaactgtcactccttccagctgagcttgagctttgggcgagctgacccaagtgatttctttacgatcctagcttagcctgcatgatttcccctttgtccgagcttatggccagctccttctcacttgtccgagactccaccttcttctcccggaccaagtcctagtcaacgatcctattgaggatcgcgggcgttataagtctcccccccttgaattggattcgtcctcgaatccgcatcaagttgatctttacccatctccttgaaccactccggaaaattggccttcatcttattctcggtttcccaaatgtattcttcacggcctccacaattccacaagacttttaacaaatcccttgattttcaccgagtccctttcgtcatttggtccatgatccgtaccggccatgcttccaccgtcatgttctcctttaacccgggaggtacatcttccatgctttcttcttgatcacttatttacttccgtagttgtgatacatggaagacggggggaatcgcatttagttttggaggaaggtcaagtttgtatgccaccgcccctactcgttcgatcaccttgtacgggccaacataccttgggcttaactttttccttgaggtgaatcgccctgcccctttgtaggtcatcgcctttaagtacaccaaatctcctacttggaattccaattcctttcgacgtttgttggcgtagcttttctgtcgatcttgggcttcctttaacttgattttgaagaacttcattctctnnnnnnnnnnnnnnnnnnnnnnnnnnncaaacaaccgacgttcgcacacgggcgtccaacacaacggtgttctacaagctcggccataccaatactagcttgaaaactattattgtatgcaaactctactaaccttagatatttctcccagtttcctccccaatccaagacgcatgccctcaacatgtcctcgagggtttgaatcgttcgttcagactgtccgtccgtctgtgggtggtaggcagtacttaggttcactcgagttcctaaggccttttggaaagccttccaaaactttgacgtgaaccttgtgtctcggtctgacactatactaaccggaatcccatgtaaccgcacgatctcgtctatatacttctcggcaatgatttatgctccatccttatccgagatcgccatgaagtgcgcagacttagtcaatcggtataccacaacccataccgcattgtgtttggacttgatccccgttggcagtctagtgacaaagtccatcgttatgtggtcccacttccattccggtataggtagattttgtaacaacccacttggtacttgatgctccgctttgaccagttgacaagtcgggcacttggccacccatctggccacgtctttcttcattcctacccaatggtagtaccttttaaggtcgcggtacatcttgttcgacccaggatggattgagaacttcgattgatgcgtctctcttaggatctcctcctttaatgccctatcgttcggcacacatactcgaccgttcaccacgattgtaccattgttcgaggtttggtactcggtcttattgtttagtgcccatccttttatctcctcgtcccgttcctgagccagccggatcctactaagcaggtcggcctgatcggcggctcccaaccctaagggttcaatttctttagacaaggcattcacatgcaatgtccccatcatgttagccaagtccacttggctccgttccgcctcaacttctgagcgcctcctactcagggtgtcagcgacttggttggccttgcccggatggtacgctatgtccaagtcgtaatccgccacaagttccatccaccttctttgccttagattcaactccggctgggtgaatatgtactttaggcttttgtggtcagtatagatttgaactttagcaccatacaagtatgatcgccaaatcttcaaggcaaatactaccgcggccatttccaaatcatgcgtagggtagttcttctcatgtttccgcaattgccttgatgcgtatgcgataacactccccttttgcatcagtatgcatcctagtcccactatggatgcgtctgtataaaccgtatagggctcaccttcctccggtaagaccaatactggtgcattagtcaacatggcctttaactccaggaagcttttctcgcactcatccgaccaattgaatgcggtgtcttttccggtcagtcgagtcaagggttgggccatgctcgcaaaactcattacgaaccttcggtaataccccgctagtccgagaaaactcctaatctcggtggcattccttggtcgtggcaactcctttatcgaccgtattttcttcggatcaaccgatactccttggtctgagataacatgaccaagaaaaccaacgctcctttgccaaaatgagcatttacttaacttcgcaaatagctcatgttcccttagccgttccagcaccgcccttagatgttcttggtgagcttcccaagatttcgagtaaacaaggatatcgtcaatgaagatgataacaaactcgtctaagaaatcccggaataccccattcatcattttcatgaaggctgctggtgcattggtcaatccgaatggcatgaccacaaactcaaagtggccgtaccttgtccggaaagccgttttcctcacgtccgttggctctatgggaatttggtgatatcctgaggccaagtcgatttttgaaaaccactgtgcacctccaagttgatccatcaactcatctatccggggtaaaggatatttgtttttcaccgtaactttattcaatccccgatagtcgatgcatagcctaaagctaccatctttctttttcacaaacagaaccggcgcaccccatggtgagctactcggcctgatgaatcctttatccaacaactcctccaactgtttctttagctccgccatttccgccggtgccatccggtacggagcttttgatatgggggttgtcccgggctcgagttctatcgtgaacgggtctgaccggtccggtggtacaccactaacggccgcaaacacgtccgagaactcgttgacgatcggaatgtttttcaactccgcactcgcccccatttccttggttgtgatcgtggctaaatatgcctcacatcctttcccgagcatcctttcagcctggattgccgagattaccaagcttcccgaggttgttcttattccttggaattttaacataccctcgtccctcttgaattgtaaccgtcctcggtgacaatctatgtgagccttgtactttcccaaccagtccatccctaagataacatcatgtttctttagtggaataatgattaggtctgcgagcatattgacaccgttcactacaaccgagatgccccaaacaagtccggtcggatacattgcatgtccgccggcccctcgtacctttccataatcggtgtttggttctttcctgaacccacctatttcaaccaattctggactaacaaaacaatgtgtagccccagaatcaaatagagtgtgcgttactacgtcacctactctcaaggtccctacacattcccttagaatgctgagtacctcccctttcccatatgcatgatgcaatgcaaatgcagttattgaaataatgaatagggagttgtgagaacgtaccagtgatcgccctgaagtttccggcatcgttagcttcctccgacaactcataaactcgcggtgccacggcttgtcgctttgggggaggcggcagtccatttcccccgcggttgtccctttgtccggcctgcttctccgcagtcaacttagggcactctcgctttagatgtccggtctgcccgcaatagaaacaagtccttgtctcttcaccgagaaccttggactgccctggttccattctcgggcaactttggatcgcatggtccttgcttccacaccggccacatgcacctatggccttccagcaagttccgctgtggctcttaccacaggtcacgcattccccggtcttagcatcggacttagtgttatccaccttgtcaaatttccttttcttatccgcgggtttggtggattgattgttccggatcggtgctttctcccggttcaagtacctctcctcctcgatcccttcctcaatcattgctgccctttcaaccaattcggaaaccgagttgaatgtccggaccaaacaatggttgcggatctctatccttagtccacggataaatcggcgcacttgagcttgttcctcctcaagttcacgtcccacataacgccttaggcggttaaattcctcatcatattcacgcaccgtgcggttcccttgaactaggtcgaggtacgcacattcaagcctatcccaagcctccggtggaaagtacttcttgttaaactcgtcttcgaaatccgcaaaggaccggacctcgtcccctctgcgtttctcgacggttaaccaccaattatgggcgtctccttcaaggaaatggaccgcaatgtccctttggtaatcctcagggcagcgggtagacttgaagttcctcttgagtctactcctccactcatcggccacaatcgggtccgtactgcccatgaagtgtctcgtgcccagccttgagacatgttcgagaagactcagatagtctccccttttccgcccataattcggttgtggattcacttccacaacttccgagtcatcgtccttttggttatccccttttaggaccaccggatctgctacaacggccttggtcaatgtggctagttgcgccatcattcccttcatcaaatcccactgttcttgggccgttggagtattgttccggttatccgtgctgtcccttgcaccactactctccggtgcttccccatttatggacttcttcccggccttaggtccggccgagtctgtcccatcgaacatcgtcccgactctggttttctcgttgatcatcgtttcctcctcaaccaaagtctcctcgacaatgcccttgtccttcttactctttcccgttttgctgctcttacccatctgcgaaacctctaaagttaatccacataactcctagtaaaatcgcaaaagagtaaagaacatctaccgcgagattctcaagccgacgagtggtgataccccttaacccaacacctagtcctagaaccaagcatgctctgataccaacttgaaaggccccgatccggactgcctaaagtccgggcgagttctctcgacccaagccactaagtgactcggccctatccgtttatgaggttctttcctagtctaatccgtttcatatgattccgagattcaatatatgagacgaatagagtaaacaaacaatcggatactttattaattaagcaaaggattcgatacaacctatgagtttgcatataagctattacaagtcatataatcgatccctagactatccgaactatcaccacccatcatcccggccttgagtctctcgcgcctaagccaagtccttcccacgatcaccattcgttcctgaaagtcatagagccataagtaatcttatttacttaatcatatgcaagtctatgcaatgctctatatgccatacactactcggatccgtggagagaattcagagaggggaagatcgcgcatcagtccggccgattctcggcaggtcagttaagacccgccggtcctccgccgagccgcgtccccgcctcagccgatccctacccggaccgagtcttgtgtaggatgcacatgacccggatactacccagccctctagtcgatccgttcaaggatccgactactaactcacatcctagaacccttagactcaaagtctaggatcccttaccttccttctcgaggttacgtcgatccgaccctccttctttattgccagccacagcctggctacggaatcctaagactatttattctcccaagaggcagagagtttgaatggtgagtttcttgtgttttcggtgtgttgtggtgagtggatgcttcccgaatcaacacatccgttccttgcacctttccaaagagttgcacctttccgaagagttgcgcctttctgaagagttgtatctcttcgcccataaccgcccagctagtccgtcactcgtccagttacctcgagctcgtccatcactcgtccagctacctcgagctcgtcagtcactcgtccaactacctcgagctcaaccgtcactcgtccagctgcccgagctggactttcactcgacctgagtaaccgtcactccttccagctgagcttgagctttgggcgagctgacccaactgatttctttacgatcctagcttagcccgcatgatttcccctttgtccgagcttatggccaagtccttctcacttgtccgagactccaccttcttctttcggaccaagtcctagccaacgatcctattgaggatcgcgggcgttacaagtctccccccccccttgaattggattcgtcctcgaatccgcatcaagttgatctttacccatctccttgaaccactccggaaaattgaccttcatcttattctcggtttcccaagtgtattcttcacggcctccacaattccacaagacttttaacaaatcccttcaatttccccgagtccctttcgtcatccggtccatgatccgtaccggccatgattccaccgtcatgttctcctttaacccgggaggtatatcttccacgctttcttcttgatcacttaaacacttccgtaattgtgacacatggaagacgttgtgaaacgcatttagttttggaggaaggtcaagtttgtatgccaccgcccctactcgttcgatcaccttgtacgggccaacataccttgggcttaactttttccttgaggtgaatcgccctgcccctttgtaggtcatcgcctttaagtacaccaaatctcctacttggaattccaattcctttcgacgtttgttggcgtagcttttctgtcgatcttgggcttcctttaacttgattttgaagaacttcattctctnnnnnnnnnnnnnnnnnnnnnnnnnnncaaacaaccgacgttcgcacacgggcgtccaacacaacggtgttctacaagctcggccataccaatactagcttgaaaactattattgtatgcaaactctactaaccttagatatttctcccagtttcctccccaatccaagacgcatgccctcaacatgtcctcgagggtttgaatcgttcgttcagactgtccgtccgtctgtgggtggtaggcagtacttaggttcactcgagttcctagggccttttggaaagccttccaaaactttgacgtgaaccttgtgtcccggtctgacactatactaaccggaatcccatgtaaccgcacgatcttgtctatatacttctcggcaatgatttctgctccatccttatccgagatcgccatgaagtacgcagacttagtcaatcggtctaccacaacccttaccgccttgtgtttggacttgatccccctcggcagtccagtgacgaagtccatcgttatatggtcccacttttattccagtataggtaggttttgtagcaacccacttggtaattgatgctccgccttaactagttgacaagtcgggcacttggccaccaatcgggccatctctttcttcattcctacccaatggtagtaccttttaaggtcgcggtacatcttgttcgacccaggatggattgagaacttcaattgatgcgcctctcttaggatctcctcctttaatgccctatcgttcggcacacatactcgatcgttcaccacgattgtaccattgttcgaggtttggtactcggtcttgttgtttagtgcccatccttttatctcctcgtcccgttcctgagccagccggatcctactaagcaagtcgccctgaccgtcccgttccgcctcaacttccgagcgcctcctactcagggcgtcggcgacttggttggcattgcacagatggtacgctatatccaagtcgtaatccgccaaaagttccatccaccttctttgccttagattcaactccggctgggtgaatatgtactttaggattttgtggtcagtatagatttgaactttagcaccatacaagtatgatcgccaaatcttcaaggcaaatactaccgcggccatttccaaatcatgcgtagggtaattcttctcatgtttccgcaattgccttgatgcgtatgcgataacactccccttttgcatcagtacgcatcctagtcccactattgatgcgtctgtataaaccgtatatggctcaccttcctccggtaagaccaatactggtgcattagtcaacatggcctttaactccaggaagcttttctcgcattcatccgaccagttgaatgcggtgtcttttccggtcagtcgagacaagggttgggccatgctcgcaaaactccttacgaaccttcggtaataccccgctagtccgagaaaactcctaatctcggtggcattccttggtcgtggccactcctttatcgaccgtattttctccggatcaaccgatactccttggtctgagataacatgaccaagaaaaccaacgcttctttgccaaaatgagcatttacttaacttcgcaaatagctcatgttcccttagccgttccagcaccgcccttagatgttcttggtgagcttcccaagatttcgagtaaacaaggatatcgtcaatgaagatgataacaaactcgtctaagaaatcccggaacaccccattcatcattttcatgaaggctgctggtgcattggttaatccgaatggcatgaccacaaactcaaagtggccgtaccttgtccggaaagccgttttcctcacgtccgttggctctatgggaatttggtgatatcctgaggccaagtcgatttttgaaaaccactgtgcacctccaagttgatccatcaactcatctatccggggtaaaggatatttgtttttcaccgtaactttattcaatccccgataatcgatgcatagcctaaagctaccatctttctttttcacaaacagaaccggcgcaccccatggtgagctactcggcctgatgaatcctttatccaacaactcctccaactgtttctttagctccgccatttccgccggtgccatccggtacggagctttagatatgggggttgtcccgggctcgagttctatcgtgaacgggtctgaccggtccggtggtacaccactaacggccgcaaacacgtccgagaactcgttgacgatcggaatgtctttcaactccgcactcgcccccacttccttggttgtgatcgtggctaaatatgcctcacatcctttcccgagcatcctttcagcctggattgccgagattaccaagcttcccgaggttgttcttattccttggaattttaacataccctcgtccctctcgaattgtatccgtcctcggtgacaatctatgtgagccttgtacttccccaaccagtccatccctaagataacatcatgtttctttagtggaacaatgattaggtccgcgggcatattgacaccgttcactacaaccgagatgccccgaacaagtccggtcggatacattgcctgtccgccggccgctcgtaccattccataatcggtgtttggttctttcctgaacccacctgtttcaaccaattccggactaacaaaacaatgtgtagccccagaatcaaatagagtgtgcgttactacgtcacctactctcaaggtccctacacattcccttagaatgctgagtacctcccctttcccgtatgcatgatgcaatgcaaatgcagttattgaaataatgaatagggagttgtaagaacgtaccagtgatcgccctgaagtttccggcatcgttagcttcctccgacaactcataaactcgcggtgccacggcttgccgctttgggggaggcggcagtccatttcccccgcaattgtccctttgtccggcctgcttctccgcagtcaacttagggcactctcgctttagatgtccagtctttccgcaatagaaacaagtccttgtctcttcaccgagaaccttggactgtcctggttccattctcgggcaactttggatcgcatggtccttgcttccacaccggccacatgcacctatggccttccagcaagttccgttgtggctcttaccacaggtcacgcattccccggtcttagcatcggacttggtgttatccaccttgttaaatttccttttcttatccgcgggtttggtggattgattgttccggatcggtgctttctcccggttcaagtacgtctcctcctcgatcccttcctcaatcattgctgccctttcaaccaattcggaaaccgagttgaatgtccggaccaaacaatggttgcggatctctatccttagtccacggataaatcggcgcacttgagcttgttcctcctcaagttcacgtcccacataacgccttaggcggttaaattcctcatcatattcacgcaccgtgcggttcccttgaactaggtcgaggtacgcacattcaagcctatcccaagcctccggtggaaagtacttcttgttaaactcgtcttcgaaatccgcaaaggaccggacctcgtcccctctgcgtttctcgacggttaaccaccaattatgggcgtctccttccaggaaatggaccgcaatgtccctttggtaatcctcagggcagcgggtagacttgaagttcctcttgagtctactcctccactcatcggccacaatcgggtccgtactgcccatgaagtgtctcgtgcccagccttgagacatgttcgagaagactcagatagtctccccttttccgcccataattcggttgtggattcacttccacaacttccgagtcatcgtccttttggttatccccttttaggaccaccggatctgctacaacggccttggtcaatgtggctagttgcgccatcattcccttcatcaaatcccactgttcttgggccgttggagtattgttccggttatccatgttgtcccttgcaccactactctccggtgcttccccatttatggacttcttcccggcctcaggtccggccgagtctgtcccatcgaacatcgtcccgactctggttttctcgttgatcatcgtttcctcctcaaccaaagtctcctcgacaatgcccttgtccttcttactctttcccgttttgctgctcttacccatctgcgaaacctctaaagttaatccacataactcctagtaaaatcgcaaaagagtaaagaacaactaccgcgagattctcaagccgacgagtggtgataccccttaacccaacacctagtcctagaaccaagcatgctctgataccaacttgaaaggccccgatccggactgcctaaagtccgggcgagttctctcgacccaagccactaagtgactcggccctaaccgtttatgaggttctttcctagtctaatccgtttcatatgattccgagattcaatatatgagacgaatagagtaaacaaacaatcggacactttattaattaagcaaaggattcgatacaacctatgagtttgcatataagctattacaagtcatataatcgatccctagactatccgaactatcaccacccatcatcccggccttgagtctctcgcgcctaagccaagtccttcccacgatcaccattcgttcctgaaagtcatagagccataagtaatcttatttacttaatcatatgcaagtccatgcaatgctctatatgccatacactactcggatccgtggagagaattcagagaggggaagatcgcgcatcagtccggccgattctcggcaggtcagttaagacccgccggtcctccgccgagccgcgtccccgcctcagccgatccctacccggaccgagtcttgtgtaggatgcacatgacccggatactactcagccctctagtcggtcctttcaaggatccgactactaactcacatcctagaacccttagactcaaagtctaggatcccttaccttccttctcgaggttaggtcgatccgaccctccttctttattgccggccacagcccggctaccgaatcctaagactatttattctcccaagagggagagagttttaatggtgagttttcttgtgttttcggtgtgttgtggtgtgtggaatggtcctgggcgcccttccttatatagggggcgaatggatgcttcccaaatcaacacatccgttccttgcacctttccgaagagttgtatctcttcgcccataaccgcccagttcgtccgtcactcgtccagctacctcgagctcgtccgtcactcgtccagctacctcaagttcaaccgtcactcgtccagctgcctcgagctcgtccgtcactcgtccagctgcccgagctggactgtcactcgacctgagtaaccgtcattcattccagctgcgtttgagcttcgaggcagctgacccaactgatttccttacgattctagctaagcccgcatgatttcccctttgtccgagcttatggtcagctccttcccacttgtccgagactccaccttatttcctcggatcaattcctagccaacgatcctattgaggatcgcgggcgttacaagtctcccccccttgaattggattcgtccccaaatctgcatcaagttgatctttacccatctccttgaaccactccggaaaattggctttcatcttattcttggtttcccaagtgtattcttcatagcctccacaattccacaagactttttacaaatccattgatttcccccgagtccctttcttcattcggtccatgatccgcatcggccatgcttccactgtcatgttctcttttaacccgggaggtacatcttccacgctttcttcttgttcacttaaacacttccgtagttgtgacacatgaaagacattgtggaacgcgtctagttttggaggaagttcaagttgtatgccaccacccctactcgttcgatcaccttgtatgggccaacataccttgggct

SEQ ID NO: 134 - DNA, 1724 bp, Arabidopsis thaliana landsberg
gagtgaatgagttagtgagtgttcatcgttcgtttgttgcttgtatagtatttgtatgttgtattatcgtttgcttctccacgttttgcaatgtaggttgtttttggactaagtaaacgctattgcaggttttgtagggtatgtaagtctttgagagaaacgacgtgtaatttgcaatttgcttgtggaagatattgttatttgagagagactaacacaggtctttgaagctcaccaacttaactctaataattgactacacaaaagttgaacaattctctccagagtgtgacactgtcgttttgtttccattgagatactcttaaaaaatttcagatcaaatggcattaactaaactagctaagcagaaaaaccatttttggtctggtttcctctggttttccattttctaatctctgccaaactcttctccatcttactaagacgtgtctccagctccagtgccatcttctctattgcaagcgttctctgcctcaatctttcatcaacatcttcttcctttttaacttcactgcaaaactttccaatgcatctcctctcaatttctctatcttcaagtagccaagaatctgcctccttgattccatcattgattattgccttcttctctgcatcacttccatttacatcatcacatgtttgccttgtaatctctgtttttttggtagttccatcatcctctacacttctttgctctactttcattaaagcatgcttttgacaaggccctgaatcatcatcgctatccaccagcatatatcttctacttctttttccaagtgattcagaagcatcacctccagttttcttgtctacatcactaaagtacttattcctagatctgatcaattgagcaacggtcatgcagtcatcttctttatccgtagaaatctcagcatcagcctcacgagctcgcttcatgtgaacatcagactcagttatcttatatctctttgctgatctatgcatcctcgatattctgcgttttgcagtaaagccttcttccaacttctgaactacttgactcaaaggaggtaccttggtagatacatcaatgcaccatcatcatcatctttatcaagatgatcaaatgtattccttgcatcaaaagcttcagtcgattctttctgtatctcttcagaaccaaaatattctgaagctgatttaaaccaccagtcttggtacctggcagtgacataacctcgatcaagttgagaaggcaagtagagatttaaatcctcaagagaattactgtaatcatcccaagcatccttttctgtgatttttctacgacgagtaaccaaacgagtaaccaaaccaggaagatcttgagacaaaccgaactgcctcgccactcgataagggaagtaatcttcaacaaaaccatttccagcaaggtatgaaactttcacacatcgagcaaaagaagcaaatgcatgatcgacactgtcatcaacagtcagccacatagcttcatcaacgtaaaaccgaagtgggttccagttcttcaacggtttagtgtaaggacgccactcgaaaacattaaaactcagtttcacattcttagatatttggtgcagaccatcccactgagctattctagggtcacctttaggtatctctttaactcttgggcttatgtttactgaatctcttccaagtcccaaacttggactaactaaaacagagactttaaattaact

SEQ ID NO: 135 - DNA, 10082 bp, Arabidopsis thaliana landsberg
cttgtagccgcaaatacttctctgtcatctccgttacaagctctaaacattttatttgaatttatcaatagaattcgtataatgtaaccaaaaacccgtaaactaaatatattttataaaacttatctccattcaacatccaaatccgttcgagtctcacacaaaaatccaataaaatgtactattcatcgccgacatgcttcgttttgatcactatatttgccgtggtggtaacacaactgatctttatgcgcaccgtttcgtccttgaacatgaccaatgcctatctgaaccacaaatgcttagccaatcaagggaaatacaagccgggaagttggtatgagaaaaaactccaaagtattatagtctctatcggtagcggtgatggttttacccttggttacgacatgatggcccttggtaaggattctgattacgtagccgtcaccaaccagtgccgtggcgactccaacgggtccatgtgccgctcctgctttgccaccgccatcgcaagggtaacgctatttcattattgattagctttcacgtctttctttattacatgtataaatttgtgcacacatatatgtcagttttggcgttatatcttatattttatatgtaaattactccatgcaatgttgatattgattttggcgttaatatgacaaatgtatatgaccgcttcgtatagaagatgcccgcgatataagggggcaataatatggtacgaccaatgtactctccagatttctccgttcgatactcaagggaagttcgacaaagataatgatttctgtatgtccaacaagaagaaaatgaacgtagattcgtttggagagaagtggatgacattcctcgacaatttggtaggtatagccctcaaagatcatttgtatgccgctggggatacaaggttcgggacaaagaagttgtacgggatggtgcagtgtaggcttgacatatataataatagttgtcgagagtgtgttggacacatagccgtaaaatttcaagattgctggcatggtaaacaaggagctagagtgttgggtgggagctgtaactttaggtatgagctttacccttttcttagaaactaacagcaacagtacaatgagagctccatattaaatgaaagggttctagagataaacagtcttataatatacactgtgttgcattttagtacgtgaacttgagcgaataaatgtactttcctctttgttttttgtgaacttgagttattaagaggaaatcttcaagtaaagaatttatctaatagtatatacatcccacatagaataccaaatagctcagctcatacaaactctctcataatgagagaaaaaaatcctgaaataagggtaagaaaaactcttatgcctcaaggttttagtaaatctcataattttggccgaaccacaaaaagagacgtgcgaaacaaaatagtagaaaattgatttcccgaatcgacaaacatggactaaactatatgtatgatacataactggtcgtacttacaatgatgatacttggtttcacgaagacgagggagcctggagatgaatgatggtgataaggccatgtgtcatcaccaaaaggagggttgctcctgaagttttcgccggagcggccaggaagtcgatcgaggtatgctcaccttctgggtttgattccaattttttctttgaattgcattcgcttgacacgctctttgtccaggcgatcgccgaatgggatcgtttgacttatttgtacgagcgttgtgttcggagcctttccgtagaggctactaacgcgaaagatgcccatgaggctttggccgttgaaaaggaaaaagtagctcaggcgctggccgacctggcaaggtctcaagacgacgccaaggagatgaagaggaaatatgacgagttagcttggtcgcgctctttcggagatgaagaggcttcgagaacgtcgacttgaatatgctaaatttgtccggagatcgaccgttgataagatggcggagctcatcgagaagcgattgaatcggatcaagacctatattgacgatacgaaggtggcggagccaaagtttttgaattctatcaagtgtatggaaacatcaagactctcgaggcgtagattgaagacggcgaggtggagataaagtcgaacgagatgatgtcaagattggatgcgaacgttgaattgttgaaggctgaggtgacaacctttaatatttgtgatctcatggtcggaggatttggcgtttaaagtctgtttgccgagctcaggtctgaactttgttactctgctttgcttcagagtagcaaggaagatgacgatcacgcagatggacgagatggtcaagaaggtcgagtcggggaacgaatcattgctcaggtcgtagtgcaagatgagaccacgggcgtcgacggctgagatcatagaacgttgcttcgttattcgtgcgtttcgtttaaggattgagatcggcgagtacaactttatcggtgcgtcatttaagatgagcgcatgatcgatcttctgctgtgattcgaatgtgcaagtgcaatcgtaggcagctttagttcgtcgaaatggtgtaagcgtacggtgaattcttcgggggtaacggcgtcgagatgatttgtatagtgattacggaggtgtaggtttggcatacatatatatatgtatatgtatatataccccccccccccttttttttgaaaaacaatgccggtgtggaacttggccatttgagaatttgttataggaaaactgaagtgtagctgactcacatgtgatttgatatagcgttctagaaggtcaagctcacacatgtgaagtcagggatgttaagcaaagcacgtgtgttgtgagctggcgagctggcaatgcgaagtcagggatgttaagcaaagcacgtgttgtgatctggcgagctggcaatgtgaagtcagggatgttaagcaaagcacgtgttgtgagctggcgagctggcaatacaaatggacgttaacggcgatcgttattaacgtggttaacgtttactttctttacctttttgtataagagcaacatgttatgctcatgctttcattatcgaataatctgtaatcttcagaattctctagaaccttgtaagtgctagatttctctcacatcgagagctagctgaatcatttggtgttttatgaacatcgattgattgtttggttttgaatgataattagagatttggattgttcttatgaatagcaggttttcctgtaacagaatgttggtggaatcgtcctggaaacgacgatggacgtaaaatcggtcacaaaggtggctgatctgatagccgcagacatgcatctttgggctacagccaggacgtgcttgtcgcagaaaaacagtaataactcttgttaaacgtaatcaattgaggcaaggatgaatccgttagaaagataagccttgtagcttcaaaatgatgtgcagatcggctcctggttccttttagctcgccgggaaatcgatctgaaagcagatagatcgggtgtagacggatctgtgtctcgataaacaacgcatgcttgagagaaaaacctataactctcggaagacagcaccaaatggagcaaaatcgatcttgttggaaagataagcctcaaagctttaagatgggctcttgatgttttctgaatcgttgggagtttgctttctaatccagttgctcccacagttcgaatctgcgatttgacaggtgtcatatgttttattgaaagtgataacgcttagtaaacagctcggaattggatgaggtcggtctctattgaaagataagcctcggggctcagttgatacttaggtcgcctcgtgatgccttttagatcgctgggaatttgattccgaggtcaacagatcggatacagatcgatctgtattttgtcagactcttctgcagataaacggcagtatctccgagaaaacagaccctaacgaagtgagctcgggcttgttaaaaagaggagcctcagggctgtaaattgatctgtagatcgtcttctgagtctctctagatcactgggaaattgagcctgagttcggctggtcggatagagacgaatctcggatcgaagcgaggtcgatggtaactcctaatagacatctcggatcgaggcgaggtcggcttctttagaaagctgactcttggggcgatctgtagataggtatatcattgcctagttcatcaggattttcaaggaaaacgatcccgaagctgactggttttatagagttgggtcctatgactggctgcgcttgcttgaggtaaacgtttatatctctcagcatatatcttcgattaaggcgaggtcaacttcttcgaaaagacgactctttgggcgatccgtagatgtattaacccttacgagattccctgtgatttgccgggaaatcggccccgaggcgaactggtctattcggacggatctgttaagaaacagacagcatcgacttcagaaaaacggcgataactctgagcagagatatccgatggagttacggttagattccctggaacgctgatctccggggcaatccgtggaatggttgtacgtcatctggttcattgtatcttgacgggaaatccccccgcaagtagaatgatatgcgaagagagttctttgtcgtccccacagacggcgccaattgttgaaccaaggattcacacaatagatttgtttagagagggaaaacaaatctagtaatttctcttcattaggtattctatccaagactcgattacaaaagatgttctaatctcttatgaaatacattagggttttaaaaaggtatagctgcatccatgatagattgcctacgtaccctgtgaagggatcaagccattcgtagttctcactaggtataaagttatgtgtttcttctgagtatccaaagatccccttttgtgaagtccctgagacactttatatagggtcgttaaaccgcctctctagcgatattcttcggaagattcttatttatccttaggtcggttctagaggataatcgtcctaaggatattctccttattcttcggaggttttggggagatttcctgatttcgacattatcttcaaagattctcctttatcatttccgaaagtcccataaaagatcctattttaccggaaatgatccttggagaatgaacggtttttacaagtctttgcctcgcgtgttcttcacggctcggtggtcgtttgagaggtggcttcggggcaaacggtatgtaccggctcggggcgcgcttgatgactccgttaagctcagttggctgtctcccgagccgacatagatgtttcccgcagcgttctcatgattggctcgggctgtgttcatatgattaacacccgagccattttgcaaactctcttcgggatggtcgatcgaataaggtcccgaggtgctttgttctaggctaggggccaatcatatgtttaatcatgaggtgattgttattcttagactgtttggctcggtcttgcttgtgggggaatccgaccctaacagttagccccccagctcgttggttaagagttaatgcgacgagcttcatgaatggtgtgaccgagccagctgcttccgcatctaaactgactgatccgtatcttttgagagtaaggcttgttttttcttggtgctacgagattctgttcttgacgggtgttgctatctcgaactcaaaatgttagctgttgacaagttgtgagctaggaaagctgctaggagacttgttgaagaactccaagctgttgacgagctgttaggcgggcaatagcaagctaggaaggctgccgacgagctgttagctgggcgaactacgagtcagaaaaactgcagacggactgtggtggttggctcgggtacaaattgcctgagtcaaagctgggttcagtatacttcgttccgagctgatcgtctcggtaccaggttgttcgggataactggatttctaagcattgagaccaaagcagataagaaactgtatttagccgaagcaaagctcggcaccagtgtttatgataactgggttttagtttccgaggcggttgactcggtaccagtgtgtttagagtaactggatttcagtagacttgaatacccacggttgcgacccgatttgattcaatcttttaccagcgtttagaaacgagctggggcaccggtgttaagtataaccgggtttcagaagatagaattcatagcctgctcgaaaaaacattcgagcagattcttatcttgaatatttatatagcacgctgtaaccgaagcggtgtaaatgaaactttggaaataataggccgtcgcccgttaaaatatttcaaagtaaaaagatttagaaatcaaattccaagaaaatttgaagtagaaaaatcgaagttcaaatttaaaccgaaacgagagtttaaaattgaagtgggagtatggatatacggaccccactcccccccccttttgttcacgaagcgttgataagttgccccagcgtttttgagtccgaaaggcatcactcggtagcaaaagatgccttgttccgtgtagaatgcggttttttcttgatcctcggggttcatcatgatctggttgtaaccgacgaaagcgtccatgaatgatagcaacttgtttccagaagttgattctacgaggcgatcgatgagtagtaatgggaagctgtcttacgggcaagctttgttaagatcggtgaaatctacgcagactctccatttgccgtttttcttttttactacgaccgggttcgcgagccattcgggatattttgcctcggtgatgaacccgatcctcagtaatttctctacttcggctttcatggcttctgctcgctcccgacccaattttctcctcttctgcttaacaggtttgaacgtcgggtcgatgttgagctcgtgtgatacgatatcaacacttactccgggcagatcttccggggaccaggcgaatgtattgactttttctctgaggaaagcgatgagttcagctgttaattcttctcctaggtctccaccgatttccacgcaccgctcgggtttttcgtcatcaaggcagatagagattaccagattggggattggtcttgtggattcccgagcctcctcgatctttagctgctataactgctcgaaaattgctttctcttcggctcggccaagcttagtcttcttatgattcgcgtcggtcgttgactctgtgacggggttcttgagcttgtgtgctgccatgaagcagattcgagcatttttctgatttccccagatggttttcacgccattgctcgtgggaaatttcaagcaaagatgatatgtcgaagcgacaactcggaattgatttacccatggtgtgccgataaatgaattgtacacggtcggctggtcggtaacagagggatcggggatttttgttacccctttggctcggactggtaatttgatggtcccgagagtcatagtgatttccccagagaatccgagcacaggtcgtggagttggtacgatttgcgtcatgtcgatcttcatttctcgcagagttgtaagaaaaatgatatctagtgtgcttcccgtgtcgactaggactcgttcgacgttgaaatcaccgatggtcagtgtaatgactaaaggatcgttgtgcggacggtctaaaccgttggtatcgctttcgtgaaaagttacttcgtcatttggctcgttaaatggccgcgcccagttatgattcgcgtcagccttcctttgataagcctttattgatgccgccgtgtcttgacagaaagccgaatcccctaaaattgtgaaaatccttccccgagcagcttctggctcatcgtcgtctgttttgcgattacctcggcctcttttgggtccttcagggttcgccgtgggagctgcctgctcgggattggccacagcgttgacctgctcggttttacctttttctgcttataaatcttcgatggtcaaacctcaaccaatttctccggttaggaattttgctgacaaccttgctctgaggctacgacatctggaagtatgatggccgtaactcttatgcaactcgcaatattcctgctcgtttcctgcgggttgatcctttgtccaagtgtaggattctcgaccgcgtcctcgaccgcggcctcgcccttggcctcaggcggcttcgcctcagggtgtatcagcctggtaattatgggctccggagaaattttgcccttcatggtgaacgaatgtcccgccttgagcaccctttttgtgattcgagcactgggttgggatttatcgatgcgaggcgtttgcttggacggttcgtgtcttttggctaatagttccatttcttcttcatgagatacgttatccgatgctcggtgtaatgcatctcggattgtttgtggtttggacaaatttaattcctttcggaattcttacttgtaccacagcgccttctcagagcagagagagccgctacgtcgttgattccttcgactctggctagagtagatcggaattttgcgaggaaatctcaaactggctcgttcggtggctgagataatgacaaaagatcggcgtcccacataccaggatcgataagcaccgaatcttgcttgaggaagagtgtcgatagctcctggaaactatcaacgaaatttccctcgagtcttgagaaccaatccagggctggtcctttcaagtgttcaacgaacaggtgacagagaccggcgtccctttcgtcggatttgaatttggctcgggctacagaaattatgaaggacttcaagtgcctttgggtcggaagatccattaatgtactcgatccttagctttcttgggtataaaattatcgcgttggagattctgcgagtgaaaggagtgttatgggactcctccagaatgcggtcgatgtttggggccgaggagactgcgttatgcatttgggatcttacgagcttgatctcggtttctgccttggctaaggaaagcttgatagcgcttatttcttgttctctggcctattcctcagcccatcgaacgttctcttatgggtcttcatcgtccgagatcccgatctgatcggcctcggcaagttctcctcagggaagagggagctgcagatcgtttccttctgctcggttcatcgtgtcccgatttctcaaagctgtcggttctgctcggtcccttccaatttccagcgcggttcggcggatgggcctcgttgttttgccaggcgtgtggaacacgagccgtgttggattgagatctactactgttcgtcgatcctgaagatgtcgtgcaccaaaacaagtagtcctgatctgtccttgggaggtagctgcttcgagttgttgcgccaaagaccgattcgcctgttcttgatcgtttaccttcttctgaagttgagccatcatacttcttaattctgctaggacagcgggagcggtggcttcaggaacgtctgtctcgtttggagggatcgggtttccctctgcgtcaacagtgttatcggggatgtgattgttgaccattgtggattggttggttggttctgtgttctgggagtaagagaaatctcaatatttcccctccttctagcgccaaattgtgagagtcaaaactcgcacaatagaaattgtactaagggttccttcaaagaacggatctttgtgagattctcaaagaacattagaattgctgattaccgcggacggtgttcttggttatattattgaaataatgaggatttgatcgtacaagtgtttagaaatatggaaaataagtgtttttgccttcaaaatcagagcggttttgatagcctgaggttgagagcgtttttgtgcgtctcccctttgtttgtcctcagaggttctttatatagggctttggcagatcgcttctctcgatattttcggaagatttctctttatcttagagttggcgaaggagattgtctttatcttccgaagattttgggaacttctatattcggtggcatcctcggagattctctaatatctcttccgggtttttcggaaatgg

SEQ ID NO: 136 - DNA, 619 bp, Arabidopsis thaliana landsberg
tgtaacttattactagagtttttatgccattacagaagactaacacggttatctttgttaattaggtattgcatagatcacaaggtttggtaagggatttaactatttgcctcataagtttgcttttaagagcacatttcacaaaacgttaggtaaagggtttttgttattctaggtacgaagactaccttcgacaagaaaactgtctgatagaagaagatgagacagtggaaggacttgatgagactcccgattccgattatcttgaggtaccttattttttaattctcttcaaaacatgctaggctccaaaagaaatgcttagcgtttaaagaacagaactgttgccacaaatcccgaagatgacttatcatggggatgaatcaacttattgttaatttaaattctcttctcgtcctccttagagtcgtgctaacacagttggctgttaaattcaagaagttgctgtaagaaaaaagacgctctttattgccaatctccctttgaaaagtgaaatgccacatatgtaagtagcccctatactttcctctttcgttcctgtagcaagtttttcatggctgatattttatcctccattttctaccgcatcaatttcttc

SEQ ID NO: 137 - DNA, 584 bp, Arabidopsis thaliana landsberg
tgctctcagcagtttttttttcgtatttagtgtcctttgtttataattctctcatatttttccatggacatgacaatagattcttttctttttgtgcagcctattgcgttgtttcggcagattccaatggcattcttggagcgagtttaagaggatttcaacaagagatatggtggtgtataggaatggctacaactacttaacccaacagtttgaacaaagagttttggtacttttggctcatcccgaggagattagcaaacttgccaaggttaaggctctagtgatcaaaatgaaaggtgttatgatggagaacattgagaaggtctgaatcatatatccatgtcaatctcacaattttccatcatttatttgagaatatatgccatatctggcttgaagtttctctgctcgttacccacttctgcgaaactgactgagctttatgtaattattaacttgcaggctcttgaccgcagtgagaaaattgaaaattctagtggaccttcgttcaaagtatagtaacttaccttttcactcatatgtgagctttttgatataaatatctccattctagttgtcac

SEQ ID NO: 138 - DNA, 1037 bp, Arabidopsis thaliana landsberg
tgtttaagtatataaccattaattgttttggtcttgatttcacttttcaggatgcttttgtgggtggtacagacacatcctccacgcttgtggaatgggaaatgacagagcttctacgacacccaacgtgtctaaaaaaacttcaagaggaagtccgtacgatttgtaagggaaaatcaagtgtgtctgaagatgacattcaaggaatggaatacttaaaagctgtggtcaaagaggcactcaggctacatccaccagttccattgatggttcctcatcaatcaacacaagatgttaggttaagagataaccatatacctgccggtacgcaggttatagtcaatctttgggccgtcgggagagaggctgcgacgtggggaccagatgcgaatgagtttagaccggagaggcatttagagtcgccttctgatttccggggtcaggattttgagctgattccttttggagcagggagaaggatgtgtccaggaatatcatttgctgtggtgctgaatgaggtagtcttggctaacttagtgcatgggtttgattggcaatctatagacgatgagaccgatgttgctgaatcaatcggtagtgtgattcgccgcatgcaccctctttacgtcattccatcatctactacttgattaaggcttattattatgttatgtctacaataaacctgttcatttgaaaatgttgtaagctaagatatgtttgagattttaaagtttcgagttcctaattaaaccaatttagaaagcaaggtgagcttacttgattcattattctgtacaacaagcatcattttttttttagattttataacgtttatattttaattttaaaatataaataaatttgattacagaaaactgattagagagctctgatttggattagtcgtgaaagaggtgaaagtatacatcaaaatttgtttaaagtaaaaatctaatgatttgttaaaaaatttgaataacaggtgattttgttgtatttaaaacctcatggtacaaatgcttaatccaataagg

SEQ ID NO: 139 - DNA, 729 bp, Arabidopsis thaliana landsberg
atagcaacataacgggaaggaaaatttatgtcataattttccgcctttcttagtttatgtctattgtcacattagcttcgaattgacaaaaacgtatagtatatccaaagtttattaaaatatatattacagagagtacatcgaacgaagtggaatcaatatcatttattggaaagtagagaaaaacacacacataggaatcataatattacatgagtatgggaaagaaacctagcaagctcacacagatcatagaaaagattcttgatttcatgagataaagtggtccgatcaatgatatgattattgggaggaaccagcagaagagaatttgagagagacactgttaacgcagtgacgttgatcggttggagtagagtaaccttcgcctttgaaaacatggcctaaatgtccatcacacactgcacatgttatctccattcttcttccacctgcttctggctatatacatttaaaaacatcaaattagttattgtaattacaatccttaaatgggtttgccggtttggctaaaatagtcaatgttatagtcaatgagtttcacgaatatggatgctcgaaatatgttatttgctatagagaaagagtcaacgaattacagtttgtttaatagcaccggggatggcgtctaaaaaagcaggccaaccggaaccggggtcaaacttagtggtcgatttataaagaggcgttccacaaccagcacaacta

SEQ ID NO: 140 - DNA, 655 bp, Arabidopsis thaliana landsberg
caataccttgagagatagacgaatatcacatgaattagtagatccaacattccatcgaacaccttttgagcgtgagaatgtttggattcatattccagttgatcataaaggaacatgctttaaccacctagagcgactaagggtaccacaactactctatctcttcctttaaaatacagttcattactcatacatattcaaagacaatcgcaatgaaatgaatgaaaacctgataacataagtgataaagtataaacgaaatgaaacaagaaaaaaatttcaaatacttgaaggtgaatacaaagtcgaaggagacacgatgcgtctacgaaacacgtctaatactaaaaacaagtctctgtaaaattcaatgataagtgatgatgccctagggaaaaccacttagaggctatttataaaagcgatacaaatcaaataaggaaagtcgaatgggcccaactgggcccctgtgatcgagtgtctgttggatcaaacttggcttcaaggactccaccttgcgatcgagtggtctggagtgaagacaagatgcaacggtccaaggacctctgcatcaagtatgtgatcgagtggccttggggatcgagtggtttgggatcttctattctcttatgtatgctcagcttgttttgtgagt

SEQ ID NO: 141 - DNA, 600 bp, Arabidopsis thaliana landsberg
gaatatacactttttgtaaacctcatatttctctgaataagttggagcattgttgccgtaagatgtttttaggaaatttaattcatgtctcgttcaagcaatgatctatacatttaccaatttggttttcttcaaattttgaataaaaatgttagcttttctttttcttctttgtaaaaatgacatctttagaatgtttataagatttatggatgtttatgtcagggaaaacggtcaaaatcaacttaaactatttgtatgcggtgtttttatacccagactctaatatatggtcgtttcctatccgaagtgattaaatattcaaattcgcaacatgaacttatcaatattaggtcaaatcaacattgactttaacaatgttagtcaaccgttattattgcgatgatgtggtgttatacaggaaaacgtggcaaaaacctccaaaaaaatgtaaaattgtaacaagcatattcaaacctgcaacctcaagacgagaatatttcacttttgaccactcggatccagcaagttcttatgttactctgatgaaattaaaatttggttttacgaaaatgagtttttaaagcttcaaatttggga

SEQ ID NO: 142 - DNA, 1034 bp, Arabidopsis thaliana landsberg
ttaaggggttaaaccagagagcaatgcaactggaccagatgagaaaacacctccaaggctaagatagtcgaagcaagcttcacgcatttccgttcttgcttcatctgaagatgctaaaaagaccttatacaacgcatccgccaatgtattaatggtggaagctacaggctgttgcaaggcgacacataagtccactaatcaaaacataaagaagcgtttacttttaactaaagagatgcttacttttcgtagtgtgtaaaaggattcaatatacttagacaaagcttctttgtcattaaggttgcgaattggccttagaagatcacggagtacaactatatccgccaatgcaacggtcatcccaccaccggttaaaggatgtctcatgttgaatgcatcaccaagaagaagagctccaggagtaggaatcggatcagctggcatgcttcggtttggcatggttctgatattacctttctcaacagcggtgatgaatgcttcacggaccttggttggtacttgaggcgcaacccgtgttttcagatactttgccatttcaccatttgcaatgggaggaagtttttgacccggtacatctactaagcaacggacttcagaactgctgatgggatacattaagatgggtgatgggtcaccgagaacaacgtgcccgtgatttgcaaatggaagttcacagttctccaagacaagacccacaaaagtagatggcacatccaccttaggtttgcaaagagagcgacgcaagttggagaaacaaccatcacatacaattgtgagaggagcaaatgatctaaactcattgccctcttttgttctgtatcgaacccctttaattgtcccgtgttcttcaagcaacgacgtaaccgttccttgttccaatcgtacactgattcacaaacaaaccgttagagtcaagctggattcaattaaagaaacaatcaatataaagattactttgaaagagtaagggctttttctcgcattctctgtacaaatctcccattatggaaact

SEQ ID NO: 143 - DNA, 2240 bp, Arabidopsis thaliana landsberg
tgtagaaatgtgttgttattttcaataatgcttgattttattataatcatatcgaaagtgaaaggaaataatcacaatttgccattggtcatagtcacaccgtcacactcaaagccaaacaatttcgaaactaaattattgagtttgtcctttgttcttccagctattctttacttgattacagtctcatttatatatacaaatgaaaaaaaaaaatcattacaacaacaaaatatcgtttttgttgtgtgtttgtatatcaagagttttggaaattgtactggtgtgttttatcgaatagttttagaaataatgatgggtctctgcaattattaatgctttgaagatgacaaaacctgtatatcttagcctgtgcctcaacacaaatagtaattgagaacacatgatctccaacacattgcacaaagagcttttgcatgtgctttcaacatcaattattttcttctaacaagcccaatttcacattagtttatgccaaaaccgaaaaaaagagagaatagttttacataatggcacacacattaaggggtttgaatggacatacatagaagaagccttggcttataaatcataacttatctttcgtgtattttcttggaaatatcaagtggagcttttgatgccataggatcgatgatcgcatcactgaaagaagatgaagaaaaacaagtaagcaccgacggaaaggaccgaacacttttgcaccaagaagatacatgttacaagacaaagagaccaacactgagatatcctgacttctccacgtgcatcatagctaggcgctgtgctataccagtataccacttagcactttaataggcctctcccgacacctgaacaagagaacttgcttagttgaaaaaagtacacaaaacaaaacgttataggccgacaagttttaggaattttataactgggctcataacataaacaaaattaaggcccaaatctgattctaacaaaaagaaaagagctctgtctctttcaaactgttgcaaagtggcttctgtagtttgttcctaaactagtcaagcaaggtgggctaacataaactcccaaaatggttggtttattacttctgtttgatgtgataatgccgcaattcaatgtgtattatgtctcttgaaatctttcatttgagtctcaattcacattcttttgattttatctttccttctttactatgttgcatatttcagagcatataattttttttttttgtcggtggtcaaagtttataaaatcaaaccaaataaaagaagtgattgaaatcatacgagaccccactggttatgttctgtataagcgccaatgaatcacaaagtcgaatcggaactgtagatgataggaaggaacaaagaaaggaatataggttaagttcaaagtggttaagctctctaatgtcgtcaatgaatacgtcatcatgaagaaataaataatttccaagtggatggacttggggaggtccacacatacgtcgtcaatgacgaccacgtcccttaaggcgaaataaacacttgccttcctaaattctctgatcaatcaatgtgtataaatatgcgcagatatatccattatcctccacaattcagggaaaatcttcaaagtgtttgcagagaaatctaaattcatcaacagttttttacaaaagaaatggaaaacggagaagcaaaacagagtgtacctcttctcactccctataagatgggaagattcaatctttcccatagggttgttctagcaccattgacgagacagagatcgtacggaaacgttcctcagcctcacgctgccatatattactctcagagaacgactccaggaggttttctcatcactgaagccactggagtttcagatacagctcaagggtaactcaaaaaccctttcttttgattaaagtttacgtttttatttgtgggtttttgatctgatccttaccacatgtgtgtgaattgatcttgaagatattaagatactcctgggatatggactaaagagcatgtggaggcatggaagccaatcgttgatgctgtacatgccaaaggtggtatcttcttctgtcagatctggcatgttggccgcgtttctaatcgcggttttcagccaaggaggcaagctcctatctcttgtacggggaagccaattatgcctcaaatgcgtgctaatggcattgatgaagctcgctttacccctccaagacgtctaagtatcgaaga

SEQ ID NO: 144 - DNA, 527 bp, Arabidopsis thaliana landsberg
aaatatttcctagtcattatcatcacgaatttttgtcaacttaactttattttatgagagtgaatatatcaaaaatatcgttatggtagagttaacattttaatttatgcaaatatgcttaaaatgatagcattaacattaattttagttatctttcttactttcatatgttgtttttttggtgaaagatatctaatattataggaacatatttagataattaatattttagaacatatttctttgttatgtttcttttaacagttatattgttaagtgtcttgttacccggctagtcttaacaaaactgaaacgatcattttaaattattatttttttgtaaatattcttttatccatcaactttcggtaaaagatttttttgatgctttgtgtccactaacctattgcttccaattttgtaattcaataccgtgatagatacccaatcattttgattactcttcacaaccgtgaaggagaagagaggagaaaaacatgatctacaccaaaatactaataagcata

SEQ ID NO: 145 - DNA, 611 bp, Arabidopsis thaliana landsberg
aattgacacaacgcaccaccttccttctcatcttcacttcttcaaccttttccactctttcgattctttaagaatctccttctagcttatcttgtattaattttgagttttgtagggtttaggttgtttgattaagttagcaagttagggattagttacgtgacgagatttctctccaaggaatctattactaaaaagatggagcaatctgaaattgtgattgcataatccactagtaaacgtcacaaagcaattgggcatgcctatggacgttgatggagctctagggcttctccgttttgggtatcttgctattggctctcatattccattgccttgcggagcggcgtcgctgcttttaccgtttgggaccggccatgagatctatattcccctgtattttggttttcagttttatctagttaggattgtatttagccaatgaggacatcagattataaaagaacaccatctttcgggactgattaacattgatgatacttctgcaattctgaggctatttttttgatgaagtttgcttttgatagtatagaaaaggcagtgatgaacgagaatgtcatgcaccactctgatatagtgctgataacatc

SEQ ID NO: 146 - DNA, 1217 bp, Arabidopsis thaliana landsberg
caaaagaagacgagtgacccactgctgcaccctatgtctcccacgctcctaaccaacagacatgagatctccctcatctcttctcaaccaaccaaacctcatccttagccttatcttcactcgacctccatctcttcaaatcaccaatgtcgtcactcttcactcgaccacaacaatttttacctcatcttttccgcaacctgtactcgaccatctctctcaagctcatctctcatcgaccctcactctcaagctcaccaaacactcgatctgatcgaccactcttcgccaccaccacctctcattcgtctcagtttcactcgaccacagctctcttcgcctctccctctctccaaggaaacaacacgacctcaccattttattcactcgacctttatcaccaagtcgccttcaccacttctcgctcttaaccactcgaccatcttcaccatcaaccaatcaaatcgttttctcctccattcaagcttcacttactcgaccgctgaataattatcaccttcaagctcctcatctctccatcgtttccaacgccgctgctcccatccccacgcaaagctcgtcacgatctctcattcatcaccatttcactcgattcagcaaccatactcgattgtgcctctcttgcctctcacaatcactcgatctctcatcaccatcttcatcacctcctttactcgaccaccgtgagtctcgcttaaccataaccattttcaagatctctcgattgccaaatcaaagagaagaagagtgaagctctaccactgacactcgaccgcatttccctcttcatattcaacactcgaccaaggtgctaccatcttcacaccggctcttgctcaccaatcactcagaccaacaactcacaatccaaataaaaaaaaaaaatcaaaaccgaccggtttactcgactggtttactcgaccggtatacaccgttggattgtgtttttgtttttgcgagaactaacgtattaacgttcatctttgagttttatctattttcaggtttcatcatgagtaactacagtggagattctctatggatcctgattatattctggttcaaggcaaaggaagatggcatgaaattgatgttgcgccttgtcttcaccgacgtccggttcttgcatggtagtggtagaagagaaggtccaagctccgagtggttaaacttgaagagatagcgatccgccggag

SEQ ID NO: 147 - DNA, 533 bp, Arabidopsis thaliana landsberg
tacttgaaaagggatttattcgtccaagttcatggccatggagaagctctggtattgtttgttaagaagaaagatgtaagcatgcggttgtgtattgactaccgaggtcttaacaacatgaccattaaggataagtatccatttccaagagttgatgagctattggatctcaaaaattgatctggctactaggcctcattaaattacaatctcggagcctaatatcaaggagactgcctttcagaccaggttttgccaatgtgatcatataccgatgcgcgctcctcttacagatggccccttagtcctaatgaaaggcaagagcaacgccatcctctgactttcctttttacgccgccctgccgacacaccagaggtacatgggggtgtaaaaggggatcactatcaactttgtcccacctatgagaaaaagcttatgggcttgttatactatcccgttcagaaactaaagaaggctttcccttccatgttaactcaaacgtaatttcctttctttttcgggtgtgaaacct

SEQ ID NO: 148 - DNA, 595 bp, Arabidopsis thaliana landsberg
atctgttgcatcacacctaagtggatttacacctaatatactacaacgacacgatagtgtttaaggattaattgatcttaaaaacctattattttttttgtgtcgttgccatttgggtgcttgtttgctatattggagatttcagaatatttaagatccagttctttttcgtttttattcaacgttactaactctgtgttttttttgtttgtctgatttgatccaggttttgcgaatcactagctttactcaatttcctctggaccgtgctaacgtatggttgttgctcagtgcatgcaaactcgatcgcaagggcatcagaacctcctttttaacgataacatgaaccgtattgctcttgaattaagggaacagttaaacacaaacgctatggttgatgaccagaacccagaattaccaaccaacattggtgcaggcgatgcaccatgcaaccacaatcaccgtaatggcatggttcatggcaacaagtttcacgacctcccatgaagaatccactcgaccacctagacgagtttgataggctctgcagcctaacaaagatcaatggaggcaatgaggatggcttcaagctagc

SEQ ID NO: 149 - DNA, 494 bp, Arabidopsis thaliana landsberg
catttatttttttatttatatatcatcaaatttattttgttttttgtaaaaatatggaataaccaaaaaaagggtggcaaactggaatcaaactaaaaccaaaccgaaccgaaccaagatatatatggtttttatatggtttcaatatttataaattcgaaaaccataaaactgtaaaatgcgaattgtaaccaaagcgaattatatatggcttctatatggttatagttttagtaaaactaaaaaacctaaagctaaaatttttgaatcgaaaccaaaccgaaaaaccgtacgtttattcctaaacaaaaccttatctaaacaaaatgaagagatggatagaagtaataaaaaataaaaccttgtttgctaaatagacaaataaatatttaattaggaaattagaaagttaaattttgcattcatataactttaaattatatatacacctatttgaaaatatatcgagtataaaataaattaacatggaaata

SEQ ID NO: 150 - DNA, 449 bp, Arabidopsis thaliana landsberg
tccctctttagatgtgagttataggctttgtgttttcaaagtgatagcacaatgctctccggctcttctgttcgtttgtctctccctttgtctatacctcttctatattttctatcttctctttatctttttctctttaactctatgctcatcactactactcatctcatggactatagcttgccacaagtatagtggaattattaaaagagaaatgattttcacatttcgttaatttaaataaatttaaggaaaactaagcaaaacctaccaatgttgaaagaacaataaaacactccactagtcttattattaaaaagagaaacaaagattcttaaaagaaaccaaataagctcgaccctaaattttctctttctccggcaagtagtatctattcttcaaccaaatagaggttgcaataacagcttcggcttctttatttctattgt

SEQ ID NO: 151 - DNA, 3982 bp, Arabidopsis thaliana landsberg
tgccttgatcgagtaagagtgtctagtgaattgcagcctcctctgtagctagcctggatcgagtaaagaagtcgagtgaaatgatgcctcttctctagccgcctggatcgagtgaatggatcgagtagaatcctttttagctccttctgcacctgaaaacacaacaaaacatgcaatgcgtatgaagatgatcctagatgcctaagtatgcaaaataagctaaaatggtgcaaaatgatatgatacaataaacaaatgcacagataaatgatgctaaacatatacctaaaatgagtaaaatacattgttatcagcagcttttactctttgcggcctcatggtttcctcctcattttcatcagatttaggcagcatgctgcctcctcatctttatcttcaactacccactggtcagtaatatcaagaatagaatcatcatcagctaccctctcaccatcagctttttccttggcttccttaggcttattcttggggacagaagaagtatcaccgtcaactttttccttggcttcctcaggcttatttttggggccagaagaagtaccacagtcagctttttccttggctttttcctcaagtgattttggcttttttattgtcacctttagaagcacctttggaggcacctttgtaggtggctttgtagcagcatttcttcctcttttggctggctctttcacgattagctcatttaatattttctccttaacattgcctttcttctttggtgatgtttttgctttggaaattctcctcgccgccgtcgtagagcgtaaacggcgggaaccaggagacttctcaatgaaatcaatatcaaaattgtttccttcagtggccttagcaaattctccatcaaaattcctactaaccccaacctctgcaatatcagcatccttctctaccactacaacttctttcgactgcataaacgtaaagaaaactcaggcattaaataatgaaaactcatacctatttataaatataactcaaacataactaactaaaagttataacttagccgtataatatgaagatcactcagccataactaactaaaagttataactcagtcgtataatatgaagataactcagccataactaaataaaggttataactcggtcgtataatatgaagataagtcagtcgtaactaaataaaagtaataactcagcgattagcttactggaggaggactagtagcagattggttatttgtaggtttgtttggaccttctggtgtctgttgggtttggggcttagggtagcctagctgtgttttgggtaaaaacatagctctaatataactagtagtgtttaattctgactaagctatgcccttcagatgctctttaatctgtttgacctcgttctcaatagatgcaaacctttttcaaactttgcatcaatcctcgattctacttgaactccaatcacatccagacgggaggacatttcttttatgctagtatcaacggtgtcaaaccttgagtttaagggagagatcaagttggacaccacatccacgagcgactgctgttctccctgaccatcctgctcacgagaacgaacatcctcgtcctcatcagattcgacagctacttccttcttcttattcttcttcttcttcttcttttctgcatctttcttgtccgaaatcgtacctcaccaccattcgctttgatatcttcagcaatgaccgattctgtagttgcacgggtacggctgccaccccatctaagcaacggaatctcatctgcgttaacaacgttcccaaaacgctcggcgatggtgatgattgactcatacgcccaagcctgcaacacgaaaaccagaccactgacggtgtacgtcttgccaataggcctcagcaactttatagagacgacaagggcttcatatgctgcccgaccccatggataagtcttcatggctttgtcgtcgaaaactcttttggcactctcaaatggtatcctagagttagtatgcaagccaaaaagtctaatggatagaagagtcaataacccaaaccatctacgcttttcagtaggccaagctctgcacgttactaagccctgcctaagttcatctagattaggaccttcaccggttggcacatgcaattcactgaagaacgctttgtagtcagcttcaggctcaaacttttctgtaggcagttcatctatatttaaacccgtgatatgatgaaattcgttcaatccaaaccggatgggtttaccagccacgatacaccaaagctccttcttcagtattctcagttgtctgcatagtagataatgtacggtcttaccagaccatagaaaatgactatcaacaagcttagcaattaatctaagctctgtctctgtcagttctgcccatatttcttttcctattgattctctaattgcagggaactctcccagctttatattatgattaatgcctttaccctccagattagaatccccctcttggtaaagtcttggagggtactcccttgcttggtcttcagacatctgtataaccataaatcagccgtaagcattccataactcagttataacataaaacaaactcatccacagataccataactcaggcaaaacataaatctaactcagccatagataacataactcagtcataacataaacctatctcagccacacataacataactcagccataagataaatctaactcagccatattttaacagaaactcagtcaaaccataacataacaacagctcagttaaaacataaaccagactcagctatatcaaaacagaaactcagccataacataaacaaactcagccgtcatataacagaaactcagacatcgatgtaaggttaaaccataactcagtcacagcataaaacaaactcagagacggatgaattgataaatcataaatcagtcggcaaacaaacagtaactcagccgtcaaatcaaatagatctaagaaatcgaccaccatatgtcaatcaacgacgacgttaaaacccagctttaaaaaccatcgttacgcatcggaaaacgatttcagtgacgggaatcacttgcgattgaacttagatgtcagagtcttacttaatggaaacatactcaccggaacttagatgtcggatgtgacttcgcgctaacggaaatgcgactccggcgtctgaatttcggccggaacagacgagaaaagagcaaaacggcgaaagaaatcgatttcgttccgtcgagagagaaagaggaagaaagcgacaattttttttttttggagatgatgaatagtaaagccaagaaataagaaacccaaacgttatgtggtttgaagatgattaatgacgtagattatagtaatgacatggaatgatgacatgtataatcactattttttcatttaatttttagttaaaaacgaattaaataataataattaattaaaactagttaggagtcttaattgtaattatataattactgaaaacatctaagtaataaaaaaaagatgtgttctattctaggaataaacatacaaatgtgttctatcttaggaattatttcttttataaattgcccaaaacttctttatagaaactaaatccaacgggaaaaagatcggaaatttccttcttctatttattaacgttgttgtactaaaggttgaattgataacaaactcaagatgagaaataacaagaacaagttgagaaggattcaaatttgttaaataaaattgggcattgggcttgatgacctttcctctaaaatcgataatgggcattatccaagccgaacggacatcaagaacaaagcccaacaccattaatctctttcagctgaacagaaaaactccagccctatccaagtaattgtgattggttcagttgggaattagttccgcgttgcgactctttgttgaacaaagaaacataagccataaggacaagcaataatagtc

SEQ ID NO: 152 - DNA, 440 bp, Arabidopsis thaliana landsberg
atacatgcatgttaacattttgaaatattatgtttttcggagatctttttctttgacccgtttacaaatgatatttgatcaaagtaaaagtgatgcattatctagtacaaataaagatttattacgcaacaacaatgaaaaactagtgaaaccaaacctgatgagtctaaagtagccggttgggttggaggttggcgtctgtagctgcacgtgctcctcatggtgtttaggaatggagatccacgtgctcctcacgtgggtgggtcagtggagcccgtgactcttgcagcaagttctacaacgcccgtgcgtgcaccctttcttggctaggtttccatactctagagtcttgacagcttatcgttagagatctcgatgacgtggtcaaatcacagacctcgatctgacccggatatagatcgaggcttgcctgctgccat

SEQ ID NO: 153 - DNA, 949 bp, Arabidopsis thaliana landsberg
cctgtgtttgttgctgctaaatccgatgtcacgtctcttgatcttcgtccacgtattcgtcatgtctttgttctatcaaatagagatgctgttgatgaatattggctcactatagaatattgctatggtgcttctgatcacgaagctgctaagcaagcatttccaggatctgtttctcaagaggtataatctttgatcttctacatcatagcttgttatatataatttaagttatgttttcagaaaacagtttttaactgtctttatattttaggtttttggtgtccgctcttgggcctcagatcatgtcatgacagcagaacagcgtgcgaagctcttacagtgtatcgatgagaaggcaaaactctcattcaaagagtgtgagaagtttgccaaggatctaaacctgaccatagagcaggtaaagatatattttgtgtgtgtgttgtatatttgttaagaagtatgagtatcttatacttattggttggtcactccaggttatgcatgtctatcatgcgaagcatggaagacgtgtgaagtcaaattcaaaagataaaaataaagctgtagaaaatagtccttcatcttccaagaaaagaaaaagagcatctcttgtaaagactaaaggagaaggtgtcaaatccataatagtagatggacagaaagttctaaattctgatgccattgatgcctcaaatagtgagagttttcaagattcattacaagatgaccaaacccccattcaaatgcatcgacaagaacatgcagagataagcaatcttactgaagctgaacctcagtgttctaatatcatcaataggcatgcaagttcaaagaccagatcacttccttcacaaagatttacgtggacagatgaggcagacaggtatttcactgtgtttatatgaatgatgatcatatatcaagtcgctattatatctataaa

SEQ ID NO: 154 - DNA, 2418 bp, Arabidopsis thaliana landsberg
tggttgcccccgttcagcgaacggcgatcccgagtctcagcgaccattatatgcagcgggaagatcctttggattagatgcaccgacctattctagtggatatatcatctatactctactgactacacatgcagtttccaagccctaattatgtctactttctctgctataaaccaaattaaaagctggctttttagttaaagatactaagttcttgcttcattcaaattaagcttataaattcgtgtaacaatcggaaaagatgacacaattaaagcccaactaaagaggctctgcaattgggattttcactgatcacatgcaaaaacacattattaggcaaaaggatgatactatatcatactatgctttttcgtaactctaataattaaaactaggaacttctcctctaaccagtaattacaaatcacataatttttgctttatttattcattagtcatcttttggttattctgtcaaaaactatttttatacaaagagaaatcttttgaagcaatctccgaacatggcaagcacatcatactttctggtcagaatttttttatactcgtattaactacatcgaatttatcgtctaacagagaaatatattttaattcctactggttggtctttccgagtaaaatcaacgacgcaatcgatgaggttatgaaaatatgttagagactctgtgtgattaatgcaattaaccgagaaatgaaattgttaaaccgtatttacatattcagctcccaaagaaaacttcagtttacaaaacgacccagtaaaaataaatgcgttaagattccccctaaaatcatagcggttaacctgctgactaaaccggtttacttctctaattgttcgaatttcggttcaagcctggttcgattaatccggttcttgtttccgttgctctgtaactgagatttgttccccggagacggagaagaagaagacgatgaagacgacgatgagaaaagctggccgaagaaaagccctgatttcagagaacaaaccggaacattaagcaccggcgtgattctgacattagcagagtacgatctcggcattccatggtgctgcttcattctaggtccaccggtgaagcttccgggactactcgagcttctttcaagtccatgaaacacgattttaccggatgcgttaagtctcggactatccgccgtcacggtgagaccccgagattcgatgttcgccgacgatgatgatgatccgtcaacggaaggcgtcgacggtggatgattccgtcttggtttggctaatctgattcttggttggttaaggtttcgtgaatgagtccgcgacggagcaaagggattcgcacttggtttatcgaggtcaagcgagagtcttggaagatcatcgatctcgtggctagaggaagacgatgaagagagtgagagacgtgaagatgcgactgagattgattcggagatatctgattctttttgcaacggcgacgatgcggcggtagaagatttagatccccggtgaagaaattgcttaaacgatgacgttttggggtttgtggatgaagaagaagaagaagctttaacagattcttcttgttccttggcgttgacgagtctcttgagacctaaaagctctctccatcgagtcgtacaacgaggagctttaggagagaagaggtcagagatctccatctcaagtctccggcatgatttcagaacctctggtgatcctcttggttcggtggtagttgtgttgactgtcgttgacgtcgtcgtcgtcgtcttagggccagagaacttcaaaggtacgagctttccgtcggagaagagctcatcggcagagagcattgtgaccggatcctcaaggcaaaactcgaaatccacaactggatcttggatttccggtaatgggtcagattgttgcttgtcaacggaggaagagcgtctgttgtcgtctctggttaaagacatccgagggctcgtccatccgtacgacgagaacttctccggcgaaacaccggcacttttaacgcaagcggaagccattaagtttgtgtgttggacttgttgataggagaaaaaagaagaatctttggagcatttgccggcaaagaactatgttaagagttagggagagaagtgggagtgacagagacaagcattatatacacagctcactctcaggtacaccgtacacacttgtttcatttaccggaaccattcggctcggttatttttaatgggccgggttcaccgatcttatgggctcagtattatttgaccctttcttttgccgtcaacgtgtgtgttcttgatagcactgaatgtctgactgctatgaaatttagatctggttcgtgtgagaatagattcacagaagcgcttcttgtgcactcatgtggaataaggattattttttct

SEQ ID NO: 155 - DNA, 4026 bp, Arabidopsis thaliana landsberg
  unsure (1)..(4026): unsure at all n locations
atctcgtaggaacgaaaaagactttctgaagggattagattcctctagcgagtaatagtatccaggcgagggtttgacaggggagcaagtttattacgagcggttggctagtgtaaatccaccaaaaacgaaagacgttggtgggaccgatcatgaaaagaagatgcgaggctatgggaaggaacataattggcataaggaaagcatcttgtgagagttgtgttactggaaggaccacaatctttgacataatattgatgtgatgcatatagagaagaattttctggacaacatcatgaacaccctcatgagtgttaagggtaaatcaaaagacaatatcatgtcaagattgaatattgaatttttttgttcttggtaaaacttacatattgatagtaagggtaaaacttcatttccagcgtatacattgaaagaagaagctaaacatagtttatttcaatctgtgaaatatgaggttaaatttcgagatggttatccttcagatttagctagttgtgtagatctggagaatgaaaagttaatttccaggcatgaaaagtcaggattgtcatgtttttatggagaaacaacttccatttatctttgcagaactccttgaccaaaatgtccaccttgcattatcaggtaaaataagaatataatttactctttatatcatatatgcacttgagatgatgcatttttttttccaggggttggcgcattttttaaggacttatgttcgagaactttgcagaaaagtcgcgttcaaattcttaagcagaacattgttttgatcatatgcaacttagagaagatctttccaccatcattttttgatgttatggagcacctgcatatacatctcccctacgaagcagaattgggcggtcctgtccaatagaggtggatgtatctttttgagaggtttttcaaaaagtttaaaggaaaaacaaaaaataaaagatatgcggccggatcaattgttgagtcatatatcgatgacgagattttttatttctcagagcactactttgccgataatatacaaacaaaatcaaggtaaatatatttaattatttaacgattagatattcttcgatattaattcatttacatggatcaggttaacaagattcaatgaaggtgaagttcctgtatatcatgtccctggagtatctaatatatttatgcacgtcggccgtccaagtggtgaaatgcacttattttggcttacagagaaagactaccaaagggcacggacctcggccttttgttttgaactttggagttatcccttgcttcgtgatatttcttcatgaaataatctatgttgaatttggaaaggtctccgctggcccatagttacacgagttgcgttttaaagacactatagtcgcagtataaactttcttctctgacccaagtgtttgattttccctttccttggaactatttctcgacgttattgttgaaaggttgtgatccgaacttccttggtccttgattttttgagggttcgaatttcttggtagggaaggtgaccgccggttttgttggcttattccttttcgcaaagcttttttttccatcttctacttccatctagttgtttgcttggaaaagcacatcttgaattgtttccggcttgagaagtattaaatcctctttgaatcttgaatcgtgccacaaacctttccgtaaggctgacaaaactaagtgttgcgaaatccttgggagcttcgaaagtacattcttgaacttagtgataaaagtccgaagtgattcattcgacccttgtgaaaaagatcggtgtctgaaatgcttttatccataagaatggaatactgtttcaagaacatggttgacaattctttgaagttactgattgaccctgtttccaactaggtaaaccacattagcgcttgtctgctcagattttcagaaaagagtntgaagtatctcgcatttttttcggcttcatccaagtcaaccctgcctgcaacaattagaaaagctgcgagataactttttggatcctccaaaccattgtacagttctagattaagctttcgagaatctctgattctcaagctagcaatttgcgggataaaaggtgtttgcctagcttcttcgatgacccggttgatatctgattccgagcttgtagcnnnnnnnnnnnnnnnnnnnnnnnnnnnnnnntcccggcttccttctctcttggtttcgaactgattgaaattttcttgctcgtgttgattcgcgaactggttgtcatcttcgggatgcgtttcaccatcttccggttggatgtccgcttttgtaccatacggggttgtttgattacttgctgcatttcacggaagggaatttggggaaccgaagatagttcttcaaactccaaaggaattgccttcattcaaagaacgaacacgaaactgaatagtgctaacattttgactgagtgatacctgggtttttgcagtgtttcgacggttttttccacattcaaaaacttctgcgccatttcggccatagtttgttgcatggtcttgagggtttcggctaatgaagcgttggtagcatcttctccagacattacggctcacttcggaaatgtaatatatagaaaaaatctgacgactcaagaatcctccgtccccacagacggcgccaaaatatggatgtcggattcacacactcaagtatttatttattagtgagaaggattattcttgaggacaaatgtactagaaaatagattgatgactatcgagaaaactatgagctttgtaggaaaatgcctatagtgtgtttgcccaaaaatgcgtgtccctttacatggtctttgacccataatttatacccaaagaatacattaaattcccatttacacaaaattattctatcttaaatatatccgtttcagtctttgaattatctattcaaacgtcgaatttaaattgactccgaacttcttgggcttcaactgtcagcccattcgacacttcactccgggtaactttgaccttgattccgtatccacttcgcaggtcaacacctcgcttgtactatcaactcggggtatcctatgggcttctcttcttttgggcctctcctgcttatgtggcaatctttgaccggtcccaagcccatggtgcgggatccgacaccaacaattagccccccaagtctttcgaagtgatactccaattcgaaagactttaatgctctaaggggcaaagattgcgccaagtgagtctctgatttctcgccaaaatcacgttattcctatgattacacaatcacccataattactctcgtgacatctgtcacaattatgaccgtatatcaattatttactattaaagcgggaaaaactcttccacttcccccacaacttccaaggcggttccgtcatcatcactagcttgcgtaaggtaaattcactttactctctccttattatttttcacgctttatttttcctttagaacaaaatccctttcttcttcctttctacactttctctccctcgaacccctagtctgttcattctcttacgataaattctgaaaacgaaaggcctgaatctccatcttacaaagacggtggttctagtaatgacatttgcacccggccaaacgatattgccggtccacattatcaatccacatgcactcttcaatcccacccgaaattatgagcccactgaatcgccggaggaccaccgtcccggattcttttgtgtttacgaaatctacttcaaaggctgcggattgaccttccctcttcccgaagccttggttcgatatttggccgctcttgaaatcgccctacctcaactgacccctaacctcctccgaaccatcatgtgtattattaccatcgtggttgtaatgcccttgaccaagactaggacttgaccgaggaatggctatcgagaaaaccttgatcgggagcgatgagaaataattttggagctgagccaaggtattctaggacaaataccaaagttttgatca

SEQ ID NO: 156 - DNA, 615 bp, Arabidopsis thaliana landsberg
  unsure (1)..(615): unsure at all n locations
atagtgttattggttctgtctctaaacaaagtgtttttattgtcaatttttgtctctagtattctcagttcaactcacattcatgatttttgcaggcttctctttactttttttttggatcctgctagtgattataatttatcaaaatgctagatggaccatagcaaaccaattgtattccaattgcatattttgcttttaaatttgtgtggtagactaaaacctcatgtggtgaacccaaggaggtgacaaaaatgattctcaggaatcctacgagttacaaaaacggtattttaaagggaaagacacaaagaacgcaattacttctgaggatcaaggcaaaaggtatgctacctattgcttagtattatccctctccacgcttgccgtgttagtttcatctatagaagggtgactactcttttgttcctccactctggtcacaatgacgtatttgttgtttccctctgcagtagtataagttgtggattctggggattctttgtatgacctncaaggaagaagcttgatccttaaatatcagtaagctccattctgtgatcctatctcaagtattttgcatatgtagnatcctaaaattttctgatgactctt

SEQ ID NO: 157 - DNA, 1182 bp, Arabidopsis thaliana landsberg
gggaagtaacaaggcatcatcaacatggaagatggcaagcaaggatcggccgagttgctggaaacaaagatctctacttgggaacattcagtaagaataaatattaaccatgcttatatataattctctcaaatcatgtcttcctaaatgatatacaagaccgtttcaaactaaatagagatcactttttttttggtgagtactatatagagatcattagatataaatattaagtttaatctaatatcaaaaatataattcagttttattttatagaaaattatgtgaattaacaccacttacaagcttaaatagatatatggtcatgcttatattcatatattttgctcaggcacggaggaagaagcagcagaagcttatgacatagctgcgataaagtttcgaggtctaaacgcggttacaaactttgagataaatcggtatgatgtgaaagccatcctggagagcaacacacttcctataggaggtggtgcggctaaacggctcaaagaagctcaagctctagaatcatcaagaaaacgagaggaaatgatagccctcggatcaaatttccatcaatatggtgcagcgagcggctcgagctctgttgcttccagctctaggcttcagcttcaaccttaccctctaagcattcaacaaccttttgagcatcttcatcatcatcagcctttacttactctacagaacaacaacgatatctctcagtatcatgattcctttagttacattcagacgcagcttcatcttcaccaacaacaaaccaacaattacttgcagtcttctagtcacacttcacagctctacaatgcttatcttcagagtaaccctggtctgcttcatggatttgtctctgataataacaacacttcagggtttcttggaaacaatgggattggtattgggtcaagctctaccgttggatcatcggctgaggaagagtttccagccgtgaaagtcgattacgatatgcctccttccggtggagctacagggtatggaggatggaatagtggagagtctgctcaaggatcgaatccaggaggtgttttcacgatgtggaatgaataaaagatgaattctgtgttttttgcgaggccaagtaaggtatggaataattagctactttattttcacaagtattaggatcggctggagtcttct

SEQ ID NO: 158 - DNA, 1202 bp, Arabidopsis thaliana landsberg
  unsure (1)..(1202): unsure at all n locations
ggaaacagtttgtaagatgttactaagtaactcgagctgataagtaattgtctgcactactttgccaggtcaaggcaagttgcaaacgcatgaaaaggtatctagatgtaactgtgtgatcttcaatgaaactctctctggttcagctagatcactagaatatatgtcagtacacacctgcatatattatcttctcatagcctaacaaagaaatatttctttctttgaccaaaccaaacgttgggatacctgcttttatggatactttggcgcgtatgtaatagaaaccgcctccatatggacacaattcacattgccgcctagcctatgtctataaagcattttctagacatatttcttctttttatatggtgtcaaagcctgcaaaaataaaacagaatgtcaagtaatcaaagagttcttgattaattcatttctaacatgaaccccganaaagaataagtttaatgttggtccaactggaaacacatggatccactacaggcctgctacagctctgctacgtgtaagatggaacaagaatttcactccagaagttcttacagcaacaaagcttaatctacttcgtaatgagctattcaaaattttccgtgaccatgatttattttcttagaccatcactacataaccgaatttactgccagaccattcttttcttctagttcctaaatgtcatcatatattcagtaatgaaattccaagttgaaagcaatagtagtgatgtttcaaaaggtagaataattgctaatctacaaggatttgagctagctatacaacggcaacattatactgcctatctattttcacaattggtgttaaatcaaaatttattgcctcaatccgataaagtaagaaactacaagctccaaaactatccactcggcatgtgaccagtgactgtatctttgtttcatctacattcttatctaactccctaatcaacctaatagctctaacattcgattgcattggcattgcaactgcaaaggataaatctccaatatctctaataaaccaaaacctcagcggatactcgacactgaattacctctctaatgagaatcaaaacatagaaaatagaatggagagaattgagagtaaccttctcattcttgaagcatgtacgaatgtttccgagctccttatcaactcgtagtctctccgcttccttgttctggcaa

SEQ ID NO: 159 - DNA, 1024 bp, Arabidopsis thaliana landsberg
tactaaatattcgagcagaagtgaataaaagaacctaaaagatttttttagaaatactatgttacatctcaatgtcttctagatctggtaaagggaacctaagaatagctgcaattccagtatgctgtgctagttgttcccctgaagcatgcattgacgaaaatataaaaacctctcctcgtgaatctttcaccgactccacaaaatccacatacttcttccttgttttcacgtcagagttcctaaatagcccatctataatgagaagtgtttggattgccattcgttcatgagcaacttccacatgttttggtccataacatgctctatttggatcattcgaaaacatggtgaagaaatcgttgagagctttgacctcttttgctgctttagtatctttgatcatattcatcacgttagggtcatgcaaaacctcgcttaggctatgtttatatcctgagtttgtgtgcaccagaatgaaacgtgatttgttctcaagaataggactcaactgtctattatctgctttcaacaataggtggctgtgaaactgatctttagttaaccccagacttgcaatctctgcgcatcgaaccacactgaagtcaacgtgtttcagaaaggcttgcacaacattctcaaagaatttcttcaaaactgactcgtaaccagccgttccagctccatgcttccaaggaatcgatgtttttattcgtgcaccgcaactttttacacttttgccggcaaggaagatttgtgccagtccttcttgcattagaactacagctaaatcagcactagctgcaagatctgaggcctgcttgagtgtatcaagagccagtgagtcccaattttcctttctcaataaaaaaggtcgtttaagctcaatctccaaagtatggaatgcaccaatccttacatgctcgttctccatgatattcttcccgcgtatgcgcataacatcgccgtctttgtcatagtccacctgctcaacttgtacttctagcttaagtttaacacgttc

SEQ ID NO: 160 - DNA, 504 bp, Arabidopsis thaliana landsberg
ctctatgctaacacagaggaatgttggttagtttagttacctgttcgcttttcgacttttcggagaagagcaggagaagctgagattcggggatggcaccaccttatttgcgtggcttaggtaattagagtatgttagtaacaaaaaagacaaagatgttacatgttgcatattacttcctccactcttcactaataatcctccttgtgagtattggacttgagggtgagaaattccaggcaataaagaacagataaactcatcagcgttttgcttaaaactctgaaaataatctgcttttcccattagtaccattttggagactaagacattaatcccggcatgtttattatcccaaccaaattcgtggatcgtatctccagctcttagaataacttggttcttcacaatgaactctctatacactcgtttcttcgacgctatatgtagccaagccgatccccatagcaactcatcctacacgcaacattttcatcaacaaac

SEQ ID NO: 161 - DNA, 1073 bp, Arabidopsis thaliana landsberg
taaacacatcaaagagtattcgttcttaccatttttcaaaacgataatatatgaaaatgcaaacacttagaagcttattacttgaaaaagatcttgtcatccttttcttgagatagctctgatcgaggcgaagtatcaccggcagactcgtcattctcaagacaaccaacttagctgcctcgttctacttatataacttatgaacatcctgtaatatgacccatgaaactttttgtaaaaacctttgtaatcttcaggtaagtttaaacttgttcttatcaaacctacaaacacaaaaaaaaaaaaggcatgcaattagaaacatataataaaagaacaatgaatgtattcctcgtaattactagtagctaaatggagaattagacaataaaaaagaattttcaaagattgaaaaaaaatcacaattttaagactataaaggttcaatcaaactacaaaggatcttgagacatagattttaattgtacacatatttaaaatttaatcacaatctataagattcaatcaatgagattcaatcaaaccacattttaaatcaagacaaagattcctacaaaatctatctttttaattcctatatagagatttcctgataatctatattatctatcttcctagttcgtacacaaacattcctagcatctacacaatctataagatgttaagagaagatacttaccaagtggttccaggctccaatatgggagtgctcctcgccgactataaatccttggaggtgaatagtctttgtaagtagggatcgttggaggatggccgattgggacatgatttcgatgagactctagatatggggcttgagggttcaccgacgtgaatgtgtagttcctaggaagactggtgagtctttgattcaaagtctgtgaatcacctggagcaatgggtcaatttgaggtgtttttcataacccttcttcctcctcctcctctcttccttcttccacaaaaaaaaaaatgaatatctattagggttcaattcgatgaagattggagagagataaaaagagatcgtaatggaaatgagaggattagggc

SEQ ID NO: 162 - DNA, 3328 bp, Arabidopsis thaliana landsberg
ctcgcccaaaaaattcatgagtacaacaacgcctactttaatcctttaatcaatcttaaaggtttcatggggagaactgagtaaggtctatttatcacatttccaaaactattactccatattcatatatgtccctaatatctccttgaaggttggtaacccagagatggacaaaaacaacgacagactagggacgataacgtattggtggtctcacgcgatgatctcggacgcttcctacaatcgcatcctcaaaaactgtgattttacagcggatagattctccaaagaatgcgattccgccatttatgtcgctgctgccgactttggcgacatcgatcagtacagcatctacacacccaagtgtgtaccaccacaagaccaaacgaaccagaccgagtttgagcagatgatgcaaatgcacacaactaaaaggtttttagaagatcagtatgacccttgtaccgaaaactatgccgagatatattataaccgtcctgaggtacaacgagctatgcatgctaaccacactgccattccatataagtggactgcttgcaggtattcccactgctcatctacattgaaactcttgaaccactgttattcatcacatgttcataactttattctaacgtatactacaagaaactcttgaaccaaattgtaaccaaactaacgactccaggtcaaacttcagttataatattattaaaaaccaggcaattttttttgttctctctgtttgttacagtgactctgtctttaataactggaattggagagattccgacaattcaatgttaccgatatataaggaactcattgctgctggtctaagaatctgggtctacaggtacactatgtttcagtatattaacctagacacctagttataaaagatcatgatagcaacacatattttggtcattaaatcacatttctccatgcagtggtgatacagattcggtaattccagtgacagcgactcgatattcccttggcaaactgaatcttcgagtgaaaactcgctggtacccttggtactccggaaaccaggtaggaggacgaacagaagtatacgaggggcttacctttgtgacggtaagaggggcggggcacgaggtgccattcttccaaccgcaaagtgcgcttattcttttaagatcattcttggctggaaaagagcttccaagatcttattagtgacccgacatttgtagctccactggtgtactaaggcaccttccaaacgaagtgttcctcaaggtacgaatctgaatgatgttggggaggtgattaatgttggcaactgactgaagaatttattggccaatgggctgaatcctctttttttaagaaacaaaattcaaaacccttacaaaaacgagaaaacagagtccttgatttctatagggtactttaggacttctttaggccaatatttttttttcataatctttcatttcagtctgcaaatccctaaatgtggtctatgatggcttctgacaattaattttactgtcaaagctaccattggtctacccgaagcatctaatggtagctttgaccgtaaaattaagagagaacatacgactaacaaagttttaaaagttatcatgcgatcaattgtcaaaagagagggtccacattgtgtaaaagaaaccgatatctttcttacatgcatatatataaaagtaaatttattagtggtaccaacacatcctcctccattccaacccattgaagaaaaagcagagactatagtgaaagacagagaaatggcaagaatccacttaatcattatactactagtgatttcatcgacatcatcatcatcatcatcattaagagagcacgaggaggacatgatcaaggcacttccagggcaaccgcaagtaggatcctcacagttatcgggttatgtgactgtgaacgagtcacatggtcgatcacttttctactggctcacagagtccccttcttgttctcacaccaaaccacttcttctttggctcaatggaggtaacataacattctttaattcttatgtctccccacttacgctcatatatgtgcacacatgcatatctcttttatatcttcataataactccaaattaaactatctgaaaaaacgcctaaaataaataaataataataatctcaatttaatataatttgcagaaaatatcgatagatttttgcaacaaaatttgtaaaacggtaaggaaatgtaaacgtaaacaattgcaataaaacaagtcgctgttctatgctcggtcctagtaatagcataaaacggtaatggttattcattggtcacagagcgagtaattatttttgtcctgctttaacttattaattaaccaatccccaattggttacaatatggtacaccctttcccaatgataagggaatatcaataatcttatcgattagactcgaaagaaaaaaagagaaaaaaaacacacattctttttgtatatacctacataaaatattaatcaaaagaaaaagaaaagaaagtgaaatccactaacattacttttttgtatctaataagtttttaaaccaacaaaacctaccctgagtttcatattatgtaatcttaaaaatttcaatcattaatataaatgtggatgaaacaaatcggtgtccaccaaaagaacatcaacaacccaatatgattctcataaatgaaacatgcgacctcctttataatcatcattttacttctttttttcttgttataatttttatttatataaatgtttattcgaaagattaaacattatataatctccttgagttttggagttcgtactcttgccagttgccacctacttccagtcttccacaattcattttccagcgtgcactttagcagcagtgcccatttctcactaatatatgcctagttaaagcttaaggaagaactggaatgtgaatgtgaatgtgaatgataaataaaatagcaaaaaaataatgttctaatgacactagattttaataaaattacgtcttcaataatacgaaaacataaaatagcaggaccgggttgcttatctatttggtatggagcttcggaggaaaatggaccatttccgatcaataaaacccggtgttatctgtatctcaacaaggttacgtggaacacagggtaatattttttctttatagtttcatttggtctggaatcacattgttcggtatacaacaaagaaaattggtttgaaacttttatttggaatgaattgaaaccaatattttgtttcttgaatcgccgggccggagtggatttttgtacactaacacaatctctga

SEQ ID NO: 163 - DNA, 1720 bp, Arabidopsis thaliana landsberg
gacggtttcgttatcagtggtagtccacatgatgcttcgaagacgccgattggattgttaagctttgcgaagtttgtcagaaacttgatcacatgaagaagaaagttctcggcatctgcttcggccaccaggttcctttcaattcagttttgctcaatttctgatttggatctgatcggttggaatcttagggtttagattgactcacatttagctcatttcaatttttagatcagactcgagttgttccaatgccattatagttagattgatatctttatattgttggtttattgatggagagagtgtttgttgatgaacgtttgctttgttctggattgtgtctctgttcttttggctatagataattactagagttaaaggtgggaagataggaagagcactcaaaggtgcagatatgggacttagaagcataaccatagcgaaagacaatgaaaaactacgaggttactttggagacgttgaggtcccagcatctttagctattataaaatgtcatcaggatgaagtgttggaacttcctgagtctgctacactacttgcttcttctgaggtatgtaacgtcgagatgttctctattggagatcattttttctgtattcaagggcatccagagtataacaaagagattctgtttgagattgtggaccgagtccttaatatgaagctgatggaggtttgttctccttctctatgatctctatttttgctagataaacatttcggagtgttcttgttctcaatgtagttagccttatcaagaattgcaatgtgattgatttttttcagcaagagtttgcggataaggcaaagagtacgatggagactgcgcaaccagacaggattctatggcagaagctctgcaaaaacttcctgaaaggttgatgatccgagactatgttatctctgtatgaacttatcaaaaactatgtcatctctcaataaacctgcagtatctttcatattttatcttcaggaaacagaaagaaacacatataaaacaaatcacaatcacaaataatcttttatgttaccacctttttctttatcttaatgtagcaacacaaatcaaacaataaaattcaatccgagttatacaagttataagcgttcatagacattagcacttttctggtaaaatttggtcaactagtatcatcagcagagaaatcaggttctgaaggcttctgatatttcacaagttctatagtagactttgcttcaatacggttcttgtgaactttacgaagtgcatttgcagcaaactttgaagccaggaacgtcgctctgatgctagtaactgatccttctccttcttcttcttctttcctgagttgctcaagtttcttcttcttcacgtatcgtcgccacgcggcttgtatgaagatagcagcccaagttctccattgttgcgagtagaatctgaatgtgtgttgaacttgcctgctgtgtagtcttctgaactggctagccacaaatttgagctcatctgctatcaaagcaaaagcctctacttcagttagagcctttgcggttctggtagaggatggtaggttggaaccagatttgggatcaagtgcccatgtcaaaagctcttccccacagaaatctccttctttaagcaaactgcggatgaagaaaccgcttcttccgccatcggtggtcacactctcaagccgaccacggataatgaagagca

SEQ ID NO: 164 - DNA, 475 bp, Arabidopsis thaliana landsberg
cttgctgtgctgcggtgttgccaacagaacgagatgcccctttcactaaactcgctcttgaggttcttggtgcctattttatatgaccaacaaaagaagatttaaatccagtgaagaaatgcgcaattgcttgaacatgtaactgatgtattgccatatatacctgaatgcacaatccaaggagtggagaaatctctttcttcaaattatcacgaatcattccgtatattttctcaacataggctgttagctgttgcttgaagaggagagctgggtatttcgcctcaacttgccttaaggtatcaactccaccatttatcatggcaagattcacaccttggggtgtgccgcgaaagctctagagaaagattgacattgacaagttaaaacttgtgatgcatctgatatgatgaagtttatatattagttggccacacacacacctgagtcatcctcccaaagagagtggcagaag

SEQ ID NO: 165 - DNA, 582 bp, Arabidopsis thaliana landsberg
  unsure (1)..(582): unsure at all n locations
aagtttcctctattctcatgtgtatatgctcaattctcatgtattcttccctacaggttattttcatttgatgagcctaggtgtcttggcttgttttggttcctcaaactatctagaaccacacaacttcacgaatacaaatacatgcaatcacctaaactcaaaacacaccgaaagacaacaaaattcaaacagaaacacgtgaaactgaaacacgatacaaaaaaaaaacacgtaaggcagataaactcaaaacaccctcgaacacaacacaacataacacaatagtaaaattcaacacaatactactatgccattatgttgccaagtcaatatcaggtgaactctccttccctttctattttagtatcttacaactattgtggtcatattgaagttcattatgttttcttaacaagttggtaaatttttatgttatttgaaagaggaattcaagccaatacgagggaaaactgtgctttgcatacaaaaacaaagaggtaatcattaatcaatgtagatatgttttgctttgtcaatttttacgttctgttcatgtgaatggaaattcngtgatgattc

SEQ ID NO: 166 - DNA, 1216 bp, Arabidopsis thaliana landsberg
ggctaaaaacaattaataagcacgccaacactgacgagttaagaaaaaattttcttgataagacagacaattaaaaaaaaaaagaggaaaccgtgtctcgtggttcgtaaaccaaaccattatttgtatataacaaaagcctcatttctctcatcaaccattgttgcgtgtttggttatctcttctttcttctctctcacctaaatcaagggatttgttctgatcaactttgaacagaatttacaacaaatccctagaaaaatctgaccccatccttcttcctctggaagatttaagatacttgttgataaggatattcggaagaagcttttgaaattttgtggcaaaggtctcatttgatccgacttttctggtaatttttttccctttattgtttgtttttccaacagatctgaacatttttgttacgattaatcaaatttctgtgttcttaaattggatttggggaaattttgagtagcgagatagatcttatcaaagctgggttaaatcgaatttttgtttatagaaaagctgggtttagatcgaaatgaatcatttttgattatatagaagctgtgttttattggaatttgatcaattttgattgtatcgaagctacgttaaatcgaaatgattgattatattgaagctgggtttgatcgaattgaatcggttatttgattatcatgttatgaattgaagacaaccttaaaaaatgagtcttctggtgtcagatgataaattgtttttgttgtttgtttagttgaaggtgaaatagatacaaaaaaaatgggctcagaggaaaacaacagcacaagctttccaccaacagagcctaagctctgtgataacggatgtggattcttcgggtcaccatccaacatgaatctctgctcgaaatgttacagaagcttaagagccgaggaagatcaaaccgcggtagcgaaagctgcggtgaagaactcgttaaagcttccatcttgcagtatcattgcacctggacaaaaacatcctctggaaattaaaccagctcatttggaaaccgttgttgtatccgccgagccgtcttcggtgcctgtatccacggaacaggacgaggctgagccgtcgagacctgttagaccgaacaacaggtgtttcagctgtaacaagaaggttggtgtaatggggtttaagtgcaaatgcggtagcacgttttgcgggagtcataggt

SEQ ID NO: 167 - DNA, 1460 bp, Arabidopsis thaliana landsberg
  unsure (1)..(1460): unsure at all n locations
ggcggacaaaactttgttttcaaaaccttaatatccgtctttttgtgtgttttgtatatccagaagataaaaatatcaatttggggnnccacttcatatatatatatatatatatatatatatatatttttctcttctggttttagtgtttgaatccaacagttatagtttcgtgtgtctttgttttacttgtggtggtttaagtttgagattttcaccgattgcatctatttacatatatagctaccacaaaaaagattgcattttaaaatcttttcctttgtgtgaatgttgatgaagtgtgagaggaacaatagaaaggtacaagaaagcttgctccgacgccgttaaccctccgaccatcaccgaagctaatactcaggttagcttttaattaatacacctagctagctagttcgttaattacttaatttcttcttcttttagttatctgacctttttttcacctcttgtaacaatgatgggatcgaaattgatgaagtactatcagcaagaggcgtctaaactccggagacagattcgggacattcagaatttgaacagacacattcttggtgaatctcttggttccttgaactttaaggaactcaagaaccttgaaagtaggcttgagaaaggaatcagtcgtgtccgatccaagaaggtacaatcactaactctccatcaatctccttatcattgaatatatatccatctgattcttgcccgttatatttggtttttctctccagcacgagatgttagttgcagagattgaatacatgcaaaaaagggtaaaagttaaacctatcttccttcacaagtaacttaccccctactttattagcaacttctctttctgatgatcatctttttttattttctgttgtcgcttgcattgtaggaaatcgagctgcaaaacgataacatgtatctccgctccaaggttttatacataactctttttggcatttttgatcatcatttttttccggtagacaatctcttgatgtgcaaattctaaatatctctgcagattactgaaagaacaggtctacagcaacaagaatcgagtgtgatacatcaagggacagtttacgagtcgggtgttacttcttctcaccagtcggggcagtataaccggaattatattgcggttaaccttcttgaaccgaatcagaattcctccaaccaagaccaaccacctctgcaacttgtttgattcagtctaacataagcttctttcctcagcctgagatcgatcttatgcatatatatattcatgttacacttactgtcaaaaaacttaaaatgcagatggtaacgatttgagagggacctaataatttacatatatcttgattatgtaagttaaggctaagacaagagatccaaaaataaaatgggatttattgctagttagtgttgcatattcaaatcaaaatgtgttgatgtgacgt

SEQ ID NO: 168 - DNA, 4271 bp, Arabidopsis thaliana landsberg
gaaacctcagcaaatgcatctgcatggtgccaaacatttgaaagaaattccagatctttctttatccataaacctcgaggaattagagcttgttggaggcaaatctttggtgacacttccttcctcgattcagaatgccactaaactgatctatttagatatgagtgattgcaaaaagctagagagttttccaaccgatctcaacttggaatctctcgtggacctcaatctcattggatgcccgaatttgagaaattcccctgcaatcaaacgtatgagatgtatgccttgtgaatttcacccagaatatctcgcttttctcgatgtgagcggctacaagctcgagaagctatgggaaagcatccaggtacattgttaatgctatgctgatttttgctttccttctattatataactaattaagtatacccaaaaatgtttttatggcttgtgatccacggttatgtcttacatacatacataataatgtttaattataattttaaacatacataggtataaaattaacatgattataattgataatgattgaagcataccaatgtttttttcagtcgcttggaagtctcgaagggatggatttgtcagaatctgaaaacctgacagaaattccagatctttcaaaggccaccaagctcgagtctttgaaactcaacaactgcaaaagtttggtgacacttccttctacaattgggaatcttcatagattggtgaggttggaaatgaaagaatgcacagggctggaggttcttccaaccgatgtcaacttgtcatctctcgaaaccctcgatctcagtggttgctcaagtttgagaacttttcctctgatttcaactagaatcgaatgtctctatctaaaaaacaccgccattgaagaagttccctgctgcattgaggatttcacgaggctcactgtactactgatgtattgttgccagaggttgaaaaacatctccccaaacattttcagacttacaagacttaagctcgccgactttacagactgtagaggtgtcatcaaggcgttgagtgatgcaactgtggtagcgacaatggaagatcatgtttcttgtgtaccattatctgaaaacattgagtatacatgtgaacgtttctgggataagttgtattatgatgcatccctccaggtaaattggaacccaattagattagatagggaatattttagcttctgtaattgcttcaaattggaaagagatgcgcgagaactcatcctacgatcatgcttcaagcctgtggccttaccaggtggagaaatccctaagtatttcacgtatcgagcttctggagattccctaactgtcactttacctcagagctctctttctcaagaattcttgcgatttaaggcttgcgtcgtggttgaacctctctccttgggtttttctccatccttgaaggtaaaagttagcttcaatggcacacagtatcagaaatcgttctttgaagatgcacaactgcagttttgtaagacggatcatctgtttttctgttccttcaatatcgaccctggagatcttccatgtaaattgactttcaaagatgtggagtttcagttttgttgctccaataggataaaagaatgcggtgtacgactcttgtatgtctatcaagaaacagagcacaaccaacagactacgagaagcaagaagcggatgcgggtaagccttttgccataattagagctgaaacttgtaaagcaatcttttgacttttgatttgttttctaggatcaaaataccgtagcgacagactatttaatagaatcgatcgtttgatttataatgcagatgacatcggggacatctgaagaagaaatcaacttaccctatggccaaattgtagcggactcaggattggccgctctaaatatggagctttcgttagaggagggagaagcatcatcagtttgttcttatacatctctggagggggaagcttcgtgtgttgattccatgataagtgagcaacaagatgaagaaattccgatcttgaacagactcattagctgtcatcatggtaactgaaacatcgtcttattctttttttttctgttttaggatcaacttgggattgactatgactatagtgataatgccacaagcccatttttttctgcagatgatggagagctctcggagaaccaaaatccgtttaatcatccaactccggagcctgaaagtgtttgtaatttcttctttatctgaatgcagaaacactcttgtgtttcctttgaacattttgcctgcctttttttgaaacatagatctcaacgtgtatgttagcacaggttgtttttctctttattagcaatgaattaaaaaatcagactttgggtaaacaaaaatgtatatcgcaaattcacaagagaattgaaaacaagaatgtgttggaactaattttaaatagtaagatcctcgtcatcaacaatatttgcattgctgattcaatagccaaaaggcaggagcgtttttggcctaacttcggccaaagatgtaaccagcataaggaacaagccttcaggtgaaggaacgagctctgcaggagacattgtctggtccacttccaaaccatgaagtatcatccagctatcctacgtcgatgagaaaacatgtcgctgctgttcccccatgccgctgcactctttaattatatcataaagagttaaagttgtaggcctgaacactagaacatctaggatgggaagctaattctctggggctgttcttgactgaattggtttgcttcagatctttgcatcaagggcctaacatagatgtgtggtccgatggggacgacacctttcactgctgaccctgaacagtgaagatctgccttgactgaattcacaccatcacattgttcttacttctctctgtttagcttctttgaaaatttcgcttttcctgaaagatgtgaatataacagtcttgtctgttgaaacacatatctctctctacaaaatgttatttttctctctttaaagcaatgaataaatcataatcttggtaaacaaaaatgtatttcacagatcacaaagagaattatcaacaacaaaaaagtgttggaactaattttaaatagcaagactttcctcatcagaaacaattgcatcactgctaccatggcgtttcctacactcacagtaaaaaacagtgattacaacataactcagcaccacctcagccccatacatacaaaccagcttccacccatcccacccaccggccacaaccaccgacctccaccacgaccctgagctcacgtccatatctagctccttcgccaacttctccatcccatgaccaatgaaactcgatagaaacacaaatacacccgccaaagccaatcctgttatcctcctccctttcatcagagcggttccttccttaatcgcatcaaaaccgtatctttcttccaatacagagacgacaaacccaagccctgttatagccattacgtatacctcaacaccgagacagaagatcgtgatgagatactgcaatgtaggtgtataaccaacgagagctgatagaaacatgggaattggtgagtagaggaagagcagaccatagacgatgatggaagttgctgttactcgcatccaagaagacttcactgaaacaaatgacgacttcagagatgggtttatgccttggtgtgagaaggaagttgatgtgatgacagttatggaggccatacaggagaggttaaaggatgggacgaaataccggaatttgagatgtaaaagcgagacagcatcttctctagactcttgccaaatctgtctagcttcaaaccgtgtatgcacaacgttagctaaggcttctaaacgaaagacatggtttttaaggcgaaaggaggtaagagttaaggagaggtgtaaggctgcgagagggatcgctatgaaagcaaagattggtaataagatgtgtttgtttctgaagagaatcatgaaagaatcaaggagtgttgtggtgatccgcgtggaagaaccaggtcgcttaacctcaatcatgatatcaaaacgcacataagaacctccttaagcttcaaccactgttgagaaactcaaaacagagtcgacgatattatgcttcttgagactgtagtcttgtatgagacctgtgtaatagtgaaagcacaaaactttaaaacagagagccccaactagtttagagatcaaacaagttgaccaaaatttaagactttatctacatagcacagag

SEQ ID NO: 169 - DNA, 1094 bp, Arabidopsis thaliana landsberg
gggttttaaagctcgcattacgcttgttttctttttgtagggcacaaattcgtatctggtgcctgcctttcctggttttgctggggggatcaccactttcagtattttcccgtgatgttcaaataatgcctttagacgttcttgtgttatatctctaggtaaattcttgatgtacaatgccttgacctgcaatcattccacacagcttttcattgtttagaaagaagaatatttgcagaacacgtctctatgataataatttcttggtagtgacattttgttggtaaggttactgttgctgctactataatttatttgtaagatagattctaaagaagtaaacctgagaggcagaagagtctccttctcctccactccttgattcagcccagcttacagttggggcattatcatcaagcttgaaactcggatttgacatttttgttttgagtattcagcacatacatggttgtaatactcgatgaaagtaaatccacgattccggcccatattttgtggttcctgtgattttaacaaaaccaaatagaaaaactgatcaagaaatgtattaatttctacatttacaattatacgtgaagttgagatgaaagttacagaactaacttaatatacactataggctgaaacttatccaagttgcaggagacaaacctttgggagttcgacaatttgaacgactggaccaattctatttgctgctttcttaatgtctgactccatccaatttctagggacattaccaagaaagagacgatgctttgcttgggtagtcgaacattttatccttttaccctattgaattacatcaagtaaataaacaaataagagccagacaatttactaagaatcgggtcaaagaacttactctgaagtcagtgttatttagagtatcaattgcttcagcagctaagtccttacttctgaatgttacaaatgcatacccctttccatcaccagaatccttttccctcattatcctaacctgttgatatcacaccaaactcagcacaagataaattaaatcacaaccatagtataggtaagaagatgtcaaattacctcagtaacttctc

SEQ ID NO: 170 - DNA, 1977 bp, Arabidopsis thaliana landsberg
ccgtttgtggccttacaaccaaaaccaagggttcattccaaagcagcagtttcaaggaggatatcaacaacagcagccacagcctggtttcacaccacaacaacaacatgcacctacgcctcagaattcagacataatgattatgctccagcagctcattcaaggacaagccacatgagcaatggatatcgctaagaagctgtctgaagtaaactacaaagtcgaccgacaaggcgtcgaacttaacaacaagttcgaatccatgagcactaggatgagatatgtggaatgcatccttgcatcaccatctgttaacaaaaacccatgccagcttccagggaacgcaatccaaaatccataggagtatgccactgcccatgccatcactatcacacatgatcgagagctgctaactcgatatatccctacatcaaacactgagggcactgtaattctagagggggaggatttctatcaagatgatgttttggctaacaacacaatcgaagagcccatactcaccagtaatccactcgaccacaagcttccccagctactctctttgttgaaaaaccggaagctgcaaagaccaaagacatagtcttcgtgccacccccttacaaacctccgctttcattccctagtcgtttcaagaaagttctggttacaaaatatcgagccctccttgaaaaacagataaaggatatgcctttagtggactatcttgcgctaatacctgacgagcacaagtacgtgaaagacctgattacagaaaggatcaaagaagtccaaggaatggtggtattaagtcatgagtgcagtgctatcactcagaagaaaattgttccagaaaagttagaagatccaagatcttttactctaccatgctccattaggcaattgactttcagcaattgtctatgtgatctaggagcctcagtcagcataatgccactctctgtggcaaggaagctgggattcgttcagtgcaagccttgtgacctaaccttgattcttgctgataggacttcaaggagaccttttggcctgttagaggatgtgcaagtaatgatgaatggagtagaggtccctactgattttgttgtgcttaagatggatgaagaatctaaggatcctctaatcttaggaagacctttctatgcttcagctggagcagtcatagatgttattgagctatgagatgtcaatagactcacacaacaaagtaccaggatcagagatctttaaaggtgtcattgcgttagaaagagaggatgttgcattgaacgaggaaggctcaattgatactcgactagagtgctcaaccaaacagctaaagtcaagcatgagggcatcaaatgattggttagaattcaaggagaggtctaaatggcacgacagagctataagagagctaacacacactatgaaagagctgaaggatcaagtcaaagagctccatgggaaagccaaccaagcaccactcgacatcaaggacgtcccaaatgatgaagttattcctatggttagaaaagaaggatgtgaattcacattagaatagtatagaaaagatgattatccagatgatgaataaggagcttaccaagaaagggccattgagtactcaattacatacttgtcacgagagcatgctgaatttaatgttgtatctactaaggaaggagaggagacgtcaattctactctatcaccctccttgagcctaatgagtgtgaggagtcaagctagagacttaaaacaagctcacttgggaggaagtcccacgtctatccctgtatatagtttttattttattttattttgttacttttgatttgttttggttttggttttgattctcagggaatgaataacagctagagcaacatcagggatgcaaccgagtgttcaaataaaaaattacatttttttttgatgaatcacttgaacgcaagatgggagtaaaagctcgggagtg

SEQ ID NO: 171 - DNA, 1763 bp, Arabidopsis thaliana landsberg
agccaaatagatatccaagtgactctttgtgttgttcacaccagcttcaatgcttctttccaactcaaagagatcctgtattacaaagatttacatcagttaacaatatggatttctaatatggaattttaactttgtatatgaagatacttacattatcgaaatcatcctcaagtggagattcactaagtaagtcatgtggatttgttatccctgaaacgcctggagaactcgtctgataagctttaaaaatcatttccaaattcttctcaagttctttaatcttcaacgcagaagtagtgggatctactttctgataagctacttcgagcatctttactttaagtcttggatctaaaactgctccaatagctaaaataagactgtaatccttccaatacttagcaaacttgatttgcatttccatagccatttgctttatatcctcatcatcacaagtgacgtacttcttcaatagtaattcaatcctccataattgagtcaagtatacattcgaggtgggatacttagagcctgaaatgtaagtagtgattacactaaatggcttcaacaagtcacagatcttttcaccacgatcccactcctcatctgatggtaaagacttataattcctatcaaaagccttcatgctatcaaaggcttttctaaattttaagtagaattcatctagtaggcacatcaagagataaccctgccccacttcttattcccactctctcaacacaggctgcaaaagcttctttcctttgtggagatgctttcacatattgaacacttcctcgaatattgtgttagacatctttagctaactctaaacctttcttcacaatgatgttaagaatatgagcgcaacaactaatatgcaaatatttcccgtcatagattaaaccactaccgctaatcatttgaagttggcccttgaggattttttgtatattattattattggtagcattgtctagaggcatagaaagtacctttttctaatccccattcctttaaacaatcaagaatcgtattagcaatatgttcaccagtgtgcgtagacttcaactcacaaaaatctaaaatataactgtgtaaatgccaatctccatcgataaaatgcgcagttacacaaatataactcttcatactagccttagctgaccacaagtccgaagtaaaagaaactctaacacgatgctttgcaaaaagctcttttaccttttctttttctacttcatatctcacaaaaacatcagtagcaacagtttgcattataaataggctgataatctggattcaagtatttatctctttctctaactttctcatattccagtataacctctataaattaataacctttataaattaataaatttttccggtcccgaattaggaccagtgtaaaaagtgacacaaaacgataaattaataagataataatttttttgaaagtcctatgtaaatatatggtcccatcaatatcataaattaataattgtataaatgtatcaactatatatatctattatatgtaaaaaaactctttagaatagatttataatatttttttgcttaaatgcatttgtgctttctttgactatagctttcatattttactgaatcaaaacttttagtgttgttttctatacattattatcatgttttactcgtaacgggttttagaaagatattagatattttctataatgagagaagttctatagaaatttttaaaaagttaccaagttaag

SEQ ID NO: 172 - DNA, 2763 bp, Arabidopsis thaliana landsberg
  unsure (1)..(2763): unsure at all n locations
tagtttctatctctagttaggtgtgtgtatatgtatctatgttcttttgattaaatgttatcaagagggtttgtggattttacatcacatttgatattctatatcatccgattgtcaatgaactacattgaatgttatgttcctttgatctctgtgcttattacggatttagagggctgctagagtttgctctatcttatgcattcaattctcttaacacagagcagagcgacttcaaacagattctttggggatttgaacttaggttgtgtgttaagtatgctcacaagaaacatttgaaatcactttcttgataagcctctcgcgttgttatgcactgcttaattatgttaaatccttcttattccacaggcatttttcatgaaaccaggtcataatcatcacgccatggaatcgtgaaacccacatggttatctgagacttgcgccaacaaactcctatgttctgctttgcttgcacctccttctttgccacgattcctgatcatgtaaactgttcatagatcatttattcctatggttattttggaatggacatcctttgttcgattctatttcctccacttcaaatttttgacacagggccaaaccatattacttgcatcttttgatgtttagagtccataacctcaaagtttccaggtgttttctcggtactgttagtaagagaccatgtccatcagtgtttctaatgggtttctaatctaaaatcctaaagaataaaagtccaaaaataaaggaaaacccaataaaattgttaggatcgttcctaattttaggatttttaggattttctgaagtgtttagaaacagtgacgtggctagaaatgataggatgaaaatttagacaaattttacttttaaagaaaaaagcgtgtttctctttccggttggggtttctcttttcttttggttctccgacgaaaattaggtgattccaatcgatccctttcgattacaaacttcgtcgtatcgaccatgaaatcgggagacaagagccacatgtactcaattttcaaccgccatgtactcaattttcaaccgccgggatgatgatcgacgacgaggttgttcactaaattgattcttcgaaccaaatcgaaaggagtggcaaaaagcttcagaaaagagtagggtggaggctgcttggattaaagagaagtatccagatagaattccggtgagtgtctctcttgtcattgatcgatcatacaataacttgcttaactttcacaacaattatagccttttctctacgcattgtttggaattatggtgttctctacgcattgttttaaacttctgttgtttaagaaattatagaatatctgcataaagtatgttaaggtttatacgtttattcacatgaacatgaccatgcttctgctatcgaagaagaattgcaattctcatggaaaagcctttgttttttatagtgcttaataagtatagagactagtaactagaatattattagattggtttatgcatttcttttatggcttttgatgaacaattggtccatatgccattattttcggttatatggtccttatgtgacacattactattaagtgtttctttctcatctaaacgttgaagagtagtttgattgttgtatnnnnnnnnnnnnnnnnnnnntcccactgaaatcttgagagctgtcattttcaggtgtatgtagaattgcagactacattctttaagttcttgagcttggaacaatacttttctcactctacttgtttctgcaattaaatggtcacaacaatctctaatgtcagttaaaaatctttcaagttgatttttgtttagctttttctattgaggttcaaacttgtaagcacgcgattgaaaccaattgtagaatgacagatcttgtttgttattctgtctttatgttactttgtgtcatcttctatatacttttacataccttacagggccgcttagtgatcttgaaatggctttaaagaacaaacttatcactgacatgttgtcaaatgcttgaatggtgtcttttatgtcttgaaagttagtctttttgtgtcggttaatgcttcttcacttgtttttgttctgttcgattatgaatcttaagttgtttgtgttctgttctaaattggtttcattgtgctctgttctaattggttcgcgttcgcgttcaaacttcaatagattggtttgtgttctgttctaaatgaattttaacttcgttttaaggatgatgtccctgtcgagatgcaagagttcaaggaagcataaatagcaagcacatgcaagtattgttctgttctgtgtataagtgtataggctatggtcgtgtgaagatgcacttgagtttgtgtgtcgaattttgtgagtgtatcaagttttgagagcgtagagtctgtgtcaagttttgagagtcaaatgtattccaaacactttcacatttttttcaaattttttttttagttttattagaaactcacttaaggatttttctaatggaccaaaaaattttcaaaaactctacaaaatctctaaactacaaaaatatcaaaattaattaataaaaaatatatagaaaccttacttagaaactaaccaatgtggatgctcttattctctatgtttgatttttagggtcgagcaacttctcatctagttcttcttaaacacttattacaacagagagaacagctgacgtggaccgttttcgttgtctagtacacgtcatcatcatatattattgggctgg

SEQ ID NO: 173 - DNA, 510 bp, Arabidopsis thaliana landsberg
gattgacttatgcggaactttctccacgaacgatgcatgcgctccttccaagaccctaacaacaaaaaacaatcacatgatcagtctttgaaggaaacctttaacaaaaaaaacagagcattttcagagcacatacttgaatctccgggttggtgggacgaagagaagtactgttcgttcgaagaattgattgtctgggaggctatcaatggccatgtaagcaaaatatccccatagaagtgaagtcggtatgagcttaatgaccggtagagcaaacactgcacctatcactagcaatgattgcaacaggttgctcactctctgctcgttgactcgaacaggcaagtaagcgtcaacgtgcttctctggatcgaaaccactctcttcgccggtatccccgtcgtcgtcactctgcttcatcactgcctctttcagatcttgcagctcatttatcagtgttgtgtgtgtctcagcctgtagattagagataagagcgcatatctcgaaact

SEQ ID NO: 174 - DNA, 1797 bp, Arabidopsis thaliana landsberg
acttaccaactgaccaataaaaaccagtcaacaaaactataggacaaagaatgcggtacctctgaaactagaagcaacacttccattagccatgtagggataaacaattaatctttcagttggagtcatgcaaaagccacgaagccgaagcaagttcctatgaacggccatactgatcatctcaacttcggtttgaaactgcagttccccacccttggtacgttcttcttttagccttttcacagccactagagtgccatcagctaaacgtcctttatacaatataccaaaacgtcctttgcccaatacatttcttttgctaaatttctctgtagcaactagcagttcacgcaaggagaaccttttaaattgtcctaaataaacctctgggtcttcttcagctgcaaaatttggttcaccacgagattaaaatcagccgaagaagcttcaatgggaaaataaatgaagagagttgactaaccaggtacatcaagaaagtgaccctgcagttttcttctcagccaccaagcaagcgcaaatagaagtgctgcacccgcagcaactcccactactattgctgcagacgttcctgagataaacacaaagcttcttagcacagaaattattcacacttgtgtgatatattgaaaagttttcaagggacaaattactgatgcatcaaccaagtggaatgtttgagcaaaagtgaaagagctaatacatttttcagatcaaagaccttcaaaagtgtcaaatatatcttcatgtcccatgttacccacataatttccgtaaacactttcttttcttacagtgtcaattaacccttgttactttaccaaactggcgagttcatcattgttctgcttcagcagactggcgagttcaactgaatgtctcacttgtcttattcaacaccaaccaatggaaaatgatatcaaaatgttgcctttttttttaataagcagtttatcaatcttagcagagacatgacaaaccttaatgtgaaaatgccatactttacaagcacccaaccattaaataaaaaaatgtggaacgaaactcgacaagatacacataaaataaaatgaaaacctgaaggtgatggtgaaggagatgcaggtcgcggcctgaatttattattggcaaaactgcagataactttcaggcaataagtaatttattctgaccactccatcaagaatgaaactaagaataagaagaaaaacctcatagaagtgaactgcgaaaaggaaccattaacaggaatatctccactgagccgattgttttagatatcctgcatttcaggatgataacatttttgtcataactcaagattgcaccatatataattcaggagaataaaagttatactcacagaacatccagcggcagagcagtcaaagaccttggaatttctccagataagctattgttatgaagacgcctaaccaaatacattacagcaggatcccatgtcaacaacattaaccactaaagagttcaaatgacaaacaacacgtttgatctataaaaataatgttatccaactgcatagaacttgtagggcaatgactgaatttgtttaaagaatttgtacacttagcctctaactctttctgaaacattcactctacacatgtacactgaagtttttggttagaagattcgacggtctctctttcgataggacccggtcttggattctatccaaacccaaggaaggttatcatcaaatgtgtctccttacaggaacgaactaatgacatacaactaaattcataactcatagct

SEQ ID NO: 175 - DNA, 1094 bp, Arabidopsis thaliana landsberg
tgaaagaaaaatagggtcaaaccttttcccccaaaaacatgattaacaatgtttcccaagtgtaatatatgtacaggaaccttcggactcggaatgaagttgtgcacaatatgaaaagcatggtcgggacgaaggttgaaccagctccgaagctacgcgcaaggaagcttcgactcagtagcagaaaaaggaaccgacttaaagaggaaaaggctatctagtccttgatagattgaccttaagtcaatagtaaacatgaagggtatgaatgtaattttacacaggttgcgccctgtgcctataaatagatgaacggtacccccgtactgttcacgctgacttgtattcactcgtgtgtcacgcttggactttttgccttctgtcaagtcgaaggtacaaatgtaattcaatattgtttatgttcattcatgatgatatagaaaagatatattaataatgtcatatgattattcatgtcatttctcatgtttcatatgcttcttctttcattaatatatactacgatgatgaaggtatgtccttcataaccttcgtccaaaaatcattatatcctaagggaaataatgcttcgaaggacgaaggactttatcaattaacattttctgtgttgtcttgttcttaattcaaagcatttgagaacaagtccccaacaaggagtgatgggacaggcttccccatctctctgtttatttatcgttagtttcattccgctgcacttcgaacaatgatgactacttttgcaaaaactccgatgatgatgtaataatttaatactccttaatgtatggttttatgttttattgtatttgctctgtgactcaccatctagtgagattttggtacttgatcctgtcagtggcctcgtcggactagatctgagggattgacgagttattcccatttaagtgtggtctagcctctaaggcgggacgtaggcacttaagttggaataattcgggcagttctgccacagcgggcgcgtatggccgtgcacctggccgactggagaaggtgaagcccgtggaccccatcttaaccgctagtcttgattgacgactagattcgtgaatatg

SEQ ID NO: 176 - DNA, 1278 bp, Arabidopsis thaliana landsberg
attgcacgtaaacggctcttcatcaaagcaaggtttgggcgtgggcatccgtcttacctcgccaacgggagaggttctcgagcaatcattcagattaaacttcaaggctaccaacaacgtggctgaatacgaagcgctcgtagccgggggtaaagatagagaaaatccgagcttttgtgactctcagctcgtcgcaaatcaattcaacggagaatacacggctcgggacgaaagaattgaagcatatctggctcatgtacaaaatctggcgaacatttcgacaaattcgagttaacgaggatccctcgaggagaaaatacatcggccgacgctttagctgctctggcctcaacatctgacccaagcttgagaagagtcattctggtggaattcatcgagaaaccaagtatcgagctcggcaaagaagaacatgtcttcccctacaagttggtgcggattgcgacgacgcttcggatgacagcccagagctgggttgcgactcagaatggatataacccatcaaaagctacatatccgaagggaaattgccctcagacaaatgggaagctcgaaaacttaaagcttagtctgcgcgcttcgttctggtcgaggagaaactctacaagtggctcgcaattcatatcaacacgctttcaaggcttctgcgacaaatggggaatccgactcagcaaggaaacggtcaagccgaggctgcaaacaatacaatcctcgacggtcagtagtaacgcttgccgccaagaagggctcgtggtctgacgagctcgaaggtgttttatggtcgcatttgacgaccccccgtcaagccaccggagaaaccctatttgccttagtctacggaacagaatatgtaattccagccgaaatgacggtaccaacgtgcgcgaaccctatttcccgagcacgaaacagataatactcagaggctactcgacgaacttgatctgatagatgaacgaagagattcagtgttggtgcgaatagagaattatcagaatgagacggctcggtattacaactcaaacgtctaacagcaaagatttcacgaaggggaccgagttctccgaaaagtctttcaaaacactgccgaaccgaatgctgggaagctcggggcgaattgggaaggaccatacctgatctcgaaggtagtccgacctggggtatatgaacttgccgacctaagcggcaaaaccgttccaagatcttggaatgcaatgcacctaaggagatactacaactaaatctgaggtaactaaactt

SEQ ID NO: 177 - DNA, 625 bp, Arabidopsis thaliana landsberg
tgtgcgtgtgctttgtaagcttgatgcctgaatcacctttgctttcgctcttattttgaggtaattatggaaccatttaacttctttatcattaaaataagtactgtatttactattactatgcaatgggttcatgcaggatttattcgtatttgttatgtatacagtgcatataatttcttttgttttttcatcaagcatattatacttctatatatagaaatactcaaaagaaccttactcataaattatctcaaaattatcatctaaaaggttatattacttttcagaactgagaagataaaagatctaaagacccaagcaggaatgataaaagtgatgggaactctaatatgtataagtggagctttgttcttaacattttacaaaggccctcatatatcaaactctcactctcacctagaggctcttcctcacaacaacagcgatcacaacaccaagaattggcttcttggatgtctctacttagtcataggaatcgggttgctatctctatggatattgtttcaagggactttaagcatcaagtatccttgcaaattcttaagcacttgtctcatgtcaattttcgcagctattcaatgtgctctattgagtctttaca

SEQ ID NO: 178 - DNA, 1286 bp, Arabidopsis thaliana landsberg
tcgaatgagtaatctttgcttttaaactggttatcgaacttccaaagctgttttaaatattaaaaattagataattacacaagttaaataataagtatcaaagcaaatgcaaaaatacaaatctaaaactcatttgaaatttctattcagtatgtgagaatcttttaaatttcaggacaacggcatgaacatcttttccaaattcgacaaacaaataacttaactatagaacacaaagaagttaattgtatagaaaattcctctcacagttagaatagtctttaaaaaaaaaaattaaacaagcaattgcaaaagaagatttgttgctcaaaatcgtttttttttaaatgggttaggccgaaaagataaaggccacattatcaaaaaatcaatcacacagttcttcaattgtggcttaagtgatgaaaatcgagtcctaagagtcacaccaaattaccaaatattaaacttgagtctaggtccaaagcaaattataattaatgtttgtttcgccttgaagatcaattaccatttacccatttgttctaactccaatttcgcctcttgtaattggttcatacagctaagtgcatcatcagtcaaggcaatatttgcatttaaagatctttttttgatgcaaattactgcaccctaatttacggctaataaatatataaacattttctatttattagcgtcattgtactatctatggaccatataccaaaaccaaggatggtgcaagcaattagagcaagccaagtagagaaattaatcaaggttggcggcaaaattgggaattggaaaataaattcatccaaaataagaaatttggattttacaattttgtttggtttgatgatagatttttaaggaaaaaaactaacaattatgtaggaatgggaatcgattgatatattttatgtgtgtctatattgcacttttacttttaaaaattgggcaactttaatttagtttcttttcttttatatgcattaataaatatacatatatatacagtatatatttttgaacaaataataaatatttgtataataatttttttttcttaaaaaaagactttacaatatagactcacttgtgtgtgaagtatacaatattagggttttctctctcacagacatcgacaagaaagaagttccattggcgtctagctaggtatcccacatgtatgggtttcttgtgggatattatacccattgataagtatctgtcaactggtccagaaaccgaacgtcgtcagcagagaatcgaaactaggatct

SEQ ID NO: 179 - DNA, 553 bp, Arabidopsis thaliana landsberg
gcacgaaattattttatccaaactcttgcacgaattcatattaccctaaataaaagttttgtcttgatttatgtaaaatccagattttgcacaaaatagttttattctgattggttttacaatattgcattaaaattgtattagtatataatacttgattattttatgaaataaattgattgataaataacttaatttaaaggtataatcacttatagaaattttcatgaatgactagtttaatgtatcttaagaagatatcatatttttgatggtcaaaattttttttaagaacttaaattatcaccagaagttgagaaaaaaaaaaaaaataatctaacgatgaaaaaatctagtatatcaagtagtataaaatcttattaaaagactctaggagagcatatacattgttttctatgggaatacaaaattaaaatcatcgatgcggtatagttctccaaatctcaaagttaatatgatgagatataaatacattatgattctagagtggaattcaatacgagatggatgaactcgaagtttcatcatttcg

SEQ ID NO: 180 - DNA, 4079 bp, Arabidopsis thaliana landsberg
gttctcgaagcttcttggtctccccgaatagtttccactccgtttggagtttggaatttgaggcactaatgatacgtagatgggaccgctttcatctggtagatccacggagttccgaggatgatgttataagctgctggtttatcaaagatgacaaaatctacaatcttcgacatctttcccgccaaaactggtagcttaattgttccgagagacattgttgactcaattgtaaaagctactaaaggggatggcggtcctactacatcggccctgcttatccccatcctttccaaagtgcttagaaagattagatcaaccgaactaccgatatcgacgaggattcttgaaacctcgaagttagctacatccagcgtaattactagagcatcatcgtgaggtcttttgaggtgctgcgtttccttttcctcgaatgatattgaagcgccttgaaaatctaccttttcacttaaacttgacattagaggaacattccgtctatgctttttgattgcgctgatggaatcgcggcaaagcttggaacctccaagaattacattgattttaccttttgagcttcttggctgttcttagctagccggctttggtctcttagagttttgagcttcagaattatcccttgattcatggaattgccaaacaaaatcctccatgttgacttttgaaagacctcagcttgcccatagttctgcaatatgccttatgagtacactgcagtctttggtcaaatgcccggtgactctatgtatatcgcaatacaagctttcatctcgaacccaagtatttgaccttccttttccctgaaactgctttcgaacgttattgttgaatggttgtgaaccaaacttccttggtcctcggttctcccgaggttcgaacttcttgggtggaaaagtgactgctggttttgcttgcttatttctcttcgcaaacttttccttttcatcttcgacttccatccaattgttcgctcggaataacgcatcttgaatagtatcaggtttgtgtagtgtcaaatcttctttgaatctcaaatcatgccataatcttttttcgcaaagccgatagagccgactgttgtgagatccttgggagcttcgagagtacgttcttaaacttggtgatgaaagcccgaagtgtttcgttcggcccttgagataaattctagaggtcggtatccgaaatgttttcatccataagaattaagtattgtttactgctgatagctcgttgaagttgctgatcgatcctggttctaactgagtgaaccacatcagggcttgtccacacaggttctcaaagaaaagcttgcagtatcctgcatcttcatcagcttcgttcagatcaactcgcccaacaacgattagaaaagttgcgagatatcctttcggatcttccaaaccgttgtacggttcaaagttaagttttcgagaatctctgtttctcaagctagcaatttgcagggtgaaaggtgttcgcctagtttcttcgatgacccggttgatatcaggttcctagcttgtagcttggtggaatttcaatctcatatctttcagttcgcggcttacttctctcatggtttcgaactggttgaagttttcttgctcgtgttgattaacgaactggttgttgtcttcgggatgcgtttctctatcttccagttggatgtccgcgtttgtaccatccgaggtcgtttgatcacttgctgcatttcgcggaagggaatttggggaaccgaagatagttcttcgaacttcagaggacttgcctgcattcaaagaacggacacgagactgaatagtactaacattttggctgagtgatacatgggttgtttgcagtgtttcgacggtttttttcacattcgaaaacttctgcgccatatcggccatagtttgttgcatggtcttgagggtttcggctaatgaagccttggtagcatcttctccagacattacggctcacttcggaaatgtaatatatagaaaaaatctgacgactcaagaatcctccgtccccacagacggcgccaaaatatggatgtcggattcacacactcaagtatttatttattagtgagaaggattattcttgaggacaaatgtactagaaaatagattgatgactatcgagaaaactatgagctttgtaggaaaatgcctatagtgtgtttgcccaaaaatgcgtgtccctttacatggtctttgacccataatttatacccaaagaatacattaaattcccatttacacaaaattattctatcttaaatatatccgtttcagtctttgaattatctattcaaacgtcgaatttgaattgactccgaacttcttgggcttcaactgtcagcccattcgacacttcactccgggtaactttgaccttgattccgtatccacttcgcaggtcaacacctcgcttgtactatcaactcggggtatcctatgggcttctcttcttttgggcctctcctgcttatgtggcaatctttgaccggtcccaagcccatggtgcgggatccgacactaacaccagtgatctttcgctccacaacggtaacagatattcgcatacggtattttcacttgtttgttaccatctttgttttcccacttcttgtgagagtttgagttcttaaagtgaactccactgcctcgtcctccagtgtatccacgcccacgaccacgaccgcgaccacgaccacgaccatgaccacggccacaaccatggttgtaaccactttcttgaccataggatgtcacattcgcttcagggaatggaggagaacctgatgggcgtagtccatggtttttcaaaagcaactcattgtttttctcagctacaaagagacaagaaataatttgggaatactttacgaatctcttttcacggtactgtgtctggaggacaatattattagcatgaaaagtagagaatgttttctccaacttatctgcatccgtgattttctctccacataactccaatttggatgttattttgaacaaagctgagttgtactcacttacagacttatagtcctggagtctcagatgagtccaatcatatcgggccttaagtaaggtcactgtcttttgatgatcatacctatcctttagatcgttccaaaggatctgtggatctttcacattgaggtactcattcttgagatcctcgtggagatggtgtcgcaaaaaaatcatagcttttgatttttctctgcttggagtttgattaccatctttaatagtatcaaggagatcctttgaatctagatgaatttcagcatctagtgcccatgccaagtagttatctcccgtgatatcaagagctccaaattcaaggctcatgagttttgacatgattcactattagcttaggcagctcgtgctgataacgtgttagaaaagaagaagaagaagaggaagatttgtgtgtattattccattgaatgagaggtcctttatatagaagtacaaggttagggtttcacaaagcatctacaggataattctagaatattctattctagaaagatctagaagatgtgccttataatgggcatccatctaatattcataacaacaatcagttttttgataaaaaggaaatttagattaacaaaacgcgtcaatttttttatttaattttaattaactaaagtcagataacaaatcagaccgttccacattattttgcaacattatttatactagatgaattcccacgctacgcgtgggtttgttttaaaaattgttaataaaaatatgttaattgtttttatcgctaatttatgtttatttttttgtttattattgtataactaatagaattaaactcataatagtatttatgtttcgacagttgttccaaataccaccacctaagtgataatttaagtgagtgtatattcaatgttatgtatatcgatattgtgaacttcaattgtatctaatgttttcattttttaatttccgtataggttatacatgatgatggttttgaatcctatttatggtacttgtcccttggtaaacatttactgatgttgttta

SEQ ID NO: 181 - DNA, 3675 bp, Arabidopsis thaliana landsberg
  unsure (1)..(3675): unsure at all n locations
cataccttggtgttatcagtttttccatcggatttagaaccatgacgttgcacattgaacatttttggtcggatagtaggacgacttgcaacaacaatgaacaagaaagacacacacaaaactttaaacgcaaaaacaacgcttgtcatcttattcttttgtttaggtatatggaatgtttatcaatacttgtttataaagagatgatgagaagtgttagcccactttatctgcttatatagagttagcatctctccatcgatgaacttgattattgttactagttaacaactgaaattgggatgctttttattggcaatgattttgattggttaatatcctgtacatttcaaaagtaggaattaaactgaaaattttgtttctaatttatattataaatataaaatgacaactaatctaaaacaaaatctaatttgaaatggaaggagtaataataactaactattttctttatttaattgataggttaataaacaggttgtgttattgggtcagtttatgcatggattctcgataggttgggttctgttaaaatacccatctccgtttgaaagaattgaatttcaaaattaataatattaaatagtaacattgtgttatttgattgaggtttaaaatgtaacgttgacctcgtttctctggttgggcatgagaaccaataaccggagatgaccttcttggcataacttgaccgggtttctatgctgtgtgaggattgcattactgtttcctaacaaaacatgagctattatgtaactctctcctttctcatttgcaaattgccattccctcactgtcaagttgaaatagtctttccgtgtcgataccgttgctttcacctccacgtactctttattaccacctcggttttcgatcattaggtcgtaaggtaaaccggtttcgctctggtcgttaacccatttaaccagtgcctcattgccgtattttgcaacaaagtatctgtaagcgatttcttcaccttttctaccggtctgttgcgcttgtgcagcccaaggtgtgcctgtatgaagctggtctctatcgctgaaattagctgtgaaggaattgttccattcatgaggaagatttggattgagatgcatagcagcctgattccctgaggttgagccactaatcatatgcatagaatgcaacgggtttggctcactagctcgtgaacttgtgcctgcacaattatcatatccagaaaccaagttggtattggtcatctcaatcggtattttttcttcaagagcctctgttacatcctctttgctgctactagtgtccagctcttgtttagaatcatcagtgttggtcttgctagaaccatgtcttgttttagaacttgaaggtaaccagctcaagcttattccagctttcttcttcgctttaacagcagatttgagggaccagatctcttcaccatcaggaacctgatgaactttctgactgttcagaatgaatgattccatttgctcctcgctcaacccagattctgccattgttttgatcaagtgaaggaaatttgccaaatgcagatcaggcactccgttgaaaaacaaacgagannnnnnnnnnnnnnnnnnnnnnnnnnnnnnnnttggtgttgtgtacagagctttatcctgaagacaacaagaataaacatataatatcagtaaaaccacatttttacaaaaccattgtcccagtcaagaggatatggcaaaagtctacttgcatataaacagagatgagtttcaaatagcctcaaagcacaatgtcacagcccatacaatcccaaaatatttaggttaaattgtcgcaagaacagaacgaaagaagacatacctgcagaagagaactgcatttgaactcctttttagagctaatgccatattgcggtatgacattcctataggataacttatcaccaacaaagacttgtagacgtttgacttgactatggactgtcttttttgtttgggtatacttctcatgatgaagagtaaagatataccgctgtgcataaggcagagcccagttaacaagtgacactgttacagtattatcttgcaaaccagcatatttcgcttcacgttttaccacctgaaaaaaaatacataaacaccacagagtgaattggaatcgaggccatggaaactagtgttatagtagaaacggtagtgttatagtagaaacggagacacatatatcagttctaccctgtatataagctacaagatgatggttctgcggatggttttagagttagtgcatcaacacagttcaagaaaggcctactcttgtccatcagaattctaatgtccataagaggcactttgcatgtataactaagtggcttgcatttcaaaatatttttgtgaaggagaagattagttacctcagaaatacttggaatgcccaaactgtgcatgagcccagacacttttgtttgaagcacttcttgcccttcgtcatcattttccccaaagctaataaactcaattttatccttgtttttaaatctcttctttaacttctcattatcacaccaacatacgagaccaaacgaggagtgcaaggaaacccacttatcattttcagtagggagtacagtgtactcgagttctgaaagtctctctttaaaatgaacaacatcttcagaagatttgccagagttcaagtcatcactccacttcaggaaaattttgaagacctagacataaattaaacactttagcaaagaagtgaatagagtgaagataaacaggacaagactgataagttaagtaaatcacttacagccttggcggcagatgagggtgacacattatgtgcaaactgccctagaattttaaggtactcttgaaacgaaggcgtctcaggtactccacacccattcacaaaaaagtcatgtagacctggatagatattgcccaatgttttcctacgcaatggttccacaacactgctgatctgcgaactgatctcttttatctcatctaaaacgccagcagaatcattccagtaaacatcatcaagtgacaagaatattcccgatatcatatcattctgcctacttgcaattccatgtggtacaaacacagacggaagagtatgaagcttttcagtaattttctgttttgaatcagccatttcattccacaaatatttgtaaaatctggtaatctgagagatgctgcaaaattaaagacaaatttgtttgctgttagaaaatacatcagcagagactatcatcatctagggtttttggagccacaaaaaggggtggaaaataaacacttgactagaagaagcatgttgtaacaatatagaaagaaaaacagctcatctcaaaataaattacatgggcaatttatctgaagtctatggactctattcgtccttacacataaaaggcctttagaaaaacgtttagaactcagttattatgttatcagacctaatatttagtgctaaatagaaacaaatcaccagcagaatatcatttatcagcagtaaatcatccaatgcacgacagtgaacagtagtttaagagcctttatattcataataatgtggaaagaaaaatgtaaaaaaaaaaatgaatgtaattaaattagtaaatcatgtagaaaaaatagatgctgtgcttaaatacataccttg

SEQ ID NO: 182 - DNA, 3163 bp, Arabidopsis thaliana landsberg
aggaccctggagatgattactactctccacgacaagagtcttgcaagtgtttgattcttcctaggtcaactctgattcgttttaggcagtggttgagctttgtgtatctgatgtctagcaaatcatatgtccggtgattatcgttcttcaaatgttttaatttcgagaggccttgtgcagtagcacagtttgcataccctcagaacataaaaccatggcattagctggtctaatgggaaaagtctaggtgaaatggtctcattgacattcacaatataacttccttcacttttgactgtatcttccaatgcttagcttcttgaatttttctgatttttttctcacaattgatttgcggtgctgcaggttttgaacttgacaaaatggaattagcggatcgagcagtcgggcttctactatcttcaatcagcttgtccatattcacgtactatactttttgggtcatcatcctggtaagtgacaacatctcccccaagttccttaaaaagacattgtcagtttgatgtaccaatgtcatctaatgtttaggatattactaggaaaaagctgacataatagaattttcgttttgtacagccatttgtagatagtgatcacttcatccacaagtacttcttaccccaagactatgccattctcgtacctgtctttgccggcatagctcttctctctctcatttccgtattcatcggcatggtcatgctcaaatccaaaaagaagaaggcttaatttcattcaactcttgccgtaagacaaagttctgtccttgtttcttaagttgtccctacattgttatggtctttcagaggtttagtccggaaactttaaatgggtgtcgttgaaccgtacgagactatatcttattgactctaaatacatagacatgttaagctcaaataaattcttgagagaatatatactaatgatgatggattttaggctccctgacaattcaactaaaaaactatttacagaatatacgaatgatttagatgaatgatgcatttcacgaatatatatatttgtttcttattttgtcttttgtgttttctccatatggcagttactgatctattttcttttctggtttcgtcttttttagagagaaaatttaataaaattgactgataggaattcagtttgttagctatataagcaccttaaatcataattagtgcttttgaaagttgagaaacagatatattatgaaaaatatcagtagtagtagtcatcataggctaagagctggcaaagcattagagacacaagtgagttttctctttgcaattattctatgtctgtaatgaattttggttttgacttatcttatgaaatttaatcatagttttagctttttctaatctcattagcactacttagtgcttatggataaatcatttcaagtcatcttcgtacaattaataaaatcaatagcccattcacttgtactgtactagagaccaaaacttaatacatacaaccaaaaatcaatttccttttttattttattttccaacacgctttgaattctgttctaccacatttgtatagtcaattctttatttcaacaaaaaagctgtcattaactatttgctaaaataggtttcaaaattttggaaggtgtagattcgtttttttggaccagactaataaatgcatgttttctttttgaagtaatgtaccgtcttcttctgtaatacggcaataaaaaaagtgaagagcctaaaacattctcttctgaaccttcattataaaaatatatacgaaacctctcaagttttcaggagattcactttggttccggatccgaattacggggacggatcttatcgtgacggcgccggaatatacggatacgaaatcagctagtcacttgtggtggttgtgaagttacgaactaatcggaattctgttaaaaatgggttgcgttagctcgaagcagacggtctctgtgacgcctgcgatcgatcactcaggtatattcaaggataatgaaaatgagtgttctggatcgggtcgatagtggtgcaggatccgcctcgggcgacgttgaagaagctcgtgtcgtggaggagtaggagcggcaagaggaggagtcagaagagcggtagcgagttagggagtgagtcaggacgtgctagtgactcgcttagttttcgactcggtaatgttagtagataccttgaagctgagcaagtcgctgctggttggcctgcgtggttgagcaacgttgctggtgaagctatccatggttgggtcccacttcgatccgatgcgttcgaaaaactcgaaaaggttcgaaatttgacaattctttatgtgttatgtgaatgttgtttagaagaagaatttgtgaaatttagtttagatttggtttctgtagattggacaaggtacttatagcaatgtgtttcgtgcggtggagactgaaacggggaggattgtggcattgaagaaggtgaggtttgataattttgagccggagagtgttaagtttatggcaagagagattttgatacttagaagacttaatcatcccaacattatcaaactggaaggtttgattacttcaaaactatcctgcaacattcaacttgtgttcgagtatatggagcatgatcttactggtcttctttcttcccctgacatcaaatttacgacgccacaggttggtttgattttatagtggaagtatcattgttcataatgttggggtgttttgttatgtgtttggttgtgtgatcatttgtttttggctcctgcagattaagtgttacatgaagcaattgttgtctgggcttgatcattgtcattcacgaggcgtgatgcatcgggacataaagggttcaaatcttttgttgagtaatgaagggatactaaaggtggctgattttgggttagcaaacttcagtaatagttctgagacacaagaagaaacctcttaccagtcgagttgtgactctgtggtatcgtccaccagaacttttgctcggggcaacggactatggagcatctgttgattcgtggagtgttggttgcgttatcgctgagctgctcattggaaaacccattctcgcgtggaagaactgaagttagcctattaacagtctacactgtcttctattatttatgatatatgacc

SEQ ID NO: 183 - DNA, 1792 bp, Arabidopsis thaliana landsberg
  unsure (1)..(1792): unsure at all n locations
aggtggacccagaaggggcagagaaagcgatggagcaagcgatgaaagaagggatagtaggagaagttggagtgttgaagaagaacaaggagatggctgaggactcaaagccggaggaaagttcaggaggagtgaaagagttcaacgannnnnnnnnnnnnnnnnnnnnnnnnnaagttggagtgttggaatgaaaaagtcgttaccttgtacagtgtcattttgtgtgagagtatgatacaaaacttgttattagttaaaatttggtgcaagggtctctctctctttggcatgtatctttttctcttttatcattaggcttctgttgttgtcagctagaggaagttgtctgtgcttatttactttgcctaccacgaagttgtccgttttaaagtatatttggactcttttgagtttagtttcgcttgacaaacatcaaatcatatagtaaacctaaagggtgacaaagtcaataaatgaatttgaagctattcacttcttttgaactaatataaaatattaagacagacgaaaaatagaagattatgggattgaagcaaagaagcaaaaaagcaaacattggctttcacctctcttcctctgatacacaaacgtcagtgcaaccatattgctcgcaaaatgagagagagataagataaatcacataatgaaacaacaaatatgttatatccctaacttgactaaacccctaaactctcttcatcagatttgaaaacagtcactaacccctacttttataccattttcttcctcccctgctttaccttctggatatcactgcgaatcatgctggtatcaaactcgtcgtccttctttctcatctcaatgatcttcctgtgtgagtttgaatgcacagatgggatgaaggtcgggcttgaggctggccggtattctggaactaggcgaccagatttgaaccggactccgcaagcgttgcagagggtcttgggtccactgggtccttgcctccactgtggggtcgtgattgtctcacaatgagtgcatatccggactatcccatccgacttacttgactccaaagtggaagactcggtgtgggtgatcagatgaatcttgcgcttcttcttggcatgttgctcagaagaatagtaaccctcggttactgattcacccggagttgactttctgggttcaaaggggaaaaggtagctaagtctcactgttgtggggcgtctgcgcttgcttctcatgcctttcacagggaaagccaatctctgagatccggagttttgggtggagagagaaccataactgttctcgagaactgacactggagttagagactgaaatagatatgaaactttgatatcaggaggagctgaagattggtggggagtgctattaatgccggacaaggcttcagaagaacaggactgcttctgcacccacagaaccaaagaaagcagatggattaaaattcaggaatcaggaacacaatcaatgcacctctacatgaatgatgctaataagcaagacaaattcagtttaaatagatgatatactctatctaatagggtaaaactctatcaagtaagtgataagaaaacaagaactgaccaaagcaggaatcatgttgttgggaatccgcacacgagcggcgcccttgggacaagaggtgaggtcagaaggcaaagcagggaacatatccaagggaggaggctcaaggtcttgaaacctggcgacccaatctccctcaccattggtggaatcgatgtcttcaagtgggcaatcaaggtgattggtgagacca

SEQ ID NO: 184 - DNA, 1812 bp, Arabidopsis thaliana landsberg
  unsure (1)..(1812): unsure at all n locations
aatcttgaccaaccaagtcatgtgagatcacgaaccttgattcaaaaatgtttgaagccaaagttgattaaacatgcatgactgatttattcccattgctactcagatgttgtatttacagacttccagatgcacatgaacacataaccaggcctcctcccggtgtcatcttccctaagaaggtaagtgacaccactttgtcttgtctgtgactggtcacctctatggaattttaatggtttagctagtcattgctcaagaagaacttattctgagtgacctctatggataattcgtcttggtagcttaagttggttggtttctcttgtctgttcagactgtggacataggggacttgaaacccccacctgctctgtggcatgaagacaatggaaggagaccgatgcataataatcatgggatgcataataatcacgggatgcataataatcacgggatgcataataatcaggggaggtaataaaatcatcaaaccaaggaaaaatgagtgtttgaattgctaattgatacgagactatggttaggctgattaggccacggttaggacggcctaattaattagctctggcgctatgagtttctttcaatcatgggttttggaagtcttacttttagcattaggtttgatgttactttttacacaatgtattgtggcctaattctctaagagagagttgggttgaagggaagcttttgcttaaatcattcttatcttttacgtttatataaggttcatatcatcttcttctgtttttttccgtaattccttatgtcagctaaagcgggtgttaaaagaccccgaacatcgtatgacgaacagcagcctacagtccatgttacttataagcacttaacgaggttagaaaaaagagtcatgactcaactacatgtaattttaagttgcatgaaatgctcaagcatttctgttattatgtgattcctagctttaccacattgttttaattgttagtgtactgcatctttcagagctagtaagcagaagctggaaagtttattacagcaatggtcagaatggtaggcagaacaaaattccttgtccgaggtatctatgatttgaactcttctgtagtgctttatatagccaatacaataaaccttgtggtttgcaaaagtgaatcaatttcaagttgtgattgaaagaacaattgtagacgaaatttcgcaattctgcaagaaatgataaggacacttgtttgctgactatttcatgttattaactaagctagaaacttttcgtttggaatatgatcaggatcaagaacaagtactagaagctggtgatgagacatactttcctgctttgcgtgtgggattgcagaagacatcatctgtagtgagtgaaactgttctttcaagcatatacaatcttgaaattttcaggtttttcgtaatcctttctgatagatacgttcttacttgtgcagtcattttggtttgactaccaaactggtcacagttcttcgaagaagtctgttccagtggaaagtagcactactcctctttataaccgtggatttacaattggtttagattcaggttcaaataacgtggaagggtaaacaaatctagatttgtagattctttttgttgcagtttctagttttgtctttcaatctgatttcgttttaccttgtgacagtgaatgtgttattgatactttattatctgccttgtgcattcttttgaatttttgttgtccttcnttgttccaaagaagtggtgattatgagtgatcctccacgatgcttcaactgtggcgcatgcagtcat

SEQ ID NO: 185 - DNA, 1942 bp, Arabidopsis thaliana landsberg
  unsure (1)..(1942): unsure at all n locations
tcaacttcattaaagccacaaagcaaaaatttcttgatttatccatcttcctatacacctctcctcaccacgcagttacctctgtctcatactttaacagctcaatagttcaagcatcaccaaattaatttcgcagttatggtatcaaattgtgagtttgctaaattggcgttaaaatgcaattctagtttaggcataaacttgtgattttctttattttgactgaaagtgatagttctttataaaacatgacttgttttaaactattattaactaacggtttagtaacaatcagggcattttagtattttgaatttttttttatgcattttatatgatacatcaagagttgcaccaatttctacatcagaaactcacataatttgaaaaagcagaaagcataacatttggacctagcatctggataaacaagcaaataaatccacaaccagtcattgaggttcgaggtttgtagttgggaaacttgcactatactcaaaagagttgtttccataaagatctccagattctttgcttgcttcatcatacgttcttgaactcgcatatgattctacgttagggtttaatcctgcatactgcattatgttctcaatctctttcacaacctcattcattgatggcctcttcactccttctggatctacgcatcttagagccacatctacatacttttcaaatcccttaagattcctgttggacgttgcgctgatcgtagtgtccagaaaatcttgtaggtcatacaagttcttcgatttattcatcttcatcttcatctctttcacaacatattttccattctctataggaatcttaccagtcagtagctcaagcatcataaccccaaacccatatacatcgctcttctctgtcaattgattcgtcatgtagtactcaggatccaagtagccctaattcaaaagatattgagagtttaaaatatatttgataaagaaagaaaagaggatgattattttcattctctactcaccatagttcccttcacttgtgccgttacattagctttctcagcatcttccacaagttgagataagccaaaatcagcaacttttgcagttaaactttcatcaagtaatacattacttgatttaacgtctctgtgtataattggaggatctgcaagctcatgaagataagccaaacccttccctgaaccaagtgctattctaagccttcttgtccaatcaagtctaatccctcttttccctgcatttttgtcctgtttagtacaaaataattttttcaaaggaagggatatatagatttgatattacctgatagactatctctaagagaaccatttggaatatactcgtagacgagcatctgttctcctcgatcaaagcaaaagcctaagagtttgacaacatttttatgatggacccttgaaagaagctctatctcagttttaaactccaacgctccttgcaaagatcctggttgagctcttttaattgctatgagttgaccagtaggaagaatccctttatatacttggccataacctccaccaccaacatcatttgccactgaaaagttgtttgcacatttcctcatctcttcaaaagtaaatgcttttgttcccataagctgtggtgcatcgacactgttctgattcgcatcccacttggctgtaacatacaaaaaaaaagctattagtattttgtcagtcttccctgatagtaaaacgtccttaccaaaaggattaatttgatcatttgctttctctgctcttctcttttgcttaagagcatagatcccagctatcattagaattaacagaaaaacagtagaaccaactacagctccaatgatgtgtgacgagtttgaacctcctacaaaataagcagagcanaatgagtcatacagaacagaactaagattagattttgtgtatgatcgg

SEQ ID NO: 186 - DNA, 829 bp, Arabidopsis thaliana landsberg
tgaagtcggagccctgccatccttctgcgcaagcagaagaccatttgttctttgcatgtatatacacatggagatcaagagcgagagagagatgatgttcatacaatgttgccaaggacgtcggtaataatgagatccatgatgaaatttgtgaggaagttaatcggttattgctcacagctctgttacaaaacaatcacatcatggttttagattgcttgagagtgaaggaattgagcaacaaattataggaagaataatatagagaaacttacaatgtggagagactggtcaagctggttaaacttggaagactaccggtaaatttgttgtcggacaagtacctaaaatggattcaacttaagaactctctcatctctttttatttattttctatgagaacacagaacaaatcttttagttgctcacttacagttcttgaagatttgtgagattattaagacttggaggaatttctccacttagtctattcctatcaaggcgtctgtcacaaagaaaacaacatatatgaagaagttaactaggataaaaaatgtttttgaaaaatctctttctactacttacaacaccgtcaatgttttaacaaggctgaggctttgtgggatttcaccggttagtaggtttccatcgaatagcctgtcgataaaacaacaaaaaatgcaatcactcatttagttacaaattgcaactttgaaatgtactatgaaacttacaaatgttttaaagtcatgttggcactgaatagcttttcagggatatcaccagaaagcttgttttttccaaaatgactgcatgagaaaatgaaaca

SEQ ID NO: 187 - DNA, 1075 bp, Arabidopsis thaliana landsberg
gcttttctgctgggctttaaacatgccacctcccccagctcccatcgaagaggaaagacagcctttatacgtgagaggcggctgcgtcaaatcctcccgttagtgctggcccttccggtggcgaactggtttgaagtttggatccgtattgagcttatgacaggttacctccggggcgattcctgtcatatccttcgtagaccaagcaaaagatgacgacctcgatttcagaaaggagatgatcagagacggaattggaaaccagaggtgacatagtctgaagtaggcttcatacatacagacgtaccctcgaggggaattccatggacgctcattttctccgggaatcatgtaagtgagcgggcaatctccggagccacataaggcaaatacttccgcgactgactcggttgtataaatagggggggtcaaagtccccaaggatcatctttaaccgaatacaagagactacaattatagagcaaaccccagctttttattcaagcaacttcgttctctcccttcgattatttgtgagctaatagaggagtgaatttgtcaaatttttgtttaaatgaaacgattaaacacataacacaccaaaatccgcaaatggatatatatatatatcatttcctgaaaatttccggcgaagcgaagcagagctcagatgggtaaatcatgaagtcgaaagacgaaactaaacgaatcacaaaaaatttctcgatctatcaataataccaccaaaaagacgcaatcaacgagagtgaaaaacatacggatttgtaaacggaaagaggcgcggagacgacgtcgcgtcggcgaatcgatcggaaaagagccgtggcagccatggactgaatcagatgagaattctctgctaatgatcttcctgcgtaaattcgagagaagtaagccaacaaaagaaatgggatctcgattaaatcagccctaattatttcataaaaatgaaaataaattagagggtaattgcgtaaattacaaattccccaacgaacgttatccgcacgtttcacaatgagattattgaaacctctggctcctttagcgggtc

SEQ ID NO: 188 - DNA, 3653 bp, Arabidopsis thaliana landsberg
aatactcggaacgcttctagacttttctggatttgcctcatttctagaagctctggagatttcttcttcatcaataaatagaatcagcaaactcaccagctttcatcataaaatcgaaattcaattcgtcggaaaattgttcagatttcgaaatcaaccgagaaaatgtcgctgattccaagcttcttcggcaacaacaggcgaatcaacaacaacatattcgatccattctcactcgacgtatgggatccattcaaggaacttcaattcccgtcatcgtcttcgtcggcgatagcaaacgcacgtgtggattggaaagagacggcggaggcgcacgtgttcaaggcggatttaccggggatgaagaaagaagaggttaaagtagagattgaggatgatagtgtgcttaagatcagcggagagagacacgttgagaaagaggagaagcaggacacgtggcatcgtgtagagagatcgagtgggggattctcgaggaagtttaggttaccggagaatgtgaagatggatcaagttaaagcttcaatggagaatggtgttttgactgtgactgtgcctaaagtggagactaataagaagaaggctcaagttaagtctattgatatctctggctaagccaatttagcttgatttgagttctctctgggtcttgactttgtgtgtgtgtgtctctgatgattatggttcttcgtttgattgtagttttaaactaataatcaatggaagctagtaacttgtgtgacaagtaaatgtatggtggagaaatgtgtgtatttggattataatagaaatacctattttcatctagaagctcaggatctagttattgataattagagctcgaaactgagatggatcttattgtttggatagttgttttaactattcaggatcttattgtttggatagttaactatttataactagagatcgaaattgagatggatcatgaatttcattgaaaattaaggctaaactgtttggctagttgtttaactcttaagcatgtatctggagatatctttattcattgtttgattttgacattgtggttcatcttgtttgatggagactctttgtaggaaatcgctttggccaacaccaatgtgaactagtctggccaatttagttaattgattgatcatcatattgtttttggcatttttcagaacgtgtaataacagtgaaggaattttgaggtacctgctcaactgaatcagattcaggagggttttaggagaggtaatatggaagtagcaatgcttaagaaagataaagctagagctcttgatgatctgctgaaaatcgactaaggaagccaatgacaaactcagacaggaaaaaactgtaagaagaagaagaaaataagagaaaagcaacaaagctatggaaagcttaactttggatttgcaagtaagcatttttaaagcaagggaagctttggagaaggtcttgttgatatgtcaaccatcgcttgaacattttggagcccaaacgaaaaggtataagttggctgcaaaaaatacaaatgaaaactgtggaaaaattcttgaagactgagataattaaacgcccaaaatgagtttttcaattctaagattatgtgggaacagcgagaacttcatttgtctggaaaatggggaacttggcaaggtgaattcgtctgaccttgaggaaaatgagaagaagaagaagcatgtatgaaaagtaaacttaaggaacttgaggagaagaatgaggattagtaggaaagagttggagaagcagaaactggaagcatataagtcgagccaacgaaggttgctttagaaagcagaaagctcagagcaatggaggttttctcttgaaaaactcgatgagttgtcaaagttatatgaaagcttggtggatagaagtgaagcatttttaaagcaagggaagcattgcaggtggtcttgttgatatgtcaaccatagcttgaacattgtggagcccaaactatacaagtgaaaagtaaggaaaaattcttgaagactgagataagtaaacacccaaaatgagtttgtccattctaagactgtgtagggacagcgagaacttcatttgcgcggaaaagtcgggaacttggcaaggtaaatgagaataaactgaaggaacttgaggagaagaatgaggatctgtagaaaagagttagagaagcagaaactggaagcatgaaatttaaaggaagcttgttggtcaacgaagtcaagccaaagaacattgctttagaaaactcagagcaatgtaggtttgttctcttgaaaaaatcgatgagtcgtcctcaaaggtaaatgaaaacttggagtataaactgcagactgaagaagaccgagagcttaattgacaaagaaaccaacctatagagcattactaaagaagctgagaagagctcaggaaaatgaaatttgctggctgaaggaatgaattagacattggttaatacacaaaatgcagagcactaatcaaagattagttgagaaaatagccaaacgcagagtttaagaggaagtcaatggagtcttcttatcataacaacattgaggagttgtcactaaaacttcttattccgggtatttgaatggcttcttcctccgcaacttctcactttccagaacacaaagacttataaacaaaccatccttcacgtatgtgttgaattgaaatgtgaatgtgacttcatcaacacaatgacttcaaaacccaacgacggtcttcctttcttttctcaccaataaaatgtagaaaagaaacaaagtacacaagaaagacttttcatttaacgatatctccactagtagtagctataactaaatggggtcatcgttattgactttgaataagaaatgttcaaacacttcaattattacataatatctttgcaataaaataacaaacgttaaagagccgtcgcattattagcacaaaaaatatcttttgtaaataaaaaaacaacgtaaaagagccgtcacatttgaataataaaacccatcttgcacataaaaaacacgactttttattatttttgattatttcaacaaagtatgaatagtcaacataaagaaaagtccgccttgatgttccttcctcactccctatttatccattttctaatcccaccctcttctcttcattcatcatcttcctcctctctctcttctctgtatcacccaactaaatcctcacgggattagatccaaagtctcaaactttgatccaaaaacacaaactttgttcaaaagacataaactttgagccaaagtcacaagctttcttggtgaacgatggattacaatccaaatcttcctcctttaggaggaggtggtgttagtatgagaagaagcataagtcgaagtgtaagcagagcaagtaggaacattgaagatatcttctcatctggttcaagaagaacacaatcagtcaacgacgatgaagaagctcttaaatgggctgccattgagaagctaccaacttacagtcgtctccgaaccactctcatgaaacgctgtaatcgaagacgatgtttacggtaaccagctcatgaacaaggaggttgaagtaaccaaacttgatggtgaagatcgtcagaagtttattggcatggctttcaaagtagc

SEQ ID NO: 189 - DNA, 3175 bp, Arabidopsis thaliana landsberg
  unsure (1)..(3175): unsure at all n locations
gaatccgcaccaaggctattagcgccatgaaccgatgcgcaagctgcttctcctgcagccattagtccaggaactacagcatctggatcatcacctctaagagtaatcacctgagactcacatagatgcaccaaaacacttttaaaaactgaacatatccatttcttcttacactaattaaaatcgtttagtttacctctccatggtagtttgtgggaataccacccatattataatgcacagtaggcaatacaggaattggctctcttgtaacatcgacnnnnnnnnnnnnnnnnnnnnnntcagatataccgggtagcctctctttaagcacttctggtggtagatggtttaagtaaaggtatagataatccctcattgggcctgataaagaacaatgttgcatatactcaaactaatttcttatacatgagtctcaaaggagtcatgatcttacctgcaccacgtcctgtcggatttccatagtcattgatcttgaaacaacatctcttgaagccagatctctagccgtgggagcatatcgatccatgaatttctcaccttcactgtttctgagaattcctccttcacctctagctcctatatgttcaaatttgataaagtcaagaaccaatatatgtctgtctaaatcctcaatgatttgattaatgcnnnnnnnnnnnnnnnnnnnnnnngatgagacatccagctccatatataccagtaggatgaaactgaacaaactccaaatcttgaagcggtagcccggctcgtgcaaccatagcatttccatctcctgtgcatgtatgtgctgaagttgcagagaaataagctcttccatagccctgaagtcattttatggatcatgattcattactgtgtggttcaccaattcaaaacaagatacattatgagccacaacaagttctctttaccccggtagccaatatcgtggaacccgcatggaaacgatgtaaagttccatcttccatgttcagtgcaatgactccttgacaggttcctgctcatcatatattcatatacaccaaaagcattcaacaatattgattttgcaacatgatggataatatatagagtatactcttaataaaccttcttagaccttaccatcactgttcattatcaaatccaaggcaaagtattcaacaaagaattgagtgttgtgtttcattgcttggccatacagagtatgtaacagagcatgcccagtgcggtcagcagcacatgcgcaacgatatgcttgaccacctgaaaaaaacacagagataaagaaataactatgagaaggttaagcaagtaatcttccacattaaacagatacatgagattcaataagtcaacaattaaaacctattccaaactcgagactctggccaccgaaagctcgttgatatatttttccatcttctgttctagaaaatggcaatccgtaattctcaagctctatcacagcttttggtgcttccctgcacatatactgaattgcatcttgatcacctacagaaccaaaaaacacaagttacatataaatatagaaacttgccgaaataagtaacttgtagggtaacaaagaagcaagttttatctgtgtatacataagtagatcatcagcgtacctaaccaatcacttcctttgacagtatcatacatatgccatctccagtcatctacactcatattacccaacgcagcatttatacctcccttcacaacaaatttcataactcaatcaaaaacaaaagcaagcttaattataaggctaaaaacaagagtaagcaaatgttggcacctgagctgcaacagtatgggaacgagttggaaaaagcttagtgatacaagccgtgttaaaaccatgctctgataatcctattgctgctcttagcccagcaccaccagctcctacaacaaccgcatcatatgtatgatctacgatcgtatacgatgatttatccctgcctttttccaacaaagaacacaacaaatcaaaaccaaaccaactacgcaaaatcataccaaaaattgtgttctaatcgaaacaaagctagaaattagtcaaccaatgaaatgatgagaaaccccaaagactaaacgagatcgatgattcaaacaatgtctcgtaccgaaggaggagctgagaagaatctggagagttgagaagtgatgaaagcgccattagattccgatctcctcgacgacgacgcaactcgaaggcaccgccacatctctccgtccactactcaccacgaacttgttaacccaaaaatggaagaagagtcgttttatataaattggctttaagattttgaaaatgtagctgcaaaatttcgaaattgccactagacctggtttacgagaagtctcttaacgtgccaatttggtataaagaatttgaaaatgttcatgaaattccaaattttgcccctacaccgggtaacgaagtgtgtaaaaatttcaacggtcaacgaaacgccacatcggatgattcgtacgaggcccatttataagtaaatgggctttacaaagcccataatgttgcagcagtgaaatacttcggtatgcattagcagcagaaatgcatgacactcttaacttcaggtaggttcgttgctcactcacgtcacgccggagaagacacatcggagatcgacaaatcgattcagagagagagagagatagcaattttcttctgtagtgttactttctgagagagtctggagagatcggtgttgagatttgggtaaatggaaacaagggagagagatctagaacgattgatcccgatgcataaatccggagcttctcctcgcgacgtcgttttgtctgttccgccgtctcctctcgcttctccgatccacgtcgccggcaaagaggtatctctctctctctctctctctctctctctctctctctctctttttcatttcctaatctctctcgcgatagtaacaactattacagaggatttctcttattcgctaatttcccacatttggatcacacaatttgatcaacattgtgaaatgttctgcaagtttgacctatagtttgaagttacttgtatgttaagttattcaatgtttcatgtacaaacaggcgatttacaaagtcattagaagctgggcctccaaaaagttcatgaccggatggtaatctc

SEQ ID NO: 190 - DNA, 917 bp, Arabidopsis thaliana landsberg
  unsure (1)..(917): unsure at all n locations
ctctagagttccggctaaatctttggcactgattgaaatcaataccgaaacaatggaagggtatattgaaactggtagctttgctaatgcaccaaaggagtctctattatcacgttgattgattctagggtttacttactgaggaccaatttccatcgagttcctccatctgctcaggtctaccttcacattccctttactaaatcttcatctcaagtcgaagtcgatatacgtgacatctttnnnnnnnnnnnnnnnnnnnnnnnnnnnnnnnnnnnnaaaggactcgcggtttggaatccatgttcaggggaaaccaagtgggttaaacctagatacaggtacagtgagtccgacttttaggctctcggttaccacaacaaatcctcctgcaagcaatacaaagtcttgagggtgaatcgtcaacaacatgctcttcatgatcagtttcttggccgacgaacagaataaagttgtagtgtgttgcaagtggcgctcggattccatcaataccatttacttcgtggaagaaaataaacacgttcaagtggatcagcgtcgtggagatcttacactcggacaatcttgctcgtttcttatgaattatgttccaagtttcgtacaaattcaacaaggtgcacttcttgcaccacgcacatgacttgtgaccgaggacttgtgaaacttacgggttccgatccatatgtcttcaactatctttagtttttccaaataagtaatttcattgggtttttaattctttttttcttctataaggagggcctaaaacaaaccgagaaatatatgtgaatcatctctgtatcttaaaacngtacaactaagaatggtgtaatagtttgactgctctcattcattgacggcatttacattggctaattcataataataattgaaat

SEQ ID NO: 191 - DNA, 1648 bp, Arabidopsis thaliana landsberg
aaattccatctatgaactctttatgaaatatgaagaaaattatatgatacctttaaatgttcatattaacctttccgggagtaatcaatcctttatcttctgcatctttgatcatactatatgcgattctgtctttgacactagagcaaggctccatcatctcaagctttgcagcgatacgagccacacaaccatcaacaacattgttcagatacaccattggtgtgttaccaatcaactgcacaaacatagaaaaagattttagacatgtcatttgtttcataattaaagcaaagggatacatatataagaaattagagattattacttcagtgacatcgttcttgatcaaacaccgatcttccatgttggtctgttttctgaaactactgaaagttattatttgtgtactaattactaaagaacaaaatggatttatgaagtccaataaccatagaataagattcaagaatctagacacaaatcacaacatactcaatggtcaaagtttgcttaaaagctctatttacaatgcacaagttagattcaagaacaaacttggcaattttttggctctattgtttcataactaaaatttttaatatggaacttctaaactcaaaagtagataagagacaaataaaaaatttagtaaagaacagtgcaaactagataaatttgataccaaaatcaagaaatgatagtaagactaaaccgtaacgaacaagaacaaaaagaaaaagtcgtacctttgcgtttaaacgaattattagtgaagaagacaaggctgtattatagattaggatatatagagactaccctactttgcatgtggtgcacactgaacgatgttgaagtatgaagacgagtttatgtcatcattcttgtataataaagttaaaaatttgacatctaaagagtttttgtcatattgcgtaatgagagcatccaatagttgtgttttgttattaaaacaaaatctgcagataaacatttaacactattattaaaatgtttaagagcattatattgtccttttctctagtactaatcatgtgttacttatccgaacgatcgaataatattacacctaagtggtcacagatcaattttttaaccaaatgattttcttaacacaaatcaaattttcataaccacatgctttttcattttatagaatacaatgtgtcgttatagtaagttagtgacacaatttgcaaacgtaatccttgcattggttgcccaaattacttgaaattgcagaaaagttttttttttttgtatgaatgtaaaattatattcaacaaaaaactgttttacaaaagatgtaacattaagaataaaaagaatgaaaaaaacagaactacttagacagtcttgggaatacagttttgattggccgccttcaagcttggcaatgcccaattggtgaatggtgctgaacattttgatcaatgatttttggagatttttgcttcttttttctttggacaactgtttaaatgttttttttttgtagaaacacatttaaacatgctcttgaccaagtgtagttagctcaattgataattatcctagacaaaatttaaaggtcgccggttcgagtgacacttgggacgaaactaatattacatgttgtggtttcggg

SEQ ID NO: 192 - DNA, 819 bp, Arabidopsis thaliana landsberg
aaagttcacacaagggaagaaaaggaagacctttcttgttacacgtatcatccgacggtcattatttcatgccgaacgaaaggaacctaaggggacttcttcgaagaggattttgatcaagctcattaattttgatgcatacaaatttgaagggaaagattgaactataattgagttttacatctgaatttataaaggtaatgtttcttttctttttttcttgttaatattttaacgtaatgtttgttttttctctatcttgctctttagtatgaattaagggattttcattactgtacataggagtaatccttcgggtattaaaacgacaacaaaccgatctatgtagttttcagaaaagcagtctgaaaaaaaatattgagtttgttagactaataaagtcacgccacggtagatcttaatcatcggacggtcatcatttcatgccgatcgaatggattggcatgtcctcttctataaaacgtcgcatagctatcgtaaggtcaagaaaacaaaagagaataatacgatagatgtacaaaaaaagacacaataaggtataataagatatggagactgactccgccaataaccaaaaactccccatctccggcgatgaaacggcgaagttttctatatactcctccgcagtgcacaaagtcgtagtcatggttagccaacactcctctattttggaaacacataaagccgcattcctcagtttttgtgtctcgttctgttctacgccgtctacgtggtcgcgacgcagatacgtgcgcctacaaccagggttagtcccgagcttgttggcacgcgagc

SEQ ID NO: 193 - DNA, 8140 bp, Arabidopsis thaliana landsberg
tttcttattttaatttaatatttattcagaaaaatatgaatataatatgtcaaatagcaattcaagttagtggttaattcgtcttaaactaaaacgaattatcgacaaattctatttcatattagtcattatgtagtcgttcattaactacatattcatgacaatgtttaagacaaacgtacatgaaaatttccgtttatagaaaattcttctatattaagatattcttttttttctttctatactaagatattcagagtaatgataatatacctttaaaagaatagattcaacaatcccatgataatgacaagaaaaaaaaaaaaaaaaaaaaaaaatcccatgatttaaacaggaagaagaccgttgacacaaaatctaatattggagggtgcaccttcttcataaaatggtacagtactagctctcatgattaacgagagagggagagatcaaatggaccctagcctccactaacgttttgtggattgcatgagtcataatctacatgtaatgaaaacaccaactcatgcaaacccccttgctttttatgactgttggtgtaatgatatgttaacttatccaatttatgtacaatatataaccgaataaagaaaacttatcctctgttgtcgtttgtcaactttcagttggcgaatgtaataaatgatttggccggatcttcaacatcagtacccactaatcatcagaaaaacatagaatactacaacgttttaaggaatcttcatttaaattgtcataaactaaatttaattacggattttgatgatttggccaaaaccaaatttgtcagagatggattgaattcttggacaaggtaaattaaaatacgatttgatttggtgtttacgagtgagatatttacgaatttcagaagactttatctattgaatagaagtttgatcatttatacaatatgtgtcatttgtgtaagataaaaggaaagaacaagaaagaaaaatagtatttttttttttttaatagtaagaggttctgggccaaagcctgtactctcctcaggtccgaaaccacgatatataatattagtttcgttctaagcgtttttcgaacggtcgatcaaaaaaggaaaaaacatgaaagaaaaatagttttcattaagtagagagtgaataatactttgaggtcagaatatgttcgttaggatcatgagaaagagacagtagacaaggaaagatgaaaaatatgtataggatcccgagctggtttcatagtgaagatacctttatatacatagctcaagacttcaaatgataacaaaggacaatttatttttaagattatgagtgagatacgtcagcttcttgttcatgatcatcatccttgaggttttgtaaaaccaagagcagacaaggaagtagccaagattcaagactcctcctatgactacaacccagtaaacatttactctgttcgttacgtcgccgcggatagttgcggctgcggcagacgcagatgacgttgttcgttttgtagccgtacgtacttgcgtcaaaacgctgcggcgaacgcggcgtcatgcggtgaataattttgaacaccgatttaattcagcggcaacgattcaaaagctgcgactaatgtagaaaatgacctaaacacccttactatctttaagaaatcacagaaacaccaaaccctaaagccaacgattaacgctgctctgaaattttctcgtcttctcctctaatgatctgaaatctcttggatctgctcggtgatttcaaaataaaattggcgattcgaagtagtgggttttgtttctgcagctctcttcttgaccctgaagagcttttgaagttctctgcttgaagaagaatctccagacacaaaacaaagcaaggtagtttcattattcacagctattgaaatctcttggaaattttgatttgtgttctcttaccttatgtaggctactttcaatttgatggattttttttccgttgaatctctaattattatggagcttgccttctataagttttcaaggtcgatgctaattagttttatctgaggttgagcttgctaatcttatttttctaatcctaggtttctcattgatttgatggaagtatattcgcttataatggtctcttgctgtgtgtgtttttatggatttctcgtaaagaacagatcttatgacctttcttactttgcattgacatgttcttgagtttacagatgaaccatctgtgttggtgactaatcatgtcatgttcaaataattaatcgtggttgtgaataaactagttatgtggaaaagatcagtgttaaatggacttttcattgtgattccttatttttgaagtctataaagtttgactctgcttgttcacccattggcttgaagaaaaaatatgtcttctttttgatatgcgtgagttcctttgtgattattataagctgtgatttagaatgaatatcaaatgtgtcttccacatttttctaatatgttataagcaatcaatacaaatatatgatttgtttactcttagggtcaactttatggtgacttttatggttgtttatcaaaaaaaaaattcatgtgatagcttggatcacgctctcaaatgatttcattcttataattaaatgttggtttatctgttatataagggtctgttttgttcacttcctgtgatggtttttttgcctttttatattttctataaattcaaatcaagaattctagatcgtaggcatccaaaatatggtctgacaaagtggattaagcttgtaacagcgataatggcattacacaacttcataaggaatttacatcgagaagatcatgattttttacagtggcaaaacacagaagaatatcgtgttgatgatgatgatgatgaagaaggagaagaagaagaagaacatgttgcatatgagcctaccggtgacagagcgatggaagctttacgtgacaacatcacgaacgaatgtaataaaagtcgcttactttattagatatgttttttttattgacttggtttattgttataattatgcttacgactttacctatcttttttgcttataacgtggtgtactattttattgttataattatgcttatgatttctcacaaaatttaaaactaacgcagcggcggcgaaacgaacatagagacttgcggcagcggcaacggcagcgacatccaaacgaacataaataaagcgtcagcggcagcggtagcggcagcggcagcgacaacgaaacgaacaacaagctgcggtagagtttcccgccgccgctgccgctgccgcctgtggtgaacaaacgaacagactaaacataaaaggatcattagcgattatgggtgctaaaccaatataatagctggccttcaaaagtgggtgaatccgtcactaccaaggtacttagtcgatttcgtacactcttatcaatcagttttacttatttcttttccaagttctcggttcttttataggaatattgcaacaaaaataaatgaaaatttgaagaagaaataagttttttttttgtgcagagaagtagaaataagtgaaactattttatcacaacaaaaccattttaaaacaatcagagattgataaaaagttcaaagcccagaaacaaaaacaaaactacaaattgtgaaactcttattaatctgacaaaacaaaaactaagtacctggtctctagatcgaattcgagcagcaacaagagttcgaagccccaatctcagaagacagaacccttttcatataataaatcacaaaagcaaagtgggttggtttagtgacagttggtttgtttcgatttactagatttgattggttgacacattatagttggttcaattcgatatgagattcgaattctagacctgtaccatttactattcctctagatttagaccataaaccggcagttttcattttcaaaactcgaaattgatcaataattagaagattttttttgtagatccgaataaaattgaggaatattatattgtttatttcttaacctctagtgttctaaaaaatcaaaacagttaacgacagctcctgcgacaactgtgcagtgacaaaaaaaagaaaaaaaaagagttaacaaattattgcccctctttctctatctctcttcttctcggtttctccgtaagcattcagagttctgcaagtaaggttagtctctgtttctgtttcttttcctcattaatctaaatgcttcaaaaacaacatgatagtgaaatcgaatctaggtcttgtaaatgcatattgaattcgctctctttccatttttaaaatcttgattataatctagtaattgaattttgatctgtcaaagcagagaagaaggaagctatggatgtagagcaaaagaaaccgttaatcgaatcatcagatcgtaatctacctgatttaaaaaatcagtgaagcttaaatatgtgaagcttggttaccattaccttatcactcatggaatgtaccttttcctctccccattagtacttgtaatcgctgcacagatttcaactttctctgtcaccgatcttcgtagcctctgggagcatcttcagtacaatcttatctcagtggttgtttgttctatgctgcttgttttcttaatgactatttacttcatgactcgaccacgtcctgtctacttggtgaacttctcgtgctttaaacccgatgagtcacgaaaatgcactaaaaagatctttatggatcgttctaaactcactggctctttcacagaggagaatcttgagttccagcgtaagattctacaacgttcggggctcggggaatcgacttacttacccgaggctgtacttaatgttccgcctaacccgtgtatgaaagaagctcgaaaagaggccgagactgttatgtttggagctattgatgagcttcttgcgaagacgaatgtgaacccgaaggatattgggatcttgattgttaactgtagtttgtttaacccgacaccttcgttatctgctatggttgttaatcactataagctccgcgggaatatacttagttacaacttgggaggaatgggttgcagtgctggtttgatttctattgatcttgctaaacatcttcttcactctattcccaacacttatgcaatggtgattagtatggagaacattacgttgaactggtatttcgggaatgaccggtcgaagcttgtttctaattgtctgtttagaatgggaggtgcagcgattcttctttcgaacaaaagatgggacagaagaagatcgaaatatgagcttgttgatacggttaggactcacaagggagctgatgataagtgttttggttgcataactcaagaagaggattccgcaagtaagattggtgttaccttgtcgaaagaacttatggctgttgcgggtgatgctctaaagacaaatattacgacgttaggaccactggttttaccgacatctgaacagcttctgttctttgcaacgttagtgggaagaaaactcttcaagatgaagatcaagccttacatcccagacttcaaactagcgtttgagcatttctgcatccacgcaggagggagagctgttcttgatgaattggagaagaacttgaaactcacagagtggcatatggagccctcgaggatgacactctaccgttttggtaacacgtccagttcttctttgtggtatgaattagcatatagtgaggccaaaggaaggatcaagaaaggtgatagaatttggcagatagcttttggttcggggttcaagtgcaacagctcggtttggagagcggtaaggtcggtaaaccctaagaaagagaagaacccatggatggatgaaattcatgagttcccagttgaagtccccaaggtctccacaatctagaaaccacttagtggcaaattttcagaagaggtttttgagttttcagcttttgatattttgtgtcttcccagtgaatttacctttttcttgatttgataatcagatacaccaaactggttaacaatatttttcttcttttttgcggaaaaacttgttgtagtcagtagcagaccgtcaatggtcggtccagcttgtgtttttggttgttgtgtctgcatatatatttcctttaagcattctttgtctctttcattttttgacaaagttgttaaaaacaagagttatcaacttgtcattaataacaataggtgatagaatgtggcagagagtttctatggttgttaagaatcagttgcaaagatgagatgatctccatctcttataacatctacatcatcaatctctgcattgttgtctttgttcataactttggtagcaacaataccaaacttgttggaacccaattctagcaactccttgaaactcccaggaagcagtaccagcttcccggctatgtcatctttctctgcacaactaatcgtcactctcaccgggtttccagttctgccttcatctaccgtagctagcccgttcttgggtacgctttgatttgctaatataccaaacaacgagttatcgaagttgttagttttacgtcttgctcttgtttctcgaatcctgaaagacacttctcttgatgcaggacggatgttgggttcactagtgaatcttccgaggaaccggatcccggttttgagtataggtaccgaagaacttgtctcgatatgcactctcctctcatgtaacttttctcggaataaggctttaatatcctcatgcccttgttgctcagcaagatccctcggcgtccaaccatgcatatcctgcttgttaacatccgcaccttgctccagaagatactttaccatctcaatgttctcttcgcatacagcggtatggagcgcagaggtgcctgtggctctaggacgagtaacgtctccaccatgaagaacaatttcttttagtagtttcaagtttccttgctcagccgccgtgcaagcaaaatgacccacatcccctgcgtctatggtactgccatgttctaacagtacctttacaactttctcatgcccttccaccattgcttcccacagtggtacactcccttccgcgtctgcgtttacatttcgaagaaaccaaaaagctcaatacttcagaagaaatcctgaaatcaaaagggaagtaccagaactgaacaagcaagtacctctgcaattggggtctgcgtggtactccaacagaagaagaacacaatttagagttccttttgatgctgctatatgctgtttccagaaaaaaaaaagagatcataagttatagtctccaagagcttggatgagaagaaaataacagaacaagaatgtgaacttgacggaccagaggtgttctgccattgttatccgattcatttggatcaagtcctctctttagtaactgatgtaaaagtaaatcgtcttctcttattgcagcaaagcataaattgagaggaagatccattttaccccgtgcaagcatgttttctatctccagcagaacattcgtcatcaccggatcattcatttctttcaaatgctgctctccacaaagaaagagagtgagaacaagtaagtaatagttcatagatacttttctgttttcaatatttgaaaacctcagaaggatctgtttattcacctgaagtagattattcatgattatggtaccatcaccaacattggcctgaataatattcaagaaagttgtacggttcatacgcaacagttggcacaaacgtttggtcctcacagtaaacagttgtggtctgtagcataacacccctatctcccctataatgtctccagctttaacctctctcacaatctgaaattctccataaacttctctttgtgaatgcttagttacatcataactccaagatcacaggtatggagacaaaagggataaacataaaataagaaacatccatcaagtgacgcgacttacgctttctgttccagtatctacatccaccaagtcctgcatcataacggatatgtaagagaagtaagttttatgtcaactcaacaaatctgtagagaactttgtaatgttttattaccgcggtaccgttcacaaggatgtagaagtctgttggcgcttcgttctgcaagataacatcttctttggatggaaatactcagct

SEQ ID NO: 194 - DNA, 1061 bp, Arabidopsis thaliana landsberg
aacttggcggtgggaaccaaccacatgtttcatgtttctacaaaccctcaacatcccttgggtttaagttacctcctacataggggatgagttcatgaaacaactagaaatatggaaagttgagttccatttagagcacatctacccaaaagcgaattctcagaatgactgtatggaaccttgtgacaggacagtcaagaataaaacatcactaatgcaagatcaggaaaaaaatcataaagagagctaattctgcagtagtaccttttacaggacaaagacaacaatctctctcaatgtctggtgtttcacatgctctgcatacccaggaagtgaggtcctgagatttgcttaccccataacattcttggtgcacagccacttgacacctgcttacagatttggtcagatttatgactcatgtttagttataagaacgctgtagaattcagtataaccaaattatgccattaaagtaacctgttacagatgatcattttattttcttcccagtcttctacccatctgcatacagcacacctttcagtcgtccacttagccctgactggctcatacttttctgtgcatataaaataagtagtaagcaagtatcttagcaattttaaactccaaaagaaggacgccaagaattaagatatactctaccttctagcaaagagagcatcttttgcttatccaacatctgggtttctagagtataggtactgaattctgcaatctgtaatatcttgttgtcagtattatacttcttatagacatcatgcatgtaaatttcaggggtatataagggaaagtttatgagagagttaagcataagggatgtacccatttttctagaggtagcattgtgtctttcactcttacactatacttccactttttggctctgcagcctgtatgccgttcccattcacttggtgactgcttccttgacccacatgaaccacacttgcactcaattctgaaaacaatagttccaagataaatgtgttgttttaatctctggaccccccagagaatggtaacacaagcctaggatc

SEQ ID NO: 195 - DNA, 932 bp, Arabidopsis thaliana landsberg
agctgatgcgaataatactccacccttttcatagtcaccatctgcaacttgagatctttatagtttatgacgaaaatacgtattgtcgagggtgtgctgcttccgatctatgaaggtcaattctattcatgcatggaatgcgactttatcctccatgaaagttgtgcaaatgctccatgcatgaagcgacatcccttacatccatatccacttacacttttaaacacggcatctcctggtgaggaaagtgtaagccagtgtactgcatgtaggcgtctggttgttggcttctactattttcattatttagataaacatcacgaacgtatagcactagacttacggtgtgcctcgattatcgaaccatttgaattccacggccacaaacatcccttatacctaccttgggaggactcaaataaagtgacgcactgtcaaatctgcaaagaagattttgatatggatagtttggaagtaaattgcatggagtgcgattatacgatatgtttccattgcgcttccttgccagaaaaagtaaggtataagcatgatagtcattttctcatgatctgtgatggaaaagaggcaagtgataaaccatactggtgtgagatctgtgaaggaaaaatagaagttgtgaaagaaaaagcgaattcgggggacaaaaaaaaaaaaaggttgccaacaaatagagacaaaaaagaaaggaaaatttataaatgcaatgactgctgtaccactcttcatgctgaatgtttacttggccagacatttacttgaaatctgctcaaacaatagaatctgttcagattcttctcaacagttctctctcccgaccaatatgcgatcgatgctactgccgctgtccattcccaatatattttaaagcggagaacaaatacttgtgttctcgcagttgtagtccgaattcc

SEQ ID NO: 196 - DNA, 943 bp, Arabidopsis thaliana landsberg
tttcgtatttttaatatttttcccttatttttttagcataaattatgtctaatctatcaatttaatgaatcagatcaacctataaccctatttatatatatggttgtcaagttatttggtcaagtttttcgtgattagcaatttaacattactagattgatgttaataataaaataatatatatattagtttattacgatagaaaacaaaaatataactaaaaaaaataactagtatttacttacaacaaaaataaaaatattacaagaatataatttctaaatatctaaagccacaaatcagacatctcttgatcttcaaaattattttaatactattagctattttgagtagatcttaatcgcatccggaaacccatggatattcataacttcagattccaataattgtttactagatttggattctctgaaattcaagagtatccaatacttctccactcctaaatagtggtgatcatttaaactaaaccgaaccgatccaaactaaatctaagcctagactcaaaccattttgttcagttttttctcaaccattcggtttaaaaccaaactgaaccgataacccaatgtgtttattttattatttattaatcatattaattatattgtacaaaatttcatggtttatttggattattcaatttaactttacaacttgaacttgttgattactttaatttattatcaaattcaaagttcaaatgacaacgaactaaaaaaatttgttttgttacattaattcattgtttgaaccgaacataaactaatccaaacacaaatcaaaccaaacttactttggttgagtttggttagagtgttacgagacccaaataaaccgaactgaaccgaacccaaagcgaacccgaagttagaccgaaatgcccacccttactcctaatcacaaacatcaaaattaataa

SEQ ID NO: 197 - DNA, 481 bp, Arabidopsis thaliana landsberg
ctctcagtccaaatcacacaaccgacccaccatttttgatatccttattcgcaaacccggtagagtgacaatccttagaacacctctccttacattcattcaacccaattgtcttatccataattgttgtgcttgtctccggcagcctcatcatcttcatcagaataaaaaccccatctccgtggtagttgtcatgtcgcaataactgtcacgaccacatatttggtacaaatcgcatttcgcggtcggtaaaacgcaaaacaagttccattccgatgatgttgtatcccatctggatatctctaatatataatccttcgggagtcagtgttaatctcacgtagtgcgtgctatggtcggtaactttgaaattgtaagcaacttcctctctattgtctatgaagttgttaacaacgtcagagtagctcctgttttgcatcgtcggtatgccactaaacccaactccattccatggaccgga

SEQ ID NO: 198 - DNA, 1495 bp, Arabidopsis thaliana landsberg
tgtattaaggatcgaacccttgtctgttcccatggagactggttcataccgatcgtcttcatcttctcatcagcgtcggccatatcgatagcatgagggtaacaaaagttgaattctgaaaatttctgtttaacgaaagctttcgcctttagtaaatcagaaagtagagagttttgtgttttcgaaagcaaaaagtgagagataacaaacgaccttagggttggttagatgtacttgttttttaaccaaaaattataatgttgtaataattcatttattaaaattatttgtctttcaaactgaaaaaaaaaaatgaaacgcaaattaaattttgagaggctgtgagaaatcagtagttgtttctataaatttatacaaactatttaaaacaaaagtcatcatttcatagaaaatattttcatatcaaattttaatatattttacttaatgcatactgtgtatgtgattttagctgttaataattcataatctgtagaatataatagagattaatgtccttgacatatttttttcccgtggttggttttagtggattgaaatatttttctacctccaggtttgatgctacagaacaaatgtatagtatattccaaaactagacggcttgcttggacagcacaaattttgaacaccactgtctaatgagacatcttaattgatccatggattgctattataccttaaggatagaattacagagataacaaaattataaggtaagaacactctccgtctttcactgccgagttgtttatggttttccatgaatctactacataagttcatctatttgttgcttcccattccttttcttgaataatattacaatacactttctccaaatgattgatacatatagcaagttgctgattctttctggtttgtatattgtatcctgaaatttgtattacttgtaaagaagatcctcagacacaagttcacaacaacatggatcgctatccaagctacgctcttagacgcctcattgggacgaataaaaatcttcttgatgacacaccattaccgccatctcaactacttcgaaacatcgacaaacaagtccggaaccgaatctcttctattcgggaacaaggagacatgaactatgatggatgcatggaagtttggtttgacacaaaataaaagccaagaggaatagaaagctcataagaaatttgtgtattgatattattaaccatatgttgcacttgatataaaaacgttttttcgaataaattttacatcttattcatattttgaaaaaggtacatagatgataataaccgaccttccaaaatattttctagaattatttaaaataaatgtatgtacaaaataaaatgataaagataccctaatctagagcaaaatatattaaatgaagagttgtgattagaggtaattttccaaaaagtaatgttacaaaagtgatcataaagagatgaaaactatgtgttggaagagagggagcatg

SEQ ID NO: 199 - DNA, 2522 bp, Arabidopsis thaliana landsberg
gtctcactggcttaaatggccctcgagtgtctagtatttctcgactggctaatgtctctcaggttgttcataatggcagttggactttgccgctagtcgtattgctccgagcatgcttacctaaagccgcgagacactaacttcccaatctgatcaatagcaagttggcacatggcctatgtcatgatccaagggaatgttagtagaaaatggtaaagatgtattgttattacaacaagatcaatgggtgagcaaatttaccagcgatcatcttgatattaacaccgagattcaaagcccttcgaatggttacagtattgtcatgtcttgggaatcaaaaagtggcaccataccaacaaatttccatatgttgcaccatgcaccagggtaccacctaaaaagggaaataagaacacatacaattgaacatttgtttccacgcagaaaagaaaaacgaaagaagactgaaactatgagtatcaatgtcaaacaagtacctaaagagcaacatccaacaacctaagaccacacttgtcaataatcgagagcactttcttttgaaggtcattgctgggaaaatcaaattagtataaagaggaaggataaggttgaagattcatcacctaatcaggagaacctttactactttcgttgatgtaagtcaaagcagttctcttatccacatggttgaatagaaagaagtgaacatgattctagctcgagcacttaatgaaaatggtcgaactgaaaagggttataccaagcatcccaaacatagctgcatcaatggcatcctggttctcaaccatggaagccatagctgcaaataatagaattgatctttcttcacaccctgaaaattacaattgttaataaagaagttgtgacaaagttgttaatatacgttctgatgcaaaattacttactgaatatatgtaagtggcataatctttggagataacatccttcttcctctacatattttttatattcaggtacatgttacttcacaatcctgtaatgttttgaaaaactttgtatagaaatgaagctttgaagttggaataaaaaaaactgaaattaagtttgagtaagaacatgcctgaaaagcgcatccaaacgaataagagttcttgctactgcaatggaaaagtgtactctagtttttgatgagagttcttggtatctttcaacctgatataacaaccaaacgaataagaattttatagtgaaagaaaagaaaaattgtatcaacttttaaaaatgtctttattgtctaaccatcctaagtaaggaagtttttgtgcctcttatgattccctagcctaactataaatgaccggattagaaaaagaacaagagcattaaattaaaattccttgatgcattcatgtttctcctactaaattatgtcgttctctgcagcttaatgttgtactaattccccaaccaggaacacgattaaggaaatccatctgaaatagaagttcatcataattatatattagcacataaaattttaagttgatgcaggagaaacaaagaaattttctaagaaagatctaaacgaccagattagatagggaacaagaacattgaatttacagaacattggtttaccttgatgcattcatgtttcctttaccaaatcaggctgatcattgttgtattaatcccatgaacacattaacgaaatccacatgaaacagcagaacttcatcaccatatattagcgcaaagacaaatatctgataacaatcaaagtgaaacctgaaaagggaagcagggaagcataactcgtttcttcaccgtgcaaggatgaaagaagacctgcaaaaagataaaattccccaattcaagaaaaccacaaaacttcaagtaaattctcacttttgcaatttcaataacaaaaataaacaattacttattgtgaaaatttgtattttgactgctctaattagatcttgactttggactcgaatggttgcatcaaagtaaaacaatgtgaaaagtgaaacaaaccaaccaatgagtgtttgatcagttctcataaatgacttgactccatataaaacatttttgtttttgagacacatgctcacatagactatataatcttctactggtgaagaaggaaagagaaagtaacttgaaagactaagcataaaagaaggattgaagaaacatacttgggaaacaaaaagatgacgcacaaccgttttaaagctccattgcgatagaccaaaaacttgagaggcacgaagcaacattatttgcgtccgatttgagaagacaacaaaaacttgtaaaacatactatataagctcaaaaccatagaaaccaagacctaaatatggttttgttgaatcaccatgcaaaagctttacttccacaaatctgaatcttgctccagcttttgtttttttctctagaacttgatctctcacattttcataactatggattgtggtgctttaagctaacaaaatccaaaacggaaacgaataaaacgtgttccatca

SEQ ID NO: 200 - DNA, 2623 bp, Arabidopsis thaliana landsberg
cacgtctgagattgacccaacggttcttttataagctatgcaaatgtgctcctgtttttcatcacaacctatcctgcatcacatctcatattctgagaccgtaacaaaaattacagaagaacagtagcataaacatattgcgacactgttttagatgtcttaccattgacgcaagccggtagttagtttttggttctaagcctgcgtacagtctgctgatatctatctcccactcaaaagcatttgttgtttcagatatttctttttcagtttcactcttttcccactctaacactaatcatgcaacccacaaaacaccaaatttgctatataagcataatatatgaaatgagtacataagatcacaatcatggtggtcaaaacttaccaattgtgaagataggtgggcatttacttataatgtgatgaataaagtttgctattccacagcctccgtttttaatgtcacatagcattgtataatccatccggatcaccttaaggatatccacaaactctatattcccaagagcacacttcatatatacaagcacaaaacaatcttataaggggaagtattagcttctgtaggaagcatacggagggaaataaatgaaacgtaccttcaagtctctgatagaatctgcagccataacaatggcataagaacttttctctggataatttgtaatacatctgcattttctacaactcattctttcattctccgccaacgtaaaaaggcgagtcaaccaaatgtcgttagctcaattggtaaagatcttaggcaaagtttagaggtcgccggttcgagtgacgcttgggacaaaacttatattacatgatgtggtttcgggcctggagagattacgaggcgagtcaccaagctttctacttttggatttttccagcaacaccaaaactcaaggatggctacaactaccttagcagcatcactcgactacaaagagtaaaaagtctaaaaactttaagaataacaattaagcttattgacaaaaaagattataatacaatgcttagatgcatatcatctccacacaaatgacgaaccttggaaataacttcttctagggaactaagtaagtcgctcaagatgcaactgtagactccctcagtttttatgctctctgacacaaaagcattaaaaaaatgttgcagtgtagaaggaacttgttgaaatcgttgtgtattgttcttcaaatcttctttgagaactttaatgttcaagagagcctgcaataccacatgtttttgtgaaactatcaaaaggaataaggaagtgaagagatgtggaatgagttgaatcagtaaatgagagattaggtattaaatcttcctttggttggaaactgctttaccttcagcgtcatgtcaagagctgaattgtatctggctgcaggtcctccaattgctgactctgaatgtgccgacagtgaatcttctttaggcatgtctagcatctcttgaaaatggcgaatgaaagatataagaataatgcatctcaaaacaagacaattcaaattatttgtcaattgagaagcttttaaacaacctgcagggccatctttagtagcttcctcttgattttgagttttggatgaactttccaatggaccactctcacttgcaagagcattttctggttccatagaatcttcttccaccgtttttagttcaaggttgacaggaggtttactgtacatgtaaaaactcagagaaaacccgaaaacaattaattaacataagaaaatgactcttaaggtacttactgttcaacagtctgatcaaggggactaaacttgctcattgaagctctctgctgcaccatcaagatcactcattaatacaatgtgacattacaggtatacacaaagcagagaagtggaatcctaaaagtaaggaaacgaagtcaaaatggaagatatgttatcaaaataagataggaaaacgtcattgacttgttcacagaatattactagttgaaagaccttgtttattttatcattcttcttctttgactgtgccttcttctcctctcgagtgcaagatctactgctactgcatctgccttggctttgcgttccatattcattatttcattctagatgagaagagatatgaaaccatataaaaaaacaatataaaggccaagtcagacagaaaatgaaagctgtctatatataaccaaccagcaagaaaggtttcatcagttgaagaatataagtgcggttgtcaaatgcagaaagcctggcgaggttgtttagcaaactaatccttgaattttcaatcagcaaaatctttgagtcgattagaagaacctgcaagtcatgtcgataatttattaagttgggatgaatatgttactctgttgttaataatgaatattacagtcatgaatgaaccttgtgggtgaccactaatgtcagaaggcctatggactccagcactttatcgtccctacaacttttctgctcacgtataagattcaagcagtcatctaaatcagggacatcaaatggtggaagcaatgctccttccaaaacatctcgtactgcacccaagaatatttttctatcaacggaaatttcagggagtatctctt

SEQ ID NO: 201 - DNA, 979 bp, Arabidopsis thaliana landsberg
tgagtctcttcgggactacatccggcgattctcgaagcagcgcaccgagctgcccaacgtcaccgactcagatgtcatcggcgcgttcctcgccggcaccacctgccgtgacctggtgagcaagctgggtcgcaagaccccaccagggcgagcgagctgatggacatcgccaccaagttcgcctctggccaggaggcggttgaggccatcttccggaaggataagcagccccagggccgccagccggaagatgtccctgaggcgtccactcagcgcggcaccaagaagaaaggcaagaagaagtcgcaagcgaaacgcgatgccgccgactcggaccttgtcgccgccgccgagtacaagaaccctcggaaacctcccggaggcgccaacctcttcgacaagatgctcaaggagccgtgcccctatcatcaggggcccgtcaagcacacccttgaggagtgcgccatgcttcggcgccactttcacaaggccgggcacctgcggaaggtggcagggcccgcgacgacgataagaacgaagatcaccaagtcatgaagaactcccactgccgcgacccgaagatggaggcctactgcgacgaggttcggcgcctggaagacaagttcttcgggctcgagctcaaccacatcgctcggcgctacaacgaaaccgcagacgagctggctaagatagcctcggggcgaacgacagtccccccggacgtcttctcccgggatctgcatcaaccctccgtcaagctcgacgacgcgcccgagcccaaggtaccctcggcccagcccgaggtaccctcggcacggcacgaggtaccctcggcagagcccgaggtaccctcggcccccgagggcggggcactgaacgtcgaggaagggcagagcgggccacgccagaccaagattggcaggccccgtacctgcaatatctccaccgaggggagctacccctcgaccaagtcgaggct

SEQ ID NO: 202 - DNA, 3910 bp, Arabidopsis thaliana landsberg
caagctgctcgcgaatccaactactcattctcacctgaatcgtcaaactttcacttctctctataaaccaaaccagagccgccattttcgaacacactatcttccttcaagcccgtcgtctcctcccgtgagccgctttgacccttctcagctatggcgatcggagaaaattcgtgggtttttcgcgagcgctttagggaacaaagctgtgaaattgggaaatctcgtggaatccagagttgggttcattggttctcagtttcccaaaaagggtttcgaattccagaggttttctgggtttcaaaggcgtggctggtatgttattgtccctcattcctcatccctcatcatccctaaatttcttacaacctcattgagatttgatgtgggtttcacttgtgtgttcttctaccttttgacaggaagcattggcttcaagggttatcagatcgtgacgttgttcttgggttagttatagctaatgctggtgtgtttgtgatgtggcgtgttttcaatcaacaattcatgatgaataacttcatggttagacctcaaagcttacacctttataggcgtttcgttccagtacatgtttgtttatggagatttaggttctagatgtcttttacatgtaatgctggtgataatttagttgataatgactttattgattgatatttttggcagatatcgttggataatttcaagagtgggcgtctacacactctgataacttcagcattcagtcatattgatattggacatatcgtctcaaacatgattggactctacttttttggaaccagtgtaacacttcttttctcttgtgatttgtatttgttgagtgaagtactcttgagcctgtcgctgctagtttttggaaagttttgatagagagaatgaattgttttcttcaatcacttacttcttcattttcccgcatccttctcttgctagatcgctagaaactttggtcctcagttccttttgaagctgtaccttgctggagcccttgggggctctgttttctacttgattcaccatgcttatatggctgcaacatcgcccaaggtagggagcaaccagcattaatttttttgcagttagtttcctttatctcaaatcatgctaggtcctcagataagttagtttttcatttgaattatgatgtggtgtgggaaggcctatcctttttatattgggtgactaatcatatgcggtgaacagggtcaaggagctttcgtgagggatccatcgagaaccccgggactggtatgtttgaatttactggttttattaaaagagcagtgacattcattctttgatgtggttatcagacattgaaattgtgatcattgattctaatttaacatgaatttgacataaagatccattgttatgtaattgtttgcccgcaagtgagaatgatttgaagaactctttttctgttgtataaaagggcgcgagtggagccgtgaatgccatcatgctgctcgatatcttcctgcacccaagagctactctatacttggaatttttcattccagttccggcaatgttgcttgtaagttttaagctctctagctcaatcatgtcaggcttttaaagctctcttcttaagtcgactaaaactcactcttctttatctttcagggtatctttctcataggaaaagacattttaaggataacagaggtaatctactaagacattgcaaaatttcaaagtttgtttggaacaatctgatgatattttttcctttacaaaacaacaaacaatttgaacactgcaggggaacagtaacatatcaggttcagctcatttgggaggagctgcagttgcagccatcgcctgggctcggattaggaaaggccgtttccgcttttgacttgaccttgcttggttttgctcatctttagagaaatctatctataaatgattaaagtaagtttgaatctttgagaccatattgtgtgtggctcacatgaacagtaattttaatcagactagattggtatggtattttctgtttttactgtcaaaactcaaaactattagttgaattcatattgatacaataaatggaatatttagaaatgttaaattcaataaatggaattatatcgtttgacatacgtaaataaacaaaaacacacggaatgtttacatctattccatttaaatgttctgataacttaaaaaattctaatcataatatggagtaggatttaacccgtggtacaccacggaacaaatattttattcatatatataataatattaaattttactatttttaatatagtattaaaattatataattttatattaatattataactaaaaaaattggttatgataaaataataaaataaatatttaacttgtgttatatcaatccgaacccgttccgctatattttatatcaattcaaacacgtcccgctatatttctcatgatatcttatatttttttataagtttaaatattaataatgtatatgagagtaagttaagagctggaattttgcggatattcctttgtttgaagatttgatttgattgtgcaccattttgaggttaagatcgtgtatatggaattagttgtgattgtgattttatgccaaaaaagttatggacttttaattccatggaatattcaaaccaagataaggaatgtttttaggtgcacatgtaatcgggtttgctcattttacgggttcgcaaatgtattttggctcgttctacaatgtttgttttaatttattgacaaaaattaatacagttaattcaaatagttcaaatttctgcacgttttaagatttagtgaataccgtatgtgagataagaaaacgataatctattgtgttttgtgtgacatatgggattgccatatatttcaaatctttttggtttgttacacaattaattgttttaaaaaaattcaaaccactaattaaaaaaaatcaaataatccagtggcaaccattgtaaataagtcccaactccaggatttatttcacaaaatggctgcagaaatatatatgtagatgccttgaatctaaaaaaacaatttgtgacttaaactagagagtcacaagacaataccaatatgcgacggtattcggaatcgtttgatactcgcgattttttggtgatgaattttgggcttttattttgggcggtaagtatttttttaatggatttaagctttggtttgggcagtgaattttgcctccaatatcgttttttgttgggagtcgtttttgactgattatggactcctcttcgttatttactatgtaaacacttagtcgatttttcattacgcggcttctctttctccttttagagtttcactctaaaaacctctgaactctcttctcttctcaatcacgtctgagggtcttcactaggcttaattcgtcgaaggcaagcggtagtaggactcagagggtgaatcctccgaatccaaccactgaaaagagtaaaagggcagatcctccgaatcccagcagaggcttcagtccaaatccaatggatccaagcgatggtttgattcaacctccatcgaatccaagtgtgagtcggactatgaataatagtcgcggtggtggtagcagaggaggaagaaatggtgtcggagtgtcttctcactcctctgatccatcagagatacagtctgtgacccaatctcatagaagtcttccatcccagtacccgccgaggacacaacctcttcctgctcgtcaaccacggtttcctgttattcaataaccgcctcttgctcctcaaaatgaggaagaggaagatgacaaagaaacagatgacgacgacaacaacataccaatcgaagaagatgatgatgaagaagaaatccagacctagactaccaagagctgttagatggt

SEQ ID NO: 203 - DNA, 1691 bp, Arabidopsis thaliana landsberg
aaactaacgagcaccgtaaaaaacgaccaagtccgctttaatttaactttcacactatatcatcggttttatcgaaatggaattcggcgacggcgtttccttcgccgtcgtccccactgtcttcaaaagagaagactacaaacgaactaaacacgacaccgtcttctccaagtggcaggtcctctgtctttctctttctcgatttgtagattgagacttttcgctcgatcttgtgttttctctgaaacccatttcggaattctcagattttcagttgaatcgaaaaatctgatcttccatttccaggatttcagtgtaaagatcccattttgaatgcctagtgtgtctgctttgtcccaaatgcattttctctggatttctgtagaattggtcgctaactatatgtatatctaactagcctaaattctgtttcatttgctacttgaagtggttggtttttagatctaagttttatctgattgtgtaaagtttgatgctgcacaggtacttataggatccaacgattgggaagatttcaaaaacggaaaagatggtgtaggtagatacagagtccagaacttacctcgtaaatcttgtccgggtctgtatgagctcggtgtagcggtcatcggtcaagaaaaatgtcgaaagcttgaaccagatattgttcttgcttcatatctaggacaagctgaaagtgttaggtctagacttcagcgttatggaagatccggtgctcatttgcgcaatgttaacaaccttaacgactgtgaaactattgaatctccagttaaggctgttactggaggtttatttgaagacatattttcgaaaggaggctcgattttatacagatgggctccggttagtaaatacatttcttcttttcttctatattggtttgctaagtatacaactttgatctaactcatgtgattgtatcagatgggatctaagagagaagctgaggcaacagaagggatgctcttgagcacatttgactatgcttggaacaaaggaagtaacggggagcgaaggcagcttgatttgcttaagaagctcggtgatcgcgagtttatgagcaagagaaagtccggtatatctcgaatgctgtttccttttcttcggaaccaagttggtatcagaataaaaggagagaagcatgtgcttaaagaagagaggaagctaacctgtgatgttgatgaagagaagagtaataatttcctcacttcaatactcaaactcacccggtctagacctcaaccggtttcagacagatttgatgaggttgatggttcttgttctgatattgtttgtggagtcttacttgaagatggtggctgttgcattagaagtccagtcaaagggagaaagagatgcatagagcataaaggacagagagtttgccgtgtttcacccgaaaaacagacaccgccaaagtccgagattttcactggacaagatcatcacaatcataaagactctgatgttgtgtgtggagtgatcttacctgacatggaaccttgcaataagagacctgttcctggaagaaaacgatgtgaggatcataaaggcatgaggatcaatgcttttctttttcttcttaaccaaactgaccgtgagaaaaccgtcaaagacgagaaacctgatcccgaatcgcataccgagtcaatcgaagaagaagctttgac

SEQ ID NO: 204 - DNA, 1461 bp, Arabidopsis thaliana landsberg
ttaactgattaaatttatgttttaaatttatgtataaaatgtacatatgttgatgtactgatcactcacaattatgattatgtttacagaattcactcaaataacatcgttgaaaagctttttcgttattttagtaaaacaatttagacattagggtgatctatgctaaacttaccatcaactgataatgtaacaaaaacaaacgtttttcaccaaatcatctctactagttcaaaacttaagatgaatcatgggtttgactttgtttgtctttctatttatttggcttctatgcatattttcaccttgcaaccaattattggaaaagaaaaatttgtactactgaaatgtcacaaaaaataataacattttaaattggggcatacttttctaaatcgcttatgatacttattactgttcgcacgtctctggttgttgccactgagcagcggtaaaacgagactacgtcggtctctaaccgttgacgcgttgaccgttttattgtgaaagaatagtagaaaaattcgacgttgtttgtatgaaactgatagaactatatattggtatgcttttgtaaccaacactgaccaagaccaccgcttcaactccatcgccatggagtaatgcgactcttaagagattatgcgactttacagacacatatacatacaggaagacaaaaccagaggatttcgaaagaccctaatgatgcacacgagcgttggcacgcctgaagaaacacgtgcatcgttgtgcgctttatagaaattctctcgacagttttgttcttctcgctctgtttaccaaacgcgccgccgtattcaccacgtcggggatggaggttccgaagacggagggatgaccggaaaagagaaagaagagaagaagaagacatgatgatagatgagacaacgttacagacatctccacgtctctgtataattttgattcaaaaagaataacaattccgtcaacagcaggattggaacctgcgcggggaaagcccaattgattgcgggtttggtcatacttataatgcttccttttgacgagataaagcatttgtaaagtcttcaatattttaattatgctcttgatctcactaaagtacgcattggcaacccctaatcctctgaaaagatcacacttttaccaaaatgtcttgaatagaaaagctaattatgtacttaaacccatcagtatctttttgaatgacacaagatagacaaatatcaaacttttatattaataagaatcaaaaaaagtttttgttgccattctttctgactgttcatggttatctttacaagtaatctttaattatctttacaagtaaactttaatctccagtttaaaacttaagataaaagttcgctaaaaaaattaactaaaggtcaattggtttaaagaaaaattattggcaatatcatatgataaaactttgacacaaatttttatcat

SEQ ID NO: 205 - DNA, 4650 bp, Arabidopsis thaliana landsberg
ggtgtcgactgctaccatcgtcgaccagcagagttctactgtattctttcttgtcgacagcagactgaaggaatgacttgttcgcctcacaagcctctgtcatcggcttggataacgtctttcgacgggaagctatagcccaagtagaagttccgtgaggtagaggtggaggtggtggaagttggagtagttgtctgggtggactcattctaagcttatgattggcctcaatgacccgatcaagagtgaaagagttccagagggtctctccctcgataacaatcttgaagaattcaacgaattctacggtcgggagagttcgagcaatgaaagctgcgaagtggaaatcataaagtcgattaaataaaagaaaaaaataagcaaaaaggcatatacgacctaatttctaccaggtttcgcagaccacttcgatgggagcacatcggaaagatttccaatcgaggcaggggttttcttaatcaagaaccaaagatggtgccaattctcatccttgtttgggagattcgagatgagatttctgttggcgttcgggtatgctgaaaagtacctggttttcttcgacgaactcctaacactgagaagttcgttcaactcgggaaccccgatgacgaaaccggcctccgccgcgatggtaataatacataggatggttcagaggagattaggggtcaattgaggtagggcgatttcaagagcagccaaataccgaaccaaagcttcgggaagggggaaggtcaatccgcaacctttgaagtagattttgtaaacgcaaaagaatccgggacggtggtcctccggcgattcggtgggctctggcatctgtgaatccctcataacttcgggtgggattcggcagagttctctcagtcggttaagggattgaagagtgcatgtagattgataatgtggactggcgatgtcattcggccgggtgtaaaggtcattactagagccaccttctttaaaatatggagattcaggccttttgttttcagaattcatcgtaagaaaatgaacagtctgggggttcgaaggagagaaatgcagagaggaagaagaaaggaactttgttctaaaagaaagataaagagtgaaaaataataaggagagagtaaagtgaatttaccttacgcaagctagagatgatgacggaaccgccttgggagtcgtgggggaagtggaagagttttccccgttttaatagtaaataattgatttgcggtcatagttgtgacatatgtcacgagagtaattatgggtgattccagaatcataggaatgacgtgattttggcgggaaatcagagagtcatttggagcaatctttgcccattagagcattaaagtcttctgatttggagtatcacttcgaaagacttggggggctaattgttggtgtccgatcccgcaccatgggctcgggaccggtcaaagattgccacgtaagtgggagaggcccaaaagatgaaaggcctatgggcttccttgagtaagcgtataaatggggtgattgatccgcgaggtgagtgagacatcgaggtgaaaagttgcctggattggagagtcaagtgggttggaagatgaagcacaagaagttcggagtcaattcaaattcgaacgtttgaatagttaattcgaagactgaaacaaatgcatttaagagagaataattgcatgtaaatgagaattaaatgtattctttgagtataaattatgggtcaaagaccatgtaaagagacacacatttttgtgcaaacttactatacacattttcttacaaaactcatagttttctctataatcgtcaatctattttctagtacatttgtcctcaagaataatccttctcactaaataaataaatacttgagtgtgtgaatccgacattcacaccgtctatcgtgaatgacaccttctaataagaaagtccacgccaacacatttaaagaatgtaatgagttgactgacgtgaattcagagttctgtaggatcaaagcggatggacaaggacgagaaaggcgtaggactattgagcgaccgttctaacgcaacttttgtttaatgtggtctgtaggatatattcgagacacggtcaatgataacaggagagttcccgcgatttttagaactctccaccagatttgttcttttgtttgcttgaggacaagcaaagtctaagtctgggggagttgataacacgactttttagcccgttttagctattgttttcttatgtttcaaagagcatttggtgccattctagagccaataagaggagaaacacacattctagatgccaagaaggtattaagagttttgatgctaaaagtatcaaaagacgatcattctagtgcttcggaagtttagcatccggccaacgtcttccctatcccggcatgaggatatctcggtgtcattggacagctagaagagtcaagattcacgtcgaagtcaaatcatagcaatccatgaagccgtttagaagatatgacccaaagagtaaagacatgtcaagaactggctgtttggaaataataagtccaaaacacatccggccgctgagacttgaactcgggcagctccgagtagctcaccaccgactattaggtcacgcccaagtctttccctttttgcgccgccgccattaggctccttccctgaagcccactactcggccggatcacttaattatcccacagaatgacgttcttacccctaaacctaattcttaggcctcaagtataaatacttatacttagccctaaccctaggtgtgccttcatcaccagtgaaccctagccgtcgccaagagctgcctcctagccgccgcacctcttaaagcttgaagaacaccatctctctctctctttttctcgttttcctgtaagactctttaagctggagctttacctcttgtattctacattcaaagaagtaatctctaaaccctttttaagttttttcatctttttgttatggtttactcaacccaacttttgattagctcctttgccatgagcgagtagatctctagttgggtttgagggggtttcgaaggggaattcatggggattaatagttcaaaagtctaggttggcggtttctatggttttgtttgatcgtttacactattctttctagttgagttgaatcttaatgcttgtatgtccggaacatcacctagtacatgaccttaggtatttcattctttggcaaaatctcgtttgaatgcttgacctaactcaactgaataaagaactataatcgttgcacacccgcctagtgatagggacttatggactagaatcgaatttgaacttaatgctttgatcttgtattttgaaaccatgttagcacctactaaccgatagggcaactaagtacgcaagatattagtgataatagccggctttcacctactaaccgttagagttagctggtcttgatagatttttgtatgtccgagaatttggaagtaaacaaacctaaccatgttatcacctagattgagatctataccttactaattgaaccatgacgcctggagaaaccctagatgatctagcgtttcgttttacttattttataccgctctctttattgctttctatttatattgccttttcattagtttccttttattgctttttacttttattgcattctttacttattttcactgcatacaacaacctccactcttttctttgtcttgatccaggttacctaacttgaattctttcttgtagctacactccctgtggattcgatcctcaaataatactccaatatagtatgcacttgtagtagtcgtgtggtctttcaggtaaaggcctgaggcaaaatagaacacgcatcacctagcaatcactgtgaaatggattgacaccccttattgctgcatcgacatgttagtgtttaagggaaaattgaacacaacatagttagacctcaaaaaactaactatcagagaggagcgtaattcatcgtggtttggttgtgccgacggcgtggtctcttcatgtcttgctaagggattgacctacgctgaagtagggttatattggtggatgcactcctggggatctgcctacataccctgttacgggatcaagccatgacgtagtttgattgcggtggtggctgcactcttgggggagctgcctacgtaccatgccaaggggtcaagccttatcgtagttcaattttgtagagagcattttcgtggtattttcttagatgcatggcattccaagaccgtaactcaggtattcccttgattactttttcgagctaatagacgtcgtcgcgaactacctcggagattcgataaggaccttccaagttggtgcccaatttttcggcatttatctctctcgtgttgctgaacacttttcgtaggacaagttctcccacgctaaatctcagaattttaatattggagttgtagaagcgggcggcaacttgttgataattttgaactcgaatcattgtctgatctttgcgtttgtcgatgaagtccatgttgtcctgcaacatttatgtgttcaggtctgggttagcaggactggcgatgacctcgtcaatatatttatgtttattaattacaaaatgaaaagggtaatagctt

SEQ ID NO: 206 - DNA, 760 bp, Arabidopsis thaliana landsberg
ttttcttttacaatctcattggttttctctagttattgcaaattcgttggaatcataacaaagaatgctttcaaatgtatccgtacaacagccgccccactgagcacactataacacaaactaaaaaagatctgatatatcgatgtttgtattatgttgcaaattaaaccaagttccgacccactcaagaattagagctttaacaatcacgggtgaaacgtatttttacacaaaacaaacataaattaaaataaaataaaaacattaattacatgttttattatatacaaacaaatattaaatatcaataatttattttaatcgttttatcccacactagatgcaagttcttatctagttataagtttataacataatcgtcgataaaagcctatacattttttacttaggtccggctcaaaataattaaggatcatgtgctaaaaaagagaattagtcatcatttcttttattttattctttaataaaaatttggaccctaattgtaacagatttacttataaaaaaaaatgttggatagaccatgtgcattagctcctcgagcacatgtaaggggttcaaatcattttgttattaatattatcagtatatatgataaaatgggagaaaaactctaatcataaaacattcaattcagaaaatcttgtgcatttgaagacttatagaaatactttttccttttttttaactaatactttccttttatattgcaaataaaagtacatggatatgatcttaa

SEQ ID NO: 207 - DNA, 2025 bp, Arabidopsis thaliana landsberg
  unsure (1)..(2025): unsure at all n locations
tttctcgagcataattaattatttaattataatcgacatcaatgtgttttgaatgtgagtaaagagctaggatttcagtgatattgtcatatagacacagcatataagcctgtggtattataatgtcatggagaacataacttaatcaagtgaattctgcaagctatggaggcaaagatctagctttttggaacggaggttgtttctttgcatttcgaatgaaaacaatagttgaagcagaacatccttaggtcattagtttgaatccggtagggtcagatcttattttctaaagcttgtttcattccattttcagtgttctttgacaagagtattacaacaaaatcgttatcaaaagagaactcaataagagaaatgcatacatgtcaagtttttttttttttttttggtaaaaggttaagttacgttacatgccaagtttgttatagggaatgagtggaaatgtcagaggttactttcactatacttgacaccttatgatgtttgaaccattgactaggcagactacaaaaccaaaagatccatccacatgtggtttttgcacagttcttggcgcaaagaaacaacctcctgtctaccaactgagcgaaggtcgaactgtactattgcatttgatacatgtgtaaaattataacaatatatgacgcaaatgatttgcaagtactttagaatatacagagtgattcctttttaagaaattgtaaacaaagttagaaattagaatgcatatcaacaatatatgcaaacatgcttcttggaaaaatctggtagatattcgaaagtgatggctacaactcgaacggtttgaatatcctccggtgcccaaggcctaccagttgataacaccacgtttaaggcgtcaatcacctcccaaatggtcgatgattgttaatattcttgaaaaaataaagccatgaaaatcgtgcaacaaagtggcaaagggtatttcactacacttgaatgaacattgacaacttataggcacaacccacaagctattgaatagaattattcatacacattcttttttcattccaaaactcaatgactataggttgggttgatcaaagaaaattagaaaactcattgttttaagtaatttcaaatattttcttatcctatcaatattgaaaaagctaaaattacggaacgtctacaacttcgagcaaaacttttcgtttaacaaagtgggaaagggtatttcactacccttgtatgaaagttgacaacttataggcacaacccacaagcatttgaatataattatgcatacattttttgttcttttaaaaaatctaaaactaaatgtttgtttgaccaaagaaaattagaaaactcataatttttagtcacttttaaatcatttctcatagtatcagtattgaaaaaagctaaacatacggatcgtttaagaattcgagcaaaactttttggtatgtttaattatcgaccaccatataaccgtttattataaaattcaaaaaccttaatgtcacaacaaaagaaaataaaaagctctcatgtgggagcaaattccgacttaccggattcgaaccagtgacctaaggataatctgcgtctactacagtcctccnnnnnnnnnnnnnnnnnnaggtcggattgtaatctatttcatgcatgtgtactgatctaaatattctatgaacacaatgatttgtattaagttagcatactcatagtgaatctctattacaaatttgtaaacaaagtttgaatttataaaaacattatatcagaaaaacacttaatatcttgcctaaatctcgtaaatatacgaaaatgaggatttacccttaaacggtttaaaatacagtgaaaattacttcgagatttcccactcgtttctgataatacagtcaatagctatgcaattctctgaaaccaatttctcatagaaaaacgagtttgtagttatactcttgtctaagcactttgaaacgaaatggaaaaaaaaagctttcaactttaatgatccgacctacc

SEQ ID NO: 208 - DNA, 1807 bp, Arabidopsis thaliana landsberg
  unsure (1)..(1807): unsure at all n locations
gcgagtgtgatgaattactatgcttgcttatctatgatgactcttctcattgttactcctttcgccgagttatgtggaaggtccccaaatgtgggttgatggttggcaaaacgatgtctccaaatcggaccaaactttgtctagtaagtttatattgatgttgtacaatacaaaagagacaaaaaaaatcaaagaagttgatttaaaaccttgtaaggtatttgattctaaatgtttgaattcaggtgggtagtggcacatagtgttttctaccatttgtataatcaagtctcatacatgtctctcgactagatttcaccactgacatttagcgctggaaacacaatgagcggatctcattcctcgttgcctctatcatcatcttccaaaccctcttaaacatgtcaatgccctgggtgctgccatcgcgattcttggaactttcatttattctcaggtaaaaaatagagtgaagaaaaatcatattctgcgtgttctttgtctaggaatgcttgaacctttagtgataactctatgaattggccaatgtggtatcgcattttgaattcaatcttgaacttaaagctcttcgattcctgagctgatgatgttcttttgttcgttttgaatctttgagcatgctaaggagtgaggaagttggaggagcggttttcacataagggtttgatgcaccaagatgttgagagcagaggataaaagataattcctgtgaagatctcaagaggcttatgtaatcgtaggatatgtgcaaatggagttggaagatcaaacaccttaaaatctttgcctacttctacatgattatataatatatactttaccttcttccagtaagatctaaagttcaactagttgactaatctaataaagttgatgatacgagacctactaatatatcatattttctttttcttggaatgtttattataagcttctttattcttttcacttattggaagtttgctcgtttttgttcttcttcttcttataagatctcgctgtatttttacagtgacttgaaaagtaaagtgaaagttaaaataaataaaaaaaggaaattgaaccaataaagacattaacaattggccaaccaacctccacccgtctctgttaattctacagagagtaattaagactcagaggcttctgtctatctgactatctatattgtctaagatatgggttttgccaatattcgaatagtgaatgtttcagtatttgaacatttgttggaatcggttactcatagtaacttttaagttttgtaattagctatcgtcgataactttaaattcatacttcctcttaaagattcatgttttagacttttgtattctttcacaaaattgcatgttataagtttccgatgtaaatttaatttttgttactatgaaaaataaaagataattttttaatttttaacgattaacttctatcatcattctttgcaattaattatcttctttaaataggaacttcactaggatagatcaaataaacagagaaataaagtagcttctatatttgtgtttattttttctcaaaaagctaaacccttaactaaacaacaaaaaagtctatagctaagaagaagacttgacgcttgcaaatgtaagacaaaataattatnnnnnnnnnnnnnnnnnnnnnnnnnnnnnaatatgcgatgcctaatgtgttccctatgaacacataccttaaaatatatcattatggaaactggaattaactagatcaatatttacanaaaaaaaaacccagatctttatactgtatactgaaaata

SEQ ID NO: 209 - DNA, 2242 bp, Arabidopsis thaliana landsberg
ttttgatatgctcgtagctgcccatatagcattttcgggatctgcgttggctgctgtatacgactgttatccccttgtccaaggggaatttaatgcattggtggtaggttgatgggacggctttcatagttcgcagatcgagttctacaaagactaggtctatgcgttctctcctagtaggtggaggagagtcacctccctccggtgttcggtcccgtttcttttgtttgagggtttgctcctcctcctgttcgtcgggaggaggggtttcaactttggggtttgaaccttttttagttttgcccccaactgcgattaattttttaagggcgcaacattcctctgtggaatgtcctctttttttgtggtacttgcaatatttcctgaggtcaagttctggactctcgtcctcagctgcctcttctattgcgaatagggtatgctgcccttgcgtttggttttcctttttgaagggttgtttaattgcaaggggagcgttttgcgttttagattttttgaatcttaaggctagcacagggagctcctcttcggctttggcgaagtggaggggtttgtgtcgggcatcgtctaaagagacaggttgcctaacggtgagttcctcgcgaaaccttgaggaaaaccacaagctgttgcgaagggcggctatggctacctcctcgtttaggttcacaatctttgatttgattgctttgaattttttgatgtaagatcgcagagattcgttttgacattgggtgagaccccaaaggtcggctttagacgtcctgtttacgataagtaccgagtactgttttaaaaaggcgacgacgagctggtcgaaggtatcaatagagttcccttcaagactagcaaaccattcgagggcgtgatctacgagtttttctgcgaagaaacggcagtgacctcctttcccttcttcgtctgtcaggtacgctcgaaatatagccagacgaaaggctctcagatgagcctttgggtcgctcgttccgtcgtatcctgggaaacggaatctctcgacgtctctgatgcgataatgggtaatcctatccgtgaatggggtacgcctggtttcttcgatcactcgatctatgtcgggaggatcgctcactgctagatgcactcgtgaatgcatttgagccatgttcgcatttgtttgagctgcgtaattgcggaatgtttccatatccaagacgttacgcgaatcgattggtgctcgaggatcggttggaccgttaaagaggtcacttcctggtatccagggaacggatggtagattagcaatggaggttcgttgttgcgttgagttcccgggaacgcaggagctggacgcggttgtttggtttctcgtccacgtgtacctcaggggcgagtagctagcggtacgcttgggaaggtaggcattgtacgtgtctcattccctgttgttgggtatcgacgagagtgtcacgggtgcctgtaaaaatgtgacctgctggttgataggaggtgaacctctatcgagacaaatctaaacgagtccttggagtatgatctgtcggggtagaggctcctgtcagatctatggagttctgggcagggatctcagtttcctgggaagggatttcctttcccgcgaggtcacgctctgttacttgtgccatgcgggtagaatcgcatttctactgacctactatttcagcgaggttccggtgcccaatttcttgatttttgcttatgttgatcaggttcaggatcattgggcagagttcggccatctcgattgcaggtctcggaggcacctgtttggtggggttagccaggttgagcggaggttggttatctctgttgggaggcggctgtatcgagacataatgttccccatccttggtttgcgaggggggagaatttgttcttattcggaagaattcgaattttggtagaggttctccacattagtgtcacggatgtcaggtgaccagacttattaggcccaaatacctaattcatacatgggctccagatttgcgcaggttctctacttggtgggcttgctgggcttatttgggtggcctggtatatttgcaggtggattcctggcgggaaatccagctccttctgtaaggatttctagttcttaagggggctcccagtagtgtttgtctcgtaccgggtttggcattcaaagtggtttggcattgttattcaaaggacaagggtacagttaggacatctatggggctga

SEQ ID NO: 210 - DNA, 2739 bp, Arabidopsis thaliana landsberg
tagtttattcatcagtattcaagtctgaacggctgttttagttcatttcttagaacaggaaacgacgattttatgtttttgtaatgttcgcaacctttgaataatgttcacagccatgtttcgtaaatctccttgctataccatatatatctatacttgtttgattatgactgatctcttacttcttctttttgtaatgataggatttttttttccaatggataagtctattccaatcaaggcaataccggttgcatgtgtcagaccagatttggtagatgacgtgaccaaaacgattcctacaatggagtcaccagttctaaccactatgccatctgcatcatctcctcttctaatggtcccacctcttcgaacaatctggccatccaacaaggaatggtatgatggagatgctggtcctagtagtactggtccaatcaaacgagaagcgtccgataatactaatgatacagcgcacaacacatttgcacctcctccagaaatggtcataccactgaacaccattaggccaagtgatgactctagcaactattcttgtgatgcgggtgctggtcctagtactggtccagtaaaacgaggccgtggccgaccaaaaggttcaaaaaactcaacgccgacggagccgaagaagccaaaagtatatgatcccaacagcttaaaggttacatctcgtgggaattttgattcagagataaccgatgcagagacagaaacaggaaaccaggagatagttgattccgttatgatgcggtttgatgcggttagacgacgattatgccaaataaaccctccggaagacatccttacaacggcaagtggcaattgcacgaaaatgggtgtcaagacaaatacaagaaggagaattggtgcagttcctggaatacacgtcggagatatattctattactggggtgaaatgtgtttagtggggcttcacaaatcaaattatggtggtattgatttttttacggctgcagagagtgcagtggaaggccatgctgctatgtgtgtggtaacagcaggacaatacgatgatgaaaccgaggggcttgacacgttgatctatagcggacagggcggaacggacgtgtacggtcacgctcgtgatcaagagatgaagggcgggaatcttgcactagaagcaagtgtaagcaaagggaatgacgttagagtcgtgagaggagtgatacatcctcatgagaacaatcagaagatatatatctacgatgggatgtatctggtttcaaagttctggacagtgataggaaaatccggctttaaggagttcagattcaaattggtgaggaaaccaaaccaacctcctgcttatgcaatctggaaaacagttgaaaatctgaggaaccatgacttgattgattcaaggcaaggttttatacttgaagatctttcttttggagctgagcttttacgagttccgctcgttaatgaagttgatgaagatgacaaaacgattcccgaagattttgactacatcccctctcagtgtcactctggtatgatgacgcaagaatttcattttgatcgtcaatcacttggatgccaaaattgtcgacatcagccatgcatgcatcaaaactgcacctgcatgcggagaaacggtgacctgctaccgtaccataacaatattttggtttgtcgtaaaccattgatttacgagtgcggtggatcttgtccttgccctgacgattgtccaacccggttggttcaaaccggtttgaaactccatttggaagtgttcaagacatcaaactgtggttggggtttacgttcttgggatccaatccgagctggaacttttatctgcgagtttgccggtgtgagcaagacaaaagaagaagtagaagaagatgacgaatacttgttcgacacatctcagatttatcatagcttcagatggaactatgaactggagcttttgtgtgaagatgcttgcgaacaagtctctgaagatgctaatcttccaacgcaagtcttgataagcgccaaggagaaaggaaatgttggtcggtgaagcacattcctccaatgacagagttaacatatgactatggagtttcttgtgtggagaagactggagaagacgaagtaatttataaaggcaagaacatttgtctctgtggttcagtcaaatgtcgtggctcttttggctgatttggaggactttgtatcatttgttttttccttctttttttagcttccttgctatctttctagtatttgcttttttgtgtgtgtgtgtttttttttttttttggtgtgtcttttagtttcctttttcctttgtattctcttaaacaataataaaagtagtgaattttgaattatacttttccgttggggataacattataaaaggcccaaaacataaaatataaagaaatatatgcatatagaaagaaatcttctcttttcatgtttctattttctaaaccctaaaatggtaaattttctttccgattttgaaattgaagctgttattcaacaaactgaaaggagaaagaagatattaatgccagactggtctcttctccctaaagagctattgcaccttatctccaagaatctggaggattactatttctatgttcttgatgctcgttctgtttgcaactcgtggcgatcctcatttcccttttcttcttgtcagttgtcggtggtaagaagtgctgaaatgagatggatgcagctaaagaaaac

SEQ ID NO: 211 - DNA, 1264 bp, Arabidopsis thaliana landsberg
ttataaacgcgaatagcagaaccgcaaccgcaataaacgctaatgttttaatgttccattgcccccaaagaaagaataggcgacaaacagactcaactagataaacccaattagtcgaaattgatttcaaaacgtttatttttctccctacttttcatgctttcggatcttttgtgtgttttgttactctgttccgctttgttgaactgtatgatcaccttcgtactatcttataagaccatgtacatgagtgatatttttagagtatcacaagtccaaaaattatttttatattagtaaagcaattagaatatgcttgatcagtatcagtccactgatatttgtgataccagtatcatctgaggtggcttcttctgattggtcacatttaacaaaagcaaaaaatattatatatatttattaaacaaatattataaataatactaaaaaaattcttaatgatactttgtgagtattacctatgaacatgctctaacagttttatatatatattataaaaaaataaaaaataaaatgctagagctttgtttttctcccaaaaagactgtaataaaaaacctttatttatacaaagaatcaatccattgaactacttgtgtacaatgatgttgaatacttcaaagctgtgctatgagaagttcattccaagtatccgggatcccgggtaagcaccaatgcaagcaacgttgaacgttggagctaagtcacgttactcgcctttttcggtttgagtttacaccctgcgatatgagcttcatctcttagtttagaaagtgcagttatgtcaagaatcttgacccttgtcccattcacagcactctcaactattgtatcgagcgatccaccttcgcctgtgattttgcttcctctagacaaagggatagtattgttacacttttcatgcctaggggaaatcgtcgtaaagaaagctttcaaccgtggatgcaatggaagttgtgcatcaagccacttcaccaggctgtgtattgtaaattttttagcgttttcaacgttcttgaaatatccgccttcgacacgtgttccatttacgtgcatcacccaatgatttttttctatcttatctctgctccaatggtgaccggtgtttagaaccaatacatggaaacggtgaacgtagtttcttatgaatgctggtggacggtcaagatgcattgcaataagatgaggtggatctgtattgttcatcggtaccaaatctgttaaactagctgaccaataagac

SEQ ID NO: 212 - DNA, 7233 bp, Arabidopsis thaliana landsberg
  unsure (1)..(7233): unsure at all n locations
actaatctagaaggggtctatcgaacaaacttaaccacctagcatactgagaattctacactactctaacccatcctaagaaacctattcactacttagacatcattgcagagaacataaacgttgaatagaatgaaaacatgataacaacagagtaatagcaaggtgataacaggatgaacaacagtaaacgaaatcaagaacaaaatactgaatactgaatactatatagattaagagaaaaatccggattacaaaagattaagaacacaatgtctacgaaaaataaaacttagattcaaaaatgtaaaatacatgctacttatagcgaaatattctgaaaccctaatactcaaaacgacgcagtattgggacggattaagaacgatactcaactcaggtggtcgagtgaatggtcgagtgataagctggagtcttcttctcttccttgtgctcgattgtctggttgagtgcggaatggagaagactctgaagctggcagtcgagtaaggacgtcgagtgaatgatgataagggactcgaccatgtggtagagtgattggtcgagtggatggtggctgtagtactcgacttagtggtagagtgattggtcgagtgaatgatgatggtgattctcggccatgttggtagagtgattggtcgagtgaatgataatggtgatactcggccatgttggtggagtgattggtcgagtgaatgatgatggtgagactcatcttggtggtagagtgatcgagtgaaggtgatgaaggtactcgaccatgtggtagagtgattggtcgagtgaatgatgatggtgatactgcacctgttagtagagcgcgctgttgagatcttgaagctcctactcgacctctgggtcgagtggtttgtcatgatcaggtccgcttcttccagatagctcgtcaacagctccaaatcacctgaaatcaacgcaaatatgcaacatgcatgcaaaactatcctaaacatgcaaagtgatgacaaatgatttgaaatggtataaaacagtgatgatatgatgctaaagtgatgacaaatggatgctcaaaacatgcaaaatacacacttatcacaagtccaaatgtatatgacatgatatatgtatgttcatacctattgacatcgtatacttaatcatgttgatatcttgggattattttacatgaaattttacacctagatgttatgagccatagtaggttaatttgcacgattctatatcaagtcatattaggtgtgatatcattaaacaatccgcaatgaggttatatactttgatctataaaatcgtgagtgtatattacaaagcttaggttcaaagatattatatcacaaccataataaaccaggatttctatgtttcgttgtaactcaagtttatacttgatggctatgactttattgttttatatgctaaatattcaaaggtgtacatcatcgttgataacttatcatacggattatgtagataagttacaactttagatccatttatactgcttacatcacggttttaatatcaaaatatatttagttcttgtttatccactcaaaatgtttaaaacataaacattgtttgtctacatatggactttacaaataaccagatatgttatacatgaatatttatctcaataagccaataaggtttatactaaaccataaacactggatccatttcgggtcaataatcttaatgaacatattctataagaatttaacattataaaataataatatcacatggttttttgccagaattagtaagatcatttactgtatattttgaactataagtcgaatttatcgtgttaatgcttatattgcattatataccaatgtgtatatctatcgactttatgttgacctatacattggtgttgacatcaattcattaatcccttcaatacacatgtgcatgtattaaaccttctaacaatgttatatgtatgactttggctacaccatacggactttggctacaccatgaaagccttgagaagctagaagaagcttggttagtgttttgcagtcgaatatgacttgatgtcatgtgtatgaatgagtataagaacttaaaccgcaacacgatctttaaagcctaagtagtgtatccttgttagaagacacaaagacaaagactcatacggacttcgactacaccatggatttctttaacaactaaggttcctgtttttaacattttaaagccaagggcttttgcccatctccaatagctaacaagaactctttcttttctttacaaatcccaaaacctttattagactttttctgcttctttagcttacttcccctagagtcttctaccttttcttatcattgaatcaacccctttttttttttcttttaaacacatcccaacccaaagtataagcgcccacctagtcctatctagtccgaaaaatgcggactagaactacatgagacactatctctgtcgttacgaacctaacactttctaccaagcttaatcggaataagacctcacaaacactcacaagtgatatagggcttggaagaaagtctaggtttgggtttgggttaactgctctaataaggagagtcagctacttggattacaagagtgatcaaaatgaataagaaaatccaagttttttagggtatccatgagttcaaatttgatgcagacatgataattaaagatcagattcaggttcaaattgattgggaatggtatcagatcatgacagtgtggtcgagtagagcaatctaggcatggttcagttttatttcaaattcattgactacgcaacagacaactagcaacgagagcactgagtttatcaggtgaaccaaaatgcttacaaggctatctcatcattatcccctatgcatatgcaacaatcctaaatgaaacactttagactcgatcctaactgtaatgcaactacatgaacactcttttttttatgaaatcattttctgaattttttcaattttttttggttttttctatgccttagatgaatgcagactcaaaattatacacaatgcagcacacacttcctgagtcctcccccaaacttaaatcacacagtccattgtgtgaataaacttggaagagagtactcaggacaaatccaatcacagaaacaaaaaatgaagaaacaaatcacaacatacggtaaatacaatggtgaagtgaagcgcttacctcatcgaagaatgaacgtagttgctcgtcaatggctgcctgcgattgctcccatgccatagacgaaccgccttgttctgtatcagctccagcaggtgggtactcgacctcatcagctctgtggcggccagcaccgctctgaggaaactcgacctctctccttttgctgcggccagcaccacggtcgagtgatctcctcgagtgaatgaggcgtgatctgctgctagatcgagtgagtgtagccttccttcttctcttgtgttcccgggattcgaatgacgaatgcctagcctggacatgtggnnnnnnnnnnnnnnnnnnctcaggcctgtgcgcaggtgcattaattctcctcgatggcatttccataggaggttgtacctgtggaatagcagtggtggaggaagagcaactcagcttgtctgtcagaagcttgaagcacttggcgatcagcctgtcctgcttcttgccccacttctgcaatttactgttattcttatgagcttcagtcaagctcttgctctgcctcgctggaggtacatgttcagcaaagtgatacatgctagtgtcgaactttactgctccatcttcatccatcccatccgaagcagcttcttgaagaagatcgtcctcatctaatggcggagcgttctcatagtagaggcgtccaatctcaggcctaaaatcaatgttatctccctctattatccgtgtgacctcagggctagggagaaggatgttagctctcttatctgtagagtgctcaaacctgaaccggtgcaagtcgccaacgattgcgaactctaggaatttgcagtggcgtagatgctcgatatccattgcccgtggcttgagtccatcagatgtgattgtgactccacaagcgatcagaatcggtgtcacaacaccacctatgcacagagcgcctagtgctctcttttgttattgccgacagcccagctcttgtatccacacagatggatcagaaaaagtacagagagaggtgtgtcattgatttcaccttggagagacatgctgttcttagtttggcgaagagttcccttgagagccatagcgatcatctccatatcagaattagttcagtccttgtgatctctcaagagtagagtacattggctatagaccgctggcagtacctacagcagggatacgtatctgattgctctttgacctggaagaattcagcggtacagagttgccaatggtgatccctaaatctttcaactcttctctatcatacttgggcttagtacccgttccactggggaaaccaaacaatccttccaagcgcttgattgataacctatactcatgaccatacacagagaatctcaagaatcccaatccttcgcattccaaatcatcaaaggtcataccttggtaaagctccacttgcagtgtggagaggaactgaatcgtttcttcttcatatgctacatacggataagccattaaagtgtccagatgacaactctagtacaagtgctgaacatcctccagcaatccaagttgtgcgagtgtggtcgagcatgaataccttgtggtacagaactctttcaatttgaagagcttaatatattcctcaacaaacaatacatcaggtttatgcagaagtttggtggctcttcgagtatgctcaggcatgtactcgtcttccagatcctcatctataagctcatatctctttgtcattgctctcttccctcgggctatctcagcttttcttctgaaactatcatattctctatgttctctctctggccttgaagacgacgactctgtctcatccatgttgtagtcaggatcaactgaagaactgccactataattactcatgattgtcctgcagaagatttagaactcaaaactcaaatgtcaataggtctgtctcaaagataacaatgaaaccaaaattgtaatcaacaagcaatgaaatggaccaatttggtcgagtatagtataatactcgagtaaactaaagtgctccccagttactctatcaagaattggatcgagtagattagagaccggtggtcgagtaaagttttgaagttgagtggctatgttgattgctagcaccagaggtcgagtacttcttcgatgagccggaattggttggacaaaatcacaagttgacggtcgagtcctgtggttgtaatcgactagttcctgagacttcgacggtgaaggaggtggggaactcgactgtggcggcgcagagaaggtcgagtgtggtgagaacaaagtgacggcgaacggaaaagtgaaatggtggagtatagcgacgaactcaagtgaagttgagtcgagtaactctttggtgaaagatggcgattcatggttgactagagaaattggattgtcggtggtgagatgaagagagatgggtcgagtaggttttacttttggggaatgtgtggtcgagttcaaaaggtatggtggagattgattctgtgattctctctccatcttatcttcaggaacaaaacgcgtggtccacactttgttgacttgtctttggactttgttccctgtttactgggaaaacctcaggaaatcctctataaacatgttgaactccctgtaagtctctgtatcttctgtatcttttgttgggcgagtaaaatgatgatttaaatttttttgggttttaaacatcactcatcctcgaccaatacactcgagtgcaaggtctccagatgcaacaaaaagttttaaaatttttgcactccactgtactgtgtattcgatctctaggccatctatagagtaaaagttttgaattttcactttaccttcacgttattcctctattcctaagaaccacaaacacatcttaaaaaaatcaaaaataacaagaaaagaaaaacttattcacagagatagtcatgggacttcctcccaagtgagcttgtttaaagtcattagcttgactcctttactcctttgatcatcaagaagctcctggagatgaaccgatgtcacctctggaaggatttggtccgctaagtatttcttgagcctttgaccatttactgtaaaatctccactcttaccagctagagtgactgctccataaggacggacctcagtgatgcagaaggggccagaccatctggatttaagttttcctggaaagagtttcaagcgagagttgaatagcagcacctgatcaccaacctggaaatccttagtgatgatcttcttgtcatggaaaagcttggttctctccttgtagattttagaactttcataagcttctagacggatctcatcgaggtcactgagttggatcaatcgcttctcctcagcagtttttatgtcaaagttcagaagttttaccgcccacattgctttgtactcgagctcaacgggtagatgacatgattttccatagagaagattgaaaggagttgtacctatgggggtcttgaaggctgtcctgtaagcccataatgcatcatctagctttgcagaccagtctttccttgtaatcccaacagtcttttccagaattgtttttatctccctattggagatctcaacctgcccgcttgtctgtggatgataaggagtggcgaccttgtgctttaccccatgcttcttcaagaggttctcaaaaaccttgttgatgaaatgctttccgccatcactgattactactctgggaactccaaatcttgggaagattatggtcttgaacaagttcagcacaacttttgcatcgttggtaggactagcaatagcttcgacccactttgatacgtagtctacggcgaccagtatatatttattaccgtatgaagatgggaatggacccataaaatcaatcccccatacatcaaagatctcaacttccaagattggactctgaggcatctcatttcttttgccgatgttgccttttctctggcatgaatcacactttgatacaaactcctgagcgtaattaggcattgttggccaccaaaagcatgcttgaagaatcttgga

SEQ ID NO: 213 - DNA, 1247 bp, Arabidopsis thaliana landsberg
  unsure (1)..(1247): unsure at all n locations
ggattccccaacaagcgagtatgggttaagcttgcatagcaggtagacttcagaagatcggttacctttgatggtcagaactacaccttccaagcgcttgatatggtcaatatacttttcatgacataagccatggaaagggtgcttgccaactaaagctaagtatcctttcttgagctaataatcgttcttaaagggggcggtacaatcgctaattgattaacatataacaaatttggcgtgtttaaatccccaagagttcgacgaggttttgtagctggctaattacttgcgtctggaattcgtgggtgtcgatagacacctagctggtgtcgttcgatacctagctggtttcactcgacaccaagccctgcttcgttgcgagcagcaagctgcgcgttgagtcgcgcctattcatctatctgattctcagctttgatgattcaatgatcatccaatctttgtccagtctcatttaggcatgcccatcgtcatctcttcaaactccttatccattagctctaacttatctgttaaccactggtactaatctctgagtttttcggttggtgcgttcttgtgtacgcaaatcaagtgttgacagattgacgaggtccttatctttcgtgattcttgtgagcctatatatacacatgaaaaacagaaaagaaaaaaaaaacaagaaaggagtaggcaacaaaaggaaaataaaaatctagacaaaatctcgaaagcaaaacctaatggtcattcccaagaactttggcaacggcgcncaaattgataaatgttcaaattaacccaacactactctctcaaataagagatcagttgtaatacttagggatcgattttcaaaaagttttcttgttcacacaatggttatcttgtctaggttaagctaaacaataagtatggtttaagagaataaaacattacgtttagggaagttcttaggaaacagatgattagttgatctaataatgactaggatgttaacaaatcgttctctaactcaaatcactaatacagaggaaccgacgttagcccgcattactcaatattatcaagtttgataagttcacctaagtagatagaccgatcttagtacacatctaaatactcgacacatctttgatagttctcgtaataaacacctttgtaagaagagtaagcataggtccctgtgaaactattgtaaggtttagtcttctgaaaagcaagctttgagtatacctaagatttgg

SEQ ID NO: 214 - DNA, 2255 bp, Arabidopsis thaliana landsberg
cagggcttcctacgctttcttgctttggtctcatgaagaatagccatgatgggaagatttatagcaccaacttagcttttgctcctcccgagtatttgcgccttggtactgtgatagcggagagcgtcacatttagctttggaaccttgttattggatcttatgagcggcagacatattcctccaaaccatgtaacaatagtggcaaatttttagttgcattttggactgattcttagcttttttatatgtacatgttaatgagatattttgtgcaggcacttgatttgttccgtggcaaaaactatttggtgctaatggattcagctcttgatggtcagttctctgatgaagacaggacagaactaatacacgtagcttctcgatgtttcaagactgaaccagaagagaggccaagtataaagtttcttaaggcgactctttctagacttcagaaacgggccaagttgtgccctattaatgtcaaaagacctatgtctgtacgtgtcactctctccatatattcaagaatcaagaatagtctctcttgaaactacacaaatttgaattaatggtaccaataaatcatattatttgacagcctccatcaaaaaatctgcctgaaaagactaaacctgcaacagagtcattgaagttgactcctttcggagatgcatgttctagagcggatctaagtagtatacatgaactactagagaaactagggtatgaagaagataatggggttggtaacgaggtatattgatgatgtttattcacttgttatctgaatttgagagttggatgttgctgattctgataaatgtgacagttttcattccaaatgtggaccggcgaaatgcaagagaatatggactacaagaagcatggagatgccgcgtttcttgcgaaagattttgatactgccattgaattctacacagaggtaaagaatgtcattgacacactctgcaactctacatcatcgagaagtataaataaaaggacttgattcattctttcattattttttgcagttcatgactggagctcctacggtatcaccaacagtattggcaagaaggtgtctttgttacctaatgactgaaatgttcagcgaggctctaagcgatgcgatgcaagcgcaagtagcttcaccggaatggccaattcctctttacttacaagcggcttgtctcttcaagctagagatggaagctgaagctaaagaagcacttagacatggttctgctcttgaggcttattagtctttgtaaaaaaacttattttgagaaattgtgattacacacaacaacatgtactactataagccaatgtgaataagtgtgtacccattcagattttttaattcaattatgaatgttctttccaattgtttgatatgattgcactcgtgcaaaaagctaaaacaggaatcaaattccacacaaagcaaaagaaataagattttgagaaaagaaaaaacagaggattttaatcttctttctcagttttcatttgtgtgaaggcaagttaaagtgaaagaaccatgagattacaaatgcacagaccatacatgttaaaaggaaattaaggaatctatttcctctacataatctccgatcatcggaatcgcttgtagccaccatcgtgggtgtatttccggcctctacgtcatctacattggtttcaaccgttgtttgaccaatctcattgtcaactttaaaaaagttttgagctatcgaacgacaaatctcgcaagtcctaaaataaaagttacgattctttgtaaaatctaacaaatgtttaaaagattaatgaaaagaatgattggttttagtttgcttacttattacccttgatcttgaaccaagtatcggcacattgcttatgaacataacccaaatcatctttacaagaacatccaagaaccattggatctccacattcatgacgactactctctaaacccaaatggcaaatccggcaatctttctccggagaccctctgattgatccagaggctactgattctgtatctgtttcgtcgtccaaatcatcagcaatctcaaactcgccgcaaaagctacgaacagctgagtgaaaatcgtagtcgtaatcacaagaagaactatcttctccgctgacgtcacttggacggtattgacgctcgccggaaccattttctaaatcaatgtgagagatttcgtaagatgacattattcatttagagagaaagagtgaagaagagacttt

SEQ ID NO: 215 - DNA, 5088 bp, Arabidopsis thaliana landsberg
actccttaaactcagacacttaacagttacatatcatcatcatttattctccttaaaacaataacacactagacagttcataaacgaaagaatatatgatgatgactcacagtgattcttccttcaatccttaaatccttcaagccaaatctggatcctagctttctgcatcaaaaacacaaaagacctataatcaaagcaacacaactaaagctaatagaataatcaaagcaacacaaagcaacataagcaaaacaaagccgtaaactaaagctaatcgaagaatcaaaagcaacacaaagcaagcaaagcaacacaaagcaacataagcaaaacaaagctgtaaactgtagctaatcgaagaatcaaaagcaacacaaagcaagcaaagcaacacaaagcaatataaggaacacaaagccgtaaattaaagctaatcgaagaatcaaaagcaacacaaagcaaagtaaagcaaacccacaattaaacaatgtacccatggtggatcaaacccaagaacaagtgattgcaacaaggatacaaagagaaacaacgagagagacatggagcgagagagaggaagcgagagagagagagagagagcaacacaaacctgtacactccggcgatggatccgacgagtctccggtgaagagaatcggcgactgcgagaaaaatcggcgacaacgagatcacctcgacggcaatgaatctcgttttcagtgttttgtgacgtggagatgctgaagaaaagatgtggtttttgggtgtaattccatatattagattagggtattattgacattttacaattttggctgaacaagcttcagcagaatgaatagattaaactcagtcagattttctttattttttggatgagtttagacaaaagcattcaactgaatcattcaaatgatctcttaaaacatgaaaaacaaacatcagttttaatcttcactgagatggttcatccaaatggacaaacaaacaggacctagatcgtgtgaatgaatgacccgagcagttgattttctttttgtcgtaattgtttttttaacttaacaataaggtgtttccttttacaaattacaatcttgaaaggtgaaaaaatgagacttatgataggtgtgagaaggagaatgtgacagttttttgtaaattaacttgtgatttattagataaagatttgaggaagtttgtttattatttataatcgttacaattgaaatcatatatataaaagcttacgaactctctccataaaattgacacataatcaatttagcatttgccatgtgtctattaaataattaatgtaagctcttcaacttctaatttataggttaatgatatatttattatttaattttatatatgattttattttatatatttaattgtactattcctaaatttgttttaatattacatgacctttcaataaaaccattttaatagttttctcatactcggagattttttttaatccaaactcaaagtatgagtgtataatagtcgtggattacttaatgatttaagttagttattctcttaaattgatatttagattctcttatattgatatttatgtaattaatcactgaggatgaagaatacgtaaggagctccatcatcaaattcttaggtttctggaatgcaacactaccctctgttaaattgatttaagagaagcgttgtttatgaattctgtatacgatgcattgttgagaatgttgttaagaaaatattttaatactaaaagtaattgcttattgcatgagtgaatgattagataaataaaaattatatttaaattaaacaatacaaacaaaatccaaaaaacccgcggcgtagggcgggtgaacacctagtgtaagtaagggaaaaattgctcaataataacatgattgatctcatttcaaagttattaactaataaattaagaatgaaaaatggagttaataatttactaactaaccggattaatgaataaagataattatttattagtatatgatcttttatatactaaatacacatgcatctagttcaagctaagtgaaggaactattttcagagtgaagcaacctttccaaatttataacaagagagttccaagtaccaaatatcaaatttttctcactcttaattgtcaccatgcaagtaacatcttcaactacacatacccaaaaatttgaaagatttcttattttttgttttatttataaaattaattggctcatacacgcacatatcgtcgaagatagagatagtttacggtgacataggctgtacgaagttacttttaagtccatcgtacatcacattttgggtttaaatattagatatgcaattttttatatgggatataggatattgatgattttttttttttttttgaataaagttggtgttatggttttcatgtgttggattgttcatttaggagtagtagttttttcttcttttctgaacaaattaggagtagtagactagtattcatggtttgttcataatcgaaaataaaatccataataacaataatagaacttactaagttatataactccgaatgacaaagtggttcgttgtattttgctagaaacataaactagaaattttcaaataattaagaagttttagacattaagtatttttacaaggcaacgttccaagacaacaggcaggagctaccagcctaccacaaacagcaatttaatttgttgttcgtgttctttctaatgacacggacatctcaactcgtcctcgataattttagttttgtttacacataccatccaaacttttgttttagaattttaaattgaaagttaaaatattttgaacagtaattcttttccatagctgataattcataatcttactattgtatgggtaccattttgataggaattttatttgtcataacattagactgatgtcatatgtatacagtaaacgtatatcacatattcattgagctattcatttaattataaaactgatcaagagtcgttatagttaacgcatgaccatcgtcagattgcggaattacgtgtcttgatccaaatggcttacaatttcaaagaaaactcgcattacttttatattacatgccatatatacgatttgcatttatttttacaagtatagtataacacttccaaacaagaactatacaatatacaaatcctgagctaattttctcttaccttgttacccatttcgcagggaagaaaatgttaggaaaataagattgaaaaatcttgaaaatatcaaagattcaaaacatatataaaattgtgtattatctcttacaaaatacttcgtagatccaactaaattaaaatatatatggctgactttctacttttataagcaattcatattggttggtaaaataaaatcaataactattctctgtaactgatagtagtatattatatattaacgtgtaaataattagatgtcaagttacataaataattatttcgaagagccaaattatttgagagtcaacggtgtgatcacaggaatcgacggatcggagagacccacgcgagcactccacccgtttcggctaaataacaatattacccttaaatcatgttcccatttgtgaaaacgtcgtgacttctgtttctcactttaccaaaacgataaaacatgctccacgatgacggtgagactatagtaaagaggaataatcaaactcattgcaattgaagtttgatttacgaaaagaaaaccctaaaacacctcagcaaaaattatgttattaatcaacacactaaatatagacataaagttacttttagtgtttttcttcttatatttcgttacttaataatagaaatttgtgaacttggaacgatgaagaaaaagatcatggttatataataattacgtataaactaaaaaattgtattatacgtttgaactttcttatagtcaaaggagaggttagtttcgtcaatagaggttaccaatatttaatggacttgagagaaatttcgttcgtttccttacaagtccattgtcacgatcccgtaattaatataaatcttaagcttaactcatcgacatcaacaaaagattagtcaagaaaaaaaaaaaactcttacggagagaaaacattcaaaacaaaatgaaagtttggagccaaagattatcgtttctaatcgtcatgatcttcattttggccgggcttcattcctcttccgccggccgcaagctccctagtatgacgacgacggaggagttccagcgattaagttttgacggcaagagaatattatcggaagtgaccgccgacaagaagtatgatcggatctacggagcttctgctagattagttcccaaaggtcctaacccgcttcacaacaaatgatatatttctatactattatagttacattttgtcgccaataattatactatcttaattaagtttgtttagggttttgtttagaataatttaatctaccttgtgtctcaacaaattctgttattgctggttctttaatttcttgtattttgtagatatattgtatgatagatatacgtacagagacttatgtaactttcttttttcatatttacatttatttatacgatgttgaaaatatgtatcaaatattgatttgcacgagatgagaggggtgattattttatattttgattatagttcattataataaatatgacatgttactagtttgacagagttattaatatattcaattcagatcatgtacgtatttctgcagtatagtttccgttcctaacatagtaacatgacatgatcaaagttatttccgttgttacgagtctatctatggtatatcttctcaaataagactagctagactattgaatttcgattttctttgcagtaaatcgatccgtcactcatatcagaaaaaagacaaaaaaaaaatcgatccgtcaacaatcaacatgtatatatatgatgaaaacattacgcaaaagaataaattcagtcgtccattgaacaaggatagaatcatagaatataagtccccatctctacttgtaaaatgaatttattttaaagacaataag

SEQ ID NO: 216 - DNA, 2237 bp, Arabidopsis thaliana landsberg
catattttaattcgctcatagaccgttccctcattattctgcatatgtttatccaactctgacaaatactttctcaaattctggaattcccgtgagtcttgtatcaaattgaaaaggtttgaagccttgttcggttgtgcgtcgaatgcgtatgatagctggcctatgatcagattcgatcatctccaagtattccacttctgaagccggatacgttgcgcgccaataatcatttgccattgctctgtcaagccaacattccactgtgtgagatcttcttttacccatccacgtcatgttatttcctttgaaagggagatctttaactttgcatattttgactgtgtttctgaaatccaacaaactccaattctcccttactcttccccctcttttctcattaggatgtaatatctcattgaagtcgccacataataaccaaggatcgaatcgatttagagcaattcgttgaagtcgttcccaaaggatgtgccttaatttgcgattgggatgcccataaacacaagagaagtaaaaagacacacatctttattacttatcttacaatcaatgagtcttgcatcaacatcataaaaagaaactgaaatagacttgttccataacaaggctaaaccacccccaattcccaaaggggaaacacatttcacgtaatcataaccaagttgagctgccacatctcggacgacgtcattcgagttctttgtctcgatcaaaaagagtaagtccggggaataagttgccttgattccctttaggcgtcgaactaccagggacccttttaagccccgacagttccaaaaggctgtattcatggcggctccggtggcttctggcccaccgtgccttctcggttggttgttggggggggtctgagtgaatctccctgctgtggatgatgattgtgttggtgtagtcgtttgcatcagaaaccagttacgtagttcaagtgcctccgattccctcctctgtcttttgacaaccttatgttctgtttcctttgtaccataaccttgtttcatctcacaacacacaagtgggaacacagagatgtgttctgctgaaggagtaggctccatctttctcttcttagaggaagattgattttcttcttctgcaccactatctgtgagatggttaagttgttgttcttggtctgcattaagattgtccgtcattcatcctgggtggacgtctggttcgtcgtcctcatcatcagatggtggaggcggaggaaggttggctccgaggggacattcggtcgcttcatgagtaatcattccacagtttgagcaaaaattgcggagcttctcatatcggaacttgagtatacatgccttatcgtcgaattggaataggcgttggaagcgtaacggatcatcaatgttccaaaggagcttgaccctgacgaaatcaacgagagtcgttccatcagcgctaaaatccgtttccaggaaatgacctaagcgtcctccaatggacgtgaccattcgttcagtgaggaagtggagagagattcctcttatctgaatccaaaaaggaattcgtttcagatcttggtcggtgtgatttgggttccatttctggaccacacacatccattcattgaaggaccaaggaccgcgtctcaggaccgacgccatcgaatcttcagattggaagaggaattggatcttacgggagtccagaatacgacttgaaacttcctcaccaacaccccatagacggggtaaggcactcgccattgctcgtaagttctgcttccttcgattcaccggtttcacaattagactatagcgggtttagctaatcgcctcttcacacaaatcaaaagggagattgatcgcttcatcttcaattcctagtgcaatttcttgcagtctgccatgattaatatgaacaaaggaaattggcttatttcactctgaacaacccattggctccagagacattcacatagtttaaataggtattgggtagcgtcagttatgcgattgataactgtaataccgttgatcacctctgaaggaaccgccgataaccggcgacaaccgcttgtcaagaaacgacacaaagaagaggcgaagatgaagagatacgatcgcaagaaaaatcgcctctctctcatcatgattatagaataaaattaattctattcaatatttattttaagaggttaattttgaaatatttaaatatacaaaaatattttatagtta

SEQ ID NO: 217 - DNA, 2086 bp, Arabidopsis thaliana landsberg
gttgacttgcgctatatattagaaactctttttctaaacatcagatgtgggacctttggtttgtaccaacaggcgactgattaggtagtcgttaattttggcgactgaataatgacgtattagcgactaaatagtctagattatacattagtcgataatcagtctataatgtgagacagattaaattagtcgctaataggtctccagttacaactacaatttagcgactcatatattctatttgggcattaaattgggcttttatcggctagatccaataacgagagcccatcagcctagactatataaggtcttttatcgactaaatcaacaaaccctaaccctaaactcctttcatcctctctcgacaaaccctaaccctaatcctaatccccttttgcgatcgatctcaattcttcttcaatcctctcaatctctcatctcttagcttcaattgatggcttctcatggtggaaaaggcaagagagaaagatgaaggggatcgaagatttccccaaatcgacccacttcttccgcggtgttgaatcgacggcccagggggcttcccagccagtacgagttcacgccggcgaactgtcaagccccacttcaagattatgaacgagatccgattgcacagcctccaacaagtcaaaccgtgagggactatcctcctctgacgcatcttttccagtcaggcgaaggatctcctcgtggatatagatctcttcggggatctccttctcctcgcagatctggatcgactctgtttcgagcatccggctcgactcaacctagatctcgaggatctattcatcatctagcctccacgttgaaacaatctccagaggcagttcaacctgaagcctccaatcagtctccagcggcggttcaacgagaagcatccaatcctctacttcaggaagcgtcaaatcctccacctcgagtctttgtatcacatcacagctctcaagctcaaaactcacacgcggaggaagatgaagatgaggaagctgagtttgaggctgattttgaaagggaatcaactatccctgaagatttgcttgcaactctatatgagttgcttgcccagccaagccgtgagaaatatacaacggtcatctctcctaaattgagcctcaaactctatggttagcatctcctcttaccttgtttgtatatagatgccgagtatattaggtttgtatatagatgatgattagattaggtttatgattaatattgaataatatgtgtatgtatatagatgtcgagtagattaggtctgctaattggtttatgtcatagtaggtttggtcatgacaatggtaatctgatcagaaagatcataaaggtatttacaaacacgtttgatgggtcattttacagttgtagatgtgtacctactgaaaaagacacatacttcctcgaattcgccgtaaacttctatctcctcttaatcttttactactgtatgtatacatttggtttggctgtttgatcacttacatcaaactctcctcttgttttgtagaaaacatagacatggcatccctcactaaccggtgtgattgaagacaaattctacaaaatttgttagctacgtatgaaggacatggtttctaaggcttgctcaaagcgagcaagggatcaaccgccatggattgagaagacattttggaaagaaatgtgtgagtattgggacatataagaagccattgctaatagttcaaccacatcaacagctcgaatgtcggaccgtaatggtcttggtcttcacaagcaatgcggttaatctctttttaattttttttatcactttgatcatcttttcttttgtttatgcagttatctgtcacaaacgagagaggggtatatttaagaattagaagcttagggaggtacatcaataagaagcggaagtacacacaaaacagttcttctttcacttccttgcaatcacagctggaggacgccaaccgcaaaatagaggaacaagcgactctacaagcacgtcgtgaggtagagacattgcaggtgagaacgagatttaacaaacaaagaaacttgttgcaagaacgagaca

SEQ ID NO: 218 - DNA, 591 bp, Arabidopsis thaliana landsberg
gaacgatcctcataatactcagaggctcctcgacgaacgcgatctgatcgatgaacgaagagattcagccttggttcgcatacaaaattatcagaatgaaccggctcgtcattataactcaaacgttcgacagcggagattccacgaaggagatcgggttctccgaaaagtttttcagaacactttaaggtgatccgacccggaatatatgagctcgccgacttaaacggcaaaaccgttccaaggtcctggaacgcaatgcacctaaggaaatactacaactaaatccgaggtgactaaacttaaactcccatttttattatcttgtaggttttcgaaccgaaatatgaataaaaattcttcgcattttttaaacgcttcggctaatacggtgagcgacggctctgagtattctttacacatattcggctacatcgtgctatacaaatacgagatgaaatctatcagattacttctgataagaattttcgtcttcagaaaaccggttatactttaacaccggtatcccagctcgttcctaaacgctggtcgggaagtgaatacgatcgggtcgcaaccaagagatttcac

SEQ ID NO: 219 - DNA, 492 bp, Arabidopsis thaliana landsberg
ggccattcagttttgaatggatcgacgctcaaggtaaggtgagatgtgagagcatgaccgaacaaccgtcggtctagggaagagcataaaaaaagcttgattatatacatgttacacatatgtatatatgaaggctgcgaagtggagtaattactttttgggattcagtaccccatggatgtgtatgtgtatacagacatgggaatactgaaaagtgtaatgtaccacaatgggctgccctgtggttaaagtgtggcatcggcgcctatgcgtggctcggcgcttaatgaggagctggcctccatatagaaatatatggagtataaactgtgataaactatcatgtgtgaattgcatcattgggaactgggctgtgatgaaattttctgcaggtacactaacttcgaactcgtatgtgtagctgacgactagcaacatatcgagagagaacgtagatatgccaccgatttagaacgctattgccacattatg

SEQ ID NO: 220 - DNA, 677 bp, Arabidopsis thaliana landsberg
tgaataatatttatttgaacgtactaatgtttcatttaacgtactaatgtttttttctgtcagttaattatcaattcttctgggtatagatagtcatattacccatgataaaaacatataaaagcatgatcaagatcataattctctcagatcaactttttgccaaaaataaacagtaactctaaccaatctgctcctgacacgtaggatgtcttagattttcttcagcatgtcttttgtgtctcgccagagacacgagccttcccagtttcatcaatattttttttaattaatattaagaattatattttaattagaagacacacattttattgtgcaatgcggatggtctaaggagttttgggactctctggataagaaatatggaacggaagatgctggatcacagaaatatgcaatggcgaagtttctagactacaaaatttaggactcacggcctctgatggtgcaagtcgaggagctgaccaatcttttgcatgaggtacacgcggaaggaatgaggatatgcgtctcataccaagtagcttgtatgatagagaagcttcatccgggttggaacgacttcaaaaattacctcaagctgaagaggaagaggatgagtcttgaagccctcatcgttagactccgcatcgaatcaacgaatagaaaacaaatgg

SEQ ID NO: 221 - DNA, 683 bp, Arabidopsis thaliana landsberg
ggagagcaaacaattgtaatggcatcgtttaatgcttcttatctttgggatcactgttagtgttaaagttgactaagaacatgagactactagaaaacaatttgactgaaactgaacctaaatgagcctaatgacggtgaggctataatagatagcgcagaagatttgttgattaccaacgcagacaagccaatgaagcgatcacttttgaaatttatgaagatcctacaaagctacacaaaatcactgatcccaaattctttcaaggaagagctatattagcaccaaagaatgatgatgtcaacaccatcaatgagtatttgctagatcagttgcatggtcagtgcatttttactctacattttaaagttcctgagttttatatgcaatataattaaagtttgattgagtatacaactaacatgctcattatttattttgatatacaagtgaagaaagaaattatctttctactgattctatagatcctacagattctgattcgctaacaatcttgtatcaccccagtttttttaaaattatcaagatagcaggtttgccaaaccattctttgcgtttaaagatcatactacagaatttggatcctaaaggtggtcaatgcaatggaactaggcttcaaataacgcacctatgtaatcagattgttcaagctagagttatta

SEQ ID NO: 222 - DNA, 3729 bp, Arabidopsis thaliana landsberg
tggtcgggaccggagttaaacacaaagaaagcaaaagtggctttgattgatgtgtgtacaccgaaagaagagggtggtgtaggcctaagatcgttaaaggaagtgaacaaggttagttgtttgaaactcatttggagaatgctatcgtcaaattctctttgggtaaaatggttgcgacagtatctaatgcggaagggatcattttggtctacaaatgaaaactcatctttggggtcttggatgtggagaaagctattaaagtacagagagctagctgcgcattttgttaagtatgaaattcagagtggaaaacaaacttccttttggtttgataattggtcacctcttggaagattgatagaaatatcgggaaaccgaggatgcattgatatgggaattacactacatgcgacagtggctgaagcagtgcttaaccacaggagaagacgacaccggactgacatgctcaatcatatggaaagagccctagaggacttacgtgagaaagggctaacagacgaagaggacatagtgtgttggaaagggaagggagatcgcttacaatcaactttcaatacgaaagaaacttggacggccataagagaatcaaaaccaagagcagagtggcaccaacgagtttggttcacccaccacacaccgaagttctctttcatgacttggcttgcagttagaaatcgtttaagcacgggagatagaatgttacaatggaacatgggggtgaattcttgctgcgttttctgtcatgcaccagtggaaacacgaaatcacttgttcttcgcttgtcaatattcagcagatgtatggactggattatctagaaagctcttatctcaacggttttcaacagattgggacatgatcatcaaactcatcacggatacatctctcgggaaaggatgtttgttcttggtgagatatatttttcagctcacagtacactcgatatggaaggaacgtaatggtcgtcgacatggagaagcagccattcgctcctcccaattaacccgccgtctcgataagcaaacccgaaacagaatctcctctattcgtgagctaggagatagaagatatgacgactgtatggcgatttggtttggttcaagataacatagacatctctcactttctaaatttgttaatgctctcaaattttgcttaaacacaagccgcacttgatgtaaaacagtttttttcgaataattttacataatattcaaaaaaaaaaaataaataaataaatccattcatgtctctttttttattgcatcaaacagtcacactaaagaattaaagaaagatcttcccacctccgctcaaaccgtcaattgtttatcaactaattcaattgattgttgtaccttactttttggattttaactaattcaattgattgttgtaccttactttttggattttatgcaactattcaattctactgcatagtagaaatcatcatggaacgcagatgatatgagcaaacataattagcaagtcaatttaatatattattcttaacgaaaaaatcatttgtcccctcataatgaaatgaaagaattaaaatcgtaccaaatattcaatatgacctatttctttcaatgtaaattcatctcaaaatagttgtttactaaatggctttggagaaaatcatatatatgaaagaagcctaactctcttccacagcatgacacctcagcactccagcagttgacacatcagcacatattttcatatatttacaaaaaaattattaaaagtaattaaacgtaatttgttcaaacttttacataatgaatcaattaatgacatttcagttttacctctttcgtctccttccaaattccaattcatcctcttcgtcttctttctcggaatcttactcgccaatctttccaacttcacattttgttatctatttaactcaaatttgtaataattttttaaaattcacctacatgattagattgaatatgcagagacatggttaataaagtcatgttatatttttagtttaagaaatatattttctaaaatttcaccgtctcacaatctaaacatataaccaaaaaaacagggatatataaatttttaaaaaaaactgaaaatctagaataacaataaaaaacaactcaagcacattcgtttttcagatgaactaatatagttggacttttcaaaacaattacaaatcatatttatgttttaaaaccgatgcattcaactttattttatatgaacagacattatataaaacaatttgtaaatagtaatacataaacctacgggtactcatctagtataagagatatgtgccacctctataaatacgatttcgtcgcctctcaatttctattcccaactataatatcttctcgttgacgatttagggttttgaattctcagatcttcagtactcctagacgaatcctctcgtttgatttctttctttgaatcctttgattgtgtgattctttgtctcttcttcttggtttgagaattcgattggttgtcacgtctagggtttttcttgcttagaaaaatccgacaaaacagtgattcggttttcttctcttgcccttttgtaagagaatgatttctacgatgtactcagaagaaacatcggaaagatcttcttttccctctaaacgacatctcgaagaccgaactgagaaccgtgaagaacatagcaaaagattgagaccaacaagtttccgtgatcagaaggtaaccatccctcaaggttggttagattgtcctcgctttggtcaacatattggattaatcattccttcgaaagttcctctcagtgaatcttacaacgattgtgttccttctggcaaaagatacaatttcaaacagtggttaactaagattggtcttgtgattgatctgactaatacaactcgttactatcatcctaacaccgagttaagacagaaccgtatcgagtatgttaagattcgttgcagtggtcgtgattctgtgccggataatgtgtctgtaaacacatttgttcacgaggttactcagttcgagaatcataacttgtcggagaagtatcttcttgtgcattgtactcacggacataatcgtacagggtttatgattgttcattaccttatgcggtctagaccgatgatgagtgttacacaagccttgaaaatattttcggatgctcgcccgccgggtatctataaacccgaaaacattgatgctcaatacagattttatcatgaggttaaacctgggagtgttatatgtccaccaactcgtgaatggaagaggtctgaaaatgctagagtcgacgagtgatgataatgctctgtctatccgtgaggtgcaaggaagcaatcaggaggagaatgtgcagttgtctaatgatgatgttttgggggatgaaataccctatgatccagaggtgtcttaccagaattcgattaatcatatgctgaatatttctatgcagttccctggctcgcaccctctatcgttaggtacagcggcattgcaactcttgaggcaacggtagtattacgcgacatgggaggcagatggaacgcggtacatgatgctcttggctagagatggatgttatctggttcatagagagaataggtttaggagagtacaaatgagtttcccttgagagtgcgagccaagtgattatacagtgcatcattacacattgcttgatgaatagatggttcgtta

SEQ ID NO: 223 - DNA, 553 bp, Arabidopsis thaliana landsberg
aaatatgagtgagctcttcttccagaacttgtgctaattctctctttaacttatctatctttgactcataaaacctataaacatccgcagttgctgtgtttcgactaaagaacttcacatccggattcaaatatttccaaatttctctaactctatcatactccacataagtaaatggcagatcgtgctggataacatgctgatttatctttctagcttgcaatcttgcttccgaattaaccatcatctgcccaatatcaccatttttaggcacaagcttacatttaagcaaatgacgtctaaatgtgtttgtaccaattttgtgagcattgtacgcataattcttcttgcaaatgaatgcattgtactcttcctcaagctattaatcttggtaatcaatgcgaaatgttcccaaacttctgagttttgccttttcttctttgggtttcgatgactttcccttgtcagcattatcttcatcatcatcaataaacccctcatcatcataatcggcgttatccacatcatcatcaccctcatagacttttatttt

SEQ ID NO: 224 - DNA, 1832 bp, Arabidopsis thaliana landsberg
atgccaaaagggtactctattgtgatgttgccacatttattttggcaattctcaccaggttgatgttgccccttccccagctgcgtacacgcaagggagaagaaaatagccaccaagaacaaaccctcctgcaccttcatcttttacctctcttctctctttatttctctctctctctctctctctaactctgttcctcttttgagttttttcgctaatctccttgttcttataagaaacaactgtatacgagatgttctctctcactcattttcgcaggccccttcccattttcccagaaattgcaagaagactaaaattcaactacacaaccaacgtaaccagtgaagaggacgtttaagtacgctgctgcttattcctgtatagtatcctaacatccacgtttgcttcggttaaacagtgacaactatagtctataggtctcggtcttctcgtcttttcttgatatcttgttcgttagtgaggacaactacaggtctcggtcttctcgtcttttattgatatcttgttcgctagtgaggaaaccaatttgcttttgttaattaataatagtgagtgacacttacttgcttactattcaaagattaagacagttgatagttggaaggaatcttcaaatgtcttggtcctctgttcttttctggatatcacaaggcaaatttactctttttcttaacagatatttccacctcaaattaagcttaaactaatcttaataatatattaattagttagactatatgaaaattgccttttaactataatgactatatgtagaaattaagactcctgaatcttgtgatcacaacatgctctgttttcttctgatgcttttattacgagtttttttttcccatattataacatcacatttagacatttcgagtcacaaatcgaagtttaagagttttacatttagatactacattatgatgattacaaagagaagagtaatatatatatacctgagcaacaagaagatgacatacatgtcaattgatcttttactccataagaaaggaaacatacatttacataatcttaagagttaaatatatagctcatgttaactgaataactacgataatgacgatgaaaacggattttacatgtttctccggatcgtgggacattagggcatctccattagttagagactaactaggtctatgactagaaaatactcttgttttttgtaaaactcttcttctttttattaaacgcaggtacaagacaaaaactgattcatcattgcataaattgagtagttacacgaaaaagcaaagtctaaagacatcatatcgatacattgtcagtgagctggacaaaacctcactactttcctctccctttgtctaattgaatcatatacacaagttgaagttcagtcttgggacagagtaaatcacttttgcagcatgcaaccaaaggtaaaagcattaccaaacatacaagtaaaagttaaaactgagaattgagattcctttaatatttgagtctgcactttccccaacttttatcttcatccactgaagttggttctaagataattttagtctgaatacgtgcttggtattattagtaagtcaataaacatgaattggggtaatcaaatggaagtagacaacaagtgatcatgctttgattggtgactaacctgccaataatcgtaggattgctgactaacacttactaaaaatcatatattttaacaagaaacaaattaagagatttgatgtgatatacaatatcaagcaatcttatgcaacaaaaatgatgggttgtaaatgagtaaagaaacatgatgactc

SEQ ID NO: 225 - DNA, 1632 bp, Arabidopsis thaliana landsberg
ggagtggtggttttataagcgtggggagtgatggggatttcttggttgcatgtcaagtgttggtgagatgttaagaggatagggagtggtcgagtgatgagggaagaagcatggagatttcgttatcaccttgtggggagcgtgggagacatggctgcagcagtgggtccctcatctctctctttgttctgaatcattactctatcttcactaggaaaatctcaggaaatcccgcaatcttctgtaaccttgatgaactctctttaagactctgtagctcctgttggtcgagtaaaatgatgatttaaaatttttcgggttttttaaaaatcgctcatactcgacaaatgtactcgatctctaggccatcagtagagtaaaagttttgaatttttactctaccctcacgttacttctttttttttttccagagaaccacaaacacaactaaaacaaatcaaaaataacaagaaagtaaaaattatttacaaggataatcatgggacttcctcccaagtgagcttgttttaaatctctagcttgactcctcacacttatcaagaagaaaatgaactatagagagggtctgcataatcctctctgatatcatcatcatactcagcgttctccctggagaggtctgcaacagaatactcaattcccctttcttcaaaataggcttctttctcttctggagggtaatctatctcttcagaccatcttgaagtgaacttttttctcgggaaagtgttaatcccacctttaggttgagcttcgttctgtatctgattcagcttactcctaagttcctcaacagagtgagctagcctctctatagtttcttcttgcttatcagacctctttttaagctcttttactttcttagtctcatacccttctcttgggatcactctatagtctttagaggttttttcatcaaactgcaacttgatgtgctttccaaagttgaggcttattttcccttccctgacatctatcacttctcccactgaagctaagaagggtcttcccaggattaagggatccttatgctctacttccatatccaacaccacgaagtctgtaggcacttccactccattaatcatgacaggtagatctttcagcatgccgaagggttttctggaagacctatccgcaaggatcaaagtcaggtcacaaggtctgtactaaataagctgacattaagctgacagaggctctgagatcgagatttctcacatctttgtgaggatcaggaatgaggttgagaacttccattagtggcatcactgcttcaatctcgtctagctgtttcgctgcaacagacttgtatctctccatccacgctttcctaaatgtccatggaagagcacgtgagggtaatggagtaggtttgaatcgtattaccattctctcgattatggcggccttctcttccgaggtgtattgaaagagatgacaagaaccagcagaacggttgaattcaacaacagagtcttcaatctgagtagaagcctccccttcttcaacatcactgtcctcagtgattaaatcagggacaggtcgccttggcagctctcgatcatggcaaatagtggagcgtgagcagttgcttacaccattggattc

SEQ ID NO: 226 - DNA, 3652 bp, Arabidopsis thaliana landsberg
aaatctctgttttacactccttagtgcaatggtaatttggaggttgaatcaccaccgacttccaccacaatgtcacgcttctttctccgccggagtttgcaagcgaattatgattattaaaaaaatatggataatgatcacaaagttcttcaagccctcgaaccaacctccacacacaatcttccgttggatcattccaataaagactatgattggaatacgacactagacgcaaacatttctctaccaaacaaatattcgtctttagctcaatcttcaaaccatccatggcataaacctttccacccattactaatctatcttgaaccacactcttttgagctgtgagatctagtgttgtaggcaatattggctcccaagtatgtgtctttggatcataaacctctccccaatcctcgatatttttggacgaagagcctccaatcacgtacaacttaccgtcgattacatcagcggctggagaaactcgaggtaggcgcaatgtttgggagactactccattggtgagatagagaattgagtatcaacactctattgctcctttgtctattcacgatgcctccgataatgtaaatcaatgaatcgactaaaagaatggtcgagtatttgggatgttgataaggaaacgaagggatgggtagtaacttctgttgttttggagttgaggaaagtatgaaccagctagggttagggtttttcttattgaggtctaagcaaacgaaatcttctgttattccaatgcggagtcgtgtggcctcgagctcaggcgaagcgatgagagatcttaaattcttggagactaagaatagagttggataatggattctcgagacacgagcccaacaattcagagctacgtcgaacggtaacgacgaaaacgacgtcggaggagacgacgactctgatgatgatgatttcggggagctcatctcttccgtcgtcgtttgtgtttcgattttttttttcatttgagtctttaaaccctaatcatcattactttacccaaaaaaaaacctaatcatcaattagagaggaattcaaggtctgatgggcttttatttaaatgaccctttttgaccgaccaaggaattatatgatcaaaataaatctgtgtatacaaaaagaaaaaatcgtagtcaaatcttgtgtgagaaagaagaattgaaacgaaggaacactaataaattacatatcgtgaaaggtctaaattcgagaacactatttcaaacaagatttcaagtaccattacctaacccaacgacaaaacctttcacaagtggtgggtcgatattttatgttcttaggccacatgcttatttagtaatttagagttacattcatgtaatttttttatcatcatgcatctcttgaaaacatactcaagatgttcaaaaacattcccgacaaagaaaatataaaactccctcagatactacaacaaaatctcataagcagaatctatctaatgatcctaaaaatacttggacatatcaattaatgtgtgctaatcgcagaattcaagaagaaatcggaacgagggtcacacccgtcaaaggtaaacacattcttagaccattcaacacatccccaaagctctgtcagaccacgtctctcaatcagggccggtcctgagaattaatgggccatagcaattgtttcaattggctgtgctcagggccagccctgctctcaatcgaaaccggccataggctttgttttgctatcggccggtttcatgtaaagaagcaacccctaggaagtgttattgatgtacaaaaatcagaatccaatatttctataccaaccaagcatacaacccctatatatgagttgtgctcacaaaccaaacaaagtcataatagtctaatcttgtgtattgaaacgaaggaacgttagtaaaattttcacataattgaaggtctaaattcgaggactaattaccaaattctttcacaagtgtgttgatgtttatgttcttaaattatttgcttattaagagacacacaagctgtttattgtctcttaaattctcgaattatactaaaaagactccttacagaaaaaatctaaaaaaaacaaaaatacatcccattgatcaatatgtcacaaggacagaatccataacaaaatccgtaggagaatcacatcccttacatgtgaacacttttctagaccattctacaaatccccaaagctcttttaaaccgcgtctctcaaacgaaatctctgcacaccaaatctctgtatcaaattccgtagaatagccaagaccttgacagccaaacaccaccacagacttccaccacactgtcactcttcttcctccgccggatttgtccacataagaaagatgattacggaagagttcctgttccactcccttaaccctagcccagccaaaatcatctccccttggatgacgccaatatagcttcccgttgaatacaaatgtttggcacagcaagttgtctatctctacaacgcaaatattcacgccatgcttgtcataaactttttgagtggtgtgatctagtggtgttgtgagcaatgttggctcccaagtttgggtcattgggtcataaacctctccccgaatctcgccgcctccaataacatagatcttaccgtcaatgacatgagcggcagcagaagctcgaggaaaacgcatttttgggagtatacgcgtttgatgagatcgacaatcaaacatggacactttcttgcttctatttccccaaacgaggcctccgatgatgtaaatctctgaaccagttgaggagacggttgaggaattgagatgataagtaaacaaagggacgggtagtagtttttgttcgttgggaagtgggggaagtgtgaaccagcgatacttagggttgctcttagtcaggtttaagcagatatagaggaacctctcggtttttccgatgcggcatcgtgtagcgtagagctcacgggaggcgatgagagattggaactccttggagacgagagatagagttgggtaatggtatctcgagacacgagccaaacaattgagaacgatgtcgtatggtaacgaagaaaacgtacgagaaggaggaggaggagactctgatgattcattcatctcttccgttttcattatctatctctcagatgacttagggtttctgtgctttgtaaaatatgagattttatttatttattatggagcaccttcaggttaaaactaaaattctgattactacgcctagatttcggaagcttttattgaatagaatttttgtaggaaaatctctgtgatctcttatgatattgtggggaatttatgatagtttttaaaatatatttcgagattatcgtaattaatttttaaatattttttattacggttatattatcaactttttatttcctaggaggtgaatgcaaaagcacacgtctaaaacacatttagtatgggaaagtcaagagaacaacaacgaaatataaaggttgcttgagcatgtcattaaatatagctcacttatctaataaaaccattgataaatcatctttaactaaaatctttaggaatgtaaaatgccatctagtataaaattctgcttggtgtaacccctataaaatatgaaacaaaaaatatctagtt

SEQ ID NO: 227 - DNA, 1848 bp, Arabidopsis thaliana landsberg
ttaagaacaactaatccagaaaggatctataaatcaaactcaaccaccttagcatactgataattctaaactactctaacccatcctgagaaacctattcactactcagacatcattgcaaaaaacataaacgatgaatcgaatgaaaacatgataacaacagagtaatagcaagatgataacagattgaataacttagtaaacgaaatcaaaagcaaatactgaatactgaatagattaagagaaatccggattacaaaaggtcaagagcacagtgtctgcagaataaaacttatgtaaacgaaaatgtaaaatacatgctacctatagcgaaatattctgaaaaccctaatactcaaaacgacgcagtattgcgacggattaagaacggtacttaacccaggtggaagagtgagtggtcgagtgataagctggagtgtaacaccccactccaacatttaatgggctatttgttatggagaaagagaaagatgatcaaagagaagtaaacagattagtggagaatgcgagactcttcggatgagaatggatcgtcaccaccgcaatggaggaacatggagagaaagagatctggttcatgtcattaaggagaagtgagatgaagcagatcttagaaaaatcggagagtgggaaaagcaaagaaagaagaagatgagaaaagaggaaagaggaagaacagtttcaagaaggtttattgcagggtgaattcccgacagaccagagggactcagataaggaataaggtgtctatggaaagaacacgctcccaagaatccacatcaactgacagatcttcaatcagatttaaagtcaagaagttatgcacgtttctttctggtcaagtaattgtaaagtctgtcaaacccagaaaacccgaaaagacaacccgagggagctcgttgacggcaacgtttggaggttcgaaactattctgatatggatgcaactttatgcagacgttcatggtactactatctacatattcaacggtgggatcacgtttctaacggttagttcctgacttatatatacgttactgtgacttttttgtatggaataaccatgacgagttttattgtttggttgggcaaacaagatcggtttgagcctaagcttttcagggtcttcaagactcagtgttttagttcttggttgatgaaggtgttcttggaagcaagctagtaacttgtctaaaggagaaaggagaagagagttgttcttcatcttcaactaggctaaggtgagggtggtatttgcggatatgcagtaaactttttccttctatactctttgatagttactgggtattggctcgagaattgtccttgttgatttatgtgaatttatgtgaagttaggtagttagtaacatgatatttgaaatgcattggtgacatgatttgatatatttaatatatattaaattacaaaattattatgtatatgagaatataaaactaaaaagtatggaaaagatatttaaggatgttggactataatggggccgacgggtccattacaagtcattaaccgttgacgagcaatgagaggaaggatcgagctacgggttgtggtcttccagaaaataggcttgagtagccaaggttaatatgcttgactagccaaagttaatataggcttgtgaagccataaagtaaaatagtaaaactaaaaatgaaagtaaaatatactgttgtgagcaagacgcatgtttgtttgtttgatttttagacattctgaatctatgctaagtaatggttgttgattatatttggaacgtttttactgtatgtccagtgggcagagttgatctccacactgagtaacg

SEQ ID NO: 228 - DNA, 595 bp, Arabidopsis thaliana landsberg
aattttgattacatgctcaaatatagaatcattatttattcgaatgcatttaaaggttagccattagcctttgttcgtgaagctattataagcctatacctatattagttatcttaatctataactcccaatttctctcgaaactaaataattgtaaagattaaaacaattttcagttacataaaaaaaaatatacttgtaaagattaaaacattttacttgtactagagaatttttatcaagtgataattaaatgtgagcaactgagcatgaagcctccgtgtcatatacttactagttttggccatgtttatttatctgcaaccgaaatgggcaaattacttttttctcttatcaccttgacttttgttttttctattaaaattatttcttatattatggttgcgaatggtgactgcgttttgcagtacgcgagaagtgcggtacgattcaaatagtaataaaaatcagcactgttgcggtacggttttaagtgcagttttggtcaccattcacagcctataaatcattatacttttatccaaaaaaatatataaaaaatcattacagtaaatagtttattttttgtacaaag

SEQ ID NO: 229 - DNA, 6849 bp, Arabidopsis thaliana landsberg
caatcattcaaggacaagctattagagctatggcttttgacaagaatgtagctgaatgactcaaccagattgagttgttcttgctgcgatctaaatgtcaagttcaaagctctgaattcaaaaatcaagtgtgtggagagtcaatgtgcatcaggctcggcttcgtagcatcctcagcaacttccagggaaagcagtccaatatcctaaggactatgttgctgctgatgctatcaccctccgccaagaagatgagtctcctccaagtgatcagactctcaataagaaggacagtatgattcgacaagggagaaattcaactcaaattgttgcacctgccatccaacaattcatttggactatagagcacacacctttgctgaatactcaccattctaaaaaaaaattcaaaatagaaaaacttaagaaggatcagaatcattagatgattagcagtgtcatctcccatgaaacttacaagaagaaagtcatccaagaaaagcttgatgatcctggttcattcactctgccatgctctctaggaccattgacattcaataggtgcctttgtgatttgggaccatctggtagtcttatgtctctctctacagctaaatggctagggatcatggaatacaagttctacaacctaggtttactcttagctgatggttttgttgcatatcctcatggtctaatagataatctgcctgtcaagattgaaatgttgagacacctttaaattttgtggtattggagatagatgaagaacgaaaagatcccctgatcctagacaggccattcttaggttcagctggagcagtcatgatgtcaggaatggaaagattaatctgaaccttggaaaaggcatcaagatgaaattttgggaaatcaacaacaggaggtcaataatttggaattcaagacattgacgttgatgaagaaacagaagctggaaccccacccagatttaattatacttctcaactgagcaagctgaagagaacctttgaccacaagaagagagcaatagaagtgttagctcagactgaagatcctacagaagatgactcgtctcagatgagataaatatttaaatggcaaattagagtcatagagggattatcttcaagggggatgaagcggaaagatcaactatggatgtttgaaaaaagtgttaataagttttcaatgggtattgacctagagaagatggaaactgcactagctattaaaaaggacgaagatttcacaacagaatggtttgcaccaaaagatcaaaaaggagttcacttagaggaaagaagcttggagagcaagtttttgggtgaggaggaaagcccactaaaccctctgctgaagaagaacacttgattcttgattctgttgctgaagaactcctggagctcaggattggatataaagctcaggaggatacaattggaaagttaactcataagatggaagagttaaatagcaccattctggaacttcaagaaatggttaaaggctaccccagttttgaaattgaggattggtcaaaggagcctggttcaaaagaagaagactactctgctgatcaaaaagaagcttattttgaagaaaaatcaaatgagtactcatcctaccatatgtcaagaaaggatgcaaagtatgattcagacactgaaaattcaaccactaaagatgagggcttctcagctcctctcttcaaccttttttctgactaagctttgtaagagtcaaggttagtgacttaaaacaagctcacttgggggggaagtcccatgtctatccacgtatataactttctattttccttgttatttttgatgtttttcttgaagtgtttcaggtttatttcatagaccttgaggaattcaacggtcgagtaaactcaaaccaagtcaagagatgatctccaccgttgatcgagtaaaatgaggaggagtgctctaagtcgttggattgaatgatcaaatgagaaaagcatcatcaccgatttgatcgagtgacttcttgaggtttattatggtccgttcgatcgagtgattaatagcgaagcactctccaccgtctgattgagtgaagaaaccaaagagaccaccttgtggattccgacgcctcgtgacccgcctccattgaattccatgattcctccttgtcttcttgtcccctcataataatttttggtccccccattgtaattcccgaacactacaacctcatctctccacctcccataccaaagcaatctcgaattcttatatctctctctatctctttctcttgcacttcctctttctataaaaaaatcaacaaaatctatctattttcttcatcactggatctcttaacctttgagtctctctttctcaatgacaaacaggcgtacgctcctgtcaaggatccggaacagagctctctccccatcgaagaggtacccaacaccttcttcgcatgcagcagctcgaggactttctgaaccatcacccatggggtcgagcaggagagaacaagcaagtttcgagatcgatcacagcgaatcaagccaagaggaggaagtgatgcaagaagaagaaactttcagctctcccgctggaaatactcgatcccgaaggtcgagtaagtcctctgcaagggagttctccaggaacaaagcagatatcactcgaggaaagaagcccgtggggaggaggttggaactggtagatgaagactttgaggaagaaatggcttcaccagaggaagaaatggcttcaccagaggaagctgatcacacagagagaggaggtggtgatgatttggaatcagagaagtgtgcaattcgaaacgagtactacaagctgctgaagcgaaatgagtttttaggaactcgataccctcatcccgagaccatggagagactcggcatctatgatgatgtagactacatgtttaagcactgcagcttgaatattcacatgtttcggccaatagagggatatgaggaagagaccatcgagtttctttcatcggtagagttgttcttatatggagagtcaaaagacgatggaatcaggccagacggaagtttgggatactttaagttctttgtgtatgacgtagagtatcggcttccaatcgagtatcttgagctgatgtatggatttctaagcggaaaagacacaagtcatcgttttgacaagagagagcttcagtcattctaggccacgcttgagtctaaacatgggttttcatcctctaggaccaagagcaacgagataaggagtccggtggtcagatactttcataggtctttagccagtgcactatttgcaagagagaggaatgggacctttgtcaatggagagctagaattaacggagacagcgctgcaggagctacttggtttagcatcagatggtacagttctagctagagatcagacagacgcttcaatctcattctacctaatcgaacatttgctgaattacagaggatgggctaagggacttaagaaaccaggaagaatggttatgggaggagttttgaccccaattttgagagcatgcaatgtacctatgcattcaaaaccgattcctccaagatggattgatatgcagcatcttatcaattccaagagtttttggtcgcagaagaagaatggcttatagaaatataagttcgatcaccttgaggcagagcaatctatttttcttctcccaaatcccgcttccactttgatcagagatggtggcaacattgagttttgcccaccagtcgagaacccctatacttcaggtgatggaaggagtgaatgatgatgaagctctaatccatcatttagataacgaggcagaacctatggacgagtattacgcaacacaacagttttactttgaggagtactccgtgccaaggcaaagtaaagactcaaaggaaattcacaagcgccttggttttctacaaagctggtgtaaacttcaagacaaggctctcgcagcactaaacaagaagtttaacgcactccaactcaagttcagctgttcttcttctactatggcgatgccacaggagatgccttttaggagaagcagatccactcgacatgaacctatgcaatatgatttgctttcgccaccaagacattattcatatgagccgagagaactccatactgcaccttcaccaccaaggcaatcatcctttgaatctagggagaaggagaggaggagtaagttaaagaagcgcagaaggaaaaggaaatcagatggggtaagccactctaccgcaccactcgatcaacagcccgagcaaagggtagagcatccaactaatccaagtccagcacaacccgttccttggagttacacaaaggagagtatggatgacttcgtctcctcctacttcacctaaacgctgaggtaacaccaccacaaccattgtatataccatagcatttttatttttctttgtgtgttgttagttttggtcttgaactttttctcaaatttttattacacaagggactgtgtaatttaagtttgggggagggttcaagacacgttaaacattgtgttctcttttcttatttcaaattttgaatcatctaaggcatagaaaaaaccataaaaatttgaaaacaaatcagaaaatgatttcacaaaaatagagtgtcatgtagattgcatatcactttaggattgtatatagtgtatttgcatttaggattcctcatttgcataggggataatgatgatttcaaaccgataagcatgttttgattcaatgaagtaagttcaatgcccaagttgttagttctctgctgcataaccgattgtatctctgaagtatgactgcatcctgctttgaatttgtaacttgactatactactttgattcgaaactcgcttatctgatgccattccctatctactagaacctaaattgaatttgtaattatcatgtctatgcatggtttgtgaactcatggctaccatatacatacttggattatcttattcacttcaccaccctctgttaatccgaatacctgactctcatttttagagcagtttcccatacccttaacctagtcttattttaagccaaatatcatttgtgtgtgattgtggggtcttttttgattgagcttggtataacgtgttaggtatgagccgacaagagcagtcttccatgtagacctagcccacgctttttgggttagctaggactaggtggagacttgtatttgggattgggattgtttatggattgaatgggaatgagaatgagaatgaaaaaaaaaaaaaaagagaataagagtttaaagttcttaagggggatacaaaaagtgttagtctagtaaagggtttggaatttaaagaagttaggcattatgattcaaggaataaaacgccctctatgctaagattagaagaaaagccttaagtttgtcaaagtttaaaaccaaatccgctagactcttgaatcgttttaaacaagaaccccttagaatttgaactaaaaagagaaagaatgagaaaaaggatagagttaggacatttatgggactgggatcatcttctgagctatcatattatatatcattgggtagatgggagtctgttcttgtaagtgtctgttggcttttacctttagcattctgctgaagctcaatcttttctctgagagtcccctgttactcgaccaaatcattagagggaccatttctgtctcttagcctaagcccgaaaccaagtgagttcaaaaccattgcttgatccactgttcgtgcttaatgaatgttaaaggaaattggttgatgtgaatgcttaaatagattaaggtatgttgttaggttgcattgtgacgagtatggctaacgtgtttgagtaagggtctatcatcttgcaacctaaaattacctacttggacattgagcttacccttttataggcatgcttcggtttttgaatccccaccttcaaacctctcattcaacttaatattttttgtttgcttgagggcaagcaagagataagtttgggggagttgataacacagtattttactcattttaggtgtatgtttatcatcatgtagctttgcatttgctcattgtatcatatcattttgcaccattttagcttgttttgcatatttaggcatttaggatgatcttgcattcgcattgcatgttttggtgtgttttcaggtgcaaaaggagcttaaaaggactctactcgactcattcactcgatccaggcagctacagaagaggcatcattctactcaacctctttactcgatccaggatgccacataggaggctgtagtttactcgatcctcgtactcgatcaaggcaatctgagatgaagcagcagattcatctactcgcccctcttattcgatcaactactcgatccatatactcgaccaaggtgaccatctctacaagacttgttgagctatcaaagcgtcttcgatcctcctcattccccactcaaccagacatctgagcatacagataggagaggatgaagcatctagtcgaccaattgatcactcggagcatagacacaaaggcgcagactttttgcagcaccctctttactcgatccccaaggtcgagtattcgcccaaaccgcctcaagtctcttgtcttctagtgaatctagggtttcaacattttagtataaatagatcactttgggatttgtccaaaggatctatgctttatctattagtttttctttgtgtttatgaatcttgaaactttaattactcttaatctatttcgtttttgcatttgattgtttaagtatagttgtttagcttgtttagatctacattttggtataattt

SEQ ID NO: 230 - DNA, 1457 bp, Arabidopsis thaliana landsberg
  unsure (1)..(1457): unsure at all n locations
ctcgaccatctatgttttaatttgatatctttgttctgtttttcagctggctaggcggccattgtttttcagagaaactaatccgcagcctagaaaacatactttgtggcaggcgacatcggattttactgatggtcaagctagcatgaacaggtaagaacatttcttatgtccttagtcttaactcgtgagtataggctgataatggtttctgtatctttgtgatatggtaggcaacattttctgcagtgtcccccagggattatgaacaaacattttgagaagcttgttcaatgtgatcatcgcttgttctgtctaagccggcagccagagataaacttggccgcaccgttctttgattcacgactatctatatttgaggatccctcagtgtctggatctcataatattgcatctcctgttggggctcagtcatcatcagaacatgtgtctctatctcatgacgcactatcgcctagctcaggtattttgtttgtttccactatcttatcgttcacattcgtttctctttacttgtggtcatacgttcttgtttatatatagtgatggatgctcgtgcaatcgaaggagttggtggttccgttgattcgaggaatacaaacggttggagtcagataaaaatgcctggactacaccaatctatctcgatgaacgatttccttacatttttgtcagatcaagcttgtgaaaacaaccaagagtttgaggaaatgaaacagttactgctaagtgacaacactcaaaccgatccatctgatgagaagtctgtcatgtcaaaggtgaattctttctgcaacctcttgcaatctgctgcaaactcacagctcaatatcgaaactnnnnnnnnnnnnnnnnnngttggggtcgataacaatagacacatgcccgaaggaggcaaaagagtagttgaccctgcttcaagcagcaagccactacaagggatgtcaaggaaagactcattcagtgatttgctggtgcaccttcctcgaatcacatcactcccaaagttcttgttcaacatttcagaagaagactagtagatagtgaaccgaaaagttcttgttctaggaatcttgaacaagtagctgtaaatcaaattatctctctcgctcttaaggatttggaggaacttttgtgtttgatgatgaatccttgtaaagaaatgcttttgtgatggcgttttctaaaagccatttctttttttgaaacattaacaaaactttattattgctttcatcctaaactcgtgttctttgttatcgtatagagaaagagaggcagaacaagtaacttttcttcacaagaaacattttttccttcgaagacgtttcagttttaaatatggtttgttttggttttaatgcacctcttcacttcccccaagcgttactttcatctacctcaaagtttaaatagagtagacgaatggagatctt

SEQ ID NO: 231 - DNA, 1527 bp, Arabidopsis thaliana landsberg
taacaacgggggccctgagttaatctggtgaaccaaaatgcttactaggctatctcatcattagcccctatgcatatgcaataatcctaaatgaaacactctatactcgatcctaaatgcaatgcaacaacatgaacactctatttttgtgaaatcattttctgaaatttatcaattttttttgtttttttctatgccgtagatgaatgcagattcaagattatataaaatgcaacacacacttcctgagccctcccccaaacttaaatcaaacagtcactatgtgaccaaacttggaagagagtactcaggacaaaaatcatcacataaacaaaataaaaacaagagatggtataatacaatggtgaagtgaggtgcttacctcagtcgaagaaggagcggagttggtcgtcaatagctgcatgtgattgctcccaggccattgaagaatctccctgtaagtctttgtagcttctgttggtcgagtataaagatgatttcaaaattttgggttttaaaatcatcactaatacttgaccaacctactcgatctcatggtctctaagtgcaacagaactttttcaaattcttgaatttctctacactgacatactcgatcccctgttgctctttagagtaaaatttttgattttttactctacctccacgttgtttctctgttcctgagaatcacaaacatacccaaaaacaaatcaaaaataacaagaaaataaaacttttatttacaggaacagtcttgggaattccttccaagtgagcttgtttaaagtctctagcttgactcctcacactcattaagaagaaaatgggtgatatagaggacctgcatagtcctctctgacctcatcatcatattcagcatcctctcttgagagatgtgtagcagaatactcaattcttctttcctcgaaataggcctctttctcttctggtggataatctatctcctcagaccatcttgaagtaaacttttttctcgggatagtatcaatcccgcattttggttgagctttctctagaatctgaactagtttactcttaagttcctcaactgtctgagctagcttctctatggtttcttcttcctcatcagatttttttttgtgatctcgcaaatcaggtgtagaggttgtgcttggtctggtgattgaattcgaaggttgaggttgagccctcatcttttcttctgcagctgtcctttgcgaagtttcgttgatgtcaaactacaaccatatgtgcttcccaaggttacgatttattctcccgtctttgacatctatcatcgctcccacggaggctaagaaaggtctccctaggattagaggatccttaggttctgcttccatctcaagcacaacgaaatatgtaggtacttccactccattaatcattattggcagatcttgtagaaggccaaagggttttcttgaagacctatcagcaaggatcaaagtcaggtcgcaaggcctgtactgagtgaattccagctttcttgccacggagagt

SEQ ID NO: 232 - DNA, 1012 bp, Arabidopsis thaliana landsberg
ggattagatcctgaccacctctatataaaagaaaaaccctacctcgctcgctgcccccaataaatacctctgcaccaggaaaataattcttttcagtctctccattgcttatcattttctatgtttctttattcatttatgttttcgttttacattctttctaatgagtttttatttaacatcaagtcttatgttactcgatttatatatccatctgattgcaaatgatgagttaaatcaccattgataaaaagaagctcaattgagcactgttggaaatcaaaaacttccatgactctgatgcaaattttgatcaagaaaaatcatatccttgatctttttttttctgttctttctcagattttgttaataatcactgaattttgcttttcaaatgtatttttctgtttaatcttaataattctctgcgtatttctcactagcgtttttaaatatatttttttctattaatctttggtattttttactaacaagactgccgaaaaataaaaatgaatttgatcaagtgcaaattgtactgtacgatatataacgaatttgatcactatataagtcacaatgatgagaaagtgtacaaaagagcttcattcatatacaccaagacgaaaagatgaagaagatggaatcaatcagaagtggttttggtgcaacaatagccgttaaaatgttgctatcattacaaatctcataactaaacaaaaaaattaaccaacaatttcgaagaatcgatgttttacgacgcatcgttatcgttgtctccatcgaaatattcatcatccctctggatctgcttatcccgtgaacgctctgaaacattcaaaccgttagcaatatataacattagtcactaagaaaacaaagggactaaagtagactacttgaaggtggttattgataaaagcatcaatttgtcctatgatgaaaagagtttacctcctgcatctgtacgcttggagcgtgttgaaagtgtggcaaattctaaaaaatctgc

SEQ ID NO: 233 - DNA, 4125 bp, Arabidopsis thaliana landsberg
aaagtgaccatttaaacgaaacctttttttaattgaccttgtcatgttttcgaagacttcatcatttgcttgttttttgagcctttaaactagttcttgtggggtttgcattggtgatatcattctcctaatgtatgtttatataaatctcaagtgtactattttcctttgatgatttctcccaccattttgttctaaaaaatgactaatggaattatttctacgcaatcaaatcgttataagtgttatttataatggctaagagattgacatgtgattaggaagagggcgtcaaattaataaaaatttggtttgacgagtctttcgtatacgaattgtgcttatactaaatcggactagttgtaattggttacactagttttgagttttggcatgtaataagttgtattagctctcctataaaatatataaaagaaaatattatcatgtttagtcactcaaacaaaacaacacattaaaactaaactttagtgtatagtttagttttttaataaatgttgtcaccatctcgggaagacgttttagaattccacatgagcaattagaaaagacataatcaattcagtcattgttataaaacttaatagactttgtagagcagctagagtaaattatgacattttaagtagctcattaatacattcaatatgtagagaatctagatataacactgacttggatttgggttttccatcgatcatacgttgataagagtaaatataacccactatctataaatcactttctaggaacatttttgacgatcccggatgtgagagaagatgaaggatagaaagttttgcggaacttgaggacattccaggcagtaccagccgcgtggcccgctgttgctagaacgtctcctgtcgcctcccctgcattctctccaaacctgctttgccaaaatttgttcttattgatcaccttattatcaccttaaaactctgaaattttgtatgatcactagtgacttatcatgaaaacatgaatctcaaatttgaggattgttaggtgaaataatttacctctcactgaccattctggtagcagccctggatgtagcagacagagtttgcctctctgcggcttcagttgcatctagtattttatctatcggatcaaacaaaacatatattacttgttccagtttttgacctccaaaggaattgattatattataacttactaagggcatcaagtgaagccaaaaggacttcccctggaaccatggagaagaaggccatccccggtttcgacttcatcacagggaccatcacagagccactcacaactcccgcaccattcaacatcgtcttgctcagattctcagtcgcctttgacagcttcctcactctatatacatgttacatccatccaacaaagcagccaagatatcaaacgaatcaagaaccaaaatatctgtctttattctgtgtttttgcgtttacatttgagtgtattacttccattgagataaaatcttacgtgaacgccaaatacaaacaatgttttaaactattgagtgaataccgttgaaggtttgtgttgattccatttttcttctcattaccactggagtttccattgttgtaacctccatttctctggctctcctcagcctttgtaatcattatgtcacctcccttgtgaacctgttgtctcataaaactcataatcatattatgtatatatatacatcaagaaagcttcgaatatatcatgagggtgtgatttaaacctggttagagtaagcattgctgagactaaagattcctctaatgatatgtcctgttcctccagcaatagccttagcaacaacgttgttatagtcttcaatcctcggcgcaaactcttgccagtcgattccattgttaaccttactcgaagccgtagacgagaaacaagaattctcactcaagaattggtcaagcaacttcagactgttcacgagggctacgtctctgtcatcgccagagaaagtgaccccgtagctaagtggatcaccgtctttaaccgggagagtgaagaggtaatcacgggcgtcaagttttaccactggctcatctctaatcactggccactgaaggtcatgtccgattctcacgatcatagctagagttacaccgttgtctgagaccttaacgagcttgaaatcaccagatgcaagctccaccgcctcggattcgcctatgagatggactctacatctaggaatctgcaacagaacttcttcagctctcatggtttgaggttgatgagacgggttttgtcgtgtcatcttgtcatgttcatggtttcttgttcttgaagcctttgatggtccgaaacatcccattttcttgtctgcttgtttttctcttcttgaaagtgaatgctctctaagaggttttgtaatattggaacagaggatgagattattaaaaaaaactttcgttggaatattttttaacttttaactcatatattctttcagagtgaataaattcttgcttccacagttttcctcactttagatggaaatgcgaacaaaacttttcgacgttaacacaaatctacacgtacgaatatgcgtacacgtagacacatctacagtacacgtgtattttaatgcatgttctctgggattggaacctactcacgtaagcagtcttatgtactgctcgtgaaaagaattagaagtcggttgttctgtgaaagaacttggatacatgacaatgaccagtgtgaacctaagcatggtggtcctagaaatatagtagatgccgactttagtaaattgagaactttgttcttttcgtaaatgttatccaaatgtgacatcatgtcaacttttaaacaaccagagagacacttcctttaattggacactggaaaggagagtttaaaccaatagacactaaaggcaaaagaagcagaatatgaaacacataactctgaattggaatctgattctacaattgccatgccagtcattaacgaataatatccaagacagattttcgaattagtaaagctgactcaaaagtttcactagcttcatatttctatcaataatcgtattaatatatgtttgttttagaccacaagaagatatggtttttgcataaaaatgatcatgattaggaggaagaggaaatagagagattatatatatatatatatagagattatatgttgagaaggagtaagcttaaacaatgacaagtctaactaagattatctatatattacacagatttaacaatttccatttactccaataatctagcgtcacttgatcgctgaatctatcttagtacctgaagggtctatgatttcaaaagaattcgggatttgttcttgtgtagagactgactagcttgtgctcctcattaagtaagctaccacgcatcctaaaatcccacctgctgcaacctgtaattcaaactcataacttagcaatagattgtaacatcctatgcttcagttataatgtttcagctttatgaaatccaagtctaattctaacattgctatgacatagtcattggacttaaaaatgtttaatgattagaatgataaaaagaaatgactggtgagtatagataacctggatagtagtgtggccgagcagttcacgcaatggtctaactgttgacaacggatgctccggaggaaactcacaaacaatttgattcagcagctgaaatttccaatcaagtgaaaaaggcttgcggtttaagaaagcatggaacaataatcctactaaaaggctataaaagaagatgaaaacagatgagattaataacttttccatagctatacctcggcttgacgaccagcatgaagcctgacaccagaggcatcatacataacctgcagcccaattcagaaacatacaaaagattggtcatactatgaaaccaaataggctgttcacaatgaaagcaaaaaatctcttttctacactggcagttactttgtaagaggttcaagtaatggcatttgtaagacagagtctgaagaggaaacgaagatgagaagaaaactcacaacgcaagccaagacaactgcaatagcgaaagctggtgctccagctccttctctaggacaatagcagcagcc

SEQ ID NO: 234 - DNA, 325 bp, Arabidopsis thaliana landsberg
acactaacattcatgaggaagctattaaaggtcaaaggagagctttataattttcgatttttgtttgtttatgttttgagatgcttatttcttatttctttcattcgccatcttcaagatttgaaaaacatgcctacaaaagattcactgtcagaagatgcaaccagataccgttcagctcttgacatgacgcttaaggtaaatcagtcaccaacaaaaataagatttaaagaccttgactctcctctactaattcagctcattcgttattttcagacggtatctctttgcttacttatttgccttgacaaattttgctactgca

SEQ ID NO: 235 - DNA, 716 bp, Arabidopsis thaliana landsberg
cttcctcaagccatcagaaatatctttggaacctttcaaggcaacaaggttgttcacagcaacagcaagtgtttcatcagccagatttcgtttaatgatatctacataagagctctttgattcttgagtttgtccaaggaccttgacaaagaaaaaaactgttattaggaactggaagatatcttaacaagatgtaaaagaaaagataagcagtataaaaaagtacctgttggacatatgctaattgaacagaaattggggctagctgagtctcgatataatcatcagaatagtcgccctcagtgagggtttcctgaccaattctgtctcaaagtaacagtacattttttatcagctatgaggaatcagtagtcaaatgatcaatgtacttgaagtgttgataaagatacagaaaaaggaaataatctagattgatgtggatatataagtgtcagtgtaaacaactattttaccgaatcactgatcctaagctagacgaataattgcatcagagctagacgagtatggaaaggtatctcttgagaaatactagtaggcacaatggcctaggtagacatatacaatggctaccacttctcagaaaaagagagattatatacctcatggcagtgagcacaagttgttaagcatcaaaatagttactgttttcgatcacagagcaagcagtattatagccaattataagcagtcgaggt

SEQ ID NO: 236 - DNA, 2779 bp, Arabidopsis thaliana landsberg
tggcaatttgggagattacactgttgtcatcggaaactggtgtctccatggcggcgacggaaggtggtccgagaaggatcgcagtggaagaataagccattgaaagagagagatttggtgatggtgattgtctcaagggtttttgactttgaagctagggtttgtgtaaaagtaacggatagctatgtcaatcaattggaagagtaagagaaaccctaagacatcaactttatagaaaagaaaaatacaaaaagattatgaattatttagcttggcgaccaagtaagctagatccttcaaatatctaaatggttataaaatatcattttttttagaaaatgttgttcttttaattgaagtataacctttttaatcatagacattattgtttttaatttgtatttttctatattaaaaaaattgtatgttagcatgtatcaaaaactaattggggaaaaaattacatgtatcaaaaactaattggggaacaacttcttttatattgaaaaactaggtttccgtacaagaggaaaagagggtagcttttgcaagagcatcagcttgccgattgttttctctgagaatgaaattgaaagaacaacaagtgaaagtagaagataaagcaaggatgtcgtgtagaatcccgtgaagagttgcaattggatcggcccttactcacatctctttcgcttcagactcgttaacactagtcaaagccctcaattcgaagctccgatgttgaaagcttagtaaagcattcatagagaagacatggaaaccgatgtttgaaggtaattttgaagattaacccgaaatgttttgtcaatttttgtatggtgattgaggtaaaatatacaaaaacacttttgtcttttctccaggaaaaagaaaaattaagagtagtaatcattgtcttaattggcttttgtcttttccttcagggaaaataccaatttgatgggtcttgtttactattccataaggcaacaagacaggactgtagcagaaagaggcttaaaacttctcattgaaatgatataaagaacaacagagagaagcctatgacaggagctcaaagagatttgcctcataaagatatctctaaagacaaaacaaagttgtttgatctctgtttcagacaactgaccaaattctctctagcttcaagcaacttattgatcaccgagtttgaagtactcattaataactgaaagagatcacataggtattttagaaaagttaaaacaagattcattcatatcctcacataactccccaaatcaaaaaacagaaacatagaaaattttaaacttctttaactctttgcggtataaaactcaaatatggtatacaactctttgcggtagaaatgatgatgttacggtttaagcattgaagcttgtgtatgtgtatctcagtcaaaaacaacaagcttcttatactcctcacctttgatggcaataaacatgacatcttcaggattcacgatcccaccttcttcaagaaacagagtcagtagattcttcgaaaacccgctaaccatagctactcctttctggttagcaaccaccggagtagccgatgagtctcttaagttccaaaataccatttctggaacattctgaaaacccttctctttatacttcctctgaaccacctcataatctgtctcccatttctccttggaccgttccttcgatatcttcaatcggtcctccacactcagatggtaactcacctccgaatggctgtttgccattgcatcatcaaactccatgtcgctgaacacaaacaaccgcttgatcatctggtcatcggttaagttattctcgactgcaacttctagaatacgatcaaacactatctgaaaatccgtgttcattccccattccatttctctaacaaactgagtcttttctctcagactcgaacccgtgacaatatgcagctccgggttttcgctaaaggtgataactttccctttccacggctcttcactaagctccgaaaccagtaacccgagcgctacacaaacctccataggtgtaccagacatacttccagagacatcacaaaccgccagtgaattcttaagcttccctttcttagcaagatcatcaaccattctcgcccactgaagctctgcaacttccgcgccaacttcactcccactatcatcctccagctggttgattatctgatgaggaagcaacgcaccagccgcaatcttcttctttccggacttcacatcctccaaaaactcggtaaacctctcgctatcatgttcctcaaacagcttcttgtaattcttcatagcaacagaaggaactctattatacttcaacaaattccattccttagcactcatgaacaactccggaaactcaagcgctttatgcaacggcacaagaacttctttcctcaatctatctctaatcctatacgcataatgcgcttcttcaataccttcatactcctctctaggaaacatccttctagcaattgcctcacatatcaaagtagccttatcatacgaagaatcaaccgaaggacaccatttcgaagctaaactaatcttagtcaactcatccgaattcaaatacttcaaatccgatttcaacaaaaccgcaaacaaatctgcaattctatcaaacagtaatctgtaattagcatcagagttatacctctctacggcctttttcgccttttcgaactctctctgtttccttaaagctctagcctttaccttatcaacagaaccaccaatctcctccgcatt

SEQ ID NO: 237 - DNA, 3872 bp, Arabidopsis thaliana landsberg
taacgcaccggtgctccttccaattcccttacggacttctcctttccttccccgtctccgctcatcgggtctgagttttgtctcgactcaccggcccgagtcacgccgagtcagctcaatttcctgcaacagttcccagattccgtcactgtatacgcctataggatctaacacaactaacaattccttcaatgggtctcccaaatcggatgaatcgaaacctaatcccggatttctcacacggatcgcgacgtcggcttctgagcagcgaaaggtattcaatttcacgttttgttcagtggtaattagaaatctctggatgcctacgtcgatgcttactaaatgtttcaatttccacattttcgtatagttttggggacgagcttggcttacattagatttggggtttatgggttttaatggggtttgatttgattcaggaaacatatgaaaagtttgtatatagtctgctcgagaagaagattccaagaattacaaaaagttccaattttgtaggggtacatatgttactatccattagctttgaatcatggaatcatgttctctctgttttaggattcgggagctaattcgatattgttgacattgaacttgctttttcatgttagatattgatactccctaatttcaagctccacacttgttggaacaatagaactcaaatcaatctagtttcttttttgtttgattagtctgtgtgttggaattgtgcttgttcgctgtcctcttatgtagtctcatggatgtttaccagatcaatatatatctgtatttctttgcagacgttatctactggaaccgttatactaatctctgcagtagctgtgcttttgcttaacccgcttcttgcaccacctgctttcgctagctttcaaactgcagctaaatccggttggctaacaagtgcgtggaccggtttccttgctggttgcttgcacacgctctcaggacctgatcacctcgctgctttagctccgctttcgatcggacgcagcaaaatggaaagtgctgctgttggagctctctggggatgtgggcatgatgctggtcaagtcatctttggtttactgtttctgctacttaaagaccggcttcacattgaagtattacaaacttggggtacaagaattgtgggattgactcttgttattatcggtgctatgggaatcaaggaagcttctgagattccagaaccttgtgtcgctttagaaaccgacatcagcatggtatcaacagagaaagaagccttaccactgcccaaaaagaagaagatcgggtttgctacatttgcaactggagtggttcacgggttgcaaccggatgctctgatgattgttttacccgcattggctctgccatctcggttagcggggtctgcgtttctgataatgtttctggttgggacagttatagcgatgggaagttacacagcgtttattgggtcttgtagtgaggctttgaaagagaaagttccaaggatcacagagaaactaacttgggtttcgtcacttgtggctattggtcttggattgggaattgtcatcagccctttctttggttttagcctctactgagaaagtaaaagcttcttcaggtaaatgagacaagttgaaatctttgtagttcttatagaagaaagagaggtttttttgggtccattcactcgtattattgttacctttgcgaacaaaatctcgtaatcttgcttcagaaactcctctcggagaaaaccatttggtgattctttttattttccttattttaagagaagtttggttttggttctggattatcgatcaactgcatgtgaccatactttgtaatattatcaaattttaacttaaatgtttatatcatttgaacactacttgtcacaaatacaaaccccaaaatgtcagaaccaagtttattttctaaagtcaggatgtcaaagcagagttcaaatccaaattgtcagattattcacacattcacaccaaatctaaagactctcaagaccccacacttgatacaacgacgttatatacaaatgtggccattgttacaacacatatttacaacaattgtaaattccctaataccacacacataagaatttatggcttttctcgtatttttcgtttcatacttgcatttccctttcgaccataacatgcggactaaaaacaggtctttgtcgacagctcttacgggattacattcgttaatatttgagaaaatataagaatgtactagacatcatgtcacaatctttcaaggacgaaggagctttcatcaaataacaccacggattataataaatcttcaatgtataatgtattattctgataaacgagagacacaacaacacacaaggttcttttggtctttaaacagatactattacaacatagcacataagatccacatgatgaagattgtattatcgcaactttgatctcttcccattttcttttctctgctaattaacaaccacagaaaggccaatcaagaattctttcactagcaacactcgttttagatgcttggtctcacgttcagacggcttgccagcttctgtcccaaagacttgtcagcctgtttcacacatttttacccaatcagtcaaaaatgtttaaaacttgacaacttttcaactgctgagacttatataacgagacaatgatcaagatttcagacctgagaccagtaagagatccagatactgcggatttcatgcgtgatgcgtgggtcggatagggcatcaatccatctctggatgaatcgttcttgcctgaagttgaaaacataccgtaaaacgttaagaacacagatgttccttttatgcattaagcatcattacaaaaataaaacaattagtacctctctggtgtaaaggtacggtatctctctccaggctccttgaagttgttctccttctcaataacacactgcaaaacagatttcaaaacttttagatcatatgttcttaagtgaaccaatccatgggaaacagaaacagagaggaaaacagaattagattactgaccctctcacgttttccagagcagacagcaggtggagttggatacttctcagcatgacgaacctggtcatacctcgacgggaagtaattgacctgtaacaacagcttcttgtaagactacgatattctagcttcaagttcgatataaagatattgatagtgtactattaagtacctcctcgtccctgtgcatgaaattcatgaatccctcatggtggttgttgtggtgagcacattttggagcattgactggtagctgaaggtagtttggtccaagacggtgtctctgagtatcggcataggagaagacacgggtttgaagcagcttgtcgtctgagtagtgtatccctggaacaataattgcaggacagaaggcaagttgctcattctctgcaaagaagttgtcaatgttcttgttcaacaccatacgtccaacaggttggagaggcaagatatcttcaggccaggtcttggttacatcgagcgggtcaaagtcgaacttgtcttcatcagcaggatcaatgatttggataaagagcttccattcagggtagtttccagcagcaatagagtcatacaagtcttgagtcgcatgactgtggttggttcctccaacacgaattgcatcttcttccaaaagagacttgactccacaagttggtttccaatggaacttcacgtagtgagctttgccagctttgttgatcaacatgtatgtgttgacacctgaaccatccatgtgcctgtaatcttgtgggataccgatatcatcgaagaggaaagtgaacatgttcaaactttcagggtggtgggagaagaagtcaag

SEQ ID NO: 238 - DNA, 1888 bp, Arabidopsis thaliana landsberg
gctctctgtttctcgcctaaaaccgagagggctctctcctctccatcaacacctccgccttcttcccggttattaaattcctcattatcaatcgaattagtttagttaattcagattaggaaacacttaattaatctctgttcattatatagatttggttgactttagtgttgacttcgctcgattactactaattagattacttcatagtctttactaataatagtaaaagtatcagatttggttttatgtgtaaactattatgcaaaatggtattatagtaagtatacttgaattggtaagtgtatgatttgacaattcatgaacccttaatttgtggatgtataatatcttcaggacaactatggtggatatatggtagcattcgcgggtcgaaaatacgcagcgaggtctataccggcttttattgctaatagcaccttcatcgtaaccagttttactttggtaaagcatttttgtatatcatatggttcaagtcttatacatgtatagagtttttatttatggtgttgttatgtttcttaaggtgatggagtttcagaaaggtaggcttcagaatctgtattggaagagagacgggtgtgcgtcgtgtaaagggaatcaaaattttgtgtgtcttaacaagcaagattgtgcgataagaacaccgagctgtaaaggtcggggaggtgccgtggactgtagtctcgggatacagctggcgttttccgggactgataagcacttggcggttctcaactcgtggtatgaagttgagaatcttaagcagtattcactttatggtttgtattcaaacctcaagagctctttaaccaatcagttcaataatttcttttgagcttcttgagggtagtatttgtttgtttggttgtatcacgtaagttaatatctttggtgacttctctaatggtttgtgaaatgtaacacgaaattggagaaagagttatggtttggttcaaccacttgtatacagagttagtcaagagtcgagccatagatatatattcgcaacaccatcaaatcaaatgtgcgttctctcttctctatgaaacctgcagcttacagacaaactcttgcagctgtgtataccaaaacagtgaaaacttatagtcgtgtaatattacatgactgatttctaatgacaacacttcatttatcttctcaagatctctgtcatatacagcttctccttggactgtgtttgcctcatcttgtggcgtttctggttccaacgcaaacacaaatatatatttgaatcaagacattcaatatgtgcttttcttgattgctttattctatttgactatgttgatgaagcaagattggtgacaccgaagtaaagagtcttctggttgaaagcattcatggcatagtcaacctgaaggtgacccaatggagacttgaaccgtagcccatacccgaatccatacccaaaccccggcttcccttgtctcagcgaagggtttcctgaaaccaattccgcaacagctttatcattttcgtgtctcaacaacttctttatggttcttgttcggagaaggtaaagtgaacttaccggggacaaggcggcttgagcctaggtctgttccacaatccaagaagatggtcccttctgtcatcttgttctgtacaccaaaaggaaccaaagctcaatgagaacttaacaggggaaaccatttgatgcttctgaagaccaaattatatatgcaacagctccacgtaccaaaggtccgccaattccgtattagcacaaggcatgaccgccggatccacagcaacctcacatatcccgacactgctagccacaatggaaatgttgataagtgtcagctcctacaatgaccactgcaactgtccggagaggtag

SEQ ID NO: 239 - DNA, 2416 bp, Arabidopsis thaliana landsberg
  unsure (1)..(2416): unsure at all n locations
gaaagcaaaagaatagaagtgttgactcggatgatgatgtctctaaggaaaggagaccaaagcgagcagcagcttgcacaaacttcaaggagaaatctctccgtatctctgacaaatctgaaactgttgaagctaagaaagagcagatcttggcggaggagatcgtggccatacagttaacttcttctttggagagcaatgatgatcctcgtccaaaccggaggctgactgatttcgttttacatgattcagaaggagttccacagcctgtggagatgttggaacttggtgacatatttattgaaggtgttgtcttacctttaggtgatgagaaaaaggaagaaaagggtgtcaggtttcaatcttttggtcgagtagagaactggaatatatctggttatgaagatggttccccggtgatatggatttcaacggcgttagcggattacgattgccgtaaaccttctaagaaatacaagaaattatatgattatttctttgagaaagcttgtgcttgtgtggaggtgtttaagagtttgtccaagaatccggatacaagtcttgatgagcttcttgcggcggtttctaggtcgatgagcggaagcaagatattttctagcggtggagccatccaagagtttgttatatcccaaggagaattcatatataaccaactcgctggattggatgagacagccaagaatcatgaaacatgctttgttgaaaattctgttcttgtttctctaagagatcatgaaagtagtaaaatccacaaggctttgtctaatgtggctctgaggattgatgagagccagctcgtgaaatctgatcatttagtggatggtgctgaggccgaggatgtaagatatgctaagttaatccaagaagaagagtatcggatatctatggagcggtcgagaaataagagaagttcaacaacttctgcttcgaataagttttacattaagatcaatgattacgagattgccaatgattatccactcccatcttactacaagaacaccaaagaagaaacagatgagcttttactctttgaacctggctatgaggtagatacaagggacctaccttgtagaacacttcacaattgggctctttacaactctgattcacggatgatatcattagaggttcttcccatgaggccgtgtgctgaaatcgatgtcaccgtatttgggtcaggtgtggtggctgaagatgatggaagtgggttttgtctcgatgattcagagagctctacctctacgcagtcaaatgttcatgatgggatgaacatattccttagtcaaataaaggaatggatgattgagtttggagcagaaatgatctttgtcacattacgaactgacatggcctggtaagcttactatattcactgcatgtttctaccttatttattacttctgttgcttgcgaatcaggctagtgcctacgtggagattgaccaactttgctaaattttatattgaaagaaaattggttttactaactttgaaaaattggttagtgattttgcaaacataatgcaaaataaattatgtattcaatattttgattttttttttttttagcaaagggtttaacatttttttttttttactagttctttatttactttttgggacgatgattgttattataattattcatttttaattgccttatatgaactaaagtttttttttataattgtctctatgcaggtaccgacttgggaaaccgtcaaagcaatatgctccttggtttggaactgttatgaaaacagtaagggttgccataagcatttgacactatgctcatgagagaaagtagggttgctaagctttcatatgcaaatgtcataaaaagactttgtgagttagaggagaacgataaagcttacatttcttctaagctctcggatgttaagagatatgtggtcgtccatggacaaattatcttgcagcttttcggagagtatcctgacaaagatatcaaaaggtgtccatttgttactggtcttgcaagtaaaatgcaggatatacaccacacaaaatggatcatcaagaagaagaagaaaattctgcaaaagggaaagaatttgaatccgagggcggggattgctcctgtggtatccagaatgaaacctatgcaagcaacaacaactcgcctcgttaatagaatttggggagagttttactccatttactctcctgaggttccatcggaggccattaatgctgaaaatgtggaggaagaggagcttgaagaggtagaagaggaggacgagaatgaggaagatgatccagaggagaatgaactagcagctgttgagattcaaaattctccacntcctaagaaaattaaaggtatttctgaagatatggaaataaagtgggatagtgaaattcttggc

SEQ ID NO: 240 - DNA, 5713 bp, Arabidopsis thaliana landsberg
gaaccatgcatcataaggtttatccatatcagccatcctatcaaatgcaactttatacttaagtgcacttttcaacatcaagtaggtagaattccacctagtaacacaatccaataccacacttcctcttgttatcttctcaacctccacccaacgcttaaatgattccagcctttaattagaagacctcacatattttacagcattacgaacacttacgatgctattacttatatcttcaagaccttcattggcaatcaagttaagaatgtgtgcaccacaacgtatgtgcataaaatcaccattcatcatcaaagcatcactatttctgttacttagcctctctttcaaaacagtaatagctttatcattggcgcttgcgttatccactgtgatagaaaatactttctcaataccccaatcatccaaagatcttaaaaactgattggcgatggtctttcccttatgatcaggaataggactaaaactaataattcttctatgcaattgccaatccatgtcaataaaatgagcagtaacgaccatataactcaatgtcgtaatagaagtccatatgtcagtggtaaatgacatggcctgcctatttcgacttaaaatagtcttcaatgcagttttttcagctctgtacagaccaacaacatccctagtaattgttcttcgcgatggaatagtaaaccaagggacagccatctcacaaaaatgtttaaacccatcattctccacaaaagaaaacggcaactcgtccatgataatcattttcaccgttgcttgcctacacacgttttgatcaaaaggttttatcatgccagcaccattaccaccaccactagagactatgacattctgagaattagattcaagatgatccaaataagctttgcactttctcatgtgtgtattcatattgctggttccacatgtagcaggattacatgaatagattttaccacaataattgcatgagcaactattatcatcatctttcaacctcgtaaagactttccatgctgttgatcttgtaggtagttttctttttgcctttggcgacactgttggagactcgggttcttttcttttattgctagtcgtgtttcttttagacatctacaaacaaaacatgtataaaattgttagtcaattgaaagaatacaattacgtttctattaaagcatctttcattattagtaaactaaataaacatgtttgatctgttttcttgcacgaaaatccattgattattggtatgaatgctaagatatattatatatattgtaaacaaacaaaatcacccaacctacatgaaacctattcttaaaaattaaaaaatctaagtaaatagaagaaacaagacaacgcaaacacagatttttcttttccatgactttgcggtgtacgtacagattgaaaaaatcatcatatactcataatatttaattaaaattgagatgagcgtaattgtattgctagagagtagttaaaaatcataccgtggctgtagagagtagagagagacgacggaagaacaaatgaaacgaagttagaagtaaaccttaggtttttactttttagggttagagttttagttagagataaataaatatttagagttatttgtaatattatttatagaattaattaattaagtatataaagacattgggttgtcggttcggtttggtttcgaacaaaccgaaccgacccatttgggttgagataaaatacaaccgaatagtttgagtctaagattggatttggtttgggtcggttctgtggtcggtttggtttggttaaaatgtccattcctcaattagcagaattttttgccatcaaactagttacaaattataggttcggtaggttcctttgggtagttgggtttaatgatttacacaacaccgtcaataaatttccctttgcctatgaccaattaatgacggtttaatctctttttcctttctttccctataaaaaaattctcacgtgcgtctatcgaaattacactagaattttcttttttccatgagaagtttttttctctccggctaaaggaagaagagaaggtaccacaatgcctcctcgcacggcaaaggataaacaaaaccccaagctcccaccggaggtgactcgcctactctacattcgtaaccttccttttagcataacaagcgaagatatgtacgatcttttcggaaggtacagtgcgattcgtcaggttcgaatcggttgtgaaaagggcacaaaaggcacggctttcgtcgtatacgaggatatctacgatgctaagaaagctgtcgaccatctctggcttcaacgtagcgaacgggtaccttgtcgtgcactattaccaacatgcgaagatgagcaagaagtttgaccagaagaagagtgaagatgagatcaccaagttgcaggagaagtatggagtctctaccaaagataagtaattgtccttgaattcgatcttcttatggtcgttctgttactgctgcaatttagggttttgaaattctgggagatgtgaaactttcttttatctgtatgaatttagtggagttctttatgtaaggtttgctcttttgtcatttacatcgaccaagcaatgaaaaatacatcttttaatcccaaattagctattgctgtgacaattttttttgtgctttgatgcaattttccgagattggtgttcagtgttttgctaggaactaagtaagaacgaaaaatcactaacacatacaagagaattgaaaaagaagaacttaagtacattgagaaaatatacataattcaacagctctcccaaatcccctttcaagtctgttaatatgcattgtggttgcgataaacgttccattgtctatattgttccattaccatcagcctcgacctgtatgattcgcagagccgaacaaaataaagaaaaacagaaaatagtgttagtctccttgctgctcggcgttgaaactcttgcaagtacaagaagtactcatagcttccgttaactgctgacttcattttctgacaaccttgtacctttgcttagtaagtccctgtcttaactcctcgagtgtaattgttccactgctatcagtgtccatacctttaaacttcaaccccatgatctcttcctctgacaagcagttggtcgttgtttggaatcagagttgagcatctttttgtttacagttttatgatgcagggagagagtatggtgtggtgtgtcaaccagttggattttgatcaaatgaggggtactatattgaatgcacttgctgatgtttatgtggaagatggaattattttcgcactgcagccaaacatcaaggtataactaatttatccttcatttttttggtagtctgaattccatttttctatgactctttctggctttgctcttcatttgatctttctctctaatgaatcgagttcttaagcagaacttttgaacaataaattgatatatattgtctttagctacgattcttttccaaagtggtgctcactgttttgctaggaaatgagaacgaataatcactaacacatacaagagaattgaaaaagtttttttttttttttttgaagtacattgagaaacccatggcactttaagcagtagtagacaactagaaaagaaaatgtacattatatcaaacacctccccccaaatgccccaaatgattttgttttccttcttgagccttctcctcccttaaagatctcctccactttagaataattttctttgatatttgctttgccttatttctcattttgaaaggaagatgagtttctcgacccctgtgtgtaactctctttctatctcctctcttcctctacttcaacaattgtgttcatttgaatgaaagttcacgccgcttctttgggattggatccgggtttccttttctcatcattgccacaaattcatcatagtttatccgaccatcattgtctccatcaacctcggaaatgatctccttaatgtctctgccatcattcatgccaaactcccgtagggcttgctctagctcttccattgtgatatatctgggaacagagagcgaggtggatttttgtttcataagcttcatattcatgattaaagtctggaatcagttatataacaaactgtactgtcaagtacttacccactgttgtctttgtcaaagtgttggaaggctgagtaaagatgttcttctctgtcaagtctgttgatatgcattgtggctgcgataaactcgccatagtctattgttccattaccatcagcatcagcctgtagatacacagagcaaaaaaacacaaaattagtggtgagtcccctccctactctgttgctcggcatttgactaaagctaaatctcttgcaagtacaagaaggactcacagcttccattaactgctgaacttcatattctgacaaccttgtaccttgcttagcaagtccttgtcttaactcctcgagtgtaattgttccactactatcagtatccatacctttaaacatctccttcaaccccatgatctcttcctctgataagcagcctgctatcacctgtccaatggtttcaggtttctaggttaggatactctactgatagtcatattctattgggtaagggatatatgattgttacccgtaatgcaactttcttgaaattgttcattgctttgaattgtttgagcctggacatcaccgcattatcaagaggaacatctggtgcctctccatcctccttgatccatggatggtctttacaaaggaagataacattagagataatatattgttatgcttttacagtttttatatattttgtagatgcttactgagaacttgagcagcagttagtctttgctttggatcagagttgagcatcttcttaacaagatcctttgcctgaggcgagatggatggccatggatcacttgagaaatcaacatgtcccctaaggattgcgttgaatatcccgttctccgactctgtgatcaggtaatttacacaagacatgaatatatatagaaaaatctctagatatgtttattcttttggtacacataaagaaaaaactgtggaatatctttaccagcccagaatggcgggacaccacataagaggatatacaacatgacaccaatactccaaatatctgcctctggtccatactttcttttcaaaacctcaggtgcgatgtaataagcactccccacaatatccttgaatacctctcctgtaacacagcggaaacaaattttatatgagtataaccatgacctcttttatttgtcacgcagggtttacaacgatgctggttcaagtagcaggaatgggcttttgatgattccagtgaaaaaacctggcttgtagaaaaccgacaacccaaagtcagtagctttgagaggagaattctcatctttgttgagcaagagaaagttctctggcttcaaatccctgtgaatcacccccatggaatggcaagtatgcacaatctgaacaatcgttcttagcaacgaagcagctgctctctccgagtaatgtcctttagcaataatcctatcgaacaactctccacctgcgcaaagctccataaccaaatgcacggaatgcttatcctcataagcccctttaagctccacaatgtttagttgaccagtcaagtgatgcattatctgcacttctcttcttacatcc

SEQ ID NO: 241 - DNA, 6638 bp, Arabidopsis thaliana landsberg
tacgttagactaactcatccacaactcaatactatctcaaccaaagttgaattaaaatataataactcagccgtaaggttagattcactcaaccatacatcaagttaatctacgataagtccgccttaacgttagaataacaatgattgagtcacatgtttaactcagccaaacatcaagttaatctacgataaatctgaaagacaaagtttttgaatcacacacgcgagtataaaataaaaattaaagtttaaaaattgaaaagacagagtttatgataacataggataaggagtactggaatccaacaacatacatataatataattgaaaataataaatgaagatacaatcacgtcgatcgccatcttcattcttaatcagactccgaatttggacggtcggtcgatccataccccagtttgtcccagtcaatactactcaccgggcgttcacgctgcgctctgtaggccttgccaacctgcgccagcactttctcgatctcgtatttcacgttaaatccgtcccccaatttctccactttccttaagaccttaagttccgcttccttctcatgcagtttgatatcgagcaagtgtgcttcctccgtctcccttatgttgctcctgatgtaagagatgacgcatttgaaacgcttctcctgttcatacagctttagggtggggctgtcatccacagacggccccttgttgggaccgtcatccacacactgccgcttgtttgaacctgaacctgaaccggatgcatccatgatctcggaatggttttctttctcagagaaaggacaagagaagaatgaagagttgtagttgctaagaattgacaagtgaaaagacaagaggaaaccagtgtatatatagtcctctaacgacgttgggtcctctaacctaacgacgtttggtcctctaacgtaacgacgtttggtcctataacgacgtttggatacttgactattcgggtgtcgtaaaccggtgtatctatagtcctaaagtcacgtctggtttatttgatgggagggaagtttgggtttgacaagtcaaccaccacgttatacaaactcagccaacaaacgatttgtctgatgacaagtcagccaccgcgttataataactcagctaaacatcgaattaaacaacaataactcagccgtctagcacgatttgagcgatgataagtcagccttaacgttagcgacgtttggtactctaacgtaacgacgtttggtcctataacgacgtttgggtacttgactattcgggtgttgtaaaccggtgtatctatagtcctaaagtcacgtctggtttatttgatgggagggaagtttgggtttgacaagtcaaccaccacgttatacaaactcagccaacaaacgatttgtctgatgacaagtcagccaccgcgttataataactcagctaaacatcgaattaaacaacaataactcagccgtgtagcacgatttgagcgatgacaagtcagccttcacgttagcatatatcagccgtaaaacgaatcgagcgatgataagtcagccattacattggtttttgttataattaacataataatagattcatacggacataattctggttatcaatcctaaagcgtcaatatttagtacaatcacatgctcaaaatcccaaaacacagacatatgttcgaaaaggacaatcacgtctcttcaaactgtgcaagcatcctttctggtgcctcatcgtagatctctgctgccatcttaacctgtagagcctggatatttgcatcacaaatgccatcaaaatttacaccaagcaataaacattcaagaatcttacacgtgaaaacgccgctgtccccagctactctgttttgcgggaccagtttcttgttcttctgccggaattaaaattggtcgtagttcggtttacggactgtggaaggaaccagttcgctcattatctgcggaatcatcctcgtgaacggcctacaagcttacagtatttttaactcgctttctagtgtatgctctccgacgatgcaatcatagcaatcgatgtgagacctaagcaagttcacgtgaaggatcacccaatgattacctccggtttggtggatcaaatacaagtgatccacatctgttatccacttcatccgtgtcgggacttctcctcccgtaccgttaatccattgttcatatgcggtgtctttgaaagaaaacctcttcggtttgatcttgaacccaataaatcgtgaaccacgggtctagaatcatgacgcgtttgttgtggtatgggcagggatctcgctggtgcctcaaggcgaggactttcatatacgcagccatttgctgtacaaaaataaaaccaacccagacaaaacacatcatcaactcagccgtaaccaagtaaaactcagccttaacacctaaataaatcagccattatctactttaactcaggcagaacaataccataactcagacataaccaactacaactcagtctgaacaccagaatagaccagctataatttatttaactcagcctgaacaacacgataactcagccataaagtagacaaactcagacagaatataacaataacttactttatcacccaaccatccataatttgaatctagccacgaactttcttttggtcatgataactccgtagaaatcaacctcgtgtattccagtgtcaacgattttttgctaacaaataataaaaagttaatatacacaaatagtgtaagcatgtcgtatttaacaacttagtaatgtataaagggtcataccattcgggacttgtcaaataagccttaagcttctgcagtttggctggatcaaccggtgccagaggatcatagattgctcgtgaaggcagacaaccctttctcatgcagctcagcccgttgtctccaataactggaaaaatgtgagtgggcatagcttcggggttaatcaatgagctcccatccggggccagcttaacagtttgagccgaatttcttttacactctttagcctctcgtttcctcctcatcttcatcagactcaggaagcatttcattatactcggatataaccttatccgtgacatcaactacatccgaatcttcctcagctttttccttagcttcctcagctttttccttagcttcctcagatggttttggtttctttattgtaatctttggcacagtaggaggcacctttttaggctgctgcaaaggctttcttcctcttcctcttctcgctggcggtttctagattagctcatttaatgttttctcctttttctgctttggcacatttggggctggtggcttcctagagcgtaaacgacgattgagaggagaaacagtctcaacgaaatcaaaatcagacacaatggagaccttatcgaattctccttcaagcttcctacttaccccaacatcagcttatttcgactgcataaacgtaacgaaaactcaggcgttaaacaacgaaaactcatacctatgtataaatataactcagccataactaactaaactcagccgtatcatattcatatacctcaaccataactaactcaactcagccgtatcatattcatataactcagccatgactaattaaatttataactcagtcgtgtaatattcatataactcagccataactaactaactaaatttataacatgaaaacaactagccataactaaccagcgtttataactcagtcataaaatatttatataactcagccgtaaaatattcagataactcagccgtataattcagataactcagccataactaactaaaagttataacgcagccgaataatattcagatattaactcggtcataaccaactaaaagtttaccggaggaggactaggagcagtagattggttatttgtaattttctttggaacgtctggtgtcttttgagtttgggccttaggattgtcttcctgcgtttggggctgtggtttggctaaaaacatatctctaatataactgcttgattttgagtcagctatggccttcagctgccctttaatctgtttgacatcgttctcaatcgagccaaaccttccttcaaactttgcttcaacactcgattcgatttgacatccaatcacatccagacgggaggacatttcttttatgctagtatcaacggtgtcaaatcgagagtttaagggagagatcaagttggacaccacatccacgagcgactgctggtctccctgaccatcctgctcacgagaacgaacatcctcgtcctcatcagattcgacagctacttccttcttcttattcttcttcttcttcttcttcttttctgcatctttctcaagagaatcaacatgctcactgtgagagaccttctgcttcttagcgggagattcagacacctgcgcttttatcttttaagagtttcttcttcttctcactcgtcttcacatcccaataacctttaacaagcttaaccccgtgtaagtcttggatcaagttatccagtgctgggtcttctaattggtctggccaaaaatgaaatagctcgcttaactcagccttttcaaccattgtacgaacacgcagctacaacacgagagataataaaacccatcagtatgtttaactcagccatcacttaatataactcagtcgtcacttaagctaactcagtcatcacagaacatatctcagtcgtcacttaatataactcagccattatagaacataactcggtcgtcacataacatatttgccaaaaaaaatagaacataactcagccttcacagagaataatataccattaactcagccgtaacataaatatttgataaaaaacagaacataacagagccgaaaccgtacctcaccaccattcgctttgatatcttcagtaatggccgattctataattgcacgggtacggctgccaccccatctaagcaacggaatctcatccgctttaacaacgttcccaaaacgctcggcgatggtgatgattgaatcatacgcccaagcctgcaacacgaaaaccagaccactgatggtgtacgtcttgctaataggcctcaacaactttatagaaacgacaagggcttcaaatgctgctcgaccccatggataagtcttcatggcttcgtcatcgaaaactcttttggcactctcaaatggtatcctagagatagtatgcaagccaaaaagtccaatggatagaagagtcaataagccaaaccatctacgcttttcatgaggccaagctctgcacattactaagccctgcctaagttcatctagattaggaccttcaccggttggcacacgcaattccctgaagaacactttgtagtcagcttcaggctcatcttttctgtaggcagttgatctgtgtttaaacccgtgatatgatgaaattcgttcaatccaaaccggatgggttgaccagccacgagacaccaaagctccttcttcagtattctcaactgtctgcatagtagataatgtacagtcttatcagaccatacaaaatgactatcaacaagcttagcaattaatccaagcggtgtctctttcagttcatcccatagatcttgtcctattgattctttaattccagggaaatctccgagctttatgttgtgattaatggctttaacctccagattagaatccccctctgggtaaagtcttggagggtaatcccttgcttggtcttcagacatctgataaaccataaatcagccgtaagcatacaataactcagccataacataaaacaaactcagccacatataccataactcaggcaaaacacaaacctaactcagccatagataacataactcagtcataacataaatctatctcagccacatataacataactcagccataacataaatctaactcagccatcttaacagaaactcagccaaaacataaacaaaacgcatccataacataacaacaactgagtcaaaacataaaccaaactcagccataacataacagcaactcagctataacataaacaaactcagccgtcatataacacaaactcatccacggatgtaaggttaaactataattcaatcacaacatataacaaactcagacacagatgaattgataaatcataaatcagtcgggaaacaaacagtaattcagccatcaaatcaaatagatctaacaaatcggccaccatatgtcaatcaacgacgacgttaaaaaccagctttaagcatcgttaaaaaccattattaagcatcggaaaacgttttcagtgacgggaatcacttgggattgaacttaaatgtcggattcttacttaccgaaaacatactcaacggaacttagagaagttcagttcaaatgcgactgcgacagggatgttacttcacgataccagaaatgcgactccggcgtaagaattttggccggaacagacgagaaaagagaaaacggcgaaggagttagggtaacgagttcgttccatctagagagaaagagaaagaaagcgacagtttttttccgctgatgaacagtagaatggcaaaagaaataaaaccgaaacgttatgcggtttcagatgagtaatgacgtcgattatgttaatgacatg

SEQ ID NO: 242 - DNA, 4484 bp, Arabidopsis thaliana landsberg
attttccctatttttttacactagtctcattattataggctccgccaactattttcaattgaggtcatcaatttgagttagtacatcaatttgagttcgactttggttcctctttgtcggatttggttttggttcggtaaattcgaatcagtttttttttgccgaggactatatattgtatgattaggtgtaggattttgatttcattttgtaaaaatttcacactcataattttgagaaagtttctcataatagatgaatgaaattaaaatttatttgagtattatgtaaatattaaagtacatagatttccatttaaaatgtccttgataatcccaatattttttcttcaaaccttaatgctgcgcaaaatatttagaaattataagtggttagtttaaaattttttaattggatatataaaaaggattaaaattattttgtaagatataattaaaattataaataaatggattgattggtacacaatttgtattttattttaaactcatttacttgtttcttgaaataatcttatactattatttgggaagtgtatttaacaaagtacccttaccctttgtaaataattacttaggaataccattggaaataaaattttaaaaagcaaactaattcaactcactaaagatatttcaagagacggcgggttagtattatatgataaaattatataaatagagtttgacacctctaaatagttggaaaaaaatttgattatacaagcaattttttattgggatttcaaaatgaaaatataaactccatatataggttgaattcagtattattatataccaaaaatatgtttaaaatatatatattggattatgcaaaattgcaaaaaataactaaatttcctaattaactcaaacaaatctccatttcaacaaccaaagaattacaaattaaaactaaatttcttaaattaactcaaaataatctatgttagtttttagatgcggctcatttatgatattttattttttgatctaactgaaatatatacaatctcattttgtggttgttaacataagattaacatttttcacttacttatgtaatatatcaaaactatattctaaaatatatgatatataaatttttgtactaaatgaaatttaacctgcgttgtaacactggtcatgatctagttatcaaataattggtttccgctacaaaaaaaaacaattttttgttgtgacaaccattgacataaaaatgtatgattgaataaaaagtgaagaaaatcagagaaaaaaaaacttaacgttaaaatattattacttttaatataaaacgttaccttcggcaaattgtttttaaatcgaatggaaacgcaaaagctatgccacatacttttggcatctcaagaagaaccttcatctgaggaaatcattttatacctaactgaaaacagtgacataggtttggcgaatttgtggtgtcgtcgcttgacggtccacatgcttaaaaccttcacaatatgattgattgatagattatggccgcataacgtgtgggaggcacgggtccacataatcaaatgcttttttgcatgttatgctagatactaatttgaaattaaaatttgtttatgaaatgataactaggacgacataaactattgaaagagttttcgccattttttttcttttgaatgtaattgttcttggtgtgatttgttgtttgaagttcaaaggttctttatatgcaacgtaatgagtaaatatgatacctatattattatattatatactatctcataagctggtgtcgataaatttttttctaattagattgtgtaaaattttcaaaaatttgaaattattgtgtaaaataaaatctatcgacacgccagcccaaaatttttcggttaaagaaaaaattatttatctagtgaattcaaaagtttatcgtctgacaaatggattagcgaactatgcatttagtctgcattttttttttcttgatgtatgttctaatgtggtccacgatattttgttggaggatgctcatgggattgaacttccgcgttctgttagttgtactttttgttttatgaaaggttgtgaatggtgaccaaaaccgcacccaaaactgcaccgcaacagtgttgtaacagtatcaaaatctctacatatatatatgtatctatgtattttctttattatttaaaccgcagcgtacttcttctgcaccgcaaaacgcagttaccattcagagcggaagtttgaataaatcgggtctccctcaccaaaaaaaagttaggggcaagtggcgtgcctaaactggttgttgtcttgccgtttttgatacagaaaaacaacacacacttatctcgcttatatcttcatcttcttctctgcttttcctctatggttatctacgtcactacatcaccaacaacatcactccaatttggacccaccggaaatcaaatgaaaccctaccggcgaaaccaagtattaaattcactcacgcttttcccgtgaagtcatcttccaaagaatcttcaaaagtttttctatttttagaatccccagaaactctttcaaaatcctttgaaaccggtaagaattagattatctctgttttctgagttaattgtttttgaaatcagagacctttaagtattcggattccattagagactaaacccattccaaagttttcgtttttacgttctgggtcgtgttagattcttgtttatgtggttcctgaactaagcaatgattgtttctatgaattcttcagcattgttgatgacttgatcaaagagagtgtaagcaatgtctgtgagtgataaagaggattcatcagcagattcatataatggacagcttttgaaggacattaaggaggtaagtaaagctctttacttgaacaatggacctcaaagaccggtgctttcgttgtctcctcctgttcgatctcaatctgtttcgagaactacagagattgggttagtattgtcaaataagaagaagaaatcgttggtaccatggaattggaagaagcctttgaatgcaatagctcattttgggcagcgtaggtttgatgtttgttttctactccatgttcattccattgaagggttgcctttgaatttggatggtactaagttagttgtgcagtggaagaggaaagatgaagtgatgactactcaaccttccaaggttttgcaaggaactgctgagtttgaagagaccttaacgcatagatgttcggtatacggtagtaaacatgggcctcatcgttctgcaaagtatcaagtgaagctttttttgatctatgtctctcctgttgatgctccatggcttgtattaggtaagcattggattgatcttacaaggatattgccgttgtctctggaggaaatggaaggtacaagaagcacgagaaagtggaacacgagcttcaaattatctggcctggcggagtctgcagtgttgaatcttagttttgattactcagttgtcaccagttcagtctgtgactcgacaagtaaaaatgtgatgctgaggcgggttggtagtgttccaagtatggaccatagatctccaccgcttgatgatggaaaggttgtcaatgaagtctcgccgagtctgagtttgaatcttttccagtcaatagattttctctatgagaaacttggcgaacaaaacccacaaagatcaacaggaactgaggtagaactaggtttggagactgacaaacaagcagctgattctgatgacagtggaaaaggagtagagacgtttcagcaagaaagatccgggctggaagaaagcactgatccaaatacagagtcctcgagaattgaaattattgatgtccatgagatacttaaagatgaagatgaattcttttttgaagaatctcattttattgatcagttatcagtggccacactaaaaagtgaaccaagtaatttgttgccaaaatattcagttgatggaacacccaagtcaacttttagtagccaggtaatttctgagtcatctgagagtaaatctccatcggctatggatgatagtacagagaaagaaaactttttggaagttaaatctagttacaaagccgccaaaatattaacgaagtcactaagcttggatgacattactgagtctgtagctaatgattttctaaacatgcttgaacttgaggagtgttcttatgtttatacctcagatggtgaacctacatctcctcgtgaatctctgcttcgagagtttgagaaagaggctttcgcttctggaaactttctcttagatttagatgaagaagcagaatatgtttctgatattgatgagaagtcgaatgatttctcgttctctgcaagttctttgggtgttcgggaaaacaagcgtgagggaaaatctcagcagataatagacagaagaaaggccaaggtacttgaagacttggaaactggaacttatcgcgaaagatgtgatttt

SEQ ID NO: 243 - DNA, 1954 bp, Arabidopsis thaliana landsberg
tctaatctctctctttcatgttggtggtgatgattagagattagattcttctaattttcagagaattttaaactcaatttcaattttctccacctcttctcaatttaggtgatgaactccaccaaagcttctctggagaatccgaccaacacctcctctgtaaatcccatgtacatctaatctctctcttgtctcttcttcacacttagagattagaatttctaaattttgagacatgtcaaactctatttcagtctcagtttagctccacctggaacctatcactttctaacacggctccaacaaattccccaggtagcttcttcacagtcctttgtgacattttatccaaacactcatgatcttcaagttttacgaagactaatcacttttttgtcaaatctgtgttgcaagatcgtcacaaacactgggactgcttctccaatgccaacgtatcccgtcatctattaacatgatcctcggtaactcttctttcattaagtctctttcaactttcatagactacataaatttctaattttgaatttcatgtttactctcagaatagctccttcgatgaaccagtgttttttttttgtccttgatgacttcatgtactctcctaaccatgaatcatctcctctcttgctgctgattatttttcccctttgatccgctgaaatcgtaactcgagtttcttgaatcttcatcacataaacttcacatggaatcagaatctgaagctcacatcaactgatttttcttgaatttttccaacagctccacctggaacaaaagtctcctcaccgtatttccaggcgcctacaggtaactccattaacccttaagatttcctgttatcgatataatcatttttttcccgaagctgacatgttcctagatttcctgttatccacatgtttctctcttcttcacaggaaaagaaagagaaaaggagaagaatatgaatcatatttaacctaaattgtttatctgtttttttggctttttccgtttttttttttttgtttttttttttgtttttctccgtattttttttagttacgtttttatttttttcccacttttccaacaaaaaattagtttttaacaaatattttgttaataatttccaacaacttaataattattgctaatttgcaacaatatcatatttgttggaaaatttcaacaatattcctacgacgtttgtgacaaatttatcataaccaaaatgtattggaaatttgtcaataaaataaaatatttgttgcaattttatagaatatctgttagaaattttcaacaaaatactattattggaagcatctgttggaatatcacatgttttcttgtagtgatcataacaatgtttatcttcttcatcatctcctttctcctttcctttctctgattcttctgttcttattctctatttcttctaaatctcattctctttcttttacttaacttaatagcgcattttgggtcttatcagaacctttgaagcgtgttgaattgttgtctctttatagtagcatgaatcaaagtatcctatatagaaaacaataaaacttgtgttaataagcatatttgtcgatgataatttcaagactataaagagtttaagatcaagtgaaaatcgattgtttgcttacatctgtatcagctaggatcatttctattgttttcctagtgtattgcaagaggattgtatgcttacatctgtatcagctaggatctgtcttgaaagacttcaattcagcaagagcggtgaaggttatttgtggtgccatctctcaaaataaacaggaagagaaacgtctattttctaaaagggtgagtatatatcttatggcattcttaggcctatacttataccaatctaaagtcggctttcaataacctagatttactagattatcgccaaagttaggatttacgaattagaatt

SEQ ID NO: 244 - DNA, 5603 bp, Arabidopsis thaliana landsberg
  unsure (1)..(5603): unsure at all n locations
atccacagttctagcgactccagagaaatctcaaagtcccatgtttcacaaggaaaactgaatggtttatccctctagcgatcaacgactggctaaagggtcgggggcatatgcatttcatgatagtatggacctctgaaccaccagaaggaggtttatctgggttgagaaagtcaaaagaagatgacattcttacagacgataccaaatctgctgccagggaaatannnnnnnnnnnnnnnnnnnnnnnnnnnctatccagaaaaaaaagaatgaaaaataacactcttgtactctgacgaggactaaccagtaaggtgatgtaaaatcttccacattgtatggaaattcatcaaagaaagcagaagctaaagacggtctacccctaataatggctaaaaggaaatccctgggataaccagtttctgtagctttcaagctcttcatgagggcaagtagtcgttttatattgccttttctgtatgcatctggcatcaatccattagaggggtctgtacaaactttaacaagaacatcataggccaactcattcacaatcccaccatcctctctttctgaaatgatgactagctgctctagtgttttgggtccaaagagagcactcataagccgaggactaagcgatgattcttgaacaaggatcttgtctttcaaggtagacaagacagaagccagagtgtcgtcatcgtcttcctcaaggccttgtaggagttgagaatagagttgcttcttctctaagatagactttaataaggaaggcttcccaacttgaaggaatgatattgcaaattcaacaaaagcccgcctcggtgcctgttttgggaaaccatgaaaatcaaatgtcctagccatttctgatgccatgcctggaccacgtctaacgatagaagccaagagtgaaagtgcggcattctgtaaacgttttgtgttggataatgctttgtaaatgtctaacagttttttttcgataagtaacctacaaaactggtcaagagctcttccaatatcagaagattttccctctggatgactcaaaatggtctggataagcgagaatatataggaaagtccttgttttccatgatgaagattccatgcctcgagaagctcagtaaagttgggtgagctctggaaataaagacgcaacaaatcgctgccagtttctccctttaataacttaacaaaatcttttgcagtatcagagcaaagcttaaactcatgtaagcaaatattatgcaacaattgcctgagtttagcttcaagggatggtctgaaagccatcacagggaccttaagataactattcagagcatcatcagcatacttgtgctcctggaaaaactcattacctgcaacagaattcagaaacacagcagacaaattattcaatccagcccacactgtcacgttgaggattaaaactacccacacaaacaagagcaaatatactaaaggaataatcagctcagtcatcagctagaaaagataataattgacccagagattccaccaaataacggtttttcttctcggtaggaaaaaacaaacagaaatcttctaaacatcttaattcgtaccttgatcttccaagtctgatgttgattccaccattaaaaggagcttcctctaggacaagaagtcgggtacttgtgtcgtgtcagagctgaacgtagtaggtcatatatgtatgccattcaatttattttgcctccaaccggtttgacattaaccgagtgctctcacaatgggccgagccgaaaccttttgtgattgggccatgtgaactgtgaagtccaaatcacaatacactttaattattcctttcatttttgctattctttggacaaagtattcgtctcattgaaacaaaacaagaaaatgtacttaaaaaccgcgtaagtcaaattcatgatcaaaatccaaagcaaaagattgagaatagaagagagtaatccaatacctgaagtgaacagctacaaaaaattatacgttcatattaaattatctggttcacattctaagccgtaaactgcatactgaaacagatgtacattgtacacacaaaagaaaacagcagaaaccacaatttacaagataaggctaaaacaaacaaacaaaaacgcttcttgcaacttttcgatttcatcttagtgaactcactcggcttaggttctcagcgatagcatctctgatcctcttcgactctctatatgcttctccttcgaaactccgagtctcctcctccttatcatcatcttttctcatctcaccattatcaccagcttcacaaccattcacacattcctccactgaatcatcatcatcaccagaattcacaagaaaattatgcaacaagcaacccgtagttatgacaaacggcataaactcgattgtctctggtttccatttcttatcaagaatccgccaccgagctcgaaccttagcaaacgcaatctcaacactatgcaatccagtgtgtactacattgttgaattcttctctaaaactctcctcgtctgaagtcaaatcataaggtgtaacaagccacggcaataaaggaagacaagaatctcccaatatgtaacgaggaaccaatactccatttccaagtttagtcggagctccactgagaacttcctctgcaattgaaaaaagcttcgtctgtctaaaaatagcttctggtttcatagtacttggccaaccagctgagatatcaacgaatctgccattggaatcaaccaatgcttgaaccaagatcgaacctttagcaccaagaagctttcctttaacctcaaacctcccgaatccgacaacaccgtagcaattcggaagcagattaggtgaaaaatcgggtttaggatcatcaagttgttgacttaatttctcattgatgagtttgcagacagtgaagaaagagcgtgaagcttgggaagtggaatcaaacccgaatctgtgaacgagacactcgtaagaagcaccgtgagcgagacggaagattgtggcagcgaaggaaggaagcgaagaatgggagaggatagagtagagactgaagaaggtggattttgacattcggaaataaagacaccagcgaggatcatcttcgtcttctgtggcggaggttaagaagcggttgaaccacgtggtggtggtgatggcggaggaggaggaagaaggggaaggtgagattgggagagatgagattagggattcaaggcggagggtctgtgatggtgagaggaagagatcgttggcttggagaaaagagtttgttacggcggcagcggaagagagacggcgcagtaatgggtcttttagaccaagtttgtcggatacatttgttgggttttctgtcgaattttcgttttccggctaccatagctttctgcgattagtgagactgagatcaattagtttggaaaggcagcagttttagacaaaagatggactgaccaatttcgttaatagtgcatttgggttgttcggtttggttcgatccaaatcggaattttagaattttgggttatttcaaaggatgttaaaatgggctgaagatttagggccgggccaagtccgttaaaaccctaattaaagcaaaggagtggattttgggctaagaaacggttttgcttaaaaggtttcgggctaaagtataattaaagatggacggaccaatttagttaagagtgcactctctttctgaccaatttagttaagtgggcttttgggattcgatccaaatcggaattttttatgtttagtggtttagtggtatgtccccaatgcagagagagagcttcttttatgtttgcttgctactagtttcttcttcattatgcattttcagttgatgatttttcaaaatcaaaagatttatgcagtcaagaaacttttgtccaaggtatgccactatatgttgattcttcaaacaagtttttacactaaacatactattagttcagtcaagcaaagtttgaagaatcaacagcaaagttttaatctttcacggcgatacggaagaggcgttgggctcaacagacaacagacatggtcagggatcatcaaaagctttgtttcatgaatatcaaggcatcaatgaaatggtatgattgtatgaattttttcttctgtgtcagtatagattagttacctcaagaatctctatttcttttatctgttttacaaaaaatcttttctctataatgatttttttttccttaattcgttacaacaatgactatccatcctaggcttgtatagattgaccatgaatgcctaaaagctggatagttcgttgtgtaactcaccagaatgagacagctaaatcccatattcttcttaatcttgcaggtttagctgatactttggctatctgatcctccattagccgctccacgtcaggactcatatcgtggaccattttaaccgactcggagagacggttgagcaaattcaccagtgcaatcacctcattccgttgcagttgcagctgaaaaacatgaaaataatctcaggtcagtgacacctccatacaaaactacgcagatagatgtttgagaaactcactgtttggtcaccaatgtcttgatttccaacagagaagagaattttcaatgctgtcccaagaccctgaacctgaagtttcccccaaagtcggcatttttcacaacctacgcaatccattagtgcactgtaacacatacattactaagatgtattactactaccgctctctctacatttgccaaaagaacatattcaaattttcgagaaaaaaatgaggtgaaccttatatttctgaattgtttctgaatctgctgtttcagttctggtccactttgaccttgccacagtttagcttcatcaaacggaacaggacaagctgtttggagtttcggactatacaacaactgtttgatcaaggattgtgttttcagatcttcagcatggtttcctgtgtcatactctgcctgctccaagtatgctgttgcctgaataaaacattgtaagaagtcagtcctaaagactaatagattgattattcagagacacatgtcagtcctaaagactaatagactaagaagttgctcactttagtaacagcacgtagcacaaagagatacgtgaagtacatatttctgacacgatctggatgtctaagaatacgatcgtacatcagctcaatgttctgtccccactgtatttcaaaagaaattacatgtcaaccaagaccataatacattcatgtagagagacttgtcaatcttttgctcagaaacacaaacctggtttctagactcatcaagaagataatcagcagctatgtgcatcgagattgaagaatgaagaccggatatcaatttgtacaaaacttttttctctggacaagtctccccagatgaatctacaaaaaccacttacatttcaacatacaacataatacaagtctttgttcacaatatggtactgaaggaaaaacttacattttggacagttctctgaatatatggagtcccaaatccttctagctgaaggtccagtataaccagtataccgttcggggtttaactaagattacatactct

SEQ ID NO: 245 - DNA, 921 bp, Arabidopsis thaliana landsberg
ggagggtttactatggaggaaatcttagaattaacattcaaatccatttttccaattttaaacactaaacaaaaaacattatattaacaaaacaaatataacttaaaatttcaaaaacaaatagttataaaaatcttcatgaagtgtatcatagtatcatacataaaaataacaatagcatgtatctatagatcatcttaaaaacaaaaaaaactatgggtcaatctctagataatacaagtttaaaatctttattacctctaaaagaaccaaaccacaaacaaaaaatattgaatttgaataataaactaatatacaacaaatatcataacacaaaacatgaattaccccagctttacatagataaaaattatgtgtcaagaatatattattcatatacaaatcataatttttataaaaactatttataacttttcaatacacatatccacgcacggtacaatatctagttttgttcataatctggacacccatgtgttgggagagcgtgttgtatgatgaaaacataagttagttgcacgaacatgaatagtacacatgcagtctcttgtcttagatggagttattcgtattagaagaggtaggagactagctaaagagatacaagaaacgaaagccatgttattagtagatactatttcttcctctttgttgttttcttaaaaaggaagttgaacaaaagaagaatcatacaaaataacagcgatacggttacacacaagcaagtatttctcttttgtttgggtgacttgtattttcgcaacaatagccactttttttttgccattcgagagaatgcatgcaaggttgatcaaaatcattggagagttgatgctacactgtacgacttcttaatcactcattaaccacatgctccctatcttctacccactgtggatt

SEQ ID NO: 246 - DNA, 1307 bp, Arabidopsis thaliana landsberg
  unsure (1)..(1307): unsure at all n locations
gaatgcggaacaacaatgatctcttcttttcaggctctgaccgttttgatatggagaagcattacaagagcgagaaaagtaccaaatgatcaagaaactacttgcaggtttgctgctggaaacagatcaagaatgaatccaccattgccgacgaatcaatttggagtttacatctctcttgtgaaaacgactactaaaatcggtaatctactggagaatgagtttggatggattgctttgaaactgcatcaagctgttaccgaacacactggcgaaaagatctcttacgaaatagatcaaatgttgaagtctcctttaccgttgcaagcatatcgactttccaatttgaacatagttcacatgngaagttctccaaggtttaacaagtacggaagcgagtttgggatggggaaagcggtggcggttagaagcggttatggcggtaagtatgacgggaaggtatcagcttatccaggaagacaaggaggaggacccatagatttggaagtatgtcttcttccagagtttatggaagctttggaatcagatcaagaattcatgtccgttgtctcttcttcttcttgatcttattcatataagtttgattgattgtttgtgttgctgttaaagtccaattaatattatgtgacaatgtgttattcaactgataatgactgttatttattaaagattagtacaaactaaaatgtgaggtttagagatgataaagttgatgtctttgtggattactcccactcactctcttgattctacactctacttgtaagaacttagataggaaacctgaaaacagaaccatgaaacagagaaaattgcagagaagtaaatgtgtaagatcaagacttttacgttttcaggtttcagtgtgaaagcgcctactcatgccttgacattgttactcggaatccactattaacaaggtttataatatcaagctctttcttgagcttatacaacaaccatacaagaagtcatctcctcccaaaacacaccctccattcaactactctctgaaccatttgtcccttttgtctcctgatatgttctaacactaagaccagatccaaaacgacacagttctacttttggcaagaatcacgtgacgtccttgtgattgggcttcagaatttgcttgcttcttcttcaaaccctctgtgggaatagtgtttagtgaagttagtaaaaacatgcatgtgttatttgataaaagattaatacaaacttctaagactaatgttattcaattagaataaagatcatatatttgatgacatcattgatgatga

SEQ ID NO: 247 - DNA, 2788 bp, Arabidopsis thaliana landsberg
  unsure (1)..(2788): unsure at all n locations
tcgtgtgctattgaatgtaaaaacactacaagaaatgaatgtacacctcggcgaaaaaaaagaaaaaagaatgtacaccacttgattcgttgtatgtgactggcgactattattataagacaaactgacaaagaacaagaccaattgctacaaacatcttcactgataaaaaaaaacatcttcactgataaacaacatcttctcaaacgattcaagtacatttgctacaactagagtttccttacagaaactgatgaaaccttgggcttgcttgctgatgggtttgtagataaagatgaagctttgaatcctcctctcaataggcttgatgcggatgctgcgcttattttccttctttttgcttccagctccattcttttcttgctcgatgagtaagacgactcgggaaaaatggaagatgcatggatcagtgctcgtttgtcctttcgattcttatcaaacttgctcttgaatttcacgtttgaggcagctttaatatcttcttcactctttggaagcagtcttatccccaagcctagcttccttgaagcagtctcttcctctgctacacgttttctgtgtccctggtaaatgagaacaaagtgagaaaggaggattcgaaaaatcggattgcaaacagagcaaaaaattgcaaacttggaacgaaccctaagttgtgcacgtagagctttgtttagggagtaatcatcagcatgtcttgcatctgagactcgctgaagacggaccaaaagcggttcagctgctttcttcttctgtaaatctacttcctggtgctctagacgataaaaggggtctgcaagctttcccttctctgcaaaagttattatcccaaagcatgtcaagattgaagaaataacaagagttgaaatacaaacagctattgagagatctatagagaataaaatcgtagaagaaggtaaaagaaaccaaccttgctcagcagtgagctccatggtttctgcatcttctgcttcatattcctcaaccttcttctgggcaccactagtgattacatactcgcagttctgaggatctgtctgaatgactatctcatgtttacagcatggtgatttcattgcaaagctccatatctgaccatgataagatataaatcctcagccacagttccataggaaagaggagaaagaatgcagaaacagaaattgaagaagtcatacatattttaagtgatgatagagaaaggagagactctcaatagtacctttgtagaataatagttgccaacttgcttcttttctgcattaaatcgaacacccttggcgatcatagaactacagccaccacaccatatattatagggcatctcgaacctgaacaaaacaaaagcacgtatgaaatttaaaccaaactgagagtaacaaaaacaaagcttctgatcgatcaacaaaatgtacaccaggagtagactttaacatcgagcacactttaattacatttgatcatcaaataggttctttcatgtaatacttaaggtttagcctcatcactctattcatggatcacagtagcaatctaatgaacaacaactagtgtgaatccaaccaaaagtagcatctccctcacgatgttacaactagaatgagctaataatatagtatataatttaccttatgaccaaaattccctcgccaattttctttgccctctctctgagaggatgctgtccttgaaacttgttcaaggaaccttgatccggagtccattctggaggatagtaaaagttatctgccctggcagctgatagagtcgactgcaaaacaaaagggacaaatcgaaaagagttaaaacaatgatgaaactaaaatcaatgaacacaattaccagataggatcctcaataatcaaatacacaaggcaagcaattgattagattagccgaatcatagagaaaattttcgataacaagctaaaaccttgcaattatcaaattgtcaaaacgaatacagaaaattttcaaagtaccaacgaaccatatgaaaaatcgattgagacaatcacgaataactctgaaaaaacaaaccctagaaccaaatcctagtatcgaaaaccataatgaaaaaaaaaaatagggcttcgaagattcattacaacaaacaaacatggttttatccccaatttgctaccacctcaaggagcagaagataaatcaagcgattgacaaatagaaggaaattaattgaatacaaggaggacaataaaactaaccatcgagattaatcaaatcgatcttcctagtctcctccttgatgttcaatcgcacaactcttggctcttgtgaaaagacttgtaactaatccccaggtaacgaaacgaatcttcttctacctcaggaaaacgccgccgtattggtgattaatttccaacgcggtcgcggatctctatcatttaattggttcacacggtttaggttattcattttatctatggtcaatgtcggtacggtaaatgtcttattttannnnnnnnnnnnnnnnnnnnnnnnnnnnnnnnaattcggtgagtagaacgcagacgtgatttgtgtgtcagctcccatcactccttttatcacaagcggctatagttgagctccggccatctgatgatggatgatattattatgcgacaacattttggtggactctccacagactgattagtgtttaccatcatcatcatcatcatcatcatgatctcctccctcatgtgcttttcacatcttaatctgatttcaaccaaattgttttttgagatcccnaatcatacta

SEQ ID NO: 248 - DNA, 1805 bp, Arabidopsis thaliana landsberg
cacaagtgaatatcaataaaaacaacataacaaaaatagtatctatattataatatagagatgagatgaatgagaccacaatcaaaaactctgtcgctttactttgatagtttttatagccattgtcgttttgctctgtgatagtcgctgactcaacgatcgataaaacatcaagcccttcgtaatatgtaggttccaaataagactgcagaaaacttcgtaatatggcagataactttaactatcccccagactggactccgaatcaaagtaaagaaaataggcgagggaattttggtcataaggtaaatatagtcaaatactatattagttcattccagtgattccctagtttccaagttgtaacatcgggaggtagatactacttttggttagattcacacaattagattgcttatgggatccataaatagagtgatgaggctaaaccaaagtataacatgaaactattatgatgatcgaaagtaactaaagtgtgtactttgcttgagttggtgtcactgtgttggtttggctcgatgttaaagtctacccatggttttcattttgttgatcgatcagaagctttgtttctgttactctctgtaaacatgagatagtcattcagacagatcctcagaactgcgagtatgtcatcactagtggtgcccagaagaaggttgaggaatatgaagcagaagatgcagaaaccatggagctcactgctgagcaaggttggtttcttctaccttcttctacgattttattctctatagatctctctatagctgtttgtattttaactcttcttatttcttcaatcttgacatgctttgggataagaaattttgcagagaagggaaagcttgcagaccccttttatcgtctagagcaccaggaagtagatttacagaagaagaaagcagcagaaccgtttttggtccgcctccagcgagtttcagacgcaagacatgctgatggtttctccctaaacagcacaacttagggttagttccaagtttgcaaattattctctgcttgcagtccgattttcgatcgtactttctaactttgttctcatttgtcagggacacagaaaacatgtagcagaagaagaggctgcttcaaggaagctaggcttggggagaagtcagacttcttcgaaagagtgaagaagatattaaggctacctcaaacgtgaaatccaagagcaagtttgataagaatcgaaaggacaaaagagcactgatccatgcatcttccatttttcctgagtcagcttactcggtgtcatcatcgagcaagagaagaatggagctggaaggaaagagaaggaaaataaccgcagcatcagcatcaaatctactgaggggaggattcaaagcttcagcattgtctaaaacgccatcaacaagcaaatgtaaggaagctgtagatttagcagctgtgcttgaaatgaatcaatgtaagaagcaataataaaaaaagtcaacttattcataagtgcagatgttctacgtttgtaaaattgaacttgatcccgacaaaacaataattagctctattcaaaatcaattagtagtataaatctaattcttgtactgttatagtgtttttctccgttgtcgtcgtgtcataatatttatatgttagtgtgaagactcaaatgatgtgaaaagaaatgatagtatgatttgggatctcaaaaaaacaatttgttgaaatcacattaccatgtgaaaagcacatgagggagaaaatcatactgatgatgatgatgatgatggtaaacactaatcagtctg

SEQ ID NO: 249 - DNA, 4233 bp, Arabidopsis thaliana landsberg
ttgacatgttcaatcgaaaattcctacatatcagccgcaactcgtatattaaactacgattttgtctattttgttgaccaataaattttacttatttgaaatttattattctaatttaatatgaaaatctatttttagtgtatatcatttatatataatcatagttttagacaaaaatatatttacttatttcagctcaaaaaaatactaaaagtttctgcataaaaaaactacttttgattcaatttttggtgtcatgaggtgtgttacctcgtttgtagttttgtgtattctcatgttccttgtggtaaacaatgttgaaggtaatactattaattttcttataatttttttatatattagaagttatgcaaatattgattattcctatcaaactttgaaattctttgtttatcagtatagtttagttaaatatttatctgtggttttttgaaacagtagatgtgaaagcacaacgaaggaaacctgtttgtaaattgactggtgtcctaaaccctggaaaatgtcccacagctatacatgatgcaagcaacttgtgtagtcgcaaattggcttcacctaatatgacatataagtcctaccccgttgcattttgcaggtgatgatttacactctatggcgagagcgaaacgagcgcaaacatggagcttctccgaattcttcaagtcggcttatcagttggatagataagcacattcgaaatcatttgatggccataaaacagaatggtgatagaagatttgatagagggtttcaagtttggcttcaagcaagagaaataacttaagctctgttttttagaaataagactctgttttccagattatattctttaaactaacgttagcacttgttgtaacaacattggcttccttttttaagtttaatttaacataaaattaaaaaaaaaaatgttttccaggtaattaaataacaaacatttgttttttttaattagtaagtcgatttctttctttgaccaatttcaatgtttagggtaaagacttgaaactctgtagcgtagaggaatacatccggtccactggttgtgctgcatccacttactgcataactttccaagccgtggctccagagaccaatcgtattggttcgcttcaaacttttcggtctcaagtttgtgaactagcatatggccgattctgtttgaattgtcttgctagacctctaggtacgtaaaatttaattattattggtttggtatataacacaaaattcatcctattatattatttgggaagtacattttaaatgtaacattaatttgtgtaagtaattacataggtatgccattagaaataaaattttaaagagtaattaatttatctctttaaggattaaaaagtcaaatactaatttaattaattaaatttaattaagaaacgaaaatacattattaatttccaaaaataataaccaaaaaaaatcaacatataagatttgatatataaatttatttctaaaactaacttcagtatattattattttcttacagaagtacaatccaattcattattactacattatcattatcatctaaactgattctaataaaactgatggttcttattcataaatacaaaagtcaaaaggtatatatcaaattagtaaaactttacgattttaatattctaatacgagttgttaaaaagaacgtctagttccaaacactatagtttgtatactattttctaagtaaacaaaaatacagtcaaaattataactactatcatatgtcagctagctaaacttattctcatgattataatgaaacaattaaatatgattttttttttttttttttgtcgtaacagttaaatatgaattaacaaaaaataactgtagtgttatatattactaacgtacacaaacattttttttccccattaaaaaggggtaattgcaaggccgaatggcttatgacggctacaagcccaaacacaaaagaaataatccagagcaaaaatcagaaaaggcctcaggcccaacaagctaaggtaagagcagagaataaaatgaagaaatgaaatgaccaaaatgcaaggattagttgttcaaaaaagacgactagatatagttgcccactggcactgagccactgactatagtacttttttactcttcaacgtatggacaattcctatttgaaaagtagccactgacgatagccactgactataggaatcatactatggacaatttctcactattcatgctttgtttgttcacaaaaaacgatgagttccaataaaccctattaaataacaagtagaactagttccaataaacccaaaatgcaaggacaagttgttcaaaagagacgactagatatagttacagaaaactgactataatatttttcacgtttcaaatattttttgtttcaagtattttttacttttcaacgtacacaattatgcaatcaaactattcacgctccaataaaccctataaataaccagcagaagatgagttaaaaatcacaaatcaaacactttcattttcatacatgagcaatattcaagaaatggaaatgacattgatggtttctctgtgcttaacgaccctcttaacccttctcttacttaaaaaattcctcaaacgaaccgccaaaaaagtgaacttaccaccatctccatggcgaattccagtgattggaaacctccaccagctcagcctccaccctcaccgctccctccactccctcagcctcaggtatggccactgatgctgcttcattttggccgtgtcccatactcgtagtctctccagcgaagagctcatgagatattgaaacacacgatcttaagtttgccaaccgcccgaaatcaaaagccgttcatggacttatgaatggtgggcgtgatgtggtttttggtccctatggagaatattggagacagatgaaggtatttcattactaagccctctttcatatatatgtatatttatcttttttataacttgcacccacacatatatatgtaccacaaattctcatatatagtatatatatcctttaatcaactgataatgattttttgttgtggctttggatgaagagtgtatgcattctcaatctactcaccaacaaaatggttgcatcctttgagaaggtaagagaggaagaggtaaatgcaatgatggagaagctggagaaagcaagttcttcttcttcatcagaaaatctgagcgaactctttataactctaccaagtgatgttacgagtagagttgcgttgggaagaaaacatagtgaggacgagaccgcaagggatctcaagaagcgagtgaggcagatcatggagcttttaggcgagttcccaatcggggactatgtcccggctttggcatggatagacaggatcaacggtttcaatgctagaataaaggaagtaagtcaagggtttagcgatcttatggacaaagtggtgcaagaacatttagaggcaggtaatcataaagaggactttgtcgatatactgttatcaatcgaaagcgagaagagtattggattccaagctcaaagagacgacatcaaattcatgatattggtatgatcatttataaaccaattcattaataattctaacaaattaatgcaacatttttattttggactaatgacatgtaaaatgtctacttcatatatatatcaggatatgtttataggagggacgtcaacaagttcaactctactagaatggataatgacggagctgatcagaaatccaaatgttatgaagaaactccaagacgagattcggtcaaccattaggccacatggttcatacataaaagaaaaagatgttgaaaatatgaaatacttgaaagccgtgattaaagaggtgtttcgggtgcatcctcctcttccactaatacttcccagattattaagtgaagatgtcaaagtaaagggatataacatagccgcaggaaccgaggtaaactaatttctatcaaatcaaattcttaaaacatggtgtacgttagctacatcatatattccaatatatagaaaaaatgatttggctaaacttgtatttgaaacatgtgtaggtgataatcaatgcttgggccatccaaagagaccccgcgatatggggaccggatgcagaagaattcaaaccagaaagacatttagattcaactttggattatcatggaaaagaattgaacttcaacccattcgg

SEQ ID NO: 250 - DNA, 648 bp, Arabidopsis thaliana landsberg
taaattattgtcataaacatacatatttcttataataatatatatcttagttataaattataattcatctccattcttacaacacaatcacaaatttgacgataactagcagagaatgtaaggatttgacgattactctcatatgataacctctatacagatgatttcaggctctctggaaaggtaagattcaattattatttttctgtaaacgtgattataaaagggtaaagccctgttcttttcattgtcgctgcatcagcgatcggcgaccaagaattataactgagttgagacacgtgtctatggtgagtaacaccggcaacaccattaaaacagtcgcagcgactccttttcaccattccaactgtcgctcatttttccagcgacaacggcgatacccgtggaagtgatcgcatcgactcttttttaattattctccatttatgttgaaattctggtcgcttaaagctgtcgcagagactttaaccgaacagggcctaagccgtttttctagaaaacggtttaaatggcttgagaaaatgctaattatgtacacacctatactcgtgataatttttataaaaataatttcattcatatgttaatataaatgacatgtttacttagtctcgagaacagaagaag

SEQ ID NO: 251 - DNA, 5349 bp, Arabidopsis thaliana landsberg
catctcaagaaacccggtgtacactctctggccatgtaatgatgatttcccatgtgttgccgttgactacgagctcgggaccgatatactttcttatatacgttctaccagatcacctgttgtgaagatacattgttctagaacactctcaggacaaccagttgggacaaaggtggtaaacttctcatcaagaggacctaactcgatgtccccggcgattctaaaagtatgccttaaacttctcatcaagaaatgctgcaatatctagattttatagaatcataagaaactctattttcgcgatacagcccgacatagcagcaccaggagtaaggatattagctgctacatctcccaatgacaccttaaatgtcggtggatttgctatgctttcaggaacatcgatggctactccagttatttcaggagttattgcacttcttaaagctttgcatcctgaatggtctcctgctgcttttagatcagccattgtcactacaggtatttgatccccttaggccaaagcagcaaagcattttatagaatcttgaatccctttaactcaataattgtggtctttactttgcagcttggagaacagatccatttggagagcagatttttgcagaagggtcatccctcaaagtacctgatccgtttgattatggtggaggcctcgtgaacccagagaaagctgcagaaccaggtctcatactcgacatgggctcacaagactatgttctctacctgtgttccgctggttacaacgactcatcaatctctcggcttgtcggtaaagtaacagtctgttcaaaccccaaaccttctgttctggatatcaacttaccttcaatcaccatcccaaacctcaaagacgaagtcactctcaccagaaccgtcactaacgttggaccagtcgactcggtctacaaggtcttggttgagcctccgcttgggattcaagtggttgttacaccagagacactagtgtttaactccaaaaccaaaagtgtctccttcacggttattgtctcgaccacacacaaaataaacactggattctactttggtagcttgacttggactgattctatccataatgtggtctttcctgtttccgtgagaacgcagattctgcaaaactattacgatgagaactgaatgattcgtaatagttatttattacccccaaacatttgtttcttacacttcagcctcgtttaataaaccactaatctctgtgttgacaatgaactagaatttagttgaccatgtatgtagtgagtgtaaaccattctttagtttctgagtgatccaattccaagaaaatgtaaacattctttgaaggagacatcagacctctatgtataaaatgttcgtgcttccacaaccaaacctttttttttttgcttggaatgagaaattttgtcatcaattcttgtggtgctatgtccgataatagcttcgctttgcttgtgttgtgataatctcaagtaggtttaggttcatatacagtgtatatggattggccgagaagcagcatgatgatatatagtgcatgctcgtactactcacaagctagctagctttattatgtataaatagtataatcttccgccaagggattggcatggaacatagtaaggaaagtgctgcagatactttgaaattattatatcttgttcatctagaatacattagaccccacaaagaaaacaaaacattcttggccacacaaagaccaagacatttccgtttattttgaattttcgtctcagtctcccacaagtcgtacgtagtataattgcatacaaactaaaacacgtttctatatatatataaatgctggtgcttctttaaaatattcaagtagattgaaagaaagtgaggaacactatttcttttctggaatgaggagtttcagatcatccattctcttggtgcttcttagtcttataacagttctgaatgccacacgagctcgttctgagactgagagcaaggtaaagtgttctttttttctcagaccgaaaaaagagaataggttatgacttatgaccaagttttggttgtgttgtgttgataattatataggttcatatagtgtatctacgcgagatacagcatcatgatcctgagtcggtcactgaatctcaccatcagatattgtggtcacttcttggaaggtatgatttagtacttctacataggaacttttggaagatatacatacatatctcgaaatatctcagattactttgttgattttcaatgattcagcaaagaggctgttcttgattcaatagtgtatagttatcgacacggcttttcaggctttgcagcgaagctcactgagtcccaagcccagcaaatttctggtactttagagttgaactcttttctgtttcttgatttgacttaaaccaagaagttgtttttttttaaaacaaatcaatgccctttcttgaaacagaactgcctgaagtagtacaagtcataccaaatacattatacgaaatgacaacaacaagaacttgggattacttaggtgtatctccgggaaattcagatagtctcctacaaaaggccaatatggggtacaatgtaatcgttggagtcatcgacacaggtatgtgcatatcgaaaatatgtttgattctctcttaaagacatgattactaatagaaaacattaaatgtggtgacaggagtgtggccagaatctgaaatgtttaatgacaaaggttatggaccaataccaagccgttggaaaggcggctgcgaatctggcgaacttttcaatggctccattcattgcaacagaaagctgataggagcaaaatactttattgatgccaacaatgcccaatttggagtcttgaacaaaacagagaacccggactacctttccccaagagactttaacggtcatggcacgcatgttgcctcgactattggtggttcttttctgcctaatgtaagctacttaggcctcggacgaggaaccgcaagaggcggtgcgcccggtgttcatatagctgtttataaggcatgctgggttcaaagagggtgttcgggagctgatgtcttaaaagcaatggatgaagctatccatgatggtgttgatattttgtcactctctttgcagactagtgttcctttatttcctgaaaccgatgcgagggagcttacctccgtgggagcattccatgcggtcgcaaaggggattcctgttgtagctgcagctggtaatgctggccccacggctcagaccctttcgaatgtagctccttggatcttgacagtggctgcaaccactcaagaccgttcttttcctacagccataacactagggaacaatataacaatactggtatacttatgttctgttttactatatataaactataaaatttactgtttttatgtagtttaaaatcattatactaaaatttcctctttgtttaatgtagggtcaagcaatatttggcggttcagaactcggttttgttggtcttacttatccagagagtccactttcagggtaacacagaattacatatttcatgttttaatcatttgcttgttcagtacgttaaaaacccgcgagattgcgtctttggacatgacatagcttttaacttgcagtgactgcgagaacctctctgccaatcccaagagtgcaatggaaggaaaagttgtgttgtgtttcgcagcatctacaccgtcaaatgctgctataaccgcagtaataaatgctggtggtcttgggttaatcatggcaagaaatccgacccacttgcttcgtccacttcgtaactttccatatgtttccgtagatttcgagctcgggaccgacattttgttttacatacgctccacaaggtatattttccaaacactcacaatatcttttacaaacacattgactaaacatattgtgttttgtttttttagatcacccattgtaaacatacaagcttcaagaacactttttggacaatccgtgtcgaccaaggtagcaactttctcatcaagaggacctaattcagtctctccagcgattcttaaggtagataataccatttcatacatttctaacatcttaagattctctgttttgtaaccgcttctttgttttgtaaccgtttttttctgttattgcagccggatatagcagcacctggtgtgaacatactagcagctatttctccaaatagctctataaatgatggaggttttgctatgatgtcagggacatcaatggctactcctgttgtttcaggagttgtagtgctcctcaaatcattacatcctgattggtctccttctgctatcaaatcagctattgttaccacaggttcttatcatcatcaaaaatgttgttataacagttttcttatcaaaaaacttattcatccgaaggaacacattttaacattgcagcttggagaactgatccatctggagagccaatattcgcagacgggtcaagccgcaagctagctgatccgtttgattacggaggaggactcataaatccagagaaagctgtaaaaccaggtctcgtatacgacatgacaacagatgactacgttatgtacatgtgctctgttgattacagtgacatttccatttctcgagtcctcggaaaaaaaactgtctgtcctaatcccaaaccttctgttcttgatctaaatttgccttccatcacaattccaaaccttagaggcgaagtcactctcacaagaaccgtcactaacgttggacccgttaactcagtatacaaggttgtaatcgatcctccaacaggcgttaacgtggctgttacgccaacggaactagtgttcgactctactactacaaagcgatctttcactgttcggttctcgactacacacaaagtaaacactggttactattttggaagcttgacttggactgatactctgcacaatgtagccatcccagtttctgtaagaacacaaatcttgcaacgatactacgacgaaaactgatttaggaaaactcctcaaatattttactatgttgttgtgttgatgaaatatctaaagtatcacgttgatgtataatactatctaagttgtgttctattgatttgttgaagattatgtaaagcattatatcatactgatgaataacactattatctaaatagattctcagaacacactctagtttatcgactgatactcatgtataacgtgatcagtgacattggtctacgaaaatgattatatcctcgatgatcaagaatcactacctaatagaattagacacacgctcaaaagactttcagactcattaccactttgtccgagaaagagtg

SEQ ID NO: 252 - DNA, 2280 bp, Arabidopsis thaliana landsberg
tagtaagacactaataatattgtcgaacacttcaaactccgatcccaattccgatatcccatttgtttcctccaatgtaactcttcctagttacaatgaaaacccaagaagaaaacgtgctaaactcaccaacaacgaagccggttcttcttcgtcttctccaaggcctaaaccggtcacgcaaccggaccctgatgcttcacaaatcgcacgaccatgtactgaatgtggtaaacaattcgggtcactgaaggcactctttggacacatgagatgtcaccctgaacgtcagtggcgtggcatcaaccctccttctaacttcaaacgtaggatcaactcaaacgctgcgtcatcatcctcgagttgggatccatctgaggaagagcataacatagcctcctgtttactaatgatggctaatggtgatgtcccaacccgttcaagtgaagttgaggaacggtttgagtgtgatggttgtaagaaagtgtttgggtcacatcaagcgttaggcggacatagagcagcacataaagacgtcaaaggatgtttcgccaataaaaacataaccgaagatcctcctcctccacctcctcaagagatcgttgatcaagataagggcaagagtgtgaagttggtctcggggatgaatcattgatgtaacatctgttctagagtgttctccagtggtcaagcgttaggaggtcacatgagatgtcattgggagaaagatcaggaagagaaccaagtcaggggcattgatcttaatgttcctgcggcgacatcttcagacacaacgttaggttgttccttggatcttaggttaggactttgatatatgataacttaaggttttatatatttattgggtatttggttctttctcttaattaacaaaaaactctctctgtatatatgtgtgatactttgtatgatgaacgtataggattgtggtattgtattctatatataagttaattagtttatgaaatgcaaatagagttatttactaaatgtccaatattcaagaaattagctttatgaagtttaaaacgttgaatctttttccctatgtaaaaagtttatattgtttgatcatacatgtatatgtatcatgcatggattatggtgtttcttcacagtgtcagtacactaagttagaaaatcaagattcttcttccctaaaaatgttgcttcgagaagagttactttgttgaagctattagcagattcagggtggaagttgttgttgactcgaagatgatgccacatcgtgctgctttgttacttcatgcatttcagaagatgaaatctacaagcaaaaagatttggttttataacatgaatgcgaaaaatcttcagggatgaaattattgtaacagtaaccctccttacttcttttttagcctgcaaggctttaagtgttgcaacaagctttttagtgatgccattctctatataacccttccactgcaaacattcagaggcgagttttaaaactatagtagcttcttctgtagagaactttcccttcagatttggatccatgagctcagtgacatcctttccattgatcatctcaggagcctagaaacagaggataaataaccactcagtaaaatgtaacttgtgttgcaagaaaccaaggattccacaaagtcaagcttgaacagaattacttacatggctcggagaaatttgcaatccagttagcagattcacaaggatagtaccaaatctgtatgtcacattcccagtcctcacgttccctacaatgagaatataaaacattacattctgatatgaatagtctgaagatacaagagcgaattggttacctccttctcttcgattgtaacggatgatctctttcaccaagccgaaactagaaagacaggcatcaccatccttcaacaccagtaaaaacagtttagcatccttagatcacatgacaaggcataggcatgaaaaatgttgtttaacataccttatcaaacagaacagtgtaagcacttagattatcgtactcgtcaaaacgtacagaattgcaataatccaatgcttcaactatatgatacgccactcgcaacctcattgaccattccatgttcttctctgtgcatcacaaaagaaaaaagaaacctcaaacagagaatgctaataagttctgtttcaatcaattctacaagcagatacatttacaccattctatagcatgtcacataaaccaacaacaatgcactctctctatcttcagatacgtttataccattctacacccac

SEQ ID NO: 253 - DNA, 1990 bp, Arabidopsis thaliana landsberg
  unsure (1)..(1990): unsure at all n locations
ggcacaaatggtattagactccacatttgctttaacgttatgagtcattgatgtaacaatgtgtagggatcccatcagaattttttgtgtgaatatcgatagctagtacctttgaatgcttttgcaacccccaagtttttcttaaagcattgttttgcaatccccaagaatctaattcttcacaaccacgtaatcaaaattgttataactttggtttttcatttttccacggtaattaaagcagctagctactcatctgcagcagcagaagactggtgagggaaactagcccagacgtcttgccacgtcatcttccctctgagactgagctaaccacggaagctgcctcctttggctgactcgaaccttggtctttgctatctctttctctgattgtcactgatgtatccaagtccactattacatcttcccctatagatgtatttgttcacacacaaatcatcacttagtctgctgccccatttcaaaaaatttaaaacttgtaatttccaagttgtttacgtaccagtgatgtcaatcttatgtgagatgccaacagaagcgagttccttggaaataactttggctgcttcctcaaattgttggttctgaacaagtgtgaaaaccgtgcacttgattggtgctacaagaggagggaagcggaacacgttcaactattcatcccctgctttgcttggccttgtgctgaaacaatgctcgtacaaacaaatatatgatccgaccaatcccaaatgatggttcaatcactgacagagagtgaaaacccgctgcccgttggattccagagttgcttcttgctcattcatcgcctaacaagatattacacaaagcatgtagtttattgtaaaccatcacatgagacaaagaaatatgtcagtaaaacaatagacttaaagtcactctacctctaaagattcatctacattatattgatttcccttgaatgcaagacaaagttctttcttcacaggagtaatcacaagtttatgaaataacagagaaccgatatcaaggacaagttatagagacagagatgaaaatgttgacaagaatacctctacttctttaggttctgcaaatttctcttcagcaacaagcgcaacgccactttttcctgccatacaacaatggatccacaatctacttaagtatattaaaataggaatatctatgggttttgatcatcaaatctctagcaaacgaaatgatgaaaatagacgtacaaggtaagttgcttactgagtggccatgtaagtcgaatgcagacctatctgctaaaccaacacattcaatccacccatatgaactatcaaattcagcatccaaacaatctgcagcatagtgggccatttcatttgcgaaatgctggcggaaacgcacccattccttgtctgtgccaagacggacaaggaatagatacactctcccaatgaagtagcctagagtttctttgttcacagttccctattcgaatacagnnnnnnnnnnnnnnnnnnnnnntgtctgtgggagtgcataatagaattaagtaggtgaagttaattacatatactgaccttggaaacatcaggaattccaattttgctagcgtgtgaattcacgaactataagaagcccttgacgaggagatatctgcaagtaatatgctacttattaaaccccagacataatatgaaaaaagtcccttaaagaagactaagataaacaaagcaacggaaaattaaaggacaatcacctcattcctaacggcttgaccaatttgagcagcagcannnnnnnnnnnnnnnnnnttgtagtaataaaagtacttaaaagttcacaaaaatgccataagatcagtctagcttgagaacaacctctggtgtcaacttctagcacattctcctcaagcatgagatgctgcaaataaaaaagcaaattaataacatataaagaacaaaacagcctaacacaatctcttcagtactcc

SEQ ID NO: 254 - DNA, 1049 bp, Arabidopsis thaliana landsberg
aagagcatggccacttttttcctgccatacaacaaagggtccacaatctacttaagtaaatataaataggaacacatacatatctagctgtaaaaggtcagtttcttacggagtgagcacgcaagtcgtaatcagacctatctgcaattccaacacattcaatccaaccatatgaacactcaatttcagcatcccaacaatcggttgcatagtgtgccatttcatttgcaagatgatgacggaagcgcaggcgttccttgtctattccaagacggataaggaaaagatacactctcccaatgaagtatcctagagtctcactgttcacatgccctaatacattttcagttgtagagatcagtattagtttttttttcttatcaaaaaggaggtaagcgaatatgattacaaatacactgaccttagcaacagcttcgccaaggcaaagtctttttgcaaattggccaggtttttcttgttcttctcttggaaacataaggaattcaagttttgctacatcagagaacttagaatgtgacttatgctcagggtgaacaaagtgctcaatttctgccagagtgaattcacgagttctaagaagcccttgacgtggagatatctgcgtgagaaacaaagatcccttaaaagaaagattcagataaacgtatacaatatatcaactagtaatattgaaggatattcacctcattcctaaagactcgaccaacttgagccacggcaaacggaagttttctcccattcaaattataataatccttgaagttgcaaaaactgccttgagcagtttcaggacgcaagtaactgaaacacaccaacaaataaataaataaaactcaagaaagaaagaattattacatggaaaaagactcaccctatcaacgaaccacttgctccaaaggaagtttgaaacatcaagttgaaggggcgaggaggatgagaaagtggattcttcgtgactggagcagtgattccatactccaccaagctcttcagcagaaagatcttccacatgagctataactttatcc

SEQ ID NO: 255 - DNA, 2209 bp, Arabidopsis thaliana landsberg
actcgctgtcaatagagtaaaatgaagggagtttatgtttgtagatctaaattataccgtctgggtgtaaccttcacacgaggcaccatggaatgaattatatttcggttgtccactcttgatatagtcaaatcggatgcaccttatgccttgagagtcacctcttacatatattttttgcgtcatcatggtcggatccatcatcccacttaaatcggctatcgggattcttttgtccttctgcttctaacctttggatcatctcggatagattcaaatcttgagacatggaggagtatcgtgtttgttagtcaaccattcatcaataatgacggtaatgttgacggtaaacgattcatgaatgatttgaaatataatattgtgcataaataataaatgcatagtggaagcgcacttggccacttgggatgtaatttggtcaatgcatgcattgtatatagggcttattagagaagtagacactttttacaaaattacttggaaactaggtactttttttagaaataggaggaatgggtactttttgttgggcttgtgagatagagagcttatgagatagagaatatgttactaaaatctaaaatatgagtcaaatactattgtacccttttgttgtgaaaaagaaaattttgtgtgggtccaaaattttaggaataatgggtcaaataatatttactaagcccaaatacaatatttcgtagcccagttaaaataatttacacctcaaatgtctatactagcataagtacaccacatacatacaccaacattagtacaccacatacgtacatcaaaattagtacattacatacatacaccaacattagtacaccatatacgtacactagaataagaacaacatgcgtacaccagaattagtacacctcaaatgtctacactagcataagtacaccacatacgtacaccaacattagtacaccacatacgtacaccagcattagtacatcacatacgtacaccaacattagtacaccatatacgtatactagaataaggaaaatattttgatttagttttcaatattttgatttagcttttaatcaaaattattttcaatattttgatttagtttttaatcaaattttgctaagaactcttcatggatgatgatccaattaatttacaaattgaaaatgttattgagttggttttaatgaggcccatttgttttcatcaaaacaacagaagggtaaaatggtactttactatttgatgtattagagagcagctctattagaaaggagagatagaactatctattttgcctatttctaaaaaaagtgtctacttctcagattattttacaaaacaactgtctagtctccaacttatctcatatatatatatatatatatatatatatatatatatatatatatatatattttgttacgaatgttctcatatatagtatgccaataaaaccacaaaatttgtctgaaacaagatagagtatcatgcttagtcaaaatatgtaaatattctcctaaggttcacaactacttgcacactttcattaagtatgctgctatgtttacatattatacaaataaaatcgtaaattttgttagaaacgtggcaaactagcataaataaataatctaaggcttctagtaatcttggcattacaacttgcataatttccataagatctattggatattgtaaaatctgccaataaaaccacatatcttttaagaaaacacaggagactaaccaaaataaatccaaccgtattatattataattctctaaattttacacattgactcacgaacatttgtaaaatctgccatattcgaaaaatttgtcaacaacatccctataatgtttgagagacatgaaaaattagcaaaacatatgctaaatgtgctagtaattcctaatgtacgtttacataaatttttttttttgaccgattttaattagatctcaaaagaatcatccatgaaaaatgtacgtttacataacattttgcatactttgtaaaatccgtcaatgttggataaacaatgttatgaaaaatattcaagtcttcaaaacaaaacctaagtttctatggcttataattaatcccatagttttttaatcatgttagatttgttaaaattttgctagcgttgatgattttcttgtattctaaaattttaattttttgaaaaaaatt

SEQ ID NO: 256 - DNA, 688 bp, Arabidopsis thaliana landsberg
  unsure (1)..(688): unsure at all n locations
tctacggaagagcatagctctttcttcgtcatgtctcaggaatcagaatagcttggcgaagagcataaaatccacgtgttttgcagagagccaacatatcagatcatctttacgcggaagcaagatattcacaggttctacagaatctctagctgcaagtctgcggagaggcttggatattattgacaatcccatgaaccctgcatcaaaccgatgctcagtttctttgtcttctgataacttgaccatgcaacctcccacagatgatcgattacctctgtcgccactctgtccaacctgcagaatttgcagctctaagttaccaagtgtagttgagggagtaagtatatgatatagcagatacaatatgttttaatagatttagtttttnnnnnnnnnnnnnnnnnnnnnnnnnnggatttattgttaatcaggatggatatcatatggaaggggttcttgagaagcagcaagagcttgaaaaattgtgctcagagcaagcagccaagattgaacagctaacgcgcctggtaacccaatttctatgtcttatgcctactgaaacttggatcagtacatatggttaagcagtctggttatatcatatcttcttaaggtagggcaacacaaacttcaaactgagaatgaaacagaaaaacttatgggagcaagtaatggagagggactt

SEQ ID NO: 257 - DNA, 1866 bp, Arabidopsis thaliana landsberg
  unsure (1)..(1866): unsure at all n locations
attgggagtttactggacatgaaccaagaagtggccaaagtgatcttggattgcaagaaagacatttggaagaatcaagaaatgtttgagttcgtcgaagcttactttgagactagcttgaagacgctcgacttctttaatgctttgaagagaggcctgcaaggagtacaaattaatcaccttttcattcttggtgctgttcagcattttgaagaagagagccttattcaaggcaagacttttcttattttctcttttgttttcttctggttttgactttaacactcatctttttctggttcgcagatgggaacggatacaagaagacacttcaagagctgaagaggttcaaagacgcagacagacctttcgaccaagacttcttcaagatgttccaatctgtttacaaccagcagaagtggatgctcgataagcttcagcatcgtcaaaacaagctcgacaagaagctcaagcgcattcgcacatggcgaaaactctccagcatcatcttcatggctacctttgccactctggtcatctgctctgttctcgctgcaactatggcggctcctcatgtggctgcggctctcgctgcagctacacccccagtgggatctatggggaaatggatcgactcgctgtggaagaactatgagaatgaaatcaaagggcagacagaggtgttcagttcgatgtatgtagggacatatgtggcggttcaggatttaaataatatcaaggatttgattaaacggttggatactgagatcagggggatggtgaagaatgcggaatatgcgggggagcttggtccagtcaagattgggatcaatgcgattaagacgcagcttgaggtgtttaagaagaacgtagaggaattggagatccaggctgatatgtgtagcaccgatattagaagggcaaggactgtgattctccagaggattattaatgctacttgcagcacctgaagaaagcacaaaaggaactacccggtttctctcatcttcaggttcttgctacaaatgatgaaatgctcaaagacaataaataataatagtacagattctttctgaatgtatatacctatcaaagtccaataactcaaactgtttatgatgattgttgcattttctgtattctttgatgattgaaaacaatgggagacaagactttcacatttgagactatcaaaatgatggttctgccaggagtctatatatactgatatcagagtggtgggctaatagacgaaaaactaaatcataagtatggaatctgaaaactaggggtgttagttaaaggaactgtgataggattcagttctcgtaaactcttaagaggcttgattaacgagagaagtaagtctcttatctatcgcccagtgtccaaagcaaaatcctacattaatccacaaggccccaactcaataacctagctttcctttctaacctcgagctctcaactaattgacataacataatcttaattctgatacagtgatatgtttcacaccccataaacatcacgaagcaaaacacatgtcgaccaaagaaaatatacttacctcagaccacttgacttggtttggaaatatagcaatgatacaagactaaactccttccacactggtccctggctcccactcatgagacatgaaactgaaactaacataaagttatgtaacaagaatctcatgagaaagacatcatatcaattgcctaaaagataggttagaaattctcattctttcagtcacaaaatcataatcataacataggcctgtataaagaaaggttgcggatcacaagaataatagggcgctncncccacaaaaatgacaaacttattttacaactgattgag

SEQ ID NO: 258 - DNA, 3608 bp, Arabidopsis thaliana landsberg
gcttgcatgatagcatacttacatttggagtgatttacatggattcatgtacttttggatttaactggggagtttctagcacaaggagtggactacctcgagtttgtacgatccaaagaaggacatggagtatactcgggatatctactcggctggagatcgagcggagcacacaagggagaaggaaggattatactcggccaatctactcggctggagctcgagtggtgcacatgaggaagaagggaagctgctcgattgaagctactcggcctgaagccgagtgatgtgaccaaaggaggctactcgacttttctactcggccaagacccgagtggtgcagcgccgacttttccattttgtctttttcccaattagggcatcctagtattgcctattaatagacctcttatgtttttgcccaaaatatctttgctttgtctgctggatattagggttcttagatttcttttgcattttctggttgttgtgttgagaatctgaatttcatttcttctgcaaacttgtttatcttattgagatctatcatttgctaagtttataatgatttatgggttaattttgttctatgatgtttttcattgttcttgagtagtcttcttcagagttcttgaggatgagttaggtttaggtggattcctctgttctttagctagctaagtatttatatgcatgattccctgctattttatttctgatcaattgaaaattgatttcagactttctccaccggctaataattgtttgatgaaatgtatgaaccaactaatttcatagatttgtagactctagcccaagacattggatgtttagactgcttattgattagcccaagaaatttgtagactctagcccaagacattggatgtttagactctagcctgctttattatgtttcatcaatgaaagttgagattaggaagtgataaagttatgaggatcattgtcatgaaaatggattgatctggttttgaatctattgtttagggatagcttgatttagtttgttagttagctaatggattgagaagtccactaagaccaattaacctaatcttaagagctctgtttagtttattcgtgcaaaactcgtgtttttagtactctgttcgtttcgtgcaaaattggtgtttttagtattgtactcgacctgcttactcgtttgctcgaccgagtgctttacctagtgcttggtttactttctgttcttgcatttgacagttcctcgtctttagtttcatttctgcttttatcacttgtgttctttaccttctacttagtatagtttcatttctgaatttgatttgcatgttaacctatcgcttaggtttagtagaaatacatcaaacctattcacacttggcttgacttagtattctctgatcacatccagattgttagcaattccacccaattggattgacaccttaaatgctacaatgacataagatgcatttagggaattgacacacaaaacccttgtattcaaacactcaagtatttatttattttgtgagaaggattattttttaggacaaaaatcagatgtaaagagcttttggattgatataaaaaatggctatagtataattgctaggagaattgcatggttcaagacctacatttttgatacaagaatgtggtatctaatcttaattatatgacataattcccttttaaagctttcgtttcagtcttcgggtttaatgtctcaacgttcgaatttaattgactttgaccttcatgggctttaacactcggcccaacacatctaaaccgaactgctctcaacttggcctcgtctctatctcgtgacgtgatcacctcgcaacactcttcacccaactttgggactcttttcaggctgtgcttcttgtgggtcccttttttcttacgtggaaatctttggttggtcccggactaccggtgcgagatccgacaccaaaaattatctcccaagtccttcgagcagttactctagttcggaggactttaatgccctaatgagcaaagattgcgctacacgattttctgatttttcgccatagtagcatcattctgtttaattccggcactatccttatttacttgcgtgacacctgtcctaattgatgtaggtcaaattaccttaagaccactctctcaaataagagatcgattgtaacacttaagggtcgaattccacaaaattctcagattacacaatagactatggttatcgaattaagctaaaccaatagattgtaaaataagaaacaaagaaaagcaataattatcaagatgtaaatcaaatgggaaaagagtcagatttagggtattctcatgaaatagatgattagtagatctagtaataggtaggttgttatcgaaccattcttaaactcaaactctaatatcataataaccgatggcgttcagtgaaattcactatgcttagagctaagattcccagtggcgtgccgtaaaatcctcttcctaagcatgcatgctaaacaagttcgataagttcaccttaataggtaggccgattctttttacacatttataaaccagactcatcaaataatagttctgataacagatacctatggcgggtatatctattatatggaatcaagttctagttagctactctagaactagcattaagaacaactaaagatgaagaatcctacaaataacctagcaaggggaaaatctactaaatcatatataaccctaatgagaaactctaaacctaacaagaagactactcaaacatgatgattgaagcaaacaacatgattgaataagaaatcaataatgaaattaagaagagaatagagttagaaagatcttctctaaagggagtctacacatggttttgctcccaagtaaaaaagagaaaaggagaatagcccctcaatgcttaggtctaaacaatgaccttaaaactatatatataagtcttaaaaatgtattgggttttatttaaaaatgagggaaagttctgggccgaatttggaaatcttcaaaacttcaataagttgcgtcttttaattgccatcaggtattggtgtcgctcaacaccaaggatggtgtcgatcgatacctacgcgatttttagtcttcggattttttctacaacataagttctctgttttcctccataatgctctattatctccaaatgcatcccaaacatgtaaagatttgaaaaggagtagaaaagactctataaatgacaaatagactctaaaacctatacctaaaacatagttaaaacaagtaaaaaatagggatatatcaactcccctaaacttagcttttgcttaccctcaagcaaaacacaaaaggcgaacccgtggaagaggtttgaaaacagaagaactcccaacattctctagcctattaccatgatcatcctaaccaaatccatatgcctagcagttctaatcaaatcctaaccaacatgtatttctccgcaagcttacacaacattctagattccatacctaattccacaactatttccactaggctttcatcgctgggtctcatcaatcaagctaatattcaagaaccttttagactcatctcatgtactc

SEQ ID NO: 259 - DNA, 2991 bp, Arabidopsis thaliana landsberg
  unsure (1)..(2991): unsure at all n locations
tattctctgtattgattatgaaaatgattgtgtgttgatgatgtttaagagtaataatggcagatacgattccacgctcagaaatactttctcaaagttcagaagagtggtgctaacgaacatcttccacctcctcgacctaagaggaaagcgagtcatccttatcctataaaggctcctaaaaatggtgacttttgatcatcttcttactctgttttcttctttgctttaatcattttctaatgatttgctatgctgctgcagttgcttatacctctctcccgtcttcgagtacattaccgttgcttgagcctggttatttgtatagctctgattcgaagtcattgatgggaaaccaggctgtttgtgcatctacctcttcttcgtggaatcatgaatcnnnnnnnnnnnnnnnnnnnnnnnntgaaggtaggttttactagtggttatgctttcagttgatgagattttgagttagttgtatttgtgaatcgtgttaacaatggggtgtaatgaatttgtgatagtagaggaaccgggagtctcggccacggctcctctcccaaataatcgctgcagacaggaagatacagagagggtacgagcagtgacaaagccaaataacgaagaaagttgtgaaaagccacatagaggtaagacttgttatcttgttacattatgtgtttttctagtagacatctttgagatttacgctgacaatggagctgttttaatgcagtgatgccgaattttgctgaagtttacagcttcattggaagtgtcttcgatcccaacacatcaggccacctccagagattaaagcagatggatccaataaatatggaaacggtatgagacacgtttaatcagactcagtccctactctgagcctttgttgaaaaattcaatcctgatgataataaagaagcttctttgatattgtttctttttgatacatcaggttcttttactgatgcaaaacctgtctgtaaatctgacaagtcccgagtttgcagagcaagtaagtagtaatctcattcccactctcaatgaaatactgaaagattaatactttcttggtggatatcaagtaatttcgtaattattaatttggtgctttgatatgtagaggaggttgatatcatcatacagcgctaaagctttgaaatagagatagaataaaacaataatgtaccttatgtgagatcaagagacaatcatccaaggtctgtatgcattgcttggatttaggcctcgtgttctcactacaggagcagaaccaatcgcaaagactcttagatggctactgagttgtggtttttatgtctctgtaagtcgcggtggagcacacgtgtttgtcctgtcttgtgtatgtgtgtatagataatacaaggttttgcagagtaaggtcacagttagctgcaagtgagtttggatcaatcttaagattaaaaccctgagagtgagtgtccaaagagactgtgtaatattggtttggcggtcagcagaagagttttgaagtgcacatccagttagtgataacacggttgaagaaaaggtaaggttacaagtttagttttgaataattgtatactcaaaaaatatgaatgtataaagaataatcacttgagtcgccttattccgcctgattaactgttgcattccacattgagtgttccatctccaaggaaaacatacacgttcgagcctttttgtgactcacacttaaatcaaacagtagcagcaagagcattcacaaaattacaatgtctagggactgtaagcacatgatcaaaccactcaactttccccctaatttcacaactttccactcaacctcatcattggttagggtttgatcaggtttccggcagagggtgaacatgcgataatcaggataacacgctatggacagatagagacagctctcggtgtggcctgagactgatcgggccttgtaaagctccggtgaaactagaagagatcgaaagctcttgcagacgagcgagactgtccgatggtacaatctcgggacgcgagcgacgatgctcaatatcaaatcatcgggaagcgactgaaacgaggccgatgccgactgcgattgcggcgccactatcttcctcttctttaccggcggggacaacattgatgacatgccagagtctgatcaaccactcgtttcttaaacactatatatgcctctaaatcaggccggctcaatattattttgggcctgtgctaaaaaatatatccccttttgggctagcttacgtggcagtgtttactgtcttcttctttaaacgtaatacacttgtagttctattcaaccatttctgctgtacgaacctcctctcaatttcttatatattgtacgtgcctctaaagtaacagcgtatctatacagattccgttatattttctttattagtttacaacttgagaaataatagtaaccatgagattagataaattactaaattattgtgtatcaggtgaatttaagagtgaaaataataaaatttagaattaagaattacattaaaattgcaaatgagtacttttgctagttacagtataaaactctgaaaaaatgcagaaaaaattgtgaatgaaacttcaatttattattgtcgtcaactcctacatattattcaaaaatatttattaaaaatgaagctgggaattcaatgggcacaattgctgcaaacaattcggatttgagtaaaattaataaggagagagagagatgtgtttagaggttgaagatggcagcaccacttgaaggcttggaggcaaagaggtaaagctccatatcttctttttttaccactcctttctctactctctttttgtagtacttctcctgtataaatccacaactccatttctttacacagaaaaaatatgtacaatancgttattgtgtatacaccaccataaggaagctactattacttgactgctggaatgaaatgagtacgcaaatccttg

SEQ ID NO: 260 - DNA, 4611 bp, Arabidopsis thaliana landsberg
tcatgatcatatggaacgagcatgaccatgctaggcgcgatgtaacatttttttccttgtgagttatgcgttttcatgatgaaatgttcccttagattcctgtgttgcttactttcaggatgagaagaacgccatcagaagtcttgatcttttgtatagaagagtcgaggtaattgtttctcttcattcttttctatgctataagatcttgagctgctgatgctttatatcaccatcttcaaacttactcatttgtcaaggaagattatcaactcgtattagtcagctttaggtgaaagtgaatccttatatcgggtgtttctctatccagacagagatcttaaaacggcaagcaagtcctgcaatgaaactgctgaatgatcttctaaacatgcatgatggctttgaagacgatgcttggctcaaggactgcagaaaacgaatggctgagaccttcccccgagaagaccccttcagcattctaatgccaccgggattcgacattgatatggtgcgtccctttttctcttttttgtttttttttattgataaaaacctctcaacagcaagaatcaatgctgtgtttgtagcatcaaggacagttgcgaccgcccattgagactgagacagacaacacccttctgagagtagactttgtaagagaagtggatgcactgctacaggaagtgaggatagaggaagacgctacaactggtagcaaaggagaagggcttgatcctgaagctatagcacttaagtttaagcaacaggagaagcaacgaaccatccgccaaattgaagccattcttgatttagccctcaacttgaagtggtaggcagttaactagaatatcaatctatacgccataataatttttttaagatagaccctagagttagattgattcaggcgtttttgtttagaaatgaatggagtctaaataataggttttggctaaaaattccaaatccaaatgttgctgactatctctctgctcatagtctccaccacaatcatctcttcctctttcaaagtatagtatggcctttacttttccggttccacgatacactccgccagtctcctaacagctcctcaaccaccgctctgtgtccagacggtggagggaggggacattgataaatttcggtctgggagctgatatggacgtgagaagcttgaccgaagaaggtagaggttaaaaaaacattttccgatgatacaagtaaaacgactgatttctggatctcagatcaaaaaaacccgtataaatgggccatgttgagccactaatgggcctcaatactatgagattttaagtgacagctctgcttcttgcatccttcaaagcataagtttgaacacccgcggttttgttttgagcggctggaatatgtaggacagaagatacaggtgaggataacgatctctcatcttaaaagatcaaaagaacggttcttttctttctttcttttttttaacccgatttttcgtcttgggatcatgcaggacatagcaatggctgaacgttttggacgcaccagggaagtggttgcaagagaagcatagatgtctattaatgaacaaattctgcggccggtatcttagagaaaaacgtcttcacaactttataatatactcagaggaggttcatgatcggtatgaacataaccggagacttaggaatccggcgacaaccgctgttcaacaagccattcacggcctcgcctacaccatctacgggaaacccgatgttcggcggctcatgtttgaggttttcgacttcgaacaaatccaacctaaagctgtctgaaaatcgaagctgtctctctcatttgtctaatgtcttttagtatactactgggtttgatttatgtagttaaatacttcattacctttggagaaaagttgaaaactttaaactagcaaaatgagtttcatcagtataatcttaggttcatcagtttcaaatttgttgctaccaattcaaagagcttcttcttatggttgcataccttgagaagagaaactgaatgttgtgagtaaagtttcttcttaaggtattttgtagtttccaggtctgcaagtgagtaaagctcctggttaaatccatgtatgagctgcatctccccacttgagctcttctaaagctaccctcagcgaatggagttgaaattgtgtttagatgcaacaggctccaatttagctataatctgctcaacagcgtctaaaactgcagcaccatacatatcagagctcgcagaagcagcagtaggtgacgcgttaggaacctattaagaggcaatcaaaacgacaagagagcaataacagtgtgtgaggcatttggaacctattaagagaccacaaaagataagagagaacaatatcagttttgtcttggccaaaaagtccactgagtgcatgtaaccgagttagatgtaccttgtatgtgcttgattctgacacaaaaactgactaaggggaatgacacaacctttttatgcaaatccttgacccatttcaacacctccatgtgtcaccaaaacagtcccattggtgcaaacatgaacaaaagcaccggcctgtaataataatatgtgttggagtaagtatcttaaaatccagattctagatttgcaagcaaaggtagtgcaatgctgagatttccaaggaagctttatcttattcttttacctttaaagttcctcgagagatgactaaatttgaaagaaaaaggattcacttctaacatgattcatgaactttgtggtaaatgaatatgacaaattgtgtgggaaccatagctacaccacaccatgcaatgtgcagaagagagtgagattaatgtgtgatgggatctttgcagttgaaagttcatctcctaaagtcaagaaaacattaaactaacaaaatgaggacaaacttttaccaattttcacatttttagaaatatattcaactcactttgatttcttcaggggctcagctgaatctagttttcaatggttgcagaacaaaatgaaaatgaaaattttagtatctcaaaatctagtttctatttttttttggtgacattaatcaatgatttcaaaataaccaaaaacctcagaataaactcaattgcatcttaaaaccacacaactttcataactgaagaatgacgaaaaacaaaataatagaggaggagcatcactactattttcatttttttagccaatcagagtgcactagacaacgcccactcgcaccaatctctcgtcacgcgctccagaccacgcccactcgcacgaacctcgcgttgagcgcgtgtggtcgatttctgtaggggtaaacccacaaaatcatgcctattttacatttactcgctttgtttctaaaacagcctcgagtgaactttttttttttttttttctcaaaaccgtattaattctaatgcaaaccgaaccaaaatcaattttcatttcaaaaccatgtaaaccaaacagaaatcacatgtaatttcaaaaccatgaacgccgaaccgaaatcaattgtcttttcatcaaaaccatgtaaaaggcttctacgattgttttaacttgccactgaaaataataatcctaatttatcaacagagaaatatagagataccaacgaaactatggggatgacaagttatcatcatgtccacatctctgtccagtgtgagtttcacgagttgatttaataggtagcaaggaccagaagctgcagcagcaatgaaagctgatcttgttttaaagccaccgccaagtcttttggttttgcataccgctttcacacattggaagaccaaggaacatgagacacatatttctgctgacctatatacgaatcataagtaaccaccaatgttggcataagcagagagtatgaaaacttttgttactaatttaacataaaaacagtatgataacaaaatgaatacatgcgtaaactctgcttcttctaagacacatatatactaaaagttccccatttggggctccatttaagaatgaaattgaacaattgaggttcaaatattcttacttgtcccagtcgaactttatatgtttttgtaatttatttcataattaaaattttgtatcatttgtcatttaaaaagttttgtggtgttttataggaagctgaaccaatactgtattcagcatgccgttgtgctagatccaacacgttgtcgtcaaccgcctgcaatacaaaaagtaaaaccaccacagaattaatccctctaggcagctacaaaaaacttttttagaaatgccgttcaccctatcaatcacttttacagctagaacttaacgggtcagtacaaacttctttactcttaaagactttggctttgccgcaacatcttctgacgatgagtttcccgccactcttctcttcctcacattctcctctactcgccttaactaatccttgtgatgcttcagttaatatgtactatacataaatgatccatattgtagtaatcgaatatatgatatgagtaatcaaaggtatgatagtaatcaaagacatgattctctccttaatacccaaaaccactttaatttggctaaggatttgctttggaaatgtggagttgt

SEQ ID NO: 261 - DNA, 1342 bp, Arabidopsis thaliana landsberg
gcagtctactagttttgtgacattcaaaagatgttgattttttcgagcaaagttttcggcttttaaccataagatccaaaaaagagatacaacagtaaaacaaactgccatatgtagagttttactggcttgaactggcagctccaacaagaacaccttgagcattaccttccttcttgttacctccttccttgttatcttcttgtttcgttatcctgatcttatacttagcttcaaactctgtaagatctttcttctttttctccaatgtctcgtatagcttcctcacaacctcttcaagtccgtccttgttacgttggacagctgggagtacctctttgatggttctttcgacaagaacgcctcctatcatgcggaagcatttcctcgattggtcgagaggctgaatggcgttaatgaccagagaatgttcgctcacttgcatctcgaggtcggttatgttggagtagatttggcttagctctgatctcttgccttcatacatgttcaaaacagcttgctcattcggcggttctcttaggccaccgcttccagatttgctggccattacttcgatcctactacagaaattagatccaagaaatcacgaattgcatagttgaagcaaaaaatgagagtaaatcattaaagaaactcaaacaacaacactcagagaaacatttgcatctgacacaactacgaaccgaaaaacacaattgttacaaaacaattccaagcacattggaaagaatactaatcacttaaccaatgcagagaactatcttacctcaagaatgattcatacttaattcattattctctcagaagttataaaatacaaaacatggtgaagcataaggcatttaccagatcaagatcaatcctacaatcattccatcactatcttgtcacgaacaatcacgcccttttccatcaaatagatctaaatactacaacagccacatctaaaccaatgacatagcttatccttcagaatccatcagtctcatagcatcaaatacacttatacaagtagaagcaaccaacacagaacattccacaaagtagacgtatatgagttcactaacagtgtatcatctcctacataatactccaatctcaaactatggcaacagagactcaaacatagaaacgataccaacaaccaatttaacatccttttcaacaatcagggctatttctccaaactagggtttcaacgtctacttatatcaactctcaacacatatattccatgatctaagctaattttctaacattaacgaagcttgattgggatctaagaagtctcagtgaaaatttctacgatttcagagctaga

SEQ ID NO: 262 - DNA, 1972 bp, Arabidopsis thaliana landsberg
agagtgatctctgactctgactctaagttctttcttttcacattctgcagtaaccaaagttatcagcgtactgagacataaactcatcattgaactttttgaaactgtccataatctctggcatttctcttctgctgcagattgttgccttaatgaacaccctgaaacaaacagacaaacaaatatgagcttgctgcaagaataacatgaaactgtaaacacagagggtttttttctccccttctttttgtccaaatccagagcctggaactgtggagattcctgtggcttctaagagcttaaggcagtagaaaacgtcagggacttttccggcttgttttgctgcttggattgctttcgacggcaactttatttgagggaatgaatacatagcaccttctgtgaaattaccgacgacgtttttgcagctgttgaatccatcagtcatcatccttgctcttcttctcagtgattctagtattcccttgctgttaataatgttccagtgaagttcgatgatcgtgatccttcattcatcaaagcgtgtttatttagagtagaatgactatatatacctctcacgaacgaattggtcatatgaaatgtctccaggctttggtgggctaaccattaaacccatctacacaaaaacaatcaggtttcagcagtgagatcattcagtaaccagaacttgctaagaaactaagaagggctagcttacaaatatctgcgcagagacgttggggctgagagctatagaggccaccttgtatatctcctcaacggtctgcattaccagaaattaaaaaggctcttgcaattaccaaaatcacgggtgaaaaagagacggtcaggtacaaaccctgggagggatatttgtcatctcaaagtaacctccccgttgcccacattcgccccagtatcctttggaaacggtgtggaaagatatgagctgaacttccttgctgatcggtgctcccatatccatcaaaacctttgcaacattcatgataaaatgaaggactatcacgcagaccaatgatcacaaagcacatgcataggctaatataattgaagctaaggagttaaagataccaatgaaagacatcgttgttaccttcttggaactgataaagggacgttcatcttggtatatattttgctgatacacttcgtctccgagaagaactaatctctcatcacaacagaaccgtagtatctctcttatgttagcttcgctaagacactggccagttgggtttccggggttaataatcaccattgcccttacctgcatttaccatatgtgaaaaaaacaaaaataagagcagaggtaaagatgtcataaaaaagcctctgcatcaacagtttcgagaaaaatagtggaagagtattaactgttattccttgagagcgagcttgagcaacagattggcgaaggttgttaacatcaagtccccagttttcagactcttcaagatagtaaggaacaagagtaccacctaacagagatatagtagccgagtagagtggatactgtggaactggaaccagaatctgccaaccaagaaaacttgtgaccagatgctactataaaccaagcctaaaaaacctataccatctgcaagaaatctgaatctgaactcttagccatcaaaaaaatcccacatacagttgatgagggattataacatacaacccatatcttactagggcctgctttaatgccaaattgatatgaaccgatttatgataaaaccaaatgaaatggctcatatatccatgtacaaaaactttagataaaggaacaagcgagttaaggttcattactccgtctttctgaccgcgtttgacacaattcaagatttgcatcacacctttgctcgctccatcagttagaaatatgagttctggatcgctgtaatttgaagaaaagaaccaaaaggccttagagtagttttttctttacaac

SEQ ID NO: 263 - DNA, 494 bp, Arabidopsis thaliana landsberg
tgcatctcagagcacttgcgtaaccaatttctcattgtagaattgctccgctgctacaggccatgttaccattggttgccctgcagccactccttccagaagcgagttccagccgcaatgggtcacaaacccacaagttgcttgatgatcaagtatgagcacctgtggtgcccatcctcttataatcatcccttttcctttcaccctctcttcgaacccttctggtaaccattcttctttttcaatacctatgtttttcctaacaacccagatgaaatttgctccagaagtttctaatcctgcagcgatctcgaatagctgctcgttcttgaagcaagccacgctcccaaaagaaatgtaaatgactgaatctggtttcttggagtcaagccatttgaggcattcaacctcattaatgcttgctttctttcctctctcaggcttgtcctcaaatcctctgttgtaaaccgaaagcggaccgatatgccacgctc

SEQ ID NO: 264 - DNA, 766 bp, Arabidopsis thaliana landsberg
  unsure (1)..(766): unsure at all n locations
tgtgacaccttttgactatttaaatgctaactaagctattaactacttctaagcaataatttgttggttttagccgtttttgggataaaatgggtaaaaatgttgtcaaaacactgctactccatctctgatatgtctataatttgcatgatttaggcattcattcttcaccactttgtcattgtttcatccacatttcatctcattaggagtcgttttagtgtgttttacatacttaggacgattttgcattaggattgcatgtgcatggcatatttggttgttttcaggtactttggatgcttttgcattaggaagaagagaagagaagccgaagaaaccactcgatcacaccctcatgacatccactcgatcgcactcgatcacaaggtcgctggaccattcaatctcgacttcacttcatttcactcgatcgcaagacggagcccctgaagcccagtttgatcaatgatatactcgatcactgggaagctcatttcagcccgtcagatgccaatgacacattcggtcgcaggatcatgacgtgaagattcgctatatatttagtttccttatttgtttcattttttcgcttatataaactacctcttagggttttccctagggcatccgctagcatccgctattatccgtttttatctcgcttttacattnttgcaactttgatagccgcagtgtttctcctgcgactttgtagtttcgctctcaagtatttgatatttagttttcgtttaagtctttcgtc

SEQ ID NO: 265 - DNA, 5791 bp, Arabidopsis thaliana landsberg
acattttataattattctccccgcttgtttttaaattatcaacaaattatactttttctgaaataatttcaaaaacctattaaaaatattgataaacttaccactaaaattttctcatcatcaaacttatagcatctccaatggctcaatatttctcccaatggtttctctcaacaaaattgttgaaaaaataattcagaaaccttttaatcggagagagatgtctctcttgagaaaaacttttgatgagatgagaaacgtgtacgtggcatgttctcattggatgttttatgtgacaaaactgagggaaaaaaacgcatggaaaaattgtttctcatctctctctctctctctctctctctctctctctctctctctctctctctctctctctctctctctctctctctctctctctctctctcaacgaaacgacgatggcgaaggcgacggcgacagagccggacttttgatccgacgattaaggttcaattgaagcagtcgatctgttgtatgagcagttgttgggcatgagcacacgacgacgacgacggatgcggatccgtcttttgcaaaaccggtggtcacgagcgcatgtggaaaatgaatcgaatcggagaatcgctgactgaagctcataactggtaagaatctatttctttctgcaatttatcatgatttaatttgggaaatttgatgtttcttttagggttatttgaattctgaatttagggttttatattgtaagcattgagtaggagttttttttattatcaatggaggctaagtgtttgttatttgacatgattgatgtgaggatgagtcattgaatgtttgatttagggtttttagtttttgttaatcaaattacggtgaattgaaaacatatttgatctgtgattcatgctttcatatgtgtctacaacatgtttggcaactttttttgagggaatcgttttcacctgaagaatatgttaacacgcaataaaatcttggatcaagaaaaatatcataacttgtaaacatatatactaggaagtgttggcaaacaatcatacataagttatgataaatcttaatcgctactaaagcctttgcgattttgttgtttatgtaataaaatttatattcttataattgtttggcctcttcttgaagctaacatgaaggaactagcaagagattgagaagcttgtgaaattcaatcgcttgatacttcttaaactaagagtctaagattcataaccaaagaggttagacaaataaaatctcctctctcttttgtgcgggaacaattttgactgcataccctttatacttatgtgaatatcaggaaaaaaaatcctattttcttagaaacaccaagtcaatctcttttatctataaatattttaatcttgttttctgtttataccttgtgtttattcttcttggtatcacagtggttagagagagattgtgcttttgtgtttagtttatatgcctgcaatatttttgtatcaagaagtgtttagtttaattgttgtgataaatttaccttgcattcgtgtcaaagggaaaggaatattgaagactgggcatggataaacgttaagagcaatattctaatggttaagagatcaatagaaaatatgtgagcaagcctcacgatttgatatgaaacagtagaacaagatcattagtgcttatataacactcattaaaaatgaagtgttgattctaacatagtttctctgattctccatatagtgaataacattatttccttctgtttgatgtttatgctaatatgattttgttttctctatttttgtgaggttaaatggagtggttgtggagacgattggtacaagtagagaacgcaagatatatttatcacatcaactaaatcaaggcatatttaaaaatggttgttgtctcattgattaccggtttgtgtttgatatagagttaagcgtataagtacactttcattcttctatttccttcttctttaaccttcaattttctctgaatttctcgtttccatcttcttcaaccttcttctttaacctgcttctttaaaatggatgatatgaatccattttatcagtcttcgggtttcatagacctattgcatagtcagcaagaagacatcaatcgttttgcaagtggatcatctgaagtcccaacctttaatacacaaatgtttgaagaaggaagtgaagatgaagtaacactcatgggttgtacacaagatgaagtcaaaccgaaggttggtttatcacaaaagaaatggtttcccaaagaagatattgttctcgtcagggcatggcttaacaccaacaaggatcatgtgattggtaatgaccaacaatgtcaatcattcttgaaacagattgcatcatatgttgcaatcagtccgcaacttgatgatctgccaaagagagagcatgctaagtgtaagcaaaggtggtcaaaggtcaataaaagtgtgaccaagtttgtaggttgttataagacggcaacaactcataaaactagtggacaaagtgaggatgatgtaatgaagttggcttatgaaatctactacaatgataccaagaagaagttcaacttagagcatacgtggagaaagttaaggtatgatcaaaaatggtgtgaagctgcaactattaaagggaataaaaatgctaaaagaaagtgtgtcgatggttattgatatggttcaaattatctagaactacgctatcaaataagagatcaattgcagtattttaggatcgaattcacggagttcttttgttcaaacaatgagttaaatgtcgagattaagctagcagggtataagtgaaaataaaggagaacaaagtaaaaagacaacagattgattgtgttgtaaatgatttaataaagagctacgaacaaggtattctcaagaaactattggttagtagatttaatgaaagctaggttgttatcgaaccatttttaaactcaaactctaattatggaataaccggtgggcgtgccgcgaaactccctatatctatagctaataataaccggagaagccgagaaagtatcaacataaatatgcatttttaacgagttcaattgttcatcttagtaaataggccgattcttattacacacctataaaccagactcatcaaataatagatccaactacagatacctatggcgggaatatctattgtctggattcaagatctagttagttactctagatctagcattaggcataattaaagatgaagaattctacagataacctagcaaagggggcaatctactaaaccatatgaatccctaatgagaaaccatattcctaacaagcagactattcagacatattgaatgaaccaaaccacataattgagatagaaagcataaacacagtaaccagagaaggggaaagaaaggatctcttcactggattaaaaactagaatgaatctctcaagaccaatggatgaatagcttatgtctctcacaatagggttttgcatagaacttgataaaagactttatttacgaaacttaggtctaaaacaatatatatagaccctaaaaacgtccagggactaataatgcaaatagggaagtcttctagggcaaatttgatcttttataaactcaaaagcgtctagggtttttgctgggctgaaattggtgtcgatcgacaccaggagtttgtcgattgacactcctcgctgaatcaagaactgaaaattgtccttagcttcattttccttagcttttgctccaaaatgtctccttatctccattgttgtcccactgcatagaatacctgaaaagacactaaaaagactcgagaaataacataaagactcaagatcctatacctaaaacttagataaaatcagtgaaaaccaggatatatcaactcccccagacttagcttttgcttgccctcaagcaaaacacaaaagctgaacccgtggaagaggttttgaaaacaaaggaactcccaacattctctagcctattgccatgatcatccaaactaagtccatatgcctaacaagtctaatcaaatcctaaccaacatgtacttctgtgcaagcttacacaacattctagatttcatacctaagttccacaactatatccaccaggctttcatcgctgggtctcatcaaacaagccaccattcaagatccttctagactcattcttgtactataccatgataaatcgaccattctttatatatttttttctttttcagtgttctttctctccccctgacttattcttttttgagagtaaacaaaggggaactcgcatactggatcgacaccctcggcattttccaacctttgtaattgattattccaaataatgtataataatggggtcataggaaacattcatacccctacacactatctgaaagtcttctcaatctctcgttatttatttgtttatttattattttttttttatttggggcgaggaatacttttcattttaacacattagtcgatctatcgggtataaacaaggagtcaatcctatgagcactaaccgttttgatgagataaaaggaagaacagtgagattagctccagcctttgtggccttctggatttttcattagtcggattgatttgaatctacagtacttaaacaatccaggcaataaactcgagagatagatcataatttcagacaaaagttttgactcaattaaatgactatctaagttaaaatgacacaactgactcataagaaaagaaaagatgaagttattaactgactcaccaagacttagatagcactgtccccagagttattaagctagaggaatcgaaagagaaatagtcaaaagttaaaaagttagaacacgtgagttgccacctgagagtggtgtcgatcgataccatgatggtgtcgatcgacactttcgtgtttttggtcgacacgctttttttttttttgttttttttttgtctgaatattcttataaaataaaaaatcctaagttagaaatcaaatgaatgaaatgaataaaaggagaaatacttaccagttggttgccgcccactaagctcttgtttatagtcaatagcttgactttgcagttgcttaatcaaccggtgggtcctagagatccaaagacttttctactggaatctcagcttcagcccagtagtgtttgactctctgtccattcacagcaaatggtttgccattgttgtttttgagaatgatagttccatatggcctaaccgagtggattgtgtagggacctgtccaacgagaagacaatttgccaggaaataattgtcaatctagagttcataaagaagtccctgggtcattaggctcaaaggtccgagtgaggatcttcttgtcgtggtaagcttttgtgcgttctttgtagagcttcgagttgtcataggcgtgaattcgtattacaacaagctcattcaactgaataagtctcctttctccagccgatttgatgtcgaaattaatcatcttgactgcccaagctgctttgtgctcttattacactggaagatgacaagctttaccatatataaaatgaaaaggtgtggtaccaagcggagttttgaaagctgtcatgtaagcccacagcgcatcatctaacttgtaggaccactcctttttcgccttacccactgttttctcaagaatttctttgatttgcatgttggaaacttcaacttggccgctcgtttgtggatggtagggagtagcaacccgatgcttaactccataatgtagaagcaatttcg

SEQ ID NO: 266 - DNA, 606 bp, Arabidopsis thaliana landsberg
atttcggaatatgttttgtaacattggtttgtattttggtgatcagagagtccgaagaaggttgaagagaagaaaatggcgacatggggaactgatattcctgaagatttggaattgaacgaggaggcacttgcaaatgctcttaaaaaggtaagaaagacgccacagtttcagttcatattttctcttgccaagactcttgtttctctgccctgcaaggtttatctgacgtgttgttgtttgtgtgcaggaggatctaagtaggagggaagaaaaagatgagaggaaacgcaaatacaatgtcaattacaccaacgatgtgacctccgaggagatggaagcttacagaatgaagagagttcaccacgaggacccaatgagaaatttccccggctgataaatgtcttttccctttcaccatattaagctgaagaaaccttgtttttaagtttcatgtctttaaataagacccttgttattcatgtcattatttgttactgtcttcatgtccacccaaagattcattatataacgtatgaaactagaataaattttcttagccaaatcaaattaaccatgttgtatataaaccacgaccaagcttta

SEQ ID NO: 267 - DNA, 545 bp, Arabidopsis thaliana landsberg
acaccacgagattgtttctggaagcttataggaaacagatttaatctttattttaacaataattattctccgtgtgttctgaagctgtttcatttgcaggaaacgtgcagagagcgataccagtgttccagatgctcctgctagagctaaaatttttgaacaaaggtaacatattttttttgcctttgcgtattaatgtggtaattctcaaagttttggtttgtaggcaaatgttttgctaatgtcaccttcataaactagacgagttttgtgtcctgtggtttgcgtttgatatgtcttactttgaatctggaagatatgcgggatttcttgaaggctggaagaaagatccagagagtaatggtgggccaccagatggtgttgtaagtcgaaaacaccttatgatctttctctttgatgtagtgagttttggtttcatggattattttggcttgttttcagattctcggccgagttcgtgagcatttactcagagagttaggatttagggacatattcaagaaagtcaaggtttaatttttttt

SEQ ID NO: 268 - DNA, 6439 bp, Arabidopsis thaliana landsberg
gattgggggggggcggtgagatgaactttctcatttttcataacctgttacattttgattctgaactaaagaaagtgatgtgattctgatctcatctgcattactgttctgaattggaaaaacagagccaaagtgttatatgatcagcctcctgagtttttgcgtcccgctttgcttgaagaaaggcatgaggttagcattgtgtgattcacaagaaaattgattagtttaatcaatcacttctctctgggtagagtgcggtatctaagaagtaatgtaaaatttggttacttgtttagttgttttgccgagtgaggaaggatctttgccatccaattggtgtctatgatttcattagtagaggtatctctcttcaaataaaaaaatccatgttttgattttcttttgggcttctccattcattctgatgccaaatctttcaattcaaatttagagttggaaaaccaagagcttaatgaaaccctttttactaccaaatttaatgctgacatctcgctgaagcaaaacagaccagctcttgttgtgagcagtacaagctggtgaggacacatcatcattctttgttcactttcactcttgtggcatcatccttccgtgccattgaatactagaacatgaatctttcaggacccctgatgaaaactttggtatcctactggaagctgcagtgatgtatgatcggcgtgtggctgcaagatcaaaaggaagtgaaacagctgaaatttcagaagagcaacattatcccaatttgttgttcatcattacaggtaaagatggtttcgttcttgtttagaacatgataatattttgctgtttctttttctgatcataagctatccatactgtctatgaaggtaaaggacctgaaaaggagatgtacgaggagaaaatcaaacgattgaaccttagacatgtggcattccgtacaatgtggctcgcagctgaagattacccattgcttttaggttctgcagatcttggtgtctgcttacacacttcctcgtcgggtttagaccttcccatgaaggtaagcacattgtttttatagctcatatgtgtaataaggttgagaagacttaaaacttgatttccattgtgtcaacttgctaccgatgtttggcgttttaggttgttgatatgtttggatgtggcctcccagtttgctcggtttcctactcatggtaatttaatcattgcctttcaatactttcacgaacaaagactataacgtataaacctttactgttgtgaagcattcaagaactcgttaaagatgggaagaacggacttttgttttcatcttcatcagaattagcagatcaattattggtaagtaacccgtctttcttttaaagacagtatttcaccaagtctacagcagacagcagtaacgttcttctgttttgtcattgtgaacagattctcttcaagggttttccagggaactgtgatgcactaatgtcgcttaaagcgggtgcaatggagactggttcttcgggtcgatgggctacagagtgggaagattgtgcaaaacctttaatcactcaggcaaaatccgtcggccctctctgtatctcgcgcacatacttttttattgggctatttctcataagatgtctttatgtctggtctatgcaggtcgtgtctcaaattgcagattcatgaaagagaagactcaaaatcgatgggcttgagagtttctcacacaactgcttttgtagatccaaatttttatacaaaatcatataaattacaagattgtctcgaaaatattgacagaatctgaattcaaaatggtttcgcatgagtctgtgtatgaatgagtaaatgatatcgaaatctttcttaaccaaaagtaaggccaaagaaaaacactgaaaggctcaaagcaaattccacagtttatgtaacaattaaaaaaaaaaaaaaaaactgaagaaacctgtgaatccataaaccagctagctttaaacaaaagactctgccttcttcgtgatgtttaaatccatttccactttttgtttttccctcgtgtctgcatacttgtatggtcgaataaaaatccttgtaaaacttagcaaagagactcactttgccttcgtcttagttttcttgaggaggctggaagttctgaactcagcatcgtctctaatgaagctccaccagagaatggttaagggaattgtggcagcgtgccagatcgagtgagcatcgaagtagccttcatatggaggaaaatcatatatctctagaagcatggctaatcctccagctatcacaaccacccaaagtttccaattagaagggtggcttgagacagcggcccatcttgcccataggaaaagctgtgagactcccattgccacacacacaatcatgttccagcctgtaaacgacattcaactgatgaattcaccaaaaatattgactcgatttttagacagcagcaagttattgggggtaccatagcgagtttgtaaaagtttatgtagagtatgtgggtggttacaaaagctagtattggagcggataccatgacccttgcagcctcgaaaagaataacaaatgttcgtaaaatggctaagatgagtgagaatccgagaatcgctactgcggatgagtagtccaacctctctgtaaggtcaacatccctgagaaccacagagacggattaccagaaaatcacatatgaatatatgatgcagattgtggataatagagtaatgtgtagatgatttaccggctgtggaaaacagcactccagaaccaagagttcatggacaggagaccgtagatatgccacaaaccgacgtattcatagtacgctgtcctatcttgtttcagaggtaacttatagtagatcatgatgaaaaaggaaagccaaccatggaaatgcattgctaggttgagtacagagaaagcaacagaagcaggctcctggcaaagaacaaggtaagtcgaaactcatattatatggaaacaaccagaataaaaaaaaagtgattgaagaaaaaaactaacctgaatcccaagtacacgcttgaagggccatttaccatggtacttgactggggcttgaccgagagtttcccgttcactctctctattaaccatacattgataacggcaatcaccttgacaaccccatattttccattgtaaatacagaggttcttggatgtaccatggaccaccatcggatgaagaattgcactgaggaaagcaaagtggtccaacacaaccgcttatctcacattctgaaacacatgtcctgatacaaaattgccagacattcataatctccacgaatcaaaaatgttgcttacatagaagctacaactaaaccaagttcacgatagatactcaaagaaccaacgttctatctaaaaccttaattctaaattacctgtaatctggatcagcatcgccagcactagcatttgaaatacagaaaaggcatgacagcaatagaaacagggctgtccagtagtggactgccatctgagcagaaagttgaagtgaaatcactgcgtgataataacaatgcaagcctcaaaaaacaaagaaagaaatcgcttaaaggagctgcaaatggaaactatgaatcagagactaaaaaaaaaaaactacaaatgtgaagatcttcatatgatgcttccattaaagaatcctaaagcaagtgtttattccagtgaaagaaattctcacaaatcaataaaaatccttctataattcgaccttgaaagactacagaatctcttcattaacgatcgaacttgatttctgtagaatctaatactatgatttccaggttcgatcagattatcaaaaactcagaacgtaaatcaaattcagagcttaaaccccctagagatctaccaattaagcagggacaacaacaacaagatgagaaatcgatcagctataatgtagagagcaagaaaatagaggaaaaatcgagcagatcagatagaatccaatacctcccgagtctgagtctgagagtctggtcttcgcaacaatgttgaagcttcaaagaatattatcgcactcctgtaaataatggagacgacgaaagagaagaccacgtgtcttataatttaaactaaacgacgtagtttttgcattattctttttctttctaccattatctgctttacaaaatgtcccccaaaaaagagtaacaaaaccttctttcgtatttatcttatctcaataatataattatctcaataatataattgttacaagtactcagaagaatgggaatttgcagacataatttaagtaagagaggttttagtgcaaggcaaaaagaatgaccctatggtttccttccaatgctttcttggagcttttttgatagttcctcatagtgtcttctttgctgtttgttcacagaaggtgagactaaggacaatgcttgctcgaaatgagtcatcttaatcgtacactgacttgtatctgtaatatcgtaatcatcttcacatgaaattgtggtgatctcctccactgcctggaatgtagctttttgcaccaagtgagcgagatcagctccgctgaaaccttcacaattcatctttgcaatgctatcaagatcaacactaggatctatgggcttcttccttgcaatagcttttagaattgaagcacgttcttccgcgttaggtagggctacatatagaagattcccaaacctaccgggtctcaagaacgcaggatcaattacatctggcctgtttgtagctccaattacgtatacattacgcctctctccaccatccagctcaacaagaaactggaacatcgaaatgcatttgatcaatgcctgactaaattgtgcagctacaccattcaataagcgtttattacctggttcaaaagccgttcaacaacccaagcaccttctttgccacgacttgttgtcaaagcatccacctgaaattcaaaaacattactcatggacaagaatcggacagctcttactgctgcatcaacccaaacatggatctactttgtttgctcaatctcatatcttattgtctgcatatatagacatcggtcttattttcgtcatatagttcaaaatgttaataacgaacctcatcaaagaagattacacatggtgcacatgtccgagctcgctgaaacaacgtacgaatagcaagctcactttctccaacgtatttatttagaagttcggcaccctgaaagcccaacgatagaagagagaaaatcacattattttggaccattcaaatacaaagcaacattcataaaatctgacgtgaaagtcaaaccttgatgtgcatgaaattagctccagcctcgttagcagctgcctttgcaatcaatgtcttgccacaacccggtggtccatagagcaaaaaccctgtctctaagtctaccccaaaagcctaaaaagatccaaagagacagttcagacctcaatagaacaagcaagtaatcttgactatataacgatgccatgtgatttttagtaccttataaatatcaggctttttgataggcctcactatataacggttgaattgaagtcgtagatggtcaagtccaccaacatcatcccacttgacatcaggcacgatagagaatccttctcttgttaaagatgcctgaactagattcactgcttcctggtatataaaagagaagttaggaactaaagaggaaattttgaagaacagaaaagtagatccatataacccctgccattaacaaacctcgaaatcagacattttgacaaagagcttttccaactcttcttctggccagggcatcctcagccaagatttatcgtcttcaccgtccccagactgttcagatttccttgaatccaagattctcttaatggctttcctgccagccaagtaagcaacactctccaaatcagctccaacaaaacccggtgttaaacgagctattcttttcttgtcaaagggtccttctaatctaagtttttgggctacaacagagagtatctcagcccttgcgtcttcatctggagcagttagagcgatctcagtttcaaatcgtccacttctcctcaaagcaggatcaagagcatcaggcctatttgtagctccaatgacaagaacaaaaccagcactagaatcaggagcatttttatcgcctttgttaccaggtccatccatacaagtcaacaattgtgttactatccgcttctccatctctctttgctgattctctctctttgaaccaatcgcatcaatctcatcgataaacacaatcgaaggcgcagtcctatatgctttagaaaagagctctctgatattctcttcagaagcacctgagaacaaaatttgcatattggattagtacagcgataataagatcagagagggagccacaacaaactggacaaatggatatgcaa

SEQ ID NO: 269 - DNA, 1138 bp, Arabidopsis thaliana landsberg
tgcttaagattaatgattattaatttatgatattgttgggaccatatttttacataggggtttcaaaaaaattattatcttattatcttatcgattttcgttaatttttacattggcccgacttgggaccggcaaaatttactaatttatcgtgtttattaatttatcgagtattaatttatagagtttctactgtacatatcatatatattacggtccaaatagaaaaagactgatggaattaagtatctaaagaatattgggtacctaatctttaataatataagtatatggatttctaggctttcctgtaggcttgggagttcggagaaatcggtttattcgggtcgggctattcggttttggagaaattcggtttttgaaaaatctatccaaattcggttcgggtcggtcggtactcgggttattcggtttggttatagggcttaaaaataattccaaaattaaaccaaatgttttctatttcggttaatttaaattgaattacaaaaaaaaaaaaacaaataggctgaaaacaaagcccaaacttattacaccatcaaaatacattaacaaatttacaaacccaattataaaatttacaaggcccaacccgaattcacaaggctcaacccattaaaattttagggtttttgacaagggttaacggcgacaaagagccacggcgacggtgacagacgggacaccaacggtgacaacgaacccgcaacggcgacaatgatgaccaatcttttcgtccgatgaagcttgtaatttgccaaccataagaaaatctgccaccaacaagatctattagatatcgtcatcataaatatacaatctgaattgaaaaaattagagatggaagtaagaaaattgaaaatccaacgaatatttattagatctaaagaattacaagtgaatctagccgtgagtttggtgataggaagagcttagtgagcacacaataaaaaatcagaccaagaagagattgaggggaaaaagaagagcttatccctaaaacatttgtggttataggtgtagaaagaagaagagctaacaacaattgatgaagaaaaaagaaaatccgggattaggttggagaagatgaaccttggtttagtttttgaatggaaaa

SEQ ID NO: 270 - DNA, 6922 bp, Arabidopsis thaliana landsberg
ccacctctagtctagattgatccagctgtcattgcattcatcatcatttgtggtcattccgcatctctagtcgagtgtatgactagtcttgcatatattctgcattctggagttgagtaaggcactttggagctattggagcttataaagaggaaaaacagaacagaaagacacatttccaccaacatactcgatcaccagtagcagagggagaagcactcagctcatttttccatgaacacacttctactcgatcgcagaggagactaggcggtccattctgccagatatactcgatcgtagaggagatgaggcagtccattctgcagttctactcaatcacaaagatgaaggagtccatcctgacaattatactcgatcgtagaggcaaccaggcagtccactttggcagtccaccagtatacccgtcgtagaggagaagaaccagtccatcctgacagctgaccaacatactcgatcacagaggccaagaagcagcctagaccattctttcaaccaacctactcgaccaccacctcgaccctttgatcaatccgcactgaaccagataacgtgagcaacggaaagagaagagaagagaacagaaggcccattcgaagcccattcgaaacccatcaggaagcccactttgagccaacactcttgatcacatcgtccatgggccgttaagtgggcttgaagcccgctttcatatcttagtataaataagtctctaagggtttcgccctgagacatgcactttcagagacacgaatttcgcactattattcagcagccgcttttcattcttgcaactttgtatttcgatttttcttctaagttattcagattttgctttcatttgcttattcatctttgtttcattccctttaatatcttaactttgcaatcttcaatcgtttctttgttattgtctttaagcatgttgtgtgactagtgatttgatttctgaggatgggatagagtagttgtggaacccctggtcgaatatgttggttaagtgttgaatcccttctagattagttgtgtgtattgcttattcctttctgatcaactggaatccgattccagacgttccagcgctcagaaggcgtttaatggaacgttggatctactaattccagtgataatcgtctctatcccaaggggttggccgtttagagcggttattggctttaacagtcgtttcttattgcctacttagttagagatcgttaatgggaattaggtcagtgtctagctatgcttgaggatttctatcacgggagtgaattaatctgttgttgaacctgttgtctagggataacttaattgagatttgttaaccaagtgaattgattagggagaccacactattcgattaccccatccttaggagtttctcatccatttgattgcctgttatcagttctgctttgtcattcacttgcctgctattgccattcctgcttttagtttcatttcatttcttttattgcatactaggactgttagaaccaaccaactttctgcttggcttgacttagagctttctgatcatatctcatctgtttgcatcacaccgaattggattgacatcctaaaatactacaacgacaagatagtgttttagggattaattgacaaaaatcctactatcaccccacttgataattcctcctagtctgaacaacatgtttcaagtagttgtagcagtctgctttgtagtgactcatacctccacagtaccagcatcctgttctcttgcttctgaactcaggtttgaagtaagtttgtctcaagttgtaagcttgagatgctcgtttaggcttagagagaaactgattccgaacagtggttgttgatttgacttgagacttatcttctgaagtggatcctttgacaaactgagtctcccttttagtgtttcctccattgtatccaagtccccacgtaacatttgatgttctgcccatggttagaagtttgtccagatccttggtcccgttattcagcatcttgatattcctcatttgttctgccaactgcttttccaatccttcagacttggttctttcctcagaaagttcattttcaagcttcgccacttgcattaccagtgtctctttttcaacaccaagtacttcattgtcctttttcttttaaaccaactctttaatcagaattctgaacttctcgatgatagatctggttcatcagtgtctgactctgattcagattcctggttaacatcctctagtgtaccattctcaactgtttcttcagtgcctgtttcaatcacaccaagctcagctaccagactattgagaatctctccttctcctccttcactgtcatccgtatcactttcgctccaagtgatgtatgacttctgctttgtttcttcatttccaacacattcagccttggtatgaccataacctttgcacccatagcacattatcccttttttcttcagtgtgggacactcagacttgtagtgaccaaatccctcacattcagcacactgttttttctgaactcttcgaatctctactcatatcaggtcgtctgtctgatgaattacccttgcgttgtcctcgttcctttttcctgaataacctcttaacaatcaaaccaacctgatcctcacttacacttagttgagattcagcagccttgagagtcaaactctttcatgatgagcgttccttcttcttcatttgcaattcatacgcttgcatcattcccaccacttgctcaaactttagagtatcagaatcaagtgatacatctatttctgacttgtgagattgaaacttatcaggcagacttttgagaaacttcttgaccagcttcttgtccttatacctttttcccaagacaacagcctcctgagaaattgaacttagccgactgttgaactcctcaatggactcttcattctccatcttcaagttttcaaatttagatgctaggatatccaatctagtccacttcacgttactggttccttcaaaggttgtctcctgaatgtcccaagcttccttcgctgatgtgcacccctacacgcgagtgaattgactcattggcagggatctgaagatgattgacaaggccgtcgaattgttcttagcggttgtcttctcttctgtggtctaatccttcttggactttggtatttctaaccccttagcatccatgaccaccggagctgtccatccttcttccactacgaaccacacatccatttcatcgctttggatagcctgcttgatagacaccttccagtaaccataatgctcagcatccagcttcaatggctgttgtatcgtaacatactgttgtgaattctccatgaccctgtcaccagatctcacctgttgaagagataccactctgactatatttttattgataacaaactgattacaaatgttatcttggagattacttgatctattctacccaaaagatcaaacccgactaagaatacctaagcctaattctcttctctgtttcttatcactcttacgtgaagacaaagagaactacacactcaccttcaagcttttgcaatgctctgaagtttacaatcgtatgacagtattctagagtgctcaaagcgcctcacactaagctctagaatacttatacctactctccagaaccgtaaacctaggatctccgagaatctcgttttaagaaatcttttttgttttctccaagcttattccttcctaattgttcgagacgatatcttccatatcttctcggtgattcttgtctttgacaccacgccaagtcagcttccatccttggctctccacatcatccgccttagcttgccacgtgtgctctcgcatccatgtctgcaactcaagcgtttgataaaactcgatgcagcttcctgaaatccatcaacgctgtgatcgccatcagctgattgattgaactctgcatcttcaatctccccctttttgactgagtttgatactcaagcattccttcattgatataaccttaaactctaatgagagacacaccacacatctaataggcatactgtagaaataccatctagtataaatatcataaagcgattagtctgaaagtgaacaatgtgtggaaaaaatattacagacccatgtttacgatgatacaatcatcggtttaaacataaacaaaagagaagttgttttggtctgaaatacaaccgagctttacaagagaaacgaaacataaacacagctcccccacaacttaatctcccccagcatcatcggagtcccaaggggccttatctccccctgcttgagcacataacttagtcaaaaatcatgtaaacaatcagacatatgtagtataaagcaagaagatcgcacagaacacttacctgtatcgagagcagcctgcaggatttcgatggcaatcctcattgcccttcggttggctgattccttgcgatatgctgctgcactctgcttcaccttcttctgcttggtcgacgctgaggaggcaggaggggtgacgggaatctgaaccgggcattgcgtctggatcaactgatagatcagattggggaacggcaggaagagtttcgtgtccgttttcagagccagctgaagaatgtggtcaaaaaccatccttccaaagtcaaatggcattttttgcataatcatgtacacaagcttggctcggtcaggctgcgcgtatccatcatttgatgcgggagaccaattggagcagcagagtttaaacaactctcgactgggaggtgtgaaggcactcacctgaatcttgctcaaagaactgactttcccaccagttagaaaagcagctacttgatcatcgaacaatccagccatatccatgcagtgctatctcgcattgacagaaggaagcccatacagagcgttgatcttctcaggcgagacctcgtactcccaatttcgcaccaggacactgaccttatacgtgtcaaccttcaccattggcagatttgcccagaactcaaagaccagttcctccgtgaatggttggaacgaatcagtcccgccttctcaataaactccctagccgcctcatctgtcttcctagatagttctacttcctctttgaaattgcggtgagagaagtgggcataccttttttcagcctccgctgaaacgaataggatgccatcgaaggaagatgaagcggcgatccccttgcccttgtcctgcttcatctgcttgccactctgacccgcagtagattgctttcgcttacgcaatcgagatgccacagatggctgagaaggagcagcctctggaccctttggttcagacttctgaactctatcagttgacaatggagtctcgtcctcaatttcgattaccagcggtggtggatctctgacaggtagcatagtccaatttgggttcggcacagtgagctcttcatcgaacatcacctcttggatttttggttcactccgctgtgaaatttctggcatcgagtcaccgggcggtgagactgacagatctgaagatgattcggactctgattgttgttgaacaagatgatgaacagccgagaaaatcgatttcaagctctctttcactcgacttatgaaggatttgccttgagtacagtgggttgccttctcgacttccaaagatagttgatttgactcctcaaaccctaactcctctttttccttccaatacgcgaacaatcgtccttgaattcacatgggcttctgaacctcgaaacgggtttgggcttaaactgttttgttattctcaaaacacttaacaaactcataagtgctttcttgccaagaaattcctcaatcaaacaaatgattttcgttagcatcaaatttcaagcaacattcagataaacatttatatcctgaaccagtttagtgacccaaacagacaattgacacatgccggtagtagctttccaaacattttcaaagcatacctcttccttgtactctgttcagtgctttgtgcctatcggttgttcagaacttagaaagaaactgtcacaaccactcagatcgttgatagatcagctcaatgttcagtggctagtctttcacactgtcatgccttcagttctaaacgatcagggcaatgtgtaacaagcagctggaatttcctttgaagatagctttaccaaacaggagcttgatgatatgtgtttttgaactgctccttatttttgtcatattagcaatatcacttgacttcttaattgctgatattcatacttagtgatcttgatacacttttttttttttttttttttttttttgggtgtgtgtgtgtgtgtgtcaaatccatttagttggttgatcttctcagctctatgacctcctagtagatgataatgttttacgtctgatttgacccgtcatgacaggcagctattttccacatggctttacaaagtgttgatcctttattcatctttggatttccatgacctgttctcgctttgtgtccctgttttagatcagcacaactcacaaatagattacagatcaaacattccaatgaacattcgtaaagtacgaaatttgctctaattcagaggtttgataaacaattcagctagttggtttttagtacccacattttcaatagctatcaatttctcctcaaccagtttgcgaatataactatgttgatgatctatgtgcttagtacgagactttctaacaggttctttgatacaacttataacactatgattattgcaaagtattaacagaacatcagaaatcataccacactcctttgtgagttgtttcacccgtatgagttgagcactcgaacttttttaaagcactgagttctgcttcagcagttgataggaccaagttgttctgcttcttgctcttccaagacaccatgttgtatccaat

SEQ ID NO: 271 - DNA, 582 bp, Arabidopsis thaliana landsberg
ataccctatcttctcgcgacttctcgttctcttcttaaccattttgtggcggagcttactccaaccgttcgatttatccgctgcactgaatcctccttgcttgtatcaaaaagaggattcttctctgtttctccgaatcaccgagtgtggctacgagtatgagcagacttaccccttcttgcctctgcttcctttcttcatctcgcttctctctcgcacaggttttgtaatttagatatctacccatttgattccctactttggttgtatcatttcgttagtaactgattctttttggattcagtttttgcgcctttggttccattgataggtctttgagctgtgatggtgttgtctggttccactgtaggcaacttggggttcatattggctgttttttatctattaaggtccttctttgccatcattccaaaatcgattattgtgtctagaaataagtcaagccaagagtcttttgagctctacaagctaatggtgtttgctattcaccgtgtcttacaccagtcgttgctacagtgtttagttattggcttgaggatactgaagcatcattcaagcttc

SEQ ID NO: 272 - DNA, 1440 bp, Arabidopsis thaliana landsberg
  unsure (1)..(1440): unsure at all n locations
ccatttccgaggatactataactgttgtgtgtgtgtatggaaacattaagctgttgtgttattcgggggagagatgaactcgagcatttgttagatgacaacgaagacatggctgacttatacttaacaaggaaatggatccagaaccagcaaaccgaggcaatactggcgggtacagcatcaaacagcattgccctcccagcacataatacatcaaatcttcaccggctcacatcaaacagaagtgcgagtatggtgacgagcaatacagaggaagatgacgtggaggatttggagatgttgttggaggcatacttcatgcaactggatggaatgcggaacaagattcttacagtgagggagtacattgacgacacagaagactacgtgaacattcaactggataatcaacgaaacgaactgatccagctgcagctgacgctgaccatagcctcgtttgcaatagccgcagagacattgttggccagcttgtttggaatgaacataccatgtccattgtatagcatacatggcgtctttggttactttgtgtggagtgttactgcactttgcattgtgcttttcatggtcactcttggttacgccaggtggaagaagctgctaggctcataatctccctctctcttacaaaccatgtgccacttgtgtaataatttatacatatgttactggacagagttgtttcactcatatcttgtccagtgaagacgttagtgattcatatatgttgttgaggaacacatgtagatggaaatgatataagagtatatatgttgaagagaattatattcagacatcgaagtcattaaaatgtttaaactaattgtgcacataattgaactcttcaactagtttgctctcttctcaaagctctctcttattactcttccaatgatttttctctatattcctcacacaaaacattcatcctctaccttggtatcgagttcatcatcaactgctttccgttgtcgaacttaagtttatgggttgatttgatttggttcggtgtggtttatttttggttattaaaactggtccaaccaaaccaattttaaagttagccaaactcgttttactttccaaaaccctaaatttacgtttcggtttttctgccaannnnnnnnnnnnnnnnnngaacagatttactttccgaaaccctaaaattctcgttgccaaatagaaataggatcggctgcgtttgtagtttgtacgtcgccctctcaaagtcaaagtttgtgacttctcttctgctatctcgcctctcggctctgccgtcgtaaggtattttctgaaaatttctaattatggctttcttatagaactcacgtagttagtaattgtttcttttcctcatatcttctggatatatatccactttcaaagtatttttcgtttccagagagtcgttatatgacg

SEQ ID NO: 273 - DNA, 1907 bp, Arabidopsis thaliana landsberg
  unsure (1)..(1907): unsure at all n locations
taaagctggtctctttttattccctctagtcttttaatgttagattacatacatgatgaagaaagccagatcaaggcgatatcaggtatgtattatgaatggctcggaccatttttgttcgatagatcagagagggattctataagtnnnnnnnnnnnnnnnnnataataaacaagttgcctttgtcaccccttgataacctgcaaaaaataaacattgttttaaggttttaagattcaaacgttttggatgtttgttcgatagaaatgaaaacattcattccctacttaccgtagttcttcgtctacataggtaatctctagttcaccgcgggcgctatcaggtgcttttataggaatctgcacagcgaacaccaatcagtaacagaagcatatggtgtctgaatcagtaaaggttctcttatagtggacacacatatagcagcagtaagagttttagtgtacttacaaagccgagaattttaaacacttggagtttcacagcaaccttcttcgaattgaggggttttatgtctccagttacctatgaaaacattgtagtttgctttaatgtatgagactcattttacaaactctgctaaaggaatcttacttatgtaaagcaaaggctctccaaagagctatattgatgataaaagtttggtcttaatcctttgttaagagccaagtgaagccacaatgaaacattaccgagttatagaaaggccaagtctccatgttttgcaccttcaatgtatccacattgatagattggtagttggttattgatcttaagaaccttggtttctgttgcattgttcaagacattgaagagaatgacacaacaagccaaaagaacacaaacttagacacaacaacaacaacacaagccctaacctttgcctgcaaaatcgaagcagaggttgtataaatgagctcccattttccattgaccaaatcagacttcaaaggctccttggtgggattaactgcttccactttacgcgctaactgtctccatacagacaaaagtcactcagcattagtctctcaatcacattctctagaccctagtgtaccaagactattctcaagaccctaatggttcccaaaagaaagagaaagaacctgatcaattcgaagctggtcatcaggcgaggccgtagcaccacgttgaagaggctcaatggcttcaagaagttcttgtttgagctgtttctgtttctcagctcgaccgtttctggtcagaaacgtaggagggaaactgaaaatagcttggactctcaatctctctcgatgaccttttcgagtactctgtaactttgtcggaacggcgaagccgctgtctgacttcataagactgccggaaaaattaaatccagtggccggagacattaaagctccagtctttaagcacgaaggtatagccatggatatcaaaacaggacaaagctgcttcgtttcaaagagactctatttaaagacagacacagaagaataaaagagagagagatcgttgtagctctgtctttgccatggctgacaacatcacacaccaccaccgatgtcagaaagataagattttttgtttctctcatgaaacgagaggccctcagtgattctgattccgacttattacgacgtcgtttaatacaaatgtgtagaaaaagctttgccatattctttgtacagtccaaaggctctacctttattcctgtctatactcaaatcaagaaagaaacacaatgagaaaataaccgttttaaatttcaaatattagattgagaccacaacactattgagtacttgagttcacatactaaaactattgtgtgaagacttgaattctatgtattctacagaattccttaaagctttgtgtttacaatttaatcagggcttgctaga

SEQ ID NO: 274 - DNA, 3705 bp, Arabidopsis thaliana landsberg
cgtactcgttatgtaacctattgctctaaacggttcgaaaattcccatctttcgagttcgaacaagaaattagggtttcctcggaaaaacgattttaggattatcaaatcaaagaaaggttttttaagagcttgagagagaaaacgcggcgcaggagcgatggaggagatacagcaaacaagacctttggggtttagggtttaacgaaatttctttgtccgaattttaattttattttccggtttaagtgtccgctcggtttatacaggttctttatttggtttggagaatgttaaatttggtttggtaaaattatggttcggttttggctaaaagtcattgaaatgtaaaaccaaaaccattttagtttaatatttaactaattgtcaatatcaatatcaattttaaaattatgatgacttttggtttaaatcttgtttaaatgtacaaagtctcggttaatgctcgattgcagtttggtctaaactctaaacaaatgatttccattcggtttgattctaagaaatttgagtttgatcacacaaaatcccagccgtcggatcttaagaaactctgtaacatagaaagattggtgttgatcctagccgtcggatcaaagctttctttgtttaaaccactctttgttttgttactcagtctaaaagcaaaagtggtcaagataaccataaataaagattatgttgatacaaagagagaaaaatagttatgaatctaatagactcagcaatagaaataacaagacaaagcttgagaagcaacaatatcaatgtttgtaacacctaaaacatattattaccataactgaaatgttctctctcaccaaggcaaagccgcagacagagacttgtatatattacttactcggatagagttgctttgagatcaccactctcacttagctccataatgatatcacatcctccaattaactcacctttgtagtatagctgaggaaaagttggccagtttgagaaattcttaatcccttgccttacttcttcatcagtcaagatatcaaacgatccgaaactcacgttttctcctctcaatgctttcacaactttggagctaaatccgcatttcggttcatctggtgaacctttcatgaatagcattacttccgaggaattgatcagtgccttcaatctatcttcaagactctgttctccagtaatccctttctcggtcaagacctttttcagctcaccgctcttttgcatctccaagacaatgtctgatccacccataagctcgcctttcacgtaaagctgaggatagcttgaccagtttgaatacactttaaggccttggcgaacttcgtcatctaagaggatatcgaaactcccaaactcgattttttcttggttgaggatttcaaccactttcccactgaacccacactttggttcttctggtcttcctttcatgaacagcataactggtttggaattgaccagaccttcgagccgagctcggagggtctcacttaagcctgtgtttcctgaactaacccctcctccttttccagcttcatcctgactttcttttgaaccaactgtcgtgatcccaagatctttgaaagcatcttttagttcaccgctctcgtgcatcgctattgcgatatcagctccaccaagaagctctccgttgcagtacagctgaggaaacgttggccagttagagaatttcttcaaaccctctcgcacttcgttatccgatagtatgtcaaaacttccaaaatcaacgttctcctctttcaaaatgtcaactactttcctgctaaacccacacctaggctcttcaggaatacctttcatgaataacatgacagggtgagaattagtgagcttttccaaacggctcttgagagcatcggcggtagatacaggctgagctcggtcttgtacagaagctttcgcattctccttcacagtttcaagaatcgttggcccagcagccaaccctaagcttgcaggagcagcaggctccgcagaagtactagaaccagcaactttgccaaccttattagcttaacttgatggatctgcaccctcaagtgtatccacaggtttaccatccttcaataagaaaacgaattcacagtcagaagaaagtaacaactttcagaacaatcattacagtgcagtgacaaagattcaagctttgaacacactctcaatcctataaagacagaaaattgcaaccaaccaattaaaacaaagaatcaataagtctggagctaaatggataggcgaaccatcttcttctactacctgattagataaacagctttcagtaatctaacagagacgcaaactaatcaaaacaaaaaccctaaatcctaaactttcgatcaaaacatagggacaaagattcaaacttttgaacacactctcaatgctataaagacagaaaattgcaaccaaacaaagcaacataaagaatcaataagtatgacttcatcaatgtcttcttcttctaccaaattagacaaacaactttaagcaaaaacaaaaaccctaaatcctaagttttgatcaaatcatagggaacaaaaaaaaccgtaactttaccttgaagaagacgaaataaggcacagcagcaacagagtaagcctcagatatctcaggatgttcctcagcttcaacctaagaagataaaaccaataacagtcaaaaacctcattgaaagtgataaaattttgaattggtcaagagaacagagacgaaccctaaagaagtgagcacgagggaaatcagtagcgagatgagagaaaacttgatccatctgcttcgaagcatcacaccaagaagcccagaagtgaagcacgactggtgcgccgctctggcgcaagttatcaagctccgcctttgaaacgatatccttcaccgtaccgctcatcttcgaagagggagaaggatctcttaacactttttttttgtgttgtgatttaccaatttattatcgagcagaatacactctgttgctggagaaagaaaggagatttatgtaaatataacaaaataaaaggacctaaagatacaattagggtttttgtgtgcccaatgtgatgctaaaattgctcacttatgtaatttctttttataaaaatagtaaaattatatatgtcagcggaaggaaaaaaaaattggaaattaagtgaggtaaaaatgttaaaattctaggtgataacaatctttaaaaataaaataattttgaaaaatagtagatacatttaaattaaaactactaaaagtaagtttgactaataaaatcttaatcctatttttttctttctaaaattaatactaactacattttaattcgcggtacaccgcggagacaatttattttttaaagttagtatatataaaaatttgtaaattatatctatctatcaaatatttttattttatagtttacaactttattaagcaacgtcctgccaaacccgtcccgcaaaacccatcctgcaaaaaaaaaccatttattttattaatgttgatcttatttatgaatcattgtctaaatattttagtcgatgcgggatgttgaacccacacatttttcgctaattggttaatatattttcatttttaaaattttgaatcacaaaatatgacggaactttttttgagtttttttaaactatatattatataatgatgttaaattttttgatat

SEQ ID NO: 275 - DNA, 997 bp, Arabidopsis thaliana landsberg
atcacattaatatctaaagcgtacaacaatcactaatttactatgtacacacgcttctgtcataagagtttggaatgtgacagatacataaccacaaaccaaatgaataaggaaagagtctttacagatccgagtcttgccagctagccaagcagagttcatgtaattcattgagtatccattcctcaccattgtgaccaccaaggaccaatactctagttcctccaacaacgcatgtgctatgtccccaagctaacttgggtggtttccctgggacattcaggatcctccatgacggtttctcttttgaaggatctattaggaacagttgcgaaggagagtgaagccctgcaatagaccctctaagatgatgaccctaccacacggcattctcacaaccacattaaagacttgcacaaacctgaatgttgaaaagatgagaaaggtaacatcttgagataccaaaggcctaagaaaaagaagcacttgcctcaacaagtctcaccttcaacagattccatctcgtgtttggtttcccaatcacctagaagaccaagtaacaccattttccattagttgatacatcttttcagaggaatttcatcgaacacattcaagtcacaaaccacagcagatctcaaaaataagaaatttttgaaaaccacacaaagtgtaatgatgagatggaattgttacctcctcagacaatgttgaggccgaagaagaggaggatacgaaaaagatcacaacctaaacccgttttgtcaggacaattgatggttataacactcgggtcaccttctttctccgattgactgattatcactacgttgtccgaaaaattcccatcttgtgattgtgatttattcttgctttaagctctaattgtgatttcttcctcaaaactatcttattaatcttctctcttcgatttggttcatcaaaatcgccgattatgttcgaagtcacagatgttgagaccgtcggttgagatgat

SEQ ID NO: 276 - DNA, 436 bp, Arabidopsis thaliana landsberg
ctaagaccaattaccctattcgtaagagctgcgtttactttattaatgcaaaactcggcgtggtaggaacctggggctgaggggtattagaaacacaccaaacctattcacacttggctggacttaatattctgatgatcatatacagatcgagagcatttacacccattaggattgacaccttaaatgctgtaatgacatcagatgcatttaggggattgacacaccgaacaacccttgcatcaatttggcgccgacgctatgtgagtgcttttgttgatacatctatgatttctaagtgattgagaccaggtggtaacactttattgctggttactgactcgtttgtacatacgcttgagattgtcttgcaggttctcttactcgactagcacagcgagtacgtcaatcgagttagagcaaaacgtatgtaact

SEQ ID NO: 277 - DNA, 1398 bp, Arabidopsis thaliana landsberg
ctgcgtttttgcttgccgtcttgagcgggaaagcttccccaaccactggcgatatcaaggatattcttggatcaggttcgtgactttgatttgagcattggaatgtatacatgattattctagtagtgagaatttgtttaacttgaaatgttattggaactaggaattgtatatgtatgctggaaatgaacagtgtgatgcaataagaggcattatggtgttggtattggactgtgttgtgattttagtgagttcatgtatatgtaaggaaaaacaaagcatttagttataggtgattgctgtaattgtggtggaggaagaattgatggagtgtggcaattgttatgtttgattttgcagttggtgctgagacagaggattctcagattgagcttttgttgaaggaagtgaaagggaaagacttggctgagctaattgctgctggaagggagaagttagcttcagtaccatcaggaggtggtggtggtgttgcggttgcttctgctacatctggaggtggaggaggtggtggtgctcctgctgctgagtccaagaaagaagagaagaaagaagagaaagaagaatccgatgatgtaagttttactttctttctgacaacagttttttatctcttcgaatgaaatgatggctcacatgttgtgtgttttgtgtgaatttgcaggacatgggtttcagtttgttcgagtaatgcggtatacttggcatttggttttgctgtaccctttcgaaatctttatgtcgttgtttagtttgttgtattcgactatcttcttagactttgctgaaattctcaagagatttttttactcaaacatcagtccacttgtgattggcatttatatttcaaactattgccttagttacatcttcaatagtccacttatgaacgatctttagtaaattctcttattcactcgcttactaagaactaaacctaaagagaatacagaagaattccctagagtaaggatttggtttagtgtaaaacagactcttccctctttgtattgttcagattctggaaacataagatatgtgaatccaatcaacacagtactcgagatatgttctgataaaaaaaatgttggtactaacaatttcagattggatgggaaggataatccgaataaagatatacctaattctgatcaaaagagagcgaaaataagtctctggagtttagattgagaaactaaatgtcaacaaaccggaaaccaaaaaaaactgtgtcaagtaacaaaaaccaaaagaaaagactcaaagagagtagcagcaacgtaagatttgattccaaagtgtctcacaagggaggaatgagtaatgctactccctgttttattcactcatcacaagtccatcaatcaatctatctcttta

SEQ ID NO: 278 - DNA, 1018 bp, Arabidopsis thaliana landsberg
ttcaatttcattaagtctaacgacattgcttgaaataacatttattattctcagcatagttctgaagcaagtcctcctgacggtgtcttggcagtgtcgcttcttagacatcaggtttgtattttattagaaaagtgataacatccctgtagatgtttaaagggacgggctgtagaactttagattttgcgtgtctatttttaaagtgtccttctgtttgcttaactaagatgatttaggccttaatattattcaattgatatggttttccaaatagatggtgggtttttgttagaatatttagtgttaatcgacactgaccatacattacacatgaacagcgtattgcattgtcgtggatgtcccaaaaggagacaagcgggaacccctgttttgggggcattcttgctgatgatcaggttaatttctactgttgtaatctatataatattaccatttactatacgttcagcacaacaaatatatatgttataaaatttccttgtgtaattatctttttctgcagggacttggaaaaacagtttccacaatagcgcttatactgacagaacggtctacaccttatctaccatgtgaagaagattcaaagaatggaggatgcaatcaatctgatcactctcaagtggttttcaatgaaaacaaagttgtcgaagatagtttatgcaagatgaggggaaggccagctgccggaactcttattgtctgtcccactagtttgatgagacaatgggctgatgaattacgcaagaaggttactcttgaagcacatctctctgtgctggtataccacggttgcagcagaacaaaggatcctcacgagctagctaaatatgatgtcgtcattaccacatattcccttgtgagcgtggaagttccaaaacagcctcgtgatagagctgatgaggagaagggtggcatacatgatggtggagttgaatctgttggttttggctcaaacaaaaaagatctcccaaattctcaaaagaagggcacaacg

SEQ ID NO: 279 - DNA, 799 bp, Arabidopsis thaliana landsberg
acaataatcgaaagagaaatgtagatgaatttttcggcaaggagccttttctttttagcggaagaggatggaagaacaaagatgtgatgagatctttgagcttgccattgggattggtgaaattatcaccctcctcgtaatacagattgaccaatcgtacaatgttgaagcaccggaccagaatcggacgtggcacactttttatcgtcaagaactcttccatcattatcttgtaattatctctaatcatcttcttaatttctcgaaccgccaattccttggtaacattatgttgcttaacgtaacagttcaccccattaaccacttctcctctcctcatctcctcctcgaagccggctatgtcgtttgtaagacgaaatataacacttaaagctcgtaacattttgggtttggatttgaaccacgcgttcgtttgattctcctcacaatcttccatcgatatgaagctgtacattgcaaagcatctaatccctgacgagtcaagcccaagctcaatatagtcatcaaaggttggaacgtgacctgctcgtgcccattttgatatttcagcgtacgctctccccatgatcttaatctgcaaaattctcaatattaaacacaaacattaatttatatggacattgattaaaactaaaccctaaaattgttggtgtacctcttttacggtgtcttgcacactcgaggatcttcctcgcggcttcatttctctttcaatatcttccattgtttcaactatactttggatgacgattcttaaacagctcggtagtttgtcaat

SEQ ID NO: 280 - DNA, 4181 bp, Arabidopsis thaliana landsberg
  unsure (1)..(4181): unsure at all n locations
aagaaatttgctaaatttttataaccgcttatgtgagtgaatatgttaataaatgattattttgatgagtacttaaagctatcatcattttatagtttttggaggttttgccaaaaactaaaggattctgaaaatatatcaaaagtggcccaatagaagcccattaagaccagttaaaacagagaaacgactctatatcgaacgtcacgcgcattactcgcgcgtgtgaccaagtccctttctcttgcttcagcttctttctttccttcctcgttgactgcttcttctgcatttcccagtgagaaatggcgacgaaggaaccagaatctgtttacgagttaagcatcgaggtgaatacatttctctaacttgagtcatcgattcaataactctctctgtctctgataacttgaatgtgagatcttttgttaaaaggaagcacctttgatataagggttctaagaatgtgaagagtttttactttaaggtgtcttgtaggctattccggatgaaaaggaatgtcaaatttttatattgtctgaaggaacgatttgtcttctgttgtatcccgatgtttagtttaggattgcttttctcagtagaatcaatcagatcatgatggatcatgtttctttcttctgttgattggtctctcacagattgttttctatgatctttgattgatttcttgtgttggcctctgagtctttatcttgttcttcctgtaacaggatgcaaaagggaacaacttagcactcagtcaatacaaagacaaagttcttttaattgtcaatgttgcttccaaatggttagtttattagacattctattaagcttctttcgtttgtaactttctcgtcttgtcttgtttattatatactctatgatggtctcagtgggatgacaaactcaaactacactgaattgaatgagctttacaacaggtataaagataaaggtaaagtagtgatttcaacaaatttctaagtccacgttattagcttcctcattgatgttgttctgttgcaggtctggagattctagcatttccttgtaaccagtttggtgacgaggaaccgggaactaatgaccaaattactgactttgtttgtactcgcttcaaatctgaattccccattttcaacaaggtactatagttcactcgatgagttcactacaattctctatgattgtcctgaagttcttaaaacattcgtatatgtccaattttgtattagattgaagtaaacggagagaatgcttctcctctgtataagttcctgaagaaaggcaaatggggaatcttcggcgatgacattcaatggaactttgctaagtttcttgttgacaaaaacggtcaagctgtacaacgttattatccaactacttcccctcttacacttgaggtaaagcaactatctctcattcactctctctcagacactatctctgctaactttcttgtctcaatttttctgcagcatgacataaagaatcttctgaatatctcctgaatgatgaagctttgttgctgaatcgtattgtatttgattatgaacctctctcattcaataaagagccatgacattgacttggattgattagttctgtttgagagccaaatcggttatttagataaaccagcattattatctcaggctgatcaacttggatagattacttcatttctaaaaccaaacacttaaaaccaaaaccgaattgaacacagatattgaagaaaccaaaggaagctttaatgagtgatataaaagagttaaaatctcgttgagtagcctgaaagtggggtggttctgtttcattgagaatgttacaataaggaactgagagttctggtctcaatcctgaaatgtctggtttaaacattcccagagagaaatctacaacaacaaagatatgtacagcactcacataatgtatgctgctgctgcttccaagactaaagggtagtagtcggagtaaataggaagaaagactaataatgtttttgttttcaatcacccgcgannnnnnnnnnnnnnnnnnngtgggtttctgctagagtcaagtgatctgcctgagcctgagcctgagcctgaaccgggccatccgctcattccctgagctgggaagttctgtggcgtatgctgacccgtcgatgctgcagcttctggtgcactaccaggtgtggtctccatttcgctattggtcggctcttccttaggttttatttcttgtttgatggtcttgttattgttattattagactttgcacttgctccgtacacgaaactacaagccaccaccttcaaaataacaaccaacaaaaaaattagtttaagagtcatattacatataaacaaatccaaacaaaatttctcaaaccgtaccggaaccgtattttgaacttttgtattccaggtagcacaaatgttataccaaacaattacaaccaaaacaaaacttaatggagccaaaccaattttgaaatacctgaacgaggctggctgcaataagcattccaattccaccgccgataacatgaccttcaggaccagaaagagagacactcaaaccgcctgttcgacttttggatccaccttcttcattcaccagataagatccacctaaacttagaatctcaaaacgtccctatagaacacaaagaagggataaagaatctttagttctccacggtttggttcttttttggattaactgaatgaacgattttgaaacctcgaatgttaaggaaggcgttgttgaagcgggttcacgcagagtgactgaagaaaccgttccagtgcctgacattatacaaagagcccgaggtcttttttgtgaaaaagacaaaactttcgaaacaatgtcctgcaagaaaaataaaaggaaattgaaacaatgaaaagctgcataactcattaagattgaaaggagttttgagagattacttctcctgatccaacactgatcacatgaggtgcaaaagcaagtccagctgatgtattcatccactcacctaaagtaattaacagagttaaatgaccatttacttatctcaacacaaatggatcagtcaaattactctcatacttaatacctaacaatcgatgttgagtagcagtaacaacagagccaaatcaatactaatttgaccataaaatcattaagcttctagcaaccaaaatctacctaatcataagaccccagctcgtgttcttcacaatgtacatagaagaaagttgtgccaaagcttacaaattgtgtccataaatcaagaagtcaaatatcgagttgactaccacattctaatgaccaattactcatctcaactggcattgtacccacacatggatcagtcaatttaacacctaccaatcaatgtttagtaacagtaacagtaaggctaaagcaacaaaacctaaaaaacgcatagaatcatacatagcttctaccattcaaactttcatctaatcataagatccttcaagattagccaacagagctaaaacaacaacttaacttaaccaagtacacagaaaaaactcgagatctcaccaagattagccaagcgttgcttccttccagttccaggaggtcgacctctggctcgtttaggtgcattaggatcagacattgaagaagagtccttagacttcttactaacacaaggcattggagaaagccccaaagaaacttgtccatcaggaacatactttcttggccttccacgtttcttcttaatcatcggttgctccgacggtggaggcggcagctgcagagtaggctgcaccgcagcaggagaagccatccccatgtgaatgctgtgtccgaaatcagaatgcctgtgctcagccatggagaaaggaggtcctggattgctagcctgagggtggtgaatgttagggtttgacattggcctcatacccggaggtggcggcggcgcgtggagccactcgcgacttgggaaggtgtaagattggtaaaaactcctctctgaagatagaactgagaatgcgagcctggaaatgccatagcttctctcccatccatgcatttaaaacctaaattacaattctttaagaatctaagagattttttaaaaaaggaaacttttttgaagaacaaatttatctccacccagaaatcgtaaccgtaattacctaagagtgagagacaccaat

SEQ ID NO: 281 - DNA, 1029 bp, Arabidopsis thaliana landsberg
aactatgggagggttaaggaacaagcagctgttgattatctagatctaaggtttttctccttaggggttaatcggttaaaagagtttcctttatgtggtaaagaaagagacaattatgttccttgttataacgtaacagagagtgatcggaattgtgagtttgcaagagaagaggaaagatgtctagttcgtcctccaagggattataagataccacttagatggcctgttggtagagatatcatatggactgggaatgtgaagattactaaagatcagtttctttcatcaggaactatgactaaaaggtaactgagatcaccttttgttatgcagtttcagcagctagtgttgtgccatcttaatctattgttaatatttatcatcaggctaatgttgcttgaagagaatcaaattacgtttcactcggatgatggcttgatctttgatggggttaaagattacgcttttcaaattgctgagatgattggattaggaagcgatactgagtttcctcaagctggtgtaagtcgtttttccttcttttgctaattcctcttatcatttgattgttagttctgttttcactgaaacctccttaagttgtctaccgtttcttgcagatacggactgtgttggacatcggttgcggatttggtagctttggtgcacatctagtgtctttgaacgtgatgcctatatgtatagcagagtatgagacaagtggaagccaagtccaattagctctagagagaggccttccggcaatgattggaaatttcttttcgaaacagcttccatatccagctttatcatttgacatggtccactgtgctcaatgtgggataacttgggatataaaaggtatttatatggtatgattcatagtctttcacttattttggttaagatctttttgaaatgatcttcttaagactgacagtgttatgctctcaattttaagacgttgagcagatgcaatgctactattaaaagtggatcgtgttatcaaacccaggcgttattttc

SEQ ID NO: 282 - DNA, 3224 bp, Arabidopsis thaliana landsberg
  unsure (1)..(3224): unsure at all n locations
aaaacatttgcttatatcctcaatgcctgtagtgttgttctcttatgttccattcttaggaagaggatctactaaatccgatccagccttagcagcagcagctgctttatcctcttcataagctgcaacatgaactccaagagccgcacggcctgacggatcaagattctttgaccaagttgcatcccattctacagctttcgcggtactgcaagctatacttggacctcctggtacagtcgctctagcagcactctgctcaggaaatacaacaaaacaaatcagcaaagcagagacgtttatgtgagattttgaaaatttatggcattttattaccttcgggaagaacttctcgaagatggttctgtagtagtacgcttcttttgtcagaggtgtgttatccgggaagacaaagcttgcgtttgacagcatagtatcagagacctttaccaagaaaaatggaagtttatgtcaaaaaacttccaacatttatcgggaaattgccttaataaaagacatttcttacatgtttatttgcatgatctttcagaccatctatccagctatacccaactccatcactaaactgttctttctgtctatatagaatgtgctgaattcaccagaagatgagaaattttgttagaacattattagtgaaattacagagtttatcgaaaaaaactgcagagaggcacaaaaacagctttagttatttgtaaacaaacctttggtagataaggtcgttcttcatcatcaaaggcattgcgtagcacccacttctcgatccttccgagatcaggcttgatcaacttccactctggatcgatgctcattgcaacatttaaaaattctttatctaggaaaggcacacgagcttcgacaccccacgcagaagttgatttgttagctctcaaacaatcaaattggtggagagctttgatctgtatgtaaagaaaagcataaacaagattcagtgaggggacaaaagcagatcagcaaagtaagttgacaaggaaatacctttcggcatgtttcttcatgaaattctttcttgttgggagccttatggaagtacaagtatccccccagtatttcatcagaaccttccccagaaagaaccatctttacacctaaagatttaatttttctggacataagaaacattggggtgctagctcttattgtagtaacgtcataagtctcaatatggtaaatgacttcctctatcgcgtctatcccgtcctggaattatcattagaggaagatgttaagtcgtctattttgaaaaccatgaatgataatggatctgtatgactatatcaaggaaattttatacctgaactgtaaactgaaactcgtggtggcgtgttccaagatagtcagcaacttctctgccagctttaagatctggcgatccctgaaaacaaaaaatagaatacatagttagaatcttgaaggcgccttttaagaaacctgatattgagcttgaagttttaagacctgcaaaccgatgcaaaacgtgtgcaattgtgaaccccattgacgagcagcttctgatttttccaaatggcgtaatgctactgcagcaacaagagacgagtccaatcctccagataggagaactccaaaaggcacatcagtcataagtctctttattacagcctgaaaaaatgtcaaattaaagaaacacattcgtagttcctaaaactgttcagcaactgcaataaccgttgcaacaagactgaacattttgaagagaatatatctccaaacataccttctcgaaagcattgcgcagaactaaaggatcatatggggttgaaggaacctgctcattgtaccacggaggattgtaccacctcctaagccctcctacaagaaagcagtaaagacatttcatgaaacttctacatcataaaaatgcctaaagtttattacaaaaaacccaccagaatagactaaatgtgtatttgtttaaacggtacacaaaccttgtttacttgagtagatgtggccaggaggaaaagacataaactgttcacaatcatcactaagcgctttcatctccgaagcaaaccagacagaacctataagggatttaattaaacattagaaaagtaattgattacaaaagatagcataagcttagccttattgcagtgaattgcttaggaaaacgttagatcacataccatcaagaccccatccaatgtaaagtggagtgataccaatagcgtcccttgcagcaataaaacttttgtcgcgagtatcaagaaggacaaacgcgaacattccatccaacatgtcgataaattcctctccatgttcttcgtactgcaagacataagattcaacaacagagatatgctcagttacttcttcactaattggccaaattcagatctatgcaaaaaaaaaaagtccaaaagatggaaatccagaaacaaaaaatcagtcttttctcaataacggatacttacaagatgtgcaatcacttcacagtcactaccagtacggaactgatgagacttaagcttttcacgcaaaatcttgtggttgtatatctctccatttacctgacatcataagcaaatttaatttacccttcagatgaccagcaaggaacaaaggccaacactttgacacatttatttacacatgatactaattgacattgtttgaaagacaagagaaagtacagtgacagcgacggtcttgtcttcgttatagagaggttggtctcctgaagtagggtcaatgatggctaaacgctcatgggcaagataacaatcttcataacaatggagtccactccaatcaggacctctgtgcctcaatctacacaaaaaaagtaaccaatctaaacatcaattcgggtctatctatgattcatcaattgagtaaacgcacacatttcctctaaaaaagttgaaacctttattccaaattataaacgattcttcagtaacattgggcaggcttcatgattgattcaatggaaacagaagagtacctgcgagtgagttcgatgatacgagaacgtttagcttgagagtagtcgatgcaaccaagaacagcgagaatcccacacattgagttagagtggcaacgaaaacaaataacaatggcttcactcagaaactgattattagaatttatagggaggctttcaatcacggccgntgattttgactatttatgatttttaaccctaatctttt

SEQ ID NO: 283 - DNA, 2823 bp, Arabidopsis thaliana landsberg
acctaagatgaggaggaaaccatgaggctgcacagagtaaaagttgcaaggggaaaaactgttaagcttgccccaaatgggagtttattgattcaactcgatgaaatgaccactaagacttttccagtaattggagacaacaggctgagctgcatgatgaagggttctctgccttcacgaggaatctatgatcctatgacaccggttgatctagccaaattgcataaacttaaggattatttgtcaagtcccgacaggtatggccttttataccttaataagttgttaagtacgacatgcttacactatttgtgtatattaactttttattatttgttagcaaaaaatcgttggacactggaatagacgaggttgatttctacggagttatcatgaccaaaagaaagttctggctagattcaaattatggatggttgggtgataaagtaagttattgttatattctgtctgagtttgtctactttatggctgagttatcgtgttgttcaggctgagttaaataaattatagctggtctattctggtgttcagactgagttgtagttgattatgtctaagttatggtattgttctgcctgagttaaactagataatggctgatttatttaggtgttgcggctgagttttacttggttacgcctgaattaatgttgtgttgtgtctgggttggttttatttttgtacagcaaattggtgcgtatatgaaagtcctcgccctgaggctccagcgagatccatgcccataccacaacgaacacgtcatgattcagacctgtggatcacgacctattgggttacagattacaataagttcaagatcaaactgaagaggttttctttcaaagacaccgcgtatcaacagtggattaacggtatgggaggagaagtcccgacacggaagaagtggataacagatatagatcacttgtatattatccaccaaaccggaggtaatcattgggtgacccttcaggacgtgaacttccttaggtctcacattgattgctatgattgcatagttaaagagcatatagacgagagcgatggaaaaatactggaagcttgtaggccgttcacgaggatgatcccacagatgatgaacgaactgattccttctgaagtccgtatcccgcattacgaccaattttcattccggcagagggacaagaaaaaggtcctgcaaaatactcagaggggactgtggcgtttacgcgttaaagattctcgaatgtttattgcttggtgtttcttttgatggcattactgatgcaaatatccaggctctacgggtgaagattgcagcagagatcttcgatgaagcaccggaaaggatccctgcacggtttctagagacgtgattagcttttttgaacatatgtctgtgtcttttgggatttttagcatgtgattatagtaaatattgacactttaggattgataaccagaattatgtctgtatgaatctattattatgttaattataccaaaaaccaatgtaatggctgacttatcatcgctcgattcgttttacggctgatatatgctaacgtgaaggctgacttatcatcgctcaactcgtgctacgcgccctgagtcattcgatgtttaattcgatgtttagctgagttattataacccggtggctgacttgtcatcagacaaatcgtttgatggctgagtttgtataacgtggtggttgactagtcaaacccaaacttccttcccatcaaataaaaaaaacgtgactttaggactatacatacaccggtttacgacacccgaatagtcaagaacccaaacgtcgttagaggaccaacgttgtttatgttagaggaccaaacgtcgttacgttagaggaccaaacgtcattagaggactatatttacactggtttcctcttgtcttttcacttgtcgattcttagcaactacaactcttcattcttctcttgtcctttctctgagaaacaaaaccattccgagatcatggatgcatcaggttcaggttcaggttcaaacaagcggcggtgtgtggatgacggtcccaacaagtggccgtctgtggatgacagccccaccctaaagctgtatgaataggagaagcgtttcaaatccgtcatctcttacatcaggagcaacataagggagacggcggaagcacacttgctcgatatcaaactgcatgagaaggaagtgctggcgcaggttggcaaggcctacagagcgcagcgtgaacgcccggtgagtagtattgattgggagaaactggggtatggatcgaccgggcgtccaatttcggagtccgacaaagaatgaagatggcgattgatgtaattgtatcttcattttttattttcaattatattatatgtatgttgttggattccagtactccttatcctatgttatcataaactctgtcttttcaattttcaaacttcactttttattttatactcgcgtgtgtgattcaaaaactttgtctttcagatttatcgtagattaacttgatgtttggctgagttaaacatgtgactcaatcattgttattctaacgttaaggcggacttatcgtagattaacttgatgtatggttgagtgaatctaacgttacggctgagttattatattttaattcaacgttggttgagatagtattgagttgtggatgagttagtctaacgtaacggccgagttattataaatttaatccgattgtacgttttggctgagttataatcgcacaattcgctgacttaatgataatagacagtacaaagaagttcacagtgagaaaaacaga

SEQ ID NO: 284 - DNA, 5688 bp, Arabidopsis thaliana landsberg
agacattccacaaatctacatctaagacactgtttcagcaatctacaagctttatttcaacttatgcttcttcaaccctagcccaccctccacacgagaccactaagacgactgaattgatgctcaaacagattctcaaaggtcaagagaagcaaactacagattttgatcacaaaatggttgcattatcggaagatttgaatgggaagattcaaatattgaacaattaaatagagtgattgagtacatatatagaagatgttagtgctattaagttacaaagtggaaaacagctaaatccagtgcttcaaagcaagctttctgtagccaaaatcgtcagtttggaagagaatgataatgcagtttttgtagaccagatacgagtgtcgatcgacaacaaccaacgcagacactataaaagtcgacagcgtcgaccgaccgataccaacagtgtgtccatcgacaccaacccaatccagacctgcgaattctccaaaacccgatttcagttgcaaaaaaaggcaaccaaacccaaggtttcttttccaagagtcttaggaagtccaaaaaagagccagatgatgctagatgcaaagctatgatggataagctgattgtagagatgccacttatagatgttttgaagtcttctcctatggtcagacagtatgtgaagatgatggttactaaggatttgaatactgagcaaggtgtgatgacgatttctacgcagattagcgacattattcagaataagattccacacaaacttcctgatccaggtagctttgttctcaattgtagtatccttaacgagtgttttgcgcaatgcttctgtgatcttggttctagtgtccatttgatgccgcgatccgttgcgttatcccttggtttgacagattgtgagccaacgcaaatcactattgttcttgctgatcgatctgtccatatacctgatggtatcctatgcaatgtccctgtacaagtcggtaatagcatgattcctatagactttgtagtcttgccttatgagaaagaacctaaggatccattaatccttgggagatccttcttgcacacagctggagtaattatagatgttcgacaaggaaggatatggttgaatgttggcgatcttactatgcagttcgatatgaacactttggtcaagaaaccgatcatagaagggaaaactttcttgatagtggaattagaagacccactagagcgagttttggtatcttccatagaagatagtgcagatttggacagtgaatcttctacatataccgaacatatgatgcaacttacagttaaagaagctcttccatctttgactccaacgccgactactaatcgagattgggatccagcaaaggctcctaaaatcgatttgaaaccacttccagcagagctaaggtacgcttttcttggtgaaaattctacttatcctgttatactgaatgcttcccttaatcccgcagagctcaccttattgctaagcaagctgcgcattcatcgtaaagctcttagctattctcttgatgacattaaaggtatatcttgggatgtatgcatgcataggatccaccttgaggatgagtctaagtcttcagttgaacatcagaggagactgaatcagaatctgaaagaagtggttaagaaagagattatgaagctgttggaagctgggattatctatccgatttcagatagcagttgggttagtccagttcatgtagttcctaagaaaggaggagttacaatcgtcaagaacgaggaagacgagatgattcatactcggacaatcacatgccatcggatgtgcatcgattactgaaagttgaatgctgccaccaggaaagaccatttctccgtaccatttatcgatcagatgttggaaaggttagcaaatcataagtactatttctttcttgatggatactcaggattctttcagatcccgattcatccagacgactaggagaaaatgactttcacctgcccctatggtacatttgcttatcggagaatgccctttggtctttgtaatgctccaacaacataaaagataggtatgatgtctatcttcacaaacatgattgaggatatcatggaggttttcatggatgatttttcagtttgtggatcatcgtttgaggattgtagagaatctctgcaaagtgttagcgagatgtgaggagaaacatctagttttggattgggagaaatgtcactttatggttcaggatagaatagttctcggacacaggatttctgagcatggtatagaagttgatagagctaagattgagatatgaaaagtcttcaagcgcttgataatgttaaagcagtgaggagtttccgtggacatgctggtttctataggagattcatcaaagactttagcaaaatcgcaagaccactgactgctttactctgtaaagaagtcaaattcgagtttacacaagagtgtcatgatgcctttcagcagataaaacaagccttgatcagcgcactaattgttcagccaccagattgggatttaccttttgaggtaatgtgtgatgcgagtgattttgcagttggagctgttctaggacagaggaaggataataagcttcatgccatctactatgcaagtagaactcttgatgatgtccaaaggaattatgcaactatagaggacttgttagctgtggtgtttgctttcgagaaattcagatcttatatcgttggatccaaggtcattgttcacacagatcatgctgccttgaagtatttgatgcaaaagaaggatgctaagccaagacttttgagatggattttgcttcttcaagaatttgacatagaggttagagataagaaaggagttaagaatggtgtagctgatcatttgtcacgcattaggattgacgatgacgtccctataaacgatttcttgcctgaaaagaacatatacatgattgatacatctgaagaagatgactgcaaacatgataggttgcagaatcgagcttcactatcgatcgacactcccattatgttgatcgacactcacatttcagaggaagtagacagtcaaagttgtgcgatggtgtcgatcgataccattgcacttgtcgatcgacacccttctaaatagacaagaaattggtcaccaactgagaattgcgccgtcacagcggtcgagaaggattacctgtggtatgctaatattgttaattacgtagctgcaaatgtggaacctgataatttcacagattacaacaagaagtgattcctaagagagattagacgatattattgggatgaaccttatctctataaggattgttgtgatggagtttacaagagatgcattgctgcaacagagcttcttgatatactatcgcattgtcacaactctagctatagtggtcattttgcaaccttcaagacagtatccaaagttcttcaagcaggcttttggaggcctacaatgtttcgggatgctcagaagttcatatcgcaatgtgacccttgttagagaaagggactgatcagcaagcgtaatgagatgcctcagcaatttatactcgaagtcgaagtcttcgattgttggggtatagatttcatgggacccttcccaccatcaaacaagaatctctacatccttgtcgcagtcgattatgtctccaagtgggtagaggctatagctagcccgaagaacgattcagcagtgtcatgaaactcttcaagtctatcatatttcctcgtttttgagtgccacgcatagtcatcacggacggaggtaagcatttcattaacaagattcttgcaaaattgctttttcagtatggagttcagcatcgagttgctactccctaccatccacaaacgagtggacatgttgaagtttccaacaggcagatcaaatagattcttgagatgacagtgggaaaatcgaaaaaagattggtcttataagttagataatgcactatgggcttacagaacaactttcaaaactccgcttggaccacaatttttcatcttctctatggtaaagcttgtcatcttctaatggaattagagcacaaagcagcttgggcagttaagataatgaatttcgacatcaaatcagctggagaaaaaagacttattcagttgaatgagcttgatgagatacgaattcatgcctatgacaactcaaatctctacaaggaacgcacaaaggcttaccacgacaagaaaatcctcactcgaacctttgagcctaatgaccatgtacttctttatgattctagattgacattgactcctggaaaattatcttctcattggtcaggtccctacacagtccattcggttaggccatatggaaccggtgttcttataaacgacaatggaagatcatttgatgtgaatggacagagagtcaaacactactgggctaagccgagattccagtagaaaagcctttggatcttcaggacccacctgttgattaagcatctacagagtcaagctattgactataaacaagcgtttagtgggaggcaacccactggtttgatttttcgtttccctttcttttttttattttatttttgatttatttttcccatcttattcggatttgaatgccactggggacattgtcgtttaagtctggaggaggttcttactaacattgcctttatttttgattcttattatttttcgtttttgagtctattgagttatgaaaaaaaagaaacgttttccttaatttagttaggaatcatgatctatatttctcttgattattgtttgattgatgagtgctctaggtttgagtcaatctgactatttgaaaatctagatggcaaagcaagagacttgaggatatcctagtgataagtgtgtattttgcatgttttgagcatccatttgtcatcattttagcatcatatcatcactgttttataccatttcacatcatttgtcatcactttgcatgtttaggatagttttgcatgcatgttgcatgtttgcgttgatttcaggtgatttggagctgttgacgagctatctggaagaagcggacctgatcacgacaaaccactcgaccaagaggtcgagtaggagcttcaagatctcaagagaccactcgacccccaggtcgagcagaggacatcaccacttcacttcaccactcgaccacgtggtcgagtgccctcatcaccaccactcgacctcttcactcaacctggaagtcgagtatcttctgacaccactcgatcacatcactcgacccccaggtcgagtgccttcaccttcactgccagacaagaagttttttacctagttttatttccgcagaccttgtgttctagactttttgtaatccggatttctctttatctattcagtattcagtattcagtttctgtacttgatttcgtttactgttgttcattctgttatcatcctgttgttacattgttgttatcatgttttcaatttgttcaacgtttatgctttctgttatgatgtcttagtagtgaataggtttctgaggatgggttagtgtagtgtagaattctcagtatgctaggtgattgagtattgattgatagatcccttctggattagttgttcttaatgccaaatgctaactgatcaactggaatttgagcccagacatttccgcgcccaaaaggtg

SEQ ID NO: 285 - DNA, 9922 bp, Arabidopsis thaliana landsberg
gcctttcttgtatactatcttcatgtcaaactttatcaatagaagtatccatctcaatagtcttgggttagtatccttcttggcatacagatgcctcaaagctgcatggtctgcatagacagtgacctttgatccaacaaaatatcttctgaacttctcaaatgcgaatacaacagctagaagctccttcttagttgttgcatatcttgcttgagcttcatccaacgttcggctagcgtaatatatgacatgaagcttcttgtatattttctggcctaaaacagcttctactacgtaatctgatgcatcacacataatctcaaatggatagtcccaattaggagctcgaacaacaggagcagataccaaagcatttgatatacctcgattttcactgcttttaactatgatttaggtataggtttgagagtctatttgctatttctagagtcttttctagtctttttcagatctttacatgtttgtgatgcatttggagattatggagcattctggagcaaaacagacaacttaagttgcagaagcagttcgcagaccaaaatccccgtaggtgtcgaacgacaccacccctggtgtcgagcgacaccaatacctgacgacaattcgaagacgcaatttattgatgttttgaagatttccatatatggcccagaagtttctcttatttctaaagaaggcccatcacgtttttaggtcatatatatagttttaaaggtcattgtttagacctaagcttggagaggctattctccttttctcttttgtactttgggagcaaaaccctatggaaactccctttagagaaaatcctgctaaaccttaatctattcttgttttattcagtgatttcttattcaatcatgttgtttgcttcattcatcatgtttgagtagttttcttgttaggtttaaagtttctcattagggattcatatggtttagtagattgccccctttgctaggttatctatagaattcttcatctttaattatgcttaatgctagatctagagtaattaactagatcttgaatccagacaatagatattccagccataggtatctatagttagatctattatttgatgagttatgtttataagtgtgtaataagaatcggcctatttactaagatgaacaattgaactcgttgagaatgcatattaaggttgatagtttctcggcttctctggttattattagctatacatatagggagtttcgcggcacacccatcggttattctataattagagtttgagtttaagaatggtttgataacaacctagctttcattagatctactaaccaatagtttcctgagaataccctgttcctagctctttattaaatcgtttacaacacaatcaatctgttgtctttttactttgttctcttttattttcactgataccctgctagcttaatctcgacatttaactcattgtttgaacaaaagaactccgtgaattcgatcctaaaatactgtaattgatctcttatttgagatagtagttctaggtaatttgaaccatatcaaatttgacagccagaatcaaagaagtccaaagaatggtggtattgagtcatgagtgcagtgcaatcacttagaaaaagattgttcaagaaaagttggaagatccgggatctttcactctatcatgctctcgtacgcaactagctttgagcaactttatatatgatctaggagcttcagtcagcataatgccactttctgttgcaatgaagctgggatttgtccaatataagccatgagacctatccttgatccttgctgataggaccttaagaaaaccttatggcctcctcgaaaatctgcctatcatgattaatggcgtagaagtgcctacagactttgttgtgctggatatggaagtagagcatggggatggcttaatactgggaagaccctttttagcgtcagtgggagaagtgatagatgtcagggaagggaaaataagtctcaaccttggaaagcatatcaagttgcagtttggcatcaacaaaactccacaagggtcaaccgaagatggaaaaacctttggaaatgatagagcgatctcaggagaaggatatgagactgaaagagtgaaagaacttagaaagaggtctgataagcaagatgaaactatagagaagctagcccaaaccattgaggaacttaggagtaagctgaatcagatgcagaaggaagctcaacctaaaggcgggattaacactatcccgagaaaagaattcacttcaagatggtctcaagatacagattatcctccagaagagaaggaagcctattttgaagaaagggggattgagtattctgctgcagacctctccagggaggacgctgaatatgatgatggtattagagaggattatgctgaccctctctacacttcattttcttcttgataagtgtgaggagtcaagctagagacttaaaacaagctcacttgggaggaagtcccatgactatccttgtaaataatttttactttcttgttatttttgatttgttttgtttgtgtttgtggttctcaggaaaaaaaaaaaaaaaaagaagtaacatgaaggtagagtaaaaattcaaaacttttactctactgatggtctagagatcgagtacattggtcgagtttgagtgatgcttaaaaacctaaaaaaattttaatcatcattttactcgaccaacagaagctacaaagtcttccagggagtctttcaagtttacagaggattgcgggatttcctggagtttttctagtgaacagagaatacagagaaggaacaagaagacatcctgggacccgccgctgacgcccatgtcctctatgcaacagaccaaaggacaggaaatctctcctcatctcttctcctccactcgacgtcaacgccatcactcgacctccatttttcttaactcgacctcatcgcctcgttttctcctccacaaccccataaactcgacccatctccaccgacaaaacaaacttcaattcactcgatcccatcgcccctctctccacaaatacttgacctcgccacttcttttcctcaaacactcttctctcaaacactcgaccaacactctttaccttatcctttcttctccatcactcgacttcaacgccatcatcatccgtccaaagcagcactcgacctcaccatctctcttcctcaggcactcgaccgcttctctctcgcctttcacagccacaactcccatcgcctcttcaccaccgtctcgagctaccactcgacgattcctcgccaccaccacctctcaatcgtcttaaagcactcgacctcttcaccacttgaccaagcagccgtttctcctcctccgagtcaatcactcgaatcaccgctcctctaacaacactcgacttcttcttacatcatctcatcaccaatccgcgactctactctcatcattcgctactcgaccttgctgtttggttcactctaccgcagctcctgcataacctcgtcgttttcaccactctctctccatcgcttcactcggccctccataatcactcgaccagctacccagaaaacaaaaaaaatattcaaaaccggctacggtttactcgaccggtttactcgacggtttactcgaccagtttactcgacctgtttttggtttgtgtcgtttgtgtttctggttttgtatgaactaacgtattaacgtttatttttgagttacatttgctttcaggtttcgtaatgattaactacagtggagaattctctatggaccctgattacaatgtggatgaagctgagtcctggtcagggatgaattcgaacgctctacagcccgacgtaatcagagaagagctgaaatcgccagaggaaagagggcgatgtcgagtagatatgagctgattgatgaggacatcgaaactgagtatgagccagagtcatggcgtaaggagacgaagctgctgaacaaacccgacgaggttacagtggaggagtatatcagattctttgagatgaatgacttctagggaacgaggtatccgtgctatgagactttagcccagttgggttactggaggacgtacaacatctgttcgagaagtattatctggagacactcatgtcttacccttaccctgcctataaggaggagacaatcgagtttctttccacgctgcaagtggagatgtatgagggactcacagactttgagctggataccatgggattaggtttcttgacgttctcagtggatgaacagcggtatcagctttcgatcaagaagttggaaaaactgtttggtttccctagtggaaagggaaccaaacccaaatttgacagagaagagcttaaggatttgtgggccactatagggaacaatctaccgctaaactcggcgcggtccaagaacaaccaaattcggagtcctgtgatccgctactttcagcgatcggttgccaacgtcttttactctagggagtctacaggcaccgtgtctaacacggacatggagatgatagattatgcgcttatagggattctccgccggacgaaggggaagaatgtcttgagaggcgatctcaacaacgcaccaccagtaatgcctctgttgatccatctgtgtggatacaggaagtgggcgttgacgaacgggaagaagaaggtgagaggagcactatgcgtgggtggcattgtgacgccaattctcgaagcttgtggagtaccgctcaaggaaccagggttagcatcgaggatgatggacttggatcatttgcgcagatgtgagttcttggagtttgacatggcaggcgactttcaccgctataggttcgagcattcatcgattagaatcgccaacattcttctcccctgcattgatgatactaggattctcgagggcaggaacattgacttcaagcctacgcttgaagatgtttatttggagggcagtccgccaactgaggagatcagtcacaccgaaggagctacaacagaagatgttgatgagacagtcgatatagatgaggcggagtttgccacgagtatgtatcatttcagtgagcgcatacttccagagaaggaaagacagagtttgagcgaagctcacaggaacaacaacaagctgcagaagtggtgcaagaaacaggataagttactcgctaagtgccttagggctatcaggtttctgaaggacaagatcagctgctcctcttccactacagctattccgcagggacatctccctcaggacatgctttcgaggagatatgacgcgcccgagccaagtcggcgcaggcctgagcctagagagcaggagattccgcatgtccctgcgaggtattcatcattcgagccttgtgaatctgggaggaagaggaggaccacactcactcgatctagcagtaggagcgaacgacttctgcagtctcatagtttacgcgaccgcggagctggccgcaacagaaggagagaggtcgagtttcctgagagcggtgctggccgccacagagctgatgatgtcgagtacccacctgctggagctgatacagaacaaggtggttcgtccatggcctgggagcaatcacaggcagccattgacgagcaactccgctccttcttccactgaggtaagcacctcacttcaccattgtattatatcatctgttgtgatttgtttcttcattttttgtttctgtgatgtgttttgtcctgagtactctcttccaaatttggtcacacagtggattgtgtgatttaagtttgggggagggctcaggaagtgtgtgttgcattgtatatatttttgagtctgcattcatctaaggcatagaaaaaacaaaaaaaaatgaaaaatttcacataatgatttcacaaaaaaaggagtgttcatgtagttgcattacatttaggatcgagtctagagtgtttcatttaggattgttgcatatgcataggggatgatgatgagatagccttgtaagcattttgattcacctgataaactcagtgccctcgttgttagttgtctgatccctaatcattgaaattgaagtaaaactgcaccatgcctagattgctctactcgaccacattgttaggatctgataccattccctatcaatttgaacttgaatctgatttagaattatcatgtcttggcatcgaatttgaactcatggataccctaaaatacttggattttcttactcattttgaccactcttgttaatccaagtagctgactctccttattagagcagttaacctgaacccaaacctaaactttctttcaagccctatatcacttgtgagtgtttgtgaggtcttatttcgattgagcttggtagaaagtgttaggttcgtaacgacagagatagtgtctcatgtagttctagtttgcgttcttcggactggataggactaggtgggcgcttatatcatgggttgggatgtgtttaaaagaaaatggtgaatttattgttgataaggaaaggggaagaattctaggggaagtaagctaaataagttagaaaaacaaaaactagtaaaggttttgggaatgttaaagaaaagaatgaggttcttgttagttaaagaagaagggttaaaagcctttggttttaaagattaaaaacaggaaccttagttgttaaagaaatccaaatccgctagatgtatcagagtgttgagaaagcttctcctagagttaagagaaaagaaaagactgatatgaaaaagagtttgaaagattcatgagtgcaaagggtagagttaagttcttgtattgggactcgagttgggattaccatgagagcttcattgttatactttgggtagatgggatcttatctctgtatgcataacttggaacttatctttagcattctactaaagctcaatcattcttgagagatcccctgttacttaagcctattctgtaagggaccatctttgtctcttgaccttcaccttagccaaatgagttcattgatgatgcattgcttgattcacgttctagaactaatgaatgttaaagggattggtagatttgaaaacatgtgtaggtcaagcataagagtcgaattgattaatagcaaggcatgactaacgtttttgagtagaattcgctcatacctcagcttagaactaccaacttggacattgatttcatctgatttatctggtgctttggctctgagtccccgctttcaaacctcacctccatcttgttcttaattgtttgcttgagggcaagcaaagaataagtttgggagagttcataagtgtgcattttacatgttttgagcatccatttgtcatcactgtagcatcatatcaccactgttttataccatttctcatcatttgtcatcactttgcatgtttaggatagttttgcatgtttgttgcatatttgtgttgttttcaggtgatttggagctgttggcgagctaattggaagaagcggacctgatcatatcaatacactcgaccccatggtcaagtagatggctctgcgatttcaacaaaccactcgacctcctggtcgagtagaaggccttatcacttcacaccaccactcgaccccatggtcgagtatcatcatctccaccacccgaccatcactcgatcacaccactcgacccccaggtcgagtacttccatcaccttcactcgatcactcactcgattgcacggccgagtctcaccatcatcacacactcgaccgatcactctaccaccaagccgagtgccgccatcaccaccactcgactacatacttgattgcgagcttcagagtcttcttcattccgcactcaaccagacactcgagcagaaggaagaaaagaagactccagctattcactcgacctctcactcgaccacatgggtcgagtacagttcttaatccatcccaatattgtgtcgttttaagtattagggtttcggaatatttggctataagtagcatgtacttcacattttcgcaaacaagtttttatctagttttattccgcagacactgtgttctagaccttttgtaatccggatttctttttatctattcagtattcagcttttgttcttgattttcgtttactgttgttcattctgttatcatcctgttgttacactgttgttatcatgttttcaacttgttcaacgtttatgctttctgttatgatgtctgagtagtgaataggtttctgaggatgggttagagtagtgtagaattctcagtatgctaggtgattgagtattaattgatagatcccttctagattagttgttcttaatgcctattgctttctcatcaactggaatttgagcccaaacatttcttcgcccaaaaggtgttcgatgaaatgtctgaaccactaattccagagattcgtgaccctgtaccaaggtattggttgcagggagcgttttggctttaacttgttgattcgtaatgcctgttaggttagctctcgtcaatggtgattaagtctgggactaggttagcttgagagtctctgttgtggtggcacttagatttggttaatgaacttgttgtctagggttaatttattgagcatgtcaatcacctgtaaactgaggaaacgaaactactcaattaccccatcattaggaattctttgtctgattgattttattgtttactctactgttgtttactgcatcctgtcatctgttgcttagtttctgcaattctttactgttactcgaccttgtactcgaccacccagttgtctggcaacagactgtgcagtcgagtatccttgtttcattttctgtctgttactcgacctgtcactcgacctcacccagtgctctgcaaagagctgtgttggtcgagtgtcttactctttctgtttgattttctgttttctgcatgttcactcaggactgctagaacacaccaaaacctgttattgcttggcttgacttagtgacttctgatcacatcttgattgttcgcatcacacccatttggattgacaacctaaaatactacaacaacatgattggtgttttaggataattgactaaaaatctattatcaaagtacctttgaaatcaagtaaggtcccctccattgagctcggagcttttcggcgttcttttctttggtgttactgaagacttctcgaagtacgagatcacccacgttgaagcgacgttctcgaatgtttcgattatagtactttgtcgccgcattctggtagttttggatccggatgatagcttgatcgcgatgttcttcggcgaagttgttgtgatctcatagcagtcgattgtttagtccagggtcctccgacatcatgcatctgcgtaacgttggaattctagcctcgcccggagccgttgcctcgatgccataaactaaggaaaaaggagataatgacgtaggtcttcaaggagtaggtcggtatgaccatagcacgccttccaacttgttcgcccaatttcttttcttagggcctcggcttgtccgttcccttgaggatatcgcgaagtcgaattgctgaggcgaatgttccacttggcgaggaaattcctggtgatgagtgagacgaactacttcccattgtccgttacgatctcgtagggaagaccatgtcgacagataatatttttccaaataaatgcaacgacataagacgatttaacttcgtagtacgcttgtgcctcaacccacttggtgaaataatcagttaggactaacagaaatttcttagatcctgaagggggaattggtcccacgatgtccatggcccaccgcataaacgggtatggcgccgtaaccgaaggcaatgtttcaggtggcacattcttcatcgggccaggtcgctgacatggttcgcactttcgtgcgtaagcctcgcagt

SEQ ID NO: 286 - DNA, 585 bp, Arabidopsis thaliana landsberg
atatctccctaacctgctgaataattttcccaacaactctatgtagagtctttcagtcgttgttggttttgtctttattgattcatttgaagaagattcgtatgatacattcctattttccaagtctgtcattaaacggtccaataaaacaacactgatactcttgttttgggtcaatctcattatctgttgtatagcttcaaaggcctggaagaaacaaaaaaaaaaagcacaaagatgaaaccaactcgtttacatcctaagctaaaatagaaaaaaatatacaagagtagaataattaattgctgcatttacctgatcagtatttcccacatccatagctacatggctgaaattctcccatatctgccagctgtctcggctgttgatacaaaatatttttcaattactaattctgattttgttagctcaagtaacagaccgtaaaggatagagagatactttaatttaagcacttctttgaatgcaatgaatgattctttgctctttttcttaatcatatgcctgcactcacagattattattaaacattcagcaccatccatagtatatgaaacataaagt

SEQ ID NO: 287 - DNA, 3137 bp, Arabidopsis thaliana landsberg
ctccagtaagagcatataacttcatgaagctagtggttgcagctgaagctgctctggttaacacttcctcactgtttgctttaaaccggacagctggagccacattagtgagtgcaagtggcagtgcatgtgcttctggcgttttcgctgcaaccgagagttgtgtgattcttgagctatgattgttgaaatcatcaagtatactctgctgctcagctttcgtaagaccctgtagcaacaatagaacatgtttcacgactagttgcagattggattgcgagtgatctttttgttctaaattggattaagaatgctaaaattaccttaagtaccaagatgcgttgaaactccattggtgtttcttctggaaacagtgcacgataagtgtctatcactgtgacgattggggatgctatgacctatatgatagttttatgagaacagagaagctctaaaagaaaaaatttataaatggtgctcaggcgaatacctttaggactgcttcagctcttttcatttgatggttcacaaatttgacatagctcgcagttgcagtctgcaatcatatcattgagataaaccaaaactcaaagaaaaaactgagcagatttgggtttaaatagtatcataaatactctataactttgactagtaaagccgatgcttcaggcttaacaacaataaacaatcttaaatcttaaatacagagtcaccagctgaggcacaacagtttacacagatgagctaacctgtctggcaagagatggaacttttaaaagaatcatcttcatatcatgcgcatctagcaacatctgtgaaaccaaatgacggatagttcatactctatagcatctgaaaaagaactcagaaacataacatgggagagagatctcaacgagctatataggttttttttctacaaagcatgagatggataatcctagcatgaaattaacttactcgtaaatatatcgaaaataaaacatagttactttaacaatggcgaatccagaaaagctgaaagaaaaatatgtgatggccaacaataactaaaaccaccatattaatgctacttgaatacagggaattaggacgcgatgttagaccaaattaaactaggtaaacagaattttcagaatgacagcctaggtaccgtcaatagctgactacaaagtgggatgatcaaatccatgcaaatggaggaacataaagtacacaggccaacctgttgagctccagtttctgatatatgcttgcatctgaagatattaacatagaacctttgtccaagggataatgccagctgcacaatagagtttcaaaactagagtcatcgtttataaatttcgccaagttttaatcgcgtaaacctatcatagccaaggtttaatcgctttaggccttgactgtttgaaattcagggaaaaatatcgtagtagaataatggagtatgttcgaagagtggagtagcataaagatttatcatatgttttatacaaaacaaaagaaataaatgatttggtaatggcttaaacccgtaagacacaattaagataggtcctaaacttgtataaggcagaaatcatcagaccataaaggcactcaaatcatactttctttattaccttgtcgagaaaaaattggaagtaaaccggtgttagaaggtttccaaggacaggaatgctgctgcaaaggattgtatttattccatagacgtaactacaagaagatgcaaattcttgttgctaaggtgttagtttttttacgagcaaatggcactttttgatgatacatgcaccacaaaaagatgaaagctttattacatcttacttattagactggtcacccacgctcttaaatatgccccatgagacacgagtcatgtctgccatttctttgtcaaatttagtctccagtccgtgaactaatgtcaccaatgcgctcgttatgacggatgaaaatgcatcctgcacagtaataaatcttaaaaagaatccaaattaagtaacatatctgggaaaaaatacaagtccttcacgtcaaccgtacctggacctctgatatgtctacaccgttagcataaggcgggtgaataattgttgagacttcttctaccagatcaccagactgcaagaaaaatattaataagcaaataacccttgtgaagtgccaagttgttgttctgttatcgaatcctactgacatcggcacacatcttatatccgacacaaacataaattgtttaatatcgaagcagtacacaatatcattgacaatgtaccacaagagtaagacggatctataagagttgcaaactaacctttcacaactgcaagccaaatttcgacttaaacgagatgagatgtagttcattacttaaaaatgcaatgaagtaagatcaaatgacaacaacatcaagaaactagcttagaactgtataatacaactggtatttctaaaagactagcttaaaatcagattagaaacatataatatataacaaccctaattaccacgttgcaagtaaggctacacaaaggtatcccctagatgctgaaggtgtcaaaagtgaaacaaacttactgttttgtggcaatagtcagcagtattaactatgtaacatatcatcctttcatctttctccgagacctgcatattagaagtaaaaaagataaatcgaaaagaacagatgggagacatgaggcaggcagcttatgctcagcacctttatacgtccgtccatgcctgtggctgcggcaatgatactagtgcctcctttagggagcttaacaaatagctttgtagcataggcattcagaactcgttgaaagacctgaaaaagggagatccttttataaaaatgaactcaaaatctccatccatattctatgggaccgcgaattagaacatttaaagtgatcggcaaacattgttaaagagctgattcaactaacaatatttatccaaataatattaaaaattctattactccacaacaaagctggaaattagacaaattaagacattgctcgaaatcacagtaccagtctaaaacatatatagaaaatccatatcgagcatatgaaaattgtaccttgagcaaattgaataaagtctggttcttggtgagagcacta

SEQ ID NO: 288 - DNA, 975 bp, Arabidopsis thaliana landsberg
ctcgctgactctgtatctcattctcagagcatgaccttgtaatatatcatcaaaaacaggtgagcgaacgagaatattgatatcgttaatgtacctggaggtcctaaaaatgcgtgccatatccaaagatcttggaaagcttttaatacaaattgtggtccgaatattattgtgtggtctcaaacataaaagaacaaaacacataacaagtggtgtgagtacaaaagaacaaaacacaaaacaagtcaactgatgacggtaagaagtgtctttgtccaccactacaaaattgaatagactcaactaattaaataaaagacatggactttgcaaactcatgtatccgcaaacacaaacaatataagccaacattcattaatagtagttaaaatgaaactaaaattcaacattacaaacacaagagcatgaaacattacaaacgcaacagcatataacaaacacaagagcatgaaactgaatacattacaaacacataaaatgaacacattacaaacttaattcaacatatcagagattagcttgttcttaagagttatctctatgtcagttagaggctcagttttggcaaagagactatcaaacaatttagtgagaccaatcttctcttctttgttaattagcttctctctcatagctaaatatttctccttaatatcccaaataagttgttactctttcacattgtcaccagacacactacttggcttggcttgggattttgttttgcctttggctttagctgccttaactctagggggacgaatttcggtttggctttggttctcttcaatgccaactggaagagatgcacttttcttctatttgttgttccagtcgtaagaaactcttaaccacttatgctcatagtgaaccgccctccaagcatgttcaaaggtgaacttggagccatagtcctcgtagaaaatctaatgagccaagttcaccaaatcatta

SEQ ID NO: 289 - DNA, 2430 bp, Arabidopsis thaliana landsberg
  unsure (1)..(2430): unsure at all n locations
ggccgtattctgaatgacagcaagatgagctatctatttctcaatttcactgagactaactgaagtggctgcatatattggacgaccctctaggattgaggcattttcatacttcgtgtttttgtcagctttctcttctacacttggtgtctttttcaaaaaagcactgcaaaactccatgcattcttctgctaaatatgattcagctatgcaaccctatggtcttgctgtattcctaacaaagtctttcaatactttcatgtacctgcaacaagaatcaatgcaaaccagaatagcatatgaatttgttatataagaaaagccataacacttaaagtagacggattacctctcaaatggatacatccatctgaaatggacaggtctacctaatcgggcttctcttcctagatggacacacaagtgcaccatgatatcaaagaagcttggaggaaagaatctctcaaacattatcaatgtttcaactatctcagtttcaattctgctgcaagtctatgactctttgacacaacttattgaagaatgcacataagtgcaagattacaatccttgtaccttttgggagtaaacctctaactgcaactggtagtagttgttgcatcaagacatggtaatcatgtgatctcatccccattactttgcagtcctctaatgatatgcaagtagaagtcataaagtctcttacaaaacactttcttctctaactttgacaaagaccaaggagcagctggaaggtagatcctttgacctttttcttgagggtgcaaatcctttctaatacctagaagttagaggtctttacgagttgttatgccgtccttcgatttcccacagtgcaacaatgtggagacaatgcttgtagccacatttctctctcacatgcatcacgtctagattgtgtctcactcgtagatcctaaccaaaagagttaaagcaaatacaatttaatgaagattagcaaaaatctatttgtaataaaagtattgtaaaagtttgaataatcatacctcccaataaggcagcttgaaaaggatagaccttttcttccatcttgatcactcctcttcatttatagatgcttcttcttcttcatcgtctgattcactaacttcactgtcatcgactgagtcagtctcaacaggacagtcctagctctcttcttcccagactctttcttattaccaaaattatttttgtaattttttagcagcacagatatattatgacttgttaatatcctacccttgacgccatgttcagcttttccctcaaaccatgttttcttccacctatacttgtgtgtagctgatagacctttgagatgagacatgtagacatgtttcatgcaattactcaaccacatactgttagtgttcttcccacatagaggacaagccatcttacctttcactctacaaccaacaagattttcataagctgggaaatcactaatagtccaaaggagcatagctntaagagtgaaagtatttccactgtaggcgtcatatgttaactctccattagtccaaatatgaagtagttcatcgactagtggtcccaaataaatgacaatgctattacctggttgttgcgaaccagaaatcaataaggtaagcataatgttttccttctttatacaaaggttagcagccatattgtatttaactaacagcacacaggccaacaactatacttgttgttcttcatgttaaaaggattgaaaccatcagtagagagtcctagacgaatgttcctttcttcagcagcaaactcagggtacttggcattaacttgatcccatgtcatagaatttacagggtgttgcatttttccatcactactcttgttagtaaaatagccaccttagatcctttgcaacttgctctgacctgaacatcctctttaatcgtgggattactcagacatgataagagaaacacaaatcataatctgaatactttgcattgaataataagattaagaatgaaaggagttcaaaatcctctattcacggattggattcttgtctccaaaagtgtatcttaatatcaaaacaaaacttaacaaaacttaggtttaacattgacattaaaaacctaattatatgtctaaaatacgtcttgggcctaaatattaacttctgggcctatttgggcaaaactaggcctgtgcaaatttcgtacagtttttgtgaaaactttgtggcagaccagtgtcgaccgacacaagtctggtattgatcgacactacattcaagactggttttctgctctgtttttgctccaaagtgtcccataatcgcctgataacccctagaatgtacaaaacctgtaaatacaccaaaaacactccaaaagcactataaaacactctagagactctgtaaaaacaatctcaaatcattgataa

SEQ ID NO: 290 - DNA, 2214 bp, Arabidopsis thaliana landsberg
gtttttattaccgaacactagtttaataatcattaattagtctttttttgactaaggctcctaaaacccttctggcgaaggaggaaagagttttgagtttttttttttctatttctccagagggagagagatgataaactcaatgccctatttacacaaaaacctacgccttcttcgtctcctctcttcaaagtcttctcctttccctctttctctcagacccttttctccacgatccttctctctctcaaccctcttctcttcttcttcatcatcgtcttcaatggagaacaacgaagcaactaatggctccaagtcttcttctaattcattcgtgttcaataagcgaagagctgaaggatttgacataaccgataagaaaaaaaggaatctagaacgcaaatcccaaaagcttaatcccactaacactattgcttacgcacaggtcatcatcatagacttcttcgttgttttttccaattttggattcttaatctctcacaatacttaaaaatccgatctttcagatacttggaactggaatggatacacaggatacatcatcttctgtattactcttctttgataagcaaagattcatctttaatgctggagaggtaaattaaaatcgcttacagatttttcagcagtttaaagtttgttacttgatcacttacttgtgaattgaatgtgttttttagggcttgcaacgtttttgtacagaacataagattaaactatcaaaggtaagtttcctctgttttctctttgtatgtgtgatgaggtgagttttaattttgatgatttggtgaatttttttttacagatagatcatgtatttttgtctcgtgtttgctcagagacagcaggaggacttccaggtttggttccagctgtgacttttctctttgttgcttgacctttttagtttatggtgggtgatgctaagttttttcatgttttgatttgaataggtcttctactaactctagctggtattggtgaagaagggctttcggtgagtattattgacatatttttgtgtgtttcttcttgtgtatgaaattgctgaagtattgtttttttgttacaaaggtgaatgtatggggtccttcggatcttaactatttagttgatgcaatgaagtcgtttattccacgggcagctatggttcatacacggagttttggtccctcgagtactcctgatcctattgttcttgtgaatgatgaagttgtgaaaatatccgccattatcttaaaaccgtgtcattctgaggaagactctggcaacaaatctggcgatctctcagttgtatatgtatgtgaattacgtgaaatattgggaaaatttgacttagagaaggctaagaaggtttttggtgttaagcctggtccaaaatatagtagacttcagtccggtgaatcagtgaagtcagatgaaagagatattacggtatacctgcgattaccaatgactgtttttttcctctctctgagtggagatattgtatgaaattgtaactgactgttcatgctttgatcttaggttcatccaagtgatgttatgggaccttcactccctggtcccattgttctccttgtggactgtccaacagagtcgcacgctgcagaactgttctcacttaagtctttggagagttattattcatctcctgacgagcaaaccattggagcaaagtttgtaaattgtattatacatttgagcccatcttctgtgacaagtagtcctacttaccaaagctggatgaagaagtttcatttgactcaacacattcttgctggccatcaaaggtttctccctcttcttataattgtttctcatcaaaaaactgttcggtaaatttgctccgtgcttatgttgcgttttgtgtatattattcaggaagaatatggctttcccaattctgaaagcaagttcaagaatcgctgccagacttaactatctatgcccgcagttctttcctgctcctggattttggccttctcaacttaccgataactcgattattgatcccactccttcgaacaaggttgcttattgcttttctcatattaagttgagataagtttgatttgtcaaatctaattaagtaaagttctgtattcttatagtgctcaagttcaaatcttgctgaaagcatttctgctgaaaatctctcaggtattgtcattctccaacactttccgtttt

SEQ ID NO: 291 - DNA, 2154 bp, Arabidopsis thaliana landsberg
tgaaggtaacaacagcatcaccgtccacagggggacctacagctttccctgattcatcaacaatcacaaacgggggcaaatactggtcattagcaccaggctctttcctcaaagtcttcacagcttcaacagcgtttttgaatttgtgaggagcttctccaagaacttgagcatcccaacctcttttaacaacttcccaatcattctcatatcggtccaaagtcacatacatacgtcctccaccagatgcaatctgagcatccacaccattctcacgtaatgcaacgaggtcggcttcaagggtttccacaaatccaacactagaaccatccaaaacatcacgaccatcagtaagaatatggactctgattctcttagcaccacgttcagcagatcctttaatcaacaactgcgcaaaagcaacaacaagtttaaggaatcatcaacaaacattaaaccagaatttgaacaaaataatgaagaacatatcaaatcaaaacctgtagttgatcgagacgagagtgaactccaccgtcactgagaagtccaacaagatgcaaagtatttgtctcgaaagattcagaaacgtatttaaaaccttcaccttcaaagattttgccagaagcaagagcttggtcacaaagcttagcaccttgagcaaagatacgaccagcaccaagagcattatgaccaacctcactgtttcccatatcatcttcactaggaagtccaacagcagtaccgtgagctttgatcaaagtccaagtatcaggagctccctatagagaaacaagagtaagttcaatgaatccaaaaagcatcaaaaatcaaagattaaggaggtaacatacatgtttaagagaatccatggctggagttggagcgttgtggatacagttgtactgatcaggagcagattcaccccaaccatctaagacgattacggcgatggttttgcccttggggagcttggggtggtcatcgagcttccaggcggaggaggtagccatagctgagattttttgagatgcaatcggagaatctcaaagcagatctgagagaaaagtgaaggttggtgtgaaggaagaggcgggttttaaaaagaggcgtttttgcaatatgggcccgtcaattgggccacttgtctctcacgtaaatataaaattcttattggctccgaatattcttttccttatttttcttacgagattttacattgtgatgacacatgccattttcttatttatatgtttaagaaaaaaacaaaaaaaacattgcgacattcaacttttttttttttttttttcacaagagggataattttaatgcgacattcaactttttttaacaactaaaatttagaaatattgctttacttccattttattagagcttagaatacatgtactattgccttattcatttacttggtttacaaggacttcgtaagagtaattttcctttccacttatagaacttcaccgcttgatatggtgggccatatataactagtttcaactttcaatatgacgaaccggctttgtgtattggttaataaatacaccataaatatcttaccttattcttagttcttttaaatctcaaatggtcaagaaatgtgaatggacatcacagaacatgcttcctaaatcctaatactgtatattaatcctttttgatgcaagctttattagaggctttgtttcttggaaaagtcaaagaagcatggaacaatgtaggttcaaatgaaagaaacaatctcttcaaacaagtagaagaagatgatgaaggagaaaacagaaaacgactgaaacagagctaataacagcagaggaagacgaagaggaatgagcagattttggcagccttggaaagtcatctggagaaggcataacacattcatcaccattgaacaagattctccttgggaaagcccaaccttctctgaaagtgaaatttcccatatccttcttcagcaataactctgtttgaacattcccaatctttccttcttgaagcagaacatcattataaaactggactccccaaaacatccctgtgtcatctgaaataacaccacacgaagaacaagtgatgttagaccaataatctaagagactatggtgtggtttttaaagaaattccttactgatg

SEQ ID NO: 292 - DNA, 5409 bp, Arabidopsis thaliana landsberg
atgtctctgcatgtgaagctgcatgaaggattcttggttatgatattcactttcgggctacaccagttgaaactatctttccatcttcctggggagcaacttatatattttaagggtgatgacgaagtagaaattattctgaatcgtgattcagcagagctttctatgttaatagcatggatgaatttgaacaaggtcagtggtattgctaggaaacttacatatgctgagattccaaacaaattcacttatgattcacaggacaagcagtttaatcttagacaaagagggttttcaatcggaagaataaactatgtgcctatgaaatacgaagaaggttattatctccgcgttttgttgaatgaacaaagaggaccaagaagttttgatgagatcaagacagttgggggagttgtttatggaagcttcaaagatgcgtgtggtgcattgagattgttagacgatgacaaagaatacatagaagatttaaaaagaacatgttattggcaaggtgtgagctctgttcgacaattggaacaaagacctagctcgtggcgatgtctcagtagtggcgctttggtcaacagactcgacatttaagacaccaacgaatagtatatgcttctcaagtgaggagctgatagacgaagatgaattatctagcaacaattgtcttgccaagctaggtatgttatcttgttaagtgtagcttagcaaataatatatgtgttcctacttaacactaacggaaaccaactgaaaaatggtcttctccgtcatataatcaggtcaagacgaggtggcacactactactcaaacccggatagaccactctgtatggcacctataaatactccaaggatgagtagagttaacaaccttgtaaggggggatgtcatagcaactcaagaacaaggtatggcgttggcaacctagattagccgaaagatggcagatatctatttgaaagaaacaccagtaccaacagtgttgtatgacaaggacgccccaccatatttcgacgatccgggagaagaaggtaaaacatgttaggatctaattcaaagtttagaaactaaattttagtgtagcatgtgtttttctggtatacttatggatatattattgttatgaatcttgtagctatcatgtagctactattctatttcgctagtaaaaggttaacatgtaacaaaaactttatctaacaaatggtacacctattgcagattacttgcagcgagccctgaaagatgccgactacgaaggagatgatctattcattggcagattgttaaaaaataaagaagattgtgcgactaaactgacaatccatgcaatacggagaaagtttcatttcatttacgccaaatcttgcccaaatattctcctggccgtgtgcgtcagccatactttcccatggcgtgtttatgcaccaaaactggagaacagtgagcgttttgaggcaaaatgtgcaacccaacaacacacttgtagtgtagacgccaagggagactttcacaagcaggcgtctatagctgtgattgggaaattaaggagaacaaagtacttgggagttggtaggggccaaggccaaatgagttgaggaagataatccgtaatgaattcaacctaaatgtctcgtactggaaggcgtggaggactcgagaaatagctatggacaatgccatgggttctgctatgggaagctacactttgattcagccttatctgagggggcgatacggcgggtgcttaattgatgcaagcgctcaggatgccaatttccaagttttccctattgcgtttggaatagtgaacagtgagaatgacgatgcttggacatggttcatggagaggctaacagacgctataccagatgatccaaatttggtctttgtttcagaaagacacttgtcaatatatgcaagcatacgcatggtaaattatcgacataaaagtaatgttatcttcataatttacaattatgaaaatgataacactagtatcttgctaatagttagattagttgatacatgattatctattattaataaaccctaacacatggtcatgcatctccaggtctatcacatgtcttcacacgccgcttgcgttgtccatcttaagagaaattttttcttaatattcaagtcagagggtttgagtttttggtagccagtgcggcccgggcttaccggctaaacgacttcaatcgcatatttgctgagattagagcaatgcacggaccgtgtgctgattaccttacatgcattgggttcaaacattggacgcgctcacattttgtgggagataggtacaacttcatgacgagcaacatagcggagtcgctaaacaatgtcttaacaatggcaagggattatccagtaatatcactactagagactcttcgaacaactcttattacatggttttctcttaggcgagaagctgcacagctcgaggggaatcattaacctccaaaggtgaatgagatggtcacagaaaattttgaaaaggggcaggttatgttgtacttaagattggtgatgcattttatgaagtgcgagacaaagaagattcggcatttacggtaaacctttgggagcgaacatgcacctgcagagaatttcagctccttacaattccatgttcccatgctatagaagccgcgatcaaggaaaggatatgtgtagagacgatggttggcgtctaccacatagttccatatctgagattggcgtacaaaggtgttatcatgcctatcgccgacatggttacactggcaccttccccaaatgatgtcggaggcgggaagcttgcaccaccttaggtgcgtaggccacctggatggccacagaaaagaagacttttctcaaggggagagttcaaggtaatgttcgctataatgtttattagtaacgttatcgttaacggatattcgtcatgtaaagaattcgatctaacgaaattattattctttcagagagaacatctaccaaacgttgctgaagatgcagggcgatatggcataatagcgcaacatgtagaggacccatcgcggtaacatataagttagcaattaacaacttccttaacaagtaatattaatttacaaccaagtaaattgttgtagggtccttagctgggataaggagacattttccggcgagtgaagggacttttttggtaatagaaggtttgataggatggtgccaggaacgttagacctttggaatgtgtgaaaataatgaagaaggatgatcagaaaaaatttcaatgtatatacatacggactatgatcctacaaatataatattacaatcgggacgatccccatcaaacctccttgtatcaatgtgaaaaagtatgttaaatcttttgttaaatgataacctatcttttagcatacattgacaatcgatgagctcagatccaccaaatcacaaaaggttatgagaaatttgaaatcatttgttgtgaatcagagttagcacctaatcattcgtgtatgttaatattatgttaaaggataacctctgcttagatcaaaacaacaaaagtcgaaaagtacaaaaacaacttcaaattacaaggtaacataattgagtgtgcggtaataaacatattatcaagtgtttatgttaaatgataacatatcttttagcgcacattgataattgattggctcagatccaccaatcacaaaacgttatgagaaatttgaaatcatatgttgtaaattagagttagcacctaattacttgtgtatgttattacttatgttaaaggataccatctggttagatcagaacaaaaaaagcacaaaaccacaaaaatcaatgtcaagttacaaggtaacataattgagtctgcggtgataaacatattatcaagtaatttttattagatcaaacccaccaaaagcaccaagggttagagttatgagaaatttgaaagcgtacgttttagtttaatacatatgttaatggataacatctggtttagtatgtggatcaaaacattacgggtaaatttcagtaacgaagggtgtgttaataaaaatattagcaagtaccgtgatagatacatagataattgactagacctgaataaccaagcacaacgattatgttttgtgttagaatataatgcaaatgttacggtacaaaaaacccaatggttggatggaaaaacataacactgttgcattgtttgttatcaacaaacaaaacataaaaaaagaggtaacaacctatatgcttttccaatcacataggagtgtaagaaatgttggcattaactaaacgtctggttacatggtaacataatcaagtgcgcagtaatcagacaattataaagtgtatttttaggatctaccagagcacgaaagttatggagtaattgacaataaacctcgtatgattttgattgtagttagcaactaatacaattaactgactgtgctacacggtaacataatttgggtgatcaaaatatggaattaataaaagtattacggcttgataaacataagcaaaataccatacacaaaataaagccggaaattcagttcaaacatatcaaaaggcgaaaggaagaaaaactgagtatgttagtcgatagttcgataataaataacttaggatacaaccctagacaatattatagtggagacgatttttttaacttcttgatccaaagtggcaacatccaaattcacgcattcttcaacctcaccggcagcatgagcatgtatgaggaaaacagagagaacacaaaatcaaagggagaggagacctgagggatgctatgcaggcgatcaagcgggaaagggtgtagtaagataggaccaactgacgagttagactctttgaagaggtaagggagcatgacagccaacggctggagtttggcatataacgctgaatctcggcgaagctgaatgttggaatcgagaatagtgatcttatgcggcgtagtaaagtcctagaaaatattgaaaaagcaaattaacgaggttaacaaaaagataataatttaaaacacgtggaaaaaattttgtttacctcatctgaatcctgatgagcgttatcaatcatcgatatttgaaaaagggaaataaacaggtgtaagaagatactaaactagagactattcagtggagagatgttgaatgtcagaattaaaattagcaaagaagaacaattattacatgttgagtaggtaagaaactagcttctccagaagcaaaatccacaacctattaaaatttttttaccaagatgcctaagtataatagcaggataataatccttttgcgtatgtaccgtcgttagtagctaataatgatttttactattagggtaaaatgaaaaaaataataaacaactttcgagggatttact

SEQ ID NO: 293 - DNA, 7775 bp, Arabidopsis thaliana landsberg
  unsure (1)..(7775): unsure at all n locations
cttccgaacactttgtcttcacctcttctcttccgtgtgctcaacttgtctggttgagtacggaatttgagtagactatgaagacgtgatcgagtgtccggtcgagtgatggtaatggtggtgagctcgaccagggggtcgagtaacgtggtagagtgaatggtcgagtgtggtcaggtagtgtggcgaagtgatactcgaccagggggtcgagtaatgtcatcgagtggcctgagctgaggttactcgacctggtggtcgagtggatgggaagaatggctccaaagtcactcgacctgggggtcgagtatgtcttctggttctggctcgtttcttccaatttactcgcaaacagctccaaatcacctgaaaacaactcagaaatgcaatatgtatgcgaagctatcctaatcatacacagtatgcaagaatgatgagaaatgatataaaacagtgatgaatgatacgaaactggactcaaaacgatgatgaatggacaatgaaaacatgcaaattatagacatatcaactcccccaaacttagtctttgcttgccctcaagcaaataagaagacatagttgaaggagaggtttgaaggcggggactcagaaccaaagcatatgatagagcaaataaaatcaatgtccaagttggtagttctaagatgcgatatgattgaattttactcaaaaacgttagccatgccttgttatcaatcaatccgtctcttatactcgacctacacatgctttcaaatctaccaatccctttaacattcattagttctggaacgtgaatcaagcaatgcatcatcaatgaactcatttggctaaggtgaaggtcaagagacaaagatggtccctcacagaataggcttaaggaacaggggatctctcaagaatgattgagctttagtagaatgctaaaggtaagtcccaagttatgcatacagagataagatcccatctacccagagtataacaatgaagctctaatggtaatcccaactccagtcccaatacaagaacttaactctaccatttgcactcatgaatctttcaaactctttttcatatcatccttttcttttctcttaactctaggagaagctttctcaacactctgatacatctagcggatttggatttctttaacaagaacctcattcttttctttaacattcccaaaccctttactagattttttttttctaacttctttagcttacttcccctagaattctttccctttccttatcaacaatggattcacccttttctttaacacatcccaacccatgatataagcgcccacctagtcctatccagtccgaaaaacacaaactagcactacatgagacactatctctgtcgttccgaacctaacactttctaccaagctcaatggaaataagacctcacaaacactgacaagtgatattgggcttgaaagaaagtttaggtttgggttcgggttaactgctctaataaggagagttagctacttggattaacaagagtggttaaaatgagtaaaaaaatccaagtattttagggtatccatgagttcaaattcgatgccaagacatgataattctaaatcagattcaagttcaaattgatagagcttaaaattgaagattttaacctagaaatttaagagattgaatccaattagatttgagattaagcaaattgtgtttgggtatgcaaattggaagtttatgcagactgtctggttgaatagatctataaataggtaagaaatggattacaacaactgaatcatagtcaaaggtagttttgaatccaaaaccattcgatttgagttcttgtcgagaaatacaactagtagaactgagtagaattgtacatgattcaatttaaaatatatatgtagtattactcataatattagttttatccagatgtatgtagtatgacttagttacactagtattaaccatttacatgtagtattacttaggtacaatagtattttacccatttacatgtagtattattcgttatactagtattatacagatatgtgtagtatgactagttatactttgtgttacacataattgtagtataactagtataactgtcagagtttttgtaggttacaatgaaagagaacgtgatcatatattttaaattccaaggtcgcatgtatagcttgatgatgaatatataaagggggaaaataactctctccgtgttagaaggtaggatttgtacgaagcttggattagatgaaaatgaggttaaattgcaaatgaagtacaatgcaatgatgttgggaccaactcaagagatttacattagttatgatgaggatgactttgtttatgtaacatccacaaaaaataatcggagaagtgttttggttgtggaggagatctctaaaccgcccgagccnnnnnnnnnnnnnnnnnnnnnnnnnnnnnnnnnnnnnnnnnnnnnnnnnaagaactctacggagttgaattcagaggaggatgaaatgagagtggatgatggtgcactcatcgtcttattagaagaggaacaaggaactcaacatcaacttgaggcaatagtggaggatcacgggactcaacatcaacttgaggcaatagtggaggatcacggaactcaacatcaacttgaggcaatagtggaggatcacgagactcaagaagatgaaacacgctatgatgagtctatggataattctgataggggggaacagtatgttgagtcgccacctgctgtagaaccgggtatgtttaaaaaagaattggaagacggannnnnnnnnnnnnnnnnnnnnnnnnnnnnnnnnnnnnnnnnnnngcacgaggtggtggatagagctgcatttgctaacagttttggttatgtgattaagaagtcggataaggagcgctatgtcctaaagtgtgccaaagagagctgttcttggcgtttacgagcgtccaatatcagtaatactgatatattctcgattagaaggtacaataagatgcatagttgcactcggctaagtaaaggtagtagtaggctcaggaaaagaaaaggcaacccccaattagtcacagctctccttcatgatcattttccgggacagttggaaactccggttccaagtatcatcatggagctagttcagacgaaattaggtgtgaaagtatcatactcgacagcgctaagggggaaatatcatgcgatttatgatttaaaaggtagtccggaagaaagctacaaggatatcaattgttatttatacatgttgaagaaggtaaataatggtacagttacttatcttaaattggatgagaatgataaatttcagtacgtattcgtagctttgtgagctagcattgaaggttttagagtgatgaagaaagttttaattgtggatacaacacatttgaagaacggatatggcggagtgctagtgtttgcctcggctcaagatcctaaccgtcaccattacatcatagcgtttgtcgtactcgacggtgagaatgatgctagttggcagtgttttttcgagaagctaaaaacggttgtacccaatacttctgaattggtcttcagaaccgacataaatgcaagcctcataaaggccatacggaacgtgtataccgcggctcatcacgggtattgtaattggcatttgtcccaaaatgtaaaagaccatgctactaacaccaacagagacgtactcgcatggaagttccagaagttaagtcggaactacaccgttgctaacttcaaccgggcgtatgataagtttaagttgagataccccaaggcgactaagtatttggaggatacaaccgtggaagaaaaatgggcaagatgttttttccccgggaaagatacaacttagacacaagcaattgtgtggaatcttcgaacaatgtgtttcgcaacgtaaggaagtactcgttaatgccaatgcttgatgcaatcatcaaaaaaatctccgtttggtttaatgaacatcagatggaagccgcgtctggatccttagaaaataagatggtgcctttgttggagaattatttatatgatttgtgggttaaagctgagaagctaaaagtgatggagctaaattcattcgagcgtgaatatgtcgacacatgcgagagagtaatagaatatatggtgagcttgcttttgaaaacttgcagttgtaaggtgttcgatatccaaaagtatccttgttttcacgcatttgcctgctttcattagcattatggatgatgaagatcggagaagaggtttggagttacatgatttggttataaaatattattgggcgaagttgtgggcattggcgtattttaagactatttatttagttccggataggtcgcagtggaaagtaccagatgaaataaaagcgttgaagatagttccgctgtctaaaaaaccgaagaagaaaggaaaaaaatgctaaggtttccatcaaccggggaaaagagtccaaaacgacaaaggacgcaaaacaaaaggcgtccaaggcaatcgttttaatggttattatttgggaatacgcctatctgagtattttactttgtttctgcagttatttgtttgtttgcttgtatggacatactatataatactgtattttcctttctgtaatattatgtttgtttctgttgttttttggtaatactggttaaaaccagtaataccatatctgtttcgagaaaaatgtagtttaatccccaactttcaaaaaatggccaatcaatacgacaactaagtaggaggccatttaaaacatcaacttacagttgactaacaaataaaccatgaactttgcgttgacgaggccacattatacgcgtcgttaagtcgattaacagacccaataaacgacgttttctcccgttagtatctctctgttagtcaagaaacggtgacgtttataggttaatagaaacccgattgtttgtcaaaaaaccccaaatccaatacttcaaatccctaattctcttcttcttctccaaattctgtgctttttctccaaattctccatcaaaagctgaagaaatgagctgcaaatctggaaattcttatcctagtattctagacggaggtcgttggggacgtggcttagcttcgaagtgtcactgtggtttggaggtcgtcatctatacttcagcttcaaagtcgaatcctggaaggccattctttcggtgtccaacgaaacaagatgtaagttgaattgagtttgtgtctttttggtttggttggtaattgatttccgattgaaaacaggatcatttgtttaaatgggttgaagatggcgtgtacgaagaggttgtagaggctttaccaaaaatctccagcattgacagtgagataatgaaggccaaatgtgaggttgcaatcgagattgagcagttgaagactatgataaaagaagtaaaggaagaagctatgtgtagcgaaagggaaatcaagaattggaaacggatgatcaaatgttgcttggtgtgtcttggttttattgtcattgtgattgtggttggtatgataatgttcggtaataccaaagaacaaaagcttgttcttggttactagtgcaacgttttgttctttgtctttgtgtttctattttactatcgtaatgaaaatgagtgtgatgtttttctagatcatgtgtttgcatacaagaagaaccaaacaacaaaaacataggttatcttcttcaaagtttaacaagaagcaaacaacaagagaagtgcttaagttcaaacaaccaaaaaaccctgaggcaaagcttaagtttttgacaaaaaaaaacgcaaatgtcacataaatactacaattagagctgagatgaacaattaaaccatgattctaacccagcaagtctttgttcttgggcttgcgcttgtggttgagattgtgcttgtgcttctgatctaacatgagctcttgatctttgtctttgtgatgccctttgtctctgcggtccatgagctcttgatccttgtgacccatgtccttgtgatccatgaccagacgctgcttgttcttgtgatccatgtctttgtgaaccatgtccttgtgatccatgacccgaagctgcttgttcttgtgatccatgacctgaaactgcttgttcttgataagattgtgctccttgtggttcctaattcaatgaagccttgatgagaatctgaaacgtacataattcaatgaagctcttgttgagaatctgaaacgtaaaagaagtgtaacctgatttagacttggtcgacctcttggtctcggtggtggtaacaggacagtagcattcttacatgagctcttgttgtgcccttcttgcttacaattagagcatgtcattattcgattagcccgtgacatcttgttcttgtttgaagaagaggctgcttcatatcttcctttctttctagcatagttactttgtcttccaggattgcctcttctccaaggtggcggtaagacaggcaacctactcattctaggccacaatggcattccttggacaggcctaataccatctctgtatgtctctctccatcttacctttgtgtagtagtcactaacatagtcttcaaccttttcttttctgcctattatcacacatgctgcatgaacacatgggattccaaccatctcccatttcctgcaaccacaagtctttttatccatatcaacaaagtatccaacatcattcacatatatctcatgcaaattgtttctcgccaaatgtctttcgcaacctgcagaaccagcaatcattttttcaatctcagcatgagctctcggagtaaatcttgactttaacctctcagctatgataaacctctttgcagttctgaccatgcattgcctccggatgtcttctagcatatccaataacggctttcttctggcttgtctaatagtcctattaaaagactcactcaaattgtttaggttgtcattacagcatgtacctattcgaaagaaggctctggaccaggtcataggactagtaagttggagagacgtgtaggcttggatattgtacctttttaagtctgcctggtaattattgaactcttctacggtgtagctgcgtgctatcttccaaaatagacgttgtagctcaatgtcgtggctgtcccttttccaattatccatgatgtgcttagaacattgacgatgctccgcttgtggcagtacattatggattgctttgacaagaccctgaaaaatcacagaaatatgaatccatcattaaaagctgaaactaaaccaagaataaaagctgaaagtgatccatgaataaaagctgaaactaaagaaagcatgaataaagctgaaactaaagcatgaataaaagctgaaactaaagcatgaataaaagctgaaactaaacaaagaatacaaactgaagcataacacgaataaagctaaaactaaagcttgattgcttaccgattgcttatctgaaattaaagctagattcaccatttcacaaagccctaaactttcagacagtttcttcaaaaaccagtcccaattatttatcgttttctatttctaccactgcccaagctagaggaacaatcctattatcaccatctcttccaactgcagcaagaaggtgaccttttatgtcccatttcaaaaacgctccatctatgcctatgactggtctacaatgttgtttccatgaaaccttttgagaattaaaacatatatacaagcgaaaaaacctccgcttgcttccaataaacgttcccgca

SEQ ID NO: 294 - DNA, 7057 bp, Arabidopsis thaliana landsberg
agggattgaagaatcaaagtttgcttaaaagcaatactttcagtcacatttcagatcgaagccaagagaagatttttcaggcagacaagacgcacgtttgatcattcgaactccaatgagcgcttaaaagctttaataatcctcagagctgaagatccggagaaaaaaagacgtggaagtggatccaaggagaaataaaacttttgttatgcgaagaagaaaatgcgctttaaacccacccctcaaaggaagaagaagacacgaaaattgaagtttcaatggatggtaatgatttcgaacatattcactggtcaattaaaataaaaattcctaaatttaaaaattagggttctttcttttcaatattttttttttttttttttagagaaaacaagagtcatcattaaacaagtagtcaccctcagctcttatacaaacctctataaaaacaggaaagcttcatggttttaaagcaagcagaaatggacctcccatttctcatctattatttgcagatgattctttgctgttatgtagaacatctgaagaggaatgttcatctctactcactattctccaacagtatgaacaagcttcaggtcagtccatcaactttcaaaagtccgctatcacttatggtaaaggagttagtgaagaggagcaaaaaaaacttggacacattctcggaatccacaaagtgggtggttttggaagatacttgggacttcctgagtttattgggcgaaacagaactaatgcgttttcttatcttgctcagcgaataaatcaaaaaatggataattggtacaatgcattcctttcacctgcaggtagagaggtcctccttaaagcggtggtaactgccattccctcctacagcatgtcttgtttcttgttgccatcccggttacttaatcgaattactagtgctatgagaagattttggtggtctagcactaaggatagacataaaattccatgggtggcatggaagaagataacaaatccaaaaaaaataggagtattgctgctgtgtagatgcttcatggctttcaatgactgactgtgcaggaataggttgggtactctatgataaacaggaaaacattattcttaaaggaatggcatccataccaccaaccagcacaccagaagaagctgaagcagaggcactcagatcagcactctttcaagttggacgcctaggctatacaaatgtactgttctgtggtgatgcatcaaacttatatcacaatatcgccgcattggagtccaatgagagtctgccaaaaggaaccaccacaaacaatgatctagcatcatatattcaggatatcaagaaccttgctaagacttatatttcttctcagttctgtaaaattcctcgtactcttaacaatgtagctgataagctagcaaaaatagcaaggtctaagaagatgacttatgtaatatcctggactgatgtaagttgaatgtttttaagtaatgcaaaggtgacgacaaaaaaacaaaaagaaaacaagtagtcacccaaaatcacagcctaacttacagattaaatcaagaatctttcaacatgcgacatcgcgacacaatcttcctgaactcatccaagcttagctttccgtccttgtccatgtcaaagcaacgaatcatgtcttgtaattcctcttctgtccatgtgaagtcatgcacagttgccattttcgccacatctctcagagtaatgaacccttttccaccttcatcaaactgacagaagtacatgaccaattcatcctgtgtcatctgcgtcttgctcatcaattccggtcttttcttcttcatagttgcagcctctttatcgcttcctgcaacagagccctgtagagaaagcgctattgccttgtctaagtcatcatcatcctcaccaagggaaactgatgtattcaaaatcttcctagatgagacttttctcttggatgcagaggacttgttctttcttttacacagaaactcctcgtcttcgtctatttcttctacttcgtcatcgtcctcatcaccatcaccgtcggcgattacgggtgtataatcatcgtcttcttcaccggaattccgcttaactctacgttttttcgaaactggagatggtgacagaagagccttggcggctttagagatgccgagtgcatccaatctcgctttgttctcagcgatccttgacaacctctgcttctcatatttcgagatcgtcccctttgttggctccgattcgtttccggaactcgagctcgaactctctcgttcacttcctgagctctctccctccgattctcccctcgccattgttagctaattagggatttgtttctccagagttgggatgtgttttcttttcaatattcttatgtcgctgtcctctttccattatatgataagtgtgtatgtatataatgcataaattgtgttctactgaattttttttaatcatattgctaaaatctaaagattcggattccaattgcttcctttaaaattctacgttattagacgaaacaagaattgattttaagaattccaattgattcttatgtcttgacagaggtgaaacaagaattgattttaagaattcaaatgcgtggtacatgtttttgtttgtccgtatttataccattcatccatgaagcaggcaggtaaccaaaaaagaacttgatagctagtcttatataagcatatgaactacactctttgaccgtagatagatcgaatgtagagagaccaacatgtatgagttcttggaatacaaaataatatgtattcttctaaagcgaactcttgtaaagtagctaaaaggagtcaaaagaatcacaagtcattatataagatatacccagaggaagtacggacatcacaaaaacatcgattgagccatgaccttaaaggaaattgtcgagttgggtttgcaaatcctgaatggagatcatattaatattggcttgttcttcagctgagtactcagctttgagcaaagactccacttgcgtatgagcttccactatatttgtcctgaatataaaacatatcatcggatgatgatgcacatttagtattcaaagtaattagcgcaagagatttgggttcaaacataagggattagaacaagtaaccgcacatatacaaaccagccaaagataatatacatggttgataaagttgcagagaaatggacttacttgatcggcttgaaaagtatggtccttgttgatgggttttgcaaatagagtttcatttttgctaaaatcggaagcaactcttgttgtatcgcagcgtatacctggttgaaatacaaatcagtatatccatatgtgtggaggagagatgtggttttgcattctgagttatgaaggtaattaaagcttaaatatgcaaaaaaccattgcgggttatatatatgatctacactgattctctcttttcatatcgaatcactcactgtctgagcataacctaaggaaccacaaatgcatgttcaaggtatcatttagcacttagaggctaacgaactgcctatgaacagagttttcaatatcatgcttctgtagaggaagctgcatagggaacaagaaatagctgccatctctatttctgagatataccttgaagaaaaagaaaaaacttaaacagtacattatctatctcataccttttgaacaagttcaaccaccttatctggtgtcgcgaaagcttgttccttcagcggcttagccatgacagaatcaactttgcgattctgagttccggaggaaagagcaacttttatggctgtgacctgcatatacaagtataccatgtataaacatagcaaaactgttacactattccattaggagaggaaattctttagataagacagatcctctccctcattatcagtacattgtagatggatgtgtcttcgacacaacttaaaaccagacagtgcaaaagatgctgacttaaactttttcgaggacgcctagaatcttaacaaaactgtgaaaaacatttttctcagataaaaaggaaaggagcaacccaccttcgtcacaaatgaaagcataggatccacaactagcttagttactgacatgatgaactcctcacaagttgtcttaagacatttttccagttcctgcgaaaataaaggtctatgcatcattcccattcatatcaagtaacgcaaggagccagatacaaccaacaacttgccatattacttgagcctactagcatggcaaaatcataacccagaccgaaacaaaatttataatctttcaccaatactagtacagaagtctcacagaaaattgtaaaatgaaatcaacacatcttagtggcgagcttttatgtaaagatgaagcaaatctgcaaatgatagtggaaggaagagaaaaaatccctaacctttttggcatctatttgactctccaaaactcgaggtgacagggtccttgctagagaggttgacctagaccagtcaaaaagtgacgcttgacctctaagtatcctcctcaagtgttcctaaccacatttttgacatggattattggagaaagttagcaaagtcatcaacaaagaaagaaactgaagaaggaaaaacatctgaaatctgtataaagataagaacctctcaaaaagcgataaagaaaaaattagatctatcatacgaagtagacttgaatgttgaggaactaaccagtaaatgagagaaatcaagctccttatgggttactgaaaattctatgtcaaaaggggcaatctggaaaataaaaaaattgtttaaaatcatcacttaatagcaaaagaagcaaacttaagatagatcagccgtaacctgttctctcaagataaggagatgcttgataaggaaaagctggccatccattgtagttgatcgcttaatgataagcttgctggctttctgttgcatatttgacaaaataatgtagacatctcaactatggtaacgcggagtagatgtaaaagcttggtaattaaaccaaaacaacaagaaatggcacatcttcgtgtaatcaaaatttgataatgccaatgaaaataaggacaagtgaaacggaaacaaatatcaaggtgaggaaaatctggttttctagcttgcttacttgaattgacagtgagcaaacttctacagcttcctgtggagcagaaaagaagttttgttacacaaattttcttaaaatgaattggtatcttttgacagaatggaagcaataaagttactgatagtcttgcctgtgctaatccagtgaagacggcctgctccaagcaacgatataatttagatagacaagagagagtcttttcaagaggtggataccaagtcttaaacacatcagcgttttcatcatcctgcaccttagaatataagtatacagctaaagattactaaacccatagaactaatttgagaatgtcattctaccctgagatcagtttcagatgttgtattaggagatccttccagctttgcaggataatccagatcttcatcagagggggtataatttgcaatctgcagaagtgagaaggagattcaaacagagcaactcaaggaaagcaaagtcctttaagactaaacagggtgacatagccgaaactaacaaatctctccactaaaaagtcgtgcagtatcacagttataacccaatttcatcatattaatagtagggtgactcgtcttactggtgacaacatacaaagttcacagtttctacataatagcagatgacaaggccacacatatggaagtaaaggccaaggtaaaggacttgtgggaaactattccagtatttgctggtaagttaaatacggtacctcatctctaatatatgttctggcacggaaagtcaatctctcatttacatcggccaaaattctttgtaatgtaggcctcagtccggccaggggttcactctgtctagctgactggtctcccaggacttcaactttaaggatatgaacgagctcacatagaagatcaatatttgcttcgtgaattaattttgggcgtaaaatgtcatacaagtacgtagacctgttcaggaacaagcaaatgtgatcaattggatgcaccgcataagatatatctaccgaaaacaatctggatcagttacacttactcatatttctgaatcacacacttttaagaagtattattcagattcaaagaaaattgactacagtgtagtggattcaccgactacagcaacaatagttcatcataagataataacaaacggaaaaaaaatcggaagatactagccataaaagttcatatatgctccaaattcaaaacatcacttatgcttactcatttctctaaacctctaaacttttaagaattcataatcagattcaaagaacatatacagcacggcagagaaaagcttacaaaggatccactaaaggtgccagactcgaaacttcttctgacgatgctggaaagaaatgagtaaacagttgatgctccatatgacaaacctgaaattcataatgaaggttaatacatgtggtgcagaaatttcatgttctgcaaaaccaaatccgttatcctcagttgctaaagctgataatccagccattgtctctctcaaacagaccttcatcttacctttgaaatctcacagattaacaactatattaatatcctcattttcctatatgtttctatcacttatgatggaaggaatgtccttttctactaaactggtatagctcctattaaccctcatgagtaaagtaacatattatcctttatgttccttcatatacctgcatcagatatgcacaacccgatctagttaaagatggcagtgcctctttcttggcgaaatcagatactcgttggtgcactatgcctttgacctgataatgtgaaatgagtaataaacaggcgattctagtaacttgcagatagaaactaaaccaaattgtattccagaaaatgaactcacaagcgagagccgttgttcacagtatagtctgtggcattctgcaaggatttggacatattcct

SEQ ID NO: 295 - DNA, 592 bp, Arabidopsis thaliana landsberg
gaaactcgaaccgaatctaccatggctagttgattcaggaggatgtgctgtttttgattttcttattctgcttcagtttttctacttgcactggcgcaaagtcgaggcagattccgtcaagaagaagcatgaaaccggtgaagaagctgtctaacaaggcctcgaacaagtagagttttgatctcaccaccagaaagattcatgtaacttagggaggcttcatcaatcatgatataggtggagttgtaatgactactataattttgcaattgctttatttcgttacttttaaattaacaggattgagttttgtgtgctgatgaaactaccttttgggtttctactttctatttttgagttttaataatttgaaggtgtttatggctctgaacctatgcattcattgtcaacaaatttatatctttatcaattgcattgtgacatataacaaatgtctaaaaagctaaaagtatttgtccaaattagaacaaagagatgagattgcatatattagtccataaagttgagtcgatgaagaagaaaaaggagagaatagcctttaaacccaatcttctattctttaaggactaac

SEQ ID NO: 296 - DNA, 3966 bp, Arabidopsis thaliana landsberg
  unsure (1)..(3966): unsure at all n locations
aattgttgcaaatcaggactcggaacttgaacttcttgaatataaaactgcttttcttcatggtgtgttaggggaaaaaatatacatgactcactcaaatggtttccaagctcctaaaaagggagatcacctcnnnnnnnnnnnnnnnnnnnnnnnnnnnnnnnnnnnnnctccaggaagtggtacaagaggttcgacaactatatgatggagctgggctacaacaggagtctgtatgattgctgtgtttacattagcgagctgaaagatgaatcctacgtctatctggtgctctatgtagatgacatgcttatagctgccaaacagatgtgtgatatttagagattgaaagatctgctgagtgctgagtttgagatgaaggatctgggagcagcaaagaagattctcgggatggagattctcagagacagaaatcagaataagcttttcttgtcacagaaaggctacattcagaaggtgttgaacaagtttggtatgttatcagcaaaacctgttgacactccatttgctgctaatatccatctcaccatgtttgctcctcagtctgaagaggacaaagagtatatgtctcgggttccctacgctaatgttgtgggaagcttgatgtatgctatggtctgtacaagaccagatcttgcacatgcagtcagtgttgtcagcaggttcatgggacaaccaggaaaagaacattggctggctgtgaagaggattttcaggtacctgaaaggtacgtctgatgtttgcctcatatatggaggtgaggctcctagcttgattgcaggttattctgattttgattatgcaggagatgtagacagcagaagatcaatgactggttatgtgtttgccctgggtaattctgtgattagcgggaaagcaactatgcagccaactgcgacgctgtcaaccacagaagcagagtatatggctttgacagaagctactaaagagggtatttggctgaaaggattggtcagtgatatgggtttgcatcaagatcaggctacagtgtattgtgacagtttgagtgcgatctgtttaaccaaagatcaggtccatcatgagaggaccaagcatattgatgtgagatatcattttctgagaaatgagaagaggattcaagtgaagaaggtaggcactactgataaccctgcaaatatgttcactaagccggttccttagagcaagtttaaacattgtttagacttgctgaatgtctcaagctgttaatcgccctgaagggcaaacaggcccctaacggggcagcaagtccctggagggacatctggcctctgaataggcataaggctccttatgaagcatttggccctagtggagcgttctggtttctgatgaagcattttggtcttggtaggcgttctggcttctgaataagtattctggctcagtgaagcatctgacttgacgaaggagttggcttgcaggggcatctggtccctgatggaatatctgaggcaaatgagaattttggtacatatctctgctacttttggttggtacgtctagcattgggataatgcatatagtacaaccgtttggtagcttaatctagtacatctatctgagggcgaagtctggtacaacactttgagcagtgtgtcaggtacagttgtttggaggatttgttagatatgacttgaattggattgggcccttaactttaggcccaattagtttagggttaattagggcttcttttgtataagtactcttcttaacctagcctccctgtattttgtactctgttttcttaagtaataaatctatgtctttgcccgtggacgtagccaacaaaaagtgttggtgaaccacgttaaatttgtgtcgtgttttttacacttctggtgtcttgcttacatctgttataacgtctccaaactgggattatggtttcatgactgcatcatcggacctataccactgcaagagaatcaaccaagagttaagaaacaataaattatgaaaacagagaactataaaacaaatgtagtcaatgtacttttattagagttagactcatcggatgagcttagttgtctgcggtcaaaatcgatatcatcacctccttcttcaagacaatcctttttaagaagaggttcgcctttctgtttaggagatctaaaactgagttttctcttcttccaagataacattctcttcttagacatttgtccttttgctgctccaagcttactacatcattggaaacctcatcaccgcaatgtcctgtctctgctaatggactgcggtgactgtaatatatcaaatcctcgtcttcggggtttgtaacagtatgaaatgagcctctagcccaattagcagaacgaagtgttttgtaattaactggatcagctaagctactttcatcctctctgttctcttctgattcatctgcagcatcaccttcatctaaagaatctgtatcaaaaggataactagagtcagaatcaagatttctctcgggacttttgccgtcacttccgcttccactgcttccatctttctcactctccttttccgatgcctgtgtactagacatgcaattgttgaaggtcttcatctttctcaggcctactttaacaacagactcagctttctcagcctctgcggaaagaggagaccatagaacaggaagagcagacctctgtctttcaggcaacgattctttaggagaaaactgaagggatatctgaacacaaaacagacaccacaatggttagagaaatgaaacaatgataaattcagagaactagctaacaagcaaatcaatgacgcacatgaacatgtggacttctcacagatgatgagtcacaatccttgagaggcactttgacttgaacatcatcttctttcatcaatgaaaagtattctgcaatgttcagtgatgcctttccaaagctacgaactttctccttcgatccttgattcagtccctacacaacaaaaaaaaatccacaaaatcttaacatatgttccaaaaatctctagagtgaatcaaaatctaaataacagaggacctaagcaaaggtacaacctttaaacagaccctgatcattcagacatcaaagtcaacgaaattaaaagaagataggagatagagagagagactaacactgaagacggttaaagaaacgaaccaaggaagaaacgatccttccttgtaaacagagaagaataaatgtttaagtaaaaaccaagtagatagcagagtttgttccaagtcaaacaacatacctcttgatatggattggaaattttaggctgagtgtttgttgaagcagaagtgttagcagcttctgcaagaaacaatattaacaacaaatttagctaatatcagaatgatagctttcttcgatagcagattaatcacaacacagctgaacacataccaggttctgcatacagagaaatccgatcacgcaagattgaaagttcaggtgagaaatcaccagactccagaagttttaagaacttcatagctgttgcaagaagtccttgactagccaatatctcagcataactttcaaagagtttacgtagagacgcactgactctcttgttgcaagttgtcaaagcaaggacaagagtcttctccataagatcctatttcacagaaaaataaatgcaaaaaaaagtttaagcagagaagtacaatttaatatttatgcaagatatagaattctatactcacttgaacacactcagcataagatttcccagcactttgtttttcaaggctcattgaccaaatgtctactgttttgtcgacattgcctgcgcaaatgtaacacagagttgcagccaaagtaaaaccagcagccatcaaatttgaggcaagagcatcgcagaggcttatccattcatctccttctgcaactttttgtcaataaataagaaaaaaccattccattagtgagttattag

SEQ ID NO: 297 - DNA, 5803 bp, Arabidopsis thaliana landsberg
agatgttgaagaaggatgggagctggtagagaacttggctcagttggatggcaactataatgaagattatgacagaagcatccgcaccaattctgattctgatgagaagcaccgtagggaaatgaaagctatgaatgacaaactgaacaagctactccttgtgcaacagaagcacattcattttctgggtgatgatgagacgttccaagttcaggatggggagactctgcagtcagaagaggtcaccaaggaagttaccagggtcctttgttccatacaaccaaggtcaggggtatgttcttaagcagcagtaccagggcaactatcagcagcaacttccaccacctgagtttgcacagaagcactaacaacctgtttcaacaactccagattcagacttgaagaacatgttacatcagattctccaaggacaagcaacaggagcaatggatttgtccaaaaggatggcagaaattcataaaaaggttgactgcagttacaatgatatcaatatcaaggttgaagcactgacatctaagatcagatacatagaaggccaaaatgggtcgaccgcagctacctttgtctagggataacttgattgcgcttgtcaaccattcgattaggctaagataccactctattcgattaccccatccttaggaaattctcgtttgtctgattactctgttttatcgttatcgcttaatcgttctcattgcctgtttcttcgttttgcaattactcgaccaacttaatcgaccacacccagtgtctggcaacagactgtgcagtcgagtacaattgtcttgtttcctgtctgttactcgaccagtatactcgaccacacccagtgtctggcaacagactgtgcagtcgagtatagctgtttcatatcctgtctgttactcgacctgttactcgaccacatcctacttctggcatcagcctgttgtggtttagtgattttagtaattctgttattgcttatattttctgcatgtttgcttaggactgttagaaaccccaaaactgtttttgcttggcttgacttaatgacttctgatcacatctcatctgcttgcatcacacccatttggattgacacctaaaatactacaacgacatgattggtgttttaggataattgactaaaaacctattatcaaactgcttctaagcaattgtttgttggttttagcctcttatgggacaaaatgggtataagtgttgtataaacactcctaatctatctctatctcttttaattagtcaaatgcattagattgtgacacattttgaccatagaaacactaacaaagctattgactgcttctaagcaatattttgttggttttagcatcttttgggagaaaatggatataaatgttgtctaaacattcctactacatctctaactcttatgattagtcaaatgtattagattgtgagacatttttaccatagaaatactaacaaagttatttactgcttctaagcaattttttattggttttagcttcttttagacaaaatgggtgttagtgttgtctaaacactcctaatctatatctatctcttataattagccaaatgcattagattgtgacacattttgaccatagaaacactcacaaagctattgattgcttcgaagcaatatttttttggttttagcatcttttgggagaaaatgggtataagtgttgtctaaacactgctactttatctctaactcttatgattagtcaaatgaattggattgtgacacattttgaccatagaaacattaaaaaagcgtttacagcttctaatcagtttttagttggttttagcctcttttgggtgaaaatggatataaatgttgtctaaacactgctactctattgatataacccgattttcaccgattttatctatgttttaggtataggattttgtgtctttatgttatttctcgagtctttttagtgtcttttcaggtattctatgcaatgggacaacaatggagataaggagacattttggagcaaaagctaaggaaaagaaagctaaggcgatttttggactcaagaatcaagaggagtgtcgatcgacacactcctggtgtcgatcgacactagtttcggcccagcaaagtccatgacgttttcaagtttacagaagaggaaatttgccccaaaagaattccctatttgcattattactccctagacgttttatagggtttatatacattgttctacaccctagttttctcttatcaagctttttgcaaaaccctattgtgagagacataagctattcatccattgttcttgagagattcattccagttcttaatacagagaagagatcccttctttctcattttctatttgctgtgtttatgctttcatactctattatggtgtttgcttcaatcaatatgtctgagtaatctgcttgttaggaatagggtttctcattagggattcatatggtttagtagattgccccctttgctaggttatctatagatttcttcatctttaattatgcttaatgctggatctagagtaattaactagatcttgaatcgagacaattgatatgcccgccataggtatctgtagattgatttattatttgatgagtctggtttataggtgtgtaataagaatcggcctatctactaagatgaacaattgaactcgctaagaatgcatatttaggttgatagtttctcggcttctccggttattattagctatagatatagggagtttcgcggtacgcccaccggttattcgagtttgagtttaagaatggttcgataacaacctagctttcattagatctactgaccaatagtttccagagaataccctgttcctagctctttattaaatcgttcacaacacaatcatcccgctgtctttttactttgtttacttactattttcactattacccggctagcttaatctcgacatttaactcattgtttgaacaaaagaactttgagaattcgatcctaaaatactgcaattgatctcttatttgagagagtagttctaggtaatttgaaccatatcacacgcgtgtaacacccccgaaccgtcctaaaactatggacaaattcggaagcgtcacgttagacccccgtagctagtcaaccaagtgcccggaacacgaccattcacatagtcgaccaaccatgagaatcttttcctcgttttcatggcctaaggcttttcaacccgttccgagaacacgagttgtgttagtcttggactagactaataatatcattggttcaaccatctatttcattaaagctttgagtctttacattatatatatacgaataaaacgttaccaaaactcgtatatagggcggatccttattaattttcataggaaatcatatataataaacattatcagtatttgcaagagctgtaaaatctaagctggttggcctaatgatcatcgcgccgtttatagattccccgctaaggtttcgtgtaaacaaaaaggtagcatcatgagtaacctagtattactcaattagaccgggatctctagggtttcacctataccgctatcggaacacctaactataccaagcaatttacaatcaacaagcaagactcaatcgacaatgttgtcagaacttgcgtagcacaacgtttatactacactttaacattatgcaatcacaacaaaagacaatgcatcacacaataattatcacttagtatgatttactaacctcctaggcaattataagtaaataaaattaaacacctaaacatgtgctacttcacatgtccgagacttactggtgatccacgcatcctcgggaaacggccatacctaccccctcgaatccattggttccttctcttactcggttatctagcaatccacaacctaactctattaagtactaatcggcggttactaaaagcaactaaggtcggaaaacttaccgacttccaaattgggtcttttcgcgggttctcctcgggtttactagtggccgaaggtacttatagtgggtttttattcgaggtgtaagttctaaggatcaggaatgagggctatttataggttttcggggaagttggttagctaaggtgcttggggagacttgttacggtcgtcaccaccaagccacgctcgataggcgacccacggactggacacgctgtgggagcgacacccagccgtgagtcaccggagtctcgccactaatcgcatcctgcccggcgacacatggcgctgagtcaccacccaagacactcagcacatcccgctagtcgacagccgtccatgggctactcaaggggcgacaaccggccctgattcatcacccacctgtcgtccaaccggatcctgctcggtggccgctccgcagccacagaattttggcagatcgacatggtcgattctcagccacaaaacaccaagcagcttacccacctgctcgcagccttaagcaggtcgatgacatggtccatggtccagcacacgcccatctcggccaaacttaggccagcgcgagtcgctcacactgcctactgcgggcacactgcaggcgtaccacgggcatactacgggcacactgcgggcacactacgggcgaactggggtatactggggcaaactgcgggcgcatcacgggcaaagtcatactcaaggtgagggtcattacaacgcgattgatcagttaattgtcgagtgtgctcaagactatggtccgaatggggaagaaggaggagaaaatgggaacgatgggggtgattcctagtcggactcatttgaatccttaacgccagaacctaagagtccgagtgtgatcaacatctccttggacagtttgaaagctatcttgataatattgaaccctagcgaggcggattcatgctgggaggatgaaatgtttaaagggaatgaaccgagtgatgatgaaggaaatgggaggtgggatccgatgctacttgaaaaggaactgaatcagaagtctttgatgaatcgtctaagacttgataaagaaaggtcaaaaggaaagatggttgataaggtgggagaagatgagaggcagaagggaaagagagcgaaagaattggaaatgggatcggagaaggctaaggaccagcgaatcgttggagtaaacccgcatccacttgggatcaaatatgggattaactccaaggttaagcccagaatatgggcaacagcgaggaagtcagttgggaagacgttggccacaccggctaagcgtacttgcgagatatgtggtcataccgatcattcggccgaagagtgcttgtatccaccatcgactatgtcctctatggatgacaataccaactgctattgttgcggaggagtggggcatgtgtccatgtactgcccgtatgttgtgcctatatgcggacgaaggatcttcgagaggagtggggccattaaagactgcggcggcggaggagaagtgtttgaatgaagggatgtcctcttttttgtgggtaaggtgtaagtgtcccaagtgtaggaacccttgatcgatggtccgtaagatcatctaggaaagaatatagttaacttttcggctaagtcatagcgaattttgtgtgtaaatatgctaaggcttagaacttgttgaataatatataagactaagtctaaaatccgatacttatgacttgtatgaacttttgaatgcataataagttaagtatttgcttgtttgtgtgtcgtcgaccattatatgagtgagaatcacttgtataagaacggatgattgtgttgaagt

SEQ ID NO: 298 - DNA, 1410 bp, Arabidopsis thaliana landsberg
  unsure (1)..(1410): unsure at all n locations
tatgcacactcgttttagtttcttacatacccaaaccattgttcatctcattgataaatatgcaaacatatgcatgatgttcttttctctctagagtaagaatcaaactaatcttcaacgtctacaaatgaaagcatacactcactcttcgttagaaagaactactctttttgtgtcctatacttcaagggaaacattatattccaagcatcccatactaaagcagagagagtcttctaatatactcatctatctctatcagattttggccctgatgaaccagtgggtctcttgaaaacgtctacaaactccataactaaatcctcatgatcnnnnnnnnnnnnnnnnnnnnncaaggaaagataacaaagcaaattaaaccaaagaactaatcactagtttttaccaaattcaagcaacactttaaccaaattcaacactttaattgaaccaaagaactaatcactagttcttaccaaattcaacactttcatcgagtcttaatcctccctaatcagacttcacagattcaacaagtaaatgctacaagagtacacgttgattagaaatcaatgatatgcaagtatattgacgttgagacatcaatgatatgcaagtaaatgctataagacacctaaagtaaaccaattctagaccaataaagagaacacatagattttgttaactctggttttaaatggacagaacaatgattcaaagatgttaaaagcaaacacatttcatctatttatgaacgatgaagtaaacaagtccacaagattgatgaaaggttaccttaaaagcaagagcaggatcaacaaaaaagagagcaacagagacaaatgcaagcagacttctctttggaaggagggtctttatgctctagtataagccggcaaacaaagcatctagcttggaacttccctctgttacacaacaatgagaatggttcagtctttagaatataactctttggaaaccaatctattgcatcaaaatcaaagctaaacacactcattgtacaaaaactctttagaaaccaatccattgcatcaaaatcaaagctaacacgaaaactgagaagagaacaaaatattatttacttaagggcaatgcaaatctaaattcaaataactccaatgaccatttaaatctaaactcaccaagctgagagtagctaagagaagacaaataaaaaagaaactcaaaatccctaagagatttgagtcagtgaataacaaaagtacctcagagtagagattcaacgttgtatctcaaagagaagtcaccggaattcaagtcaagtcactggaaaagtgagattgagacggcggagagaggatagtctcaaagagtttgagatcgaagagaagaagagagaaccgatgaaagaagaaggagaagaatagg

SEQ ID NO: 299 - DNA, 1295 bp, Arabidopsis thaliana landsberg
  unsure (1)..(1295): unsure at all n locations
taaaggtgttcactggcttcacatccaccatattccgcgaatctccattctaaaaaggcaagtgatgaataatagaaagataaaataaagtgagtgaaagaacaaaaaagaattgtatttcttaccattccttggatggaaactacattggctgatcgatctgcgtgaccagcacttgttgcagcagctgccgctgccgctgctatgctgtttattgcaggctgcaaatgtagaatgaagtgttgactaaatctttcaattgggtgtaagtaatttaaagcttagcttagattttaagtaccttggaggattcagatgatatgttctcaaaagtgtgcaatagccttagaccatctgagtttgccataatcttgatcacattctcgttgccagacacggccaggagagagccttccttgttgaaccggatacgcgggcttgcctagtttaaatatattagaagcgcaagttaagaagaaactccaaaagaatatctgaaaacttttctagttaggcattttttgttcatgtacctggaggcctccatcgccatcaatggcagttaaaagctgtacagtgtccatatcccagaacttgatggagaaatcatcacccgcagctagataacggtttttagttgtatcaaactgcacaacacctagagaacgcttgtggaatccttgataagttcttttaacagctccttcgctttcattccactcaacaatgaaagactctccatctttactcgtcccacaagagaatagcctagtaccatcggcactataagccattgtagtacaccagcgaccaggtgcatcatagtcaactcgggaacccatattatcatacaaccaagccttaattttcccatcaagagctgttgaaaatatgaacttgatgacaggaaaaatacaacacatcaaaaaactgaaacatttaatagaagggagggagatcaacggttagctaagcttacctgaatgttttccttgtaatgaggacaaacggaataaacaggagcttcatggccttcaaaagtatgccttttgacacctgttgcagcgtcccaaaccttgatggttttgtcatcaccacaagttattacacatagttgcttgtttggagtcgagaaggaaatatcattcacaccaccaacatgagcatcaatttgaaatgattnnatattgcaagaaaatccccaagggaaaaaacgattgttaaagccccaggctccccaatgttacgagacctcaaaaaaatgcctaaagtcttcacctcccttataaaagtat

SEQ ID NO: 300 - DNA, 1953 bp, Arabidopsis thaliana landsberg
  unsure (1)..(1953): unsure at all n locations
cttttgtagaaagtgtcctctgtatttggaaaaaaaaaatgtgggaataataacaagtctctcctctttttttttttttctttggttatgtttcatcctaacaatacatgcaattctttattgttgtgtatataaaataggtccttaaaaatggtgtttttcaatcgtgtttaagagctttatcggcgtaagaaagaacctttttcaggatcctcacctcacctgatacagagcagataaacctagctcgttatcttcgaaagacaattccatctccttgaacaaacggaacacttcatcagtggtctctgcggaatcgaaagcctctttgagatgatcttttcctgatataacggataatctcaagattaagagctcagtgtttgaccacaccgaattgcttgacttgcattccacgccaagaacaccacgttaaggtgatccttcggtgaagtaggaatcctgtttcgagactgaaacgagaaaggaccaagatgcaaatattttctactaaaacgataaaggaccaagatgcaaatatttcttcttacttttttttttgttttgctttttacatttcaaaataaacctgagaatgcctattacattttcttaaaatccctcttcacccgatccctctttctttgtctctgtctcgagattgctagtaaactcaaaaagctatggcggtttataatgcctctgttgttcttagcccgaatctggagacatcgtcgtcatggtatcaccataatccgtcttcttctctagacctgattaggattcatactcttccgatgaataagatgacaaggagaggtttgatacagagagtgcgttgcgagacttctccgtccagcgactcatcgcctctggacaagcttaagaattctcctgcaattgacagtaataagaatctctgccttcatttctgaaatgttccaacttttgaattttgtttttgattgcatttgagattcgtgattaggtttcgttgattaacgttaaagcaaatcctcggagattgttgttaccttgttaaagtttatagctttgttgaatattaggatacacaagggagagaagcagcattgtggtgattgggcttagctttcacacatctcctctagagatgcgtgagaggcttgctattcctgaagctgaatggccactagctatcactcagttgtgcgctttgaatcacatcgaagaagctgctgttctcagtacctgcaaccgtatcgagatttatgtatccgctctttctcgttaccgtggtgtcaaagaagtcactgaatggatgtctaaggttttcttccctttcccttttatctcattaacttcagtgttatcggtggcaaatgattacatgataaaatgctatttctttgccagagaagtgggnnnnnnnnnnnnnnnnnnnntcagcatcggtttctgttgtacaacaaagacgccacgcaacatctgtttcaagtctcagctggtctggaatctcttgtcataggagaaaatcagatacaatcacaggttagaaaagctgaacaagtagttaaacaagaagggtttgggaggattatcagtactctatttgaaaaggcaaacaaggctggaaagcgtgtcagagcacagacgaatatagcgctctggggctgtttccgttagctctgctgcagtcgaacttgctctcactaagcttccaggatctgtatcatctgctatgatgttggcaattggtgcaggaaagacggggaagcgtataatcgagcacctggatagctaaaggttgaactaaaatggcgggtatgaaccggagcgaacataaatgatgagatatccgcaaggagatgcacctctggagatgagattattcataaaccccttgaccgagagctctagctggtgctgcaaaatccacagtgatgagtactagcacataatcatgagacacca

SEQ ID NO: 301 - DNA, 1250 bp, Arabidopsis thaliana landsberg
  unsure (1)..(1250): unsure at all n locations
atgaaacatgatgcatgttgataacgaacgaacgaacaagagaatgcgtttcgaaaacaataattgtgtcaggtttttaccttggcatgatgtggatgttgcatcataccaagaagatcatggtaaactagcacctgcatttccaagaaaacaattatcaggtatgagaaatgcaaatttgtctcttggctacacacaaaaccggaaagaacgaaacttttcaaataaaacctgtccactgcagaaaggtccagccccaatgccaatggttggtatcttgagggcagaagttgcagcagcagctacaggaggtggaacgcattccaaaacaaccgaaaaacatccagcttcttgtaaagccattgcagtctcaacaactttaacagcactagctatgtttctgccttggggtctgaaaccaccaagaacgctaatcgcctgaggggttagacccacatgaccaataaccgcaattcctgcttcaactatagcttttgcagcagtgatcctagaagctgatcctccttcgagcttaatcgcatccattcctccttccttcaaaaccgtaaccgcagtatcaaccgcctgaagccaacatttaaacccaaaatcaggtccctaatttgtttcattgacacaaaatcttgtaaagaatctactttgcataagcaagtactaaagctaaatctgtgattacacaggcaatgacacattgacacataatgtatcatttaagactttttttatcaagaatccaatcacctaaacatttgatcaggaaatgaattgaacattgtaagtcccactgagtgttgtgattaattcaggtattgaaattgcaatcaagaatctaattacctacacaaaaattaagcagaagaacatgccttatcaacaaatatgtttaatttaggtatctagaagaaaaaaagattcaattttataacattacctgactagagcttgactcgtaggtcccaaatggcaagtcaccaactaggagaggtcgtttagcgcctcgagcaacggcacgacaatgaacaagcatctcgtctaaggagataggaagtgttgtgtcgtgaccatgaacaaccatggaagctgagtcaccgacaagacaaacatcgataccagctgtgtctaaatgaacggcggatgggtaatcgtaggcagttacgacggtgatcggttctcatctccggtgtntttgtctgagatgcgttacggtcactccttggtttgagttttgt

SEQ ID NO: 302 - DNA, 2494 bp, Arabidopsis thaliana landsberg
ccgccgacgttctctttcctcacgccgtttttcacttcccatcgaaggacatattataagcgtacgagttcatgctcaaagtaggactcttaccctttttcttatcgaaacgattccttttcatactaaccgattcatgaactaggtcctcgacaagcaacaccgcctatgcgatgagaggcagcggttgggcctcaagaggcaaacgctcgaggcccgaattacccgtattgaaaggaaggtgagggccatatagagtgatcccttccaatgggaatggaggaacttcgactgcatggcgaagatctcgcacatgctctggatgtacctccatgctcgaggtcaagtccttgatcccgtaaatgctccggtccaagtgatcccgtctgacggcgaagaggatgaagacgaggaggaagacagcaacccttggaagtgcgtgaagaatgaacccaaagttgacgttaaaaacgaggcatccacctcgaaccccgaaccggcgatgaaagagcctgttcccgagcgtcttccctaaatgtccctcgataactcaaatattttccttttccctttttttttatttttgtttggacttacttttgggctccagcccatctttatataaggaaactttcctattctccttgatttcacaaatattcgttttggagatattctttgaatgcagggcgattggagtgacgtgaatgcttccgcaaatcactccagccttgaatggaaacgcatccttgaaagttacgagtccttctataaattgcttctctatgttttctttattcttcatctaactttcgtttttccttttgtgcagttatggcttttaaccttcgatgctcggagtccatgccagacttttccagggtcaagatgattgatgaagatatcctgaacgtgccggacagaggacgctctccacttcgtaacttcagatcccagatccgagctccgtgtgcattaatcaaggatctttcaagcagagatcaagaaattgcgatggcctttatcaaagccctcgcggctcaacaccaaaagcgttcatcagaaaagaagatacttagaaagaagatcaacctgatgctctagagagtcaatgtgatatcaagggagctacacaccctcaacttggaatcgccgaatttgctcgcatcccagactgtatgatgcccattcttgatcttgccaaccaaggagtcaaagtattttgcaagacgagaaggatttcctagttcgaagtgtgtttaagacttcgacatctttttattgttttcgcctttgaataaatgtaactttgcttcctgttttgtatgttcgcacagccgaactcctttcctttgtttgttcgtatagtcgaacttctcttcaaatgaataaaacaccccttctccatagcttaactcgtttccgagctgccacgtaaccatttcgggatcaagccacaccgtaattcatgtacaaaaatgcgtatcgtttttaaacataaaatttcttcaagttcaccacgttccaaggacaatggactggtctgtcctctacatctttcaatctgtaaacaccatttcggatcacctcggtaacaatataaggaccttcccaattaatgccaagtttgcctgctccttcctctttcttgttatcgaacacacgtttcaaaacataatcgcccacaaagaaaggtctgcttttgactttcgagttataataccgagctgctgcatgttgataattctgaattcggatcaaggcctgatctcgcctctcgttgatggtatccagcgagtcgtcgagcattgcagaattgtcttcttcattcagaggagcttctgttcgacgaagtcctggtacattgagctcggctggtacaactgcctacatcccgtacaccaatgaaaacagggtctctctcgtcgaacgcctaggagttgtgcgatatgcccataagactggctgaagttcatcataccagccccctttcaaatgacttaaacgtttcttaagattgcttagaattgtcttgtttgcagcttcggcctgaccgtttccttgtggatactgcggagtggaataactaaccttaatcccctaatccgagcaaaatgcttcaaactcgtgtgagataaattgtggtgcgttgtcagtaactatctcgtatggaacgccatgcctgcatatgatgttcttctaaatgaaagtctttaccgccgaatctttaatgtttacatacgcttcaccttcaatccacttcgataatcagttagaaccagtagatactgtacacctcgggtcgacctatgcaatggtccaatgatatccattgaccatctcatgaaagggtatggtgcggagatcgaagagaataactccagaggttggtggatgagtggtgcatggagctggcaaacgcctgcattgttgagcatacttaacgcagtccgtgatcatagtaggccagtagtatcccattctcttatcttaa

SEQ ID NO: 303 - DNA, 2137 bp, Arabidopsis thaliana landsberg
atcgttcaaatgtagtatagattcaacatccaagaaacatgcaatgttcgagcaacgaaatatcttttcttattaatccgcaaatcattttatatatattttgtcaagattctcaattcatttgattatcacacacgtacctaacactgataataagctaatggtcaaaatgtggagacacggatttagtatattcaaatgttatcatgtaccttcttcgtcagaccgcctctgtattaacatcccaacatgttagtcactacttctccacgccgacatagacgtgctttccacttcttcccccatctctatatattctgaaaattctaaccctaaaccctaaaaatcaaaccttttccttcatcatctttagtacatcgtcttaagatttctgactttgttatgtctcctccagcattggttgtgtttgaagatggtttaacccaaaaatggagcaacgacgagtggcagggtttcagcgtttatcccggagaaaaccctaaccctaatattaatttcttggtgcagaaggcgactctgcagaaccagatgactgtctctcgcccatcgctgaacgaagagagcttcagaatggtcttacctctggcaatgtctccgccaagagacaacgctgtgcctcttcctgttcttcctgagccgatgatgaaaccacggaagaagcttagccaccaagaatccatgctttctctacgaaaatctcggtatcccgagaaaaacttctaccaagaagaagaaaatttcaagtgcaatgcgttctgtttatccctccccgggtttggaaaaagacctgtgcgatcaccaaaaagcgaggactctataaagaagaaaatgatcaaagcgtcatcattctcaaattccactgtctcactaagtgcctcgctagagaaattcgaatgtggatcatgggcttcaacgacagctctaacccgcgaaaacggcagattgtatttcgatctaccggtggagatgatcaaatgtggcggtggagatgtgcaagaaccagtgagttctggtttcttctttgacaaggaaacaggaagtctagctttgagaagcgttctaaagaaaagcagttctctgtctggaagacaattaagggatttggctgagacatccccgcaacgccgtgtcagattctcgaccacaacctcggattcgtgcccagcttcgccgcgaacatgtattaccccaagactgttgaaagctagagatgacttcaatacgttcttagcagcacagaacgcgtgaaacacacacaaaatcaaaaaaacagagcactaagactttgcaataataaatgatcggtctgtatatatcaatggagtgtgtgtgtttatcttctgtttagatttgagtctcctctacgttaaaaaatctcgatgaaagacactatgagcatttgaaaatacgatcttcttatctttcctttagagttaagatctctttctgctctgctttgttttcctctgttttctgcatcagttcttcatttttaagaatgggaaaagtacacaaatttttctttcatttaaaaaaaaagattggtacatacaacagaatatagaataatcggtaaatactaaacctcgtacattctacaaatcctgttccaaattgatggaaaggaaagtgaaaggaggcatgtgtagagtatttttacaagacgaaaacttcaacgtcaagaaaatagattgggttagtgattcacctataaaaaccataggtatgaatcttggacgcagatccaaaacgcaaacgcgctccagtcaaacttgaaagcaaacagaggaataaaaaaaacatgttatagataaagtgaagtattgttagcgttttgaacccttggttttatgaatttcaggttcttgaatcgacgaaaacgcgaacaacgtctagaatcttggcatgacaaatcgggcatttcccgccattatattgtaattcgtttgcgcatctcaggcatgtgcacatgtgcccacacctacagaaaaaaaacgcaattgtaaatattgtaggggttgcataaaccaaccaaatgaacattcaaaaaggtaggtgatcgatataataatatctgttcatacctgtataaaagtgtttcaacttgcgtttcgtg

SEQ ID NO: 304 - DNA, 2581 bp, Arabidopsis thaliana landsberg
  unsure (1)..(2581): unsure at all n locations
agcatttacttaacttcccaaatagctcatgttcccttagccgttccagcaccgcccttagatgttcttggtgagcttcccaagatttcgagtaaacaaggatatcgtcaatgaagatgataacaaactcgtctaagaaatcccggaataccccattcatcattttcatgaagnnnnnnnnnnnnnnnnnnnnnnnnnntggcatgaccacaaactcaaagtggccgtaccttgtccggaaagccgttttcctcacgtccgttggctctatgggaatttggtgatatcctgaggccaagtcgatttttgaaaaccactgtgcacctccaagttgatccatcaactcatctatccggggtaaaggatatttgtttttcacagtaactttattcaatccccaatagtcacaaacagaaccggcgcaccccatggtgagctactcggcctgatgaatcctttatccaacaactcctccaactgtttctttagctccgccatttccgccggtgccatccggtacggagctttagatatggaggttgtcccgggctcgagttctatcgtgaacgggtctgaccggtccggtggtacaccactaacggccgcaaacacgtccgagaactcgttgacgatcggaatgtctttcaactccgcactcgcccccacttccttggttgtgatcgtggctaaatatgcctcacaacctttcccgagcatcctttcagcctggattgccgagattaccaagcttcccgaggttattcttattccttggaattttaacataccctcgtccctctcgaattgtatccgtcctttttgttatatctatgtgagccttgtacttccccgaccggtccatccctaagataacatcatgtctctttagtggaacaatgattaggtccgcgtgcatattgacacctttcactacaaccgagatgccccgaacaagtccggtcggatacattgcgtgtccgccggcgctcgtacccttccataatcggtgtttggttctttcctgaatccacctgattcaaccaattaaggactaacaaaacaatgtgtagccccagaatcaaatagagtgtgcgtttctacgtcacctactctcaaggtccctacacattcccttagaatgttgagtacctcccctttccgatatgcatgatgcaatgcaaatgcagttattgaaaaatgaatagggagttgtgagaacgtaccagtgatcgccctgaagtttccggcatcgttagcttccttcgacaactcataaactcgcggtgccacggcttgccgccttgggggaggcggcagtccatttccccctcgattgtccctttgtccggcctgcttctccgcagtcaacttagggcactctcgctttagatgtccagtctcttcaccgagaaccttggactgtcctggttccattctcgggcaactttggatcgtatggtccttgcttccacaccggccacatgcacctatggccttccagcaagttccgctgtggctcttaccacaggtcatgcattccccagtcttagcatcggacttggtgttatccaccttgtcaaatttccttttcttatccgcgggtttggtggattgattgttccggatcggtgctttctcccggttcaagtacctctcctcctcgatctcttcctcaatcattgctgccctttcaaccaattcggaaaccgagttgaatgtccggaccaaataatggttgcggatctctatccttagtccacggataaatcggcgcacttgagcttgttcctcctcaagttcacgtccaatataacaccttaggcggttaaattcctcatcatattcacgcaccgtgcggttcccttgaactaggtcgaggtacgcacattcaagcctatcccaagcctccggtggaaagtacttcttgttaaactcgtcttcgaaatccgcaaaggaccggacctcgtcccctctacgtttctcgacggttaaccaccagttatgggcgtctccttcaaggaagtggaccgcaatgtccctttggtaatcctcagggcagcgggtagacttgaagttcctcttaagtctactcctccactcatcggccacaatcgggaccgtactgcccatgaagtgtctcgtgcccaaccttgagacatgttcgagaagactcagatagtctccccttttccgtccatgattcaattgtggattcacttccacaacttccgagtcatcgtccttttggttatccacttttaggaccaccgaatccgctacaacggccttggtcaatgtggctagttgcgccatcattcccttcatcaaatctcactgttcttgggccgttggagtattgttccggttatccgtgctatcccttgcaccactactctccggtgcttcctcatttatggacttcttcccggccttaggtccggccgagtttgtcctatcgagcatcgtcccgactctggttttctcgttgatcatcgtttcctcctcaaccaaagtctcctcgacaatgcccttgtccttcttactctttcccgttttgctgctcttacccatctgcgaaacc

SEQ ID NO: 305 - DNA, 7801 bp, Arabidopsis thaliana landsberg
  unsure (1)..(7801): unsure at all n locations
ctagttagatccgaatgtcattttgctttcttgtgcaggctccggttaactttgtgtgtctccattgcgtgagaccaaacttgagaccattgtcaatggcttcttcaactgttttgatccatatcttaagcgatgttccttcttctccactttatgggaaaatgcaggtttacattcatcattaatgacttgaaacaaattagttttactttttaggattagatttattaaccctctcaattgttttgcaggatcatttaaaaaattggagaaaatcaacacttatcattacttcaatcctcttcctcgcagctattatatggggaattggtaaggactcaaattgtttttattttttttcactcatctcataatcttttggtatagcttagtaaatttgtttgtttaattgtttgtgtgtagggatatttatgaatagtgtggataggtctaatgaagtaagtgaagacgatgaggtcgaagaagataaattggaaagcaaaacagagaactctactctcgcctaatttttgaagacatttttatcaattttcttcttctacacgaccaaataattccttagtcctactccattgtttaattgaacaacaattcatttgattcattttcttttccttatagatactatttctctgtttcttttgtgtacataaacctaattttttggaataatatgttttagagagggaatttttcttctcgagcttccctaaaagattcaaccattacaattgtttcttaatattcatggatttttttattacttatgttcactctctgtttttgttaatagctaataacatgttcaaatatctccatacttgaacattcatggaagaaagaaaataaaagaattgttctcatttcaattggaaatatatgacagataaatcaaagtgacaccaaaacaaattggtgttttttttgacattattcgttttatttaaaattgccgttcttactgaagtcattaacaaaaaatgggaaaaaaatgggaagtgaaaaaaaatagttgtcttattttggttagtaagaaggtttgtttttcatcatcatcttcaatcactttagaagttaggaccagctgcaagaatctcctcagtcaattttccatcatcaccaatcttatgacttgtgaatgtctcaaaattgcttttaaacaaaccagccagtttcaacaatgtgtcctcataagccattttatcaggccactgcacaagacacacataaccaaagatgtcaaataaatgggttaatttcataaaaaaaatatatatgttttctgctgtctatctaacttactgcattaataggttccagtatctcagaaggaactccttctacttcatttggaatctccaaaccaaaaatatctgttttacggtaacttgcattcaatagactaccggaatgtatagcatcgataatctttcgtgtatacgccaacttgattcggcttccagttccgtagctgcatatttttatcatcaattttaatactctttttgtttgtttagctagttggttataactgcagtagagatggatggttaaccttccaccggaccaaccggtgttaacaagccaaccggtggctccttgagcctgcattttctcagccaacatagcagcgtacttggttgggtgaagcataatgaaagcagcaccaaaacaagctgagaatgtcgctcgaggttccttaactccttcctctgttcctgcaacctacaaaatcacattattcattacgaatcgattacaagaaaaccgaaccgaaccaaaccgggacttacgagagcagtgtagccactgatgaaatggtacatagtctgagcaagattgagcttgctgattggcggcaacacaccaaaggcgtcacaagccaataggatcacgttcttcgggtgtggtccaacgcacggtatcttcgagtttggaatgtactctatcggataagccgcacgtgtgttctccgtcactgatttgtcagtgtaatccacttctcgtgtatgctcatcaaacacaacattctccaaaactgtcccaaaaccaaaaaaaaaaaagtgaaaatgttataaaaacgtaaaatctaacatttgtaaagtgagttctgtttttaagtaccggttccaaacttgatagcgttccagatatcaggctctttgtccctagacaaatcaatgcatttcgcgtaacaaccaccttcaatattcgaaactccggcctcactccaacaatgttcatcatctccgatcaaataccggttatgatcagtcgacaatgtagtctttccggtaccagagagtccgaaaaagagagcaacatctccatctttgcccatgttacaaccagagtgaagagacaaaatctttctcttaggcatcaaataatgcatcacaccaaagagtcctttcttcatttctccagcatattgtgtacctagaatcaccatctctcttcttcctaggtttatgtccacactcgtagaagatgtcatgtaatgagtgaaacggttacacgggaatttccccgcgttgtaaatcgtgaaatcgggtgtcccgaaattctctaactcctcaggtgttggacggatacacatgttgtgcatgaatagtgaatggtaagctcttgctgaaacaattctcactttgattctgttctctggatcccagtttaggtattgatcattcacaaacacctaacaatgaaattataaaaagatctttaaatatataatctatggaatttaactacaatctcattttgaatgtagtagtctatgtcaagttaccttgtccaaggagtttaagtaatcaacagctctctctcggttcaccaaaaaagttttttcatccatttcaatgtttggtgatcctctgcaagaaaaaagatagttattttacgaatttttaaactagaaaaacaaacaataaatgggatatcacatttgatgaatgtgttttcataatttggtgatcttgatttgtcacatataatgtaaatgtttgatagaaaatgactcactttccccaccagagttcggcctcagtggtatcatccttaaccacacgcttgtctttaggagaccgaccggttttggctccagacaatgtagccaacgcaccggtcgatgtcacaaacgatcctttctcaaactttatcgcttgctcgtacaactctgcattcatacaaattgagaaggtgatgacaaaacatgaaacaacattaaaaatagggctcttgggttaaaacggtggcgttttagggatttgttaccggcgggagagaggttgtgaaggatgtgagtgaacttcaagccactgtcgctgacgtcagcagccggaagtgacgtaggagtcactggcacgtgtgctactttagctgccgaagtcggatctcctcttattaacttcggtcctgtctctctcgtcaacgaagccaacgatgcactgtccaatatttcaccaaattatgcattcgtatcattgttttctcaaaattcatttttttatttttatttttatgattgcatgcaaaactaaacaaaattcaatcatacgattatgagaaaccactatatatatcattacgctatttcacatgtttaatcttcaaatcaaagatctttttttgcttaaatcacgattccttataattttgtgatttgtaaaattagtaaacatagattggcctaataactttttacattccccattaattattgaaaataaattgtgttttttggaagttgagctatattcaattgtaaatatacctgacggattgaagcatggtctcgctggagacaggagtagtcgggccactagttccgctgactccgctggcgctgccatctctaagaggagtggtaggggcagatcgtttcttctggagactgtgaagctcgtcgatggtctgaaagttgacccgcggtgcgatgtcatcctggcagacgtctgccggccctggagatttgccgcccttctcagtcgtgatcctcggaagcgcatcacgggccgccgcagccgagaaactgaagtctccaccggtactttcgtttccgtttcccgccatttctactaacttgggattaagattaaacaacacaattaacacaaacacacgtataaacaaagtatatacacgtatatgaatttaaagagaggtatgaagaacaatgttagtaccgaaatgtgtctttcttcttttgttttgtagaagattaagaatgtataaatacaaaagaaaaagaaccaaaattgtctgaaagagagactaatggttgtgatgagattgggaggggtagcataagccggttttataggttcattgactcagtaattaacgcgttttaattagcctgcataatcgtgttttttctataattaaatgatgacactcacgttatactcatatagagagtataatcttgattttgtagataatgcaactatttgtccactattgtgataattaggtgactagacattacgttgattatagatagatttggaaatcgtattaagcatactttacgtgcacatgggtgtggataactttgtataatacttgtcgtcgtattcatgtcttcacgtttgtaattaagaaacaattccaataacatttcaactaatacagtccggtaattcttttaaaatatgtttggattataaatatagtgtgtcgtttccaaatatcttatccgtacagcgtacaaacatagtttttaaagcacgttttttgttttcctaatcaaatttccccacagtagtttgacttagattttatatatatattataatggtgttaacagtttcaacaccataataatattttactttctgacaaaaaaataaatatatttttcttctttaaaatagtccaccgtcaatgaaaacaaatggattaacggagtttgtgtggttattacgataatgtattattttgtatggatgacatatactctgaatttgatgtaaatatgtaatagaagatattggtggttgcaactcttgcaaatacaaagtcatcaataaagactgttagaataacttaaaaacttaaagataatccaatcttggctgtactaaatggatggttacttgaaaactagataaaatttaattataattaacactttcacttttgaccagaaaagaaaattaccaaatttacaaagccaagtgccagtatactgatctggaccgttgattttcaatgttgacagcttttgggcacatcacaaccacgtcagatgggcttatctctgtctgccgcaataccaggactttttaattaacacgtacacttttttcggagttgaccaaacattttcgaaattattaaatctctccttaaataacccattacattatgtaaaagataactttggtgattaatagattcatagatttgttttagagttacattatttgggcctaagcctattttacatggacctatgtttgtagagtaaaggttgttttcggtatcttattttcgtcccaggcgccaaaggtaaatgctttattaattggtttacattatttttggaattctcaatgggctttacagttgccgattgcacaaactgtagcccaactgtgacaaaatctcccaaaagttggatcagccattataactccaaatagtgtgttataccgggttattttgattttcacagagttcattagtacaagtaattgtaacatcaatgaatgtaatgcaccttgattagtatttttttaagtatggtgcgtcaaaccgtttgaccatatatagttcgagattctttccctttcattagttgacagtaacattgtccatatgcaatatgtaactgcgtgatgaatgatagcttagttttttttttgtgaaaaaataatagcttagtttttttagttatgatttgaccatatatatagttcgagattcttctgccactgatcattttagtgaatcacatcgagaagtggacctttgacaatagttaatcatttcatccattttaaaagtatacaaaatcattgcattcaaaacaaattgcaacttggcgctagctacatataattagtaaatgtcttaatgatataaaatgaatgaatttaagcgagaagaaagctttgcaacggcgcatgacctggtttctaccacggtgcacccaccaaaccattcaccaacaaccaacaaagacaatccccacgcactattcaaatcattcaaacccggtgccttctataacaaaataggctataatgatgatcacatgactaatcatgatcattcatttggaaagatataatatattatagatcctcttaagttaaacggcatatgataatataaacttaacttttgattttgaagtccagcattacaagcacactctctaatccactatacctcaacttttaattctatatagtacacaaaaaaagcagacttcatttatttgatctacaactttttttaactattcagtcattaatttggagtttttgaagattacaaaaaggaagaagaagataaaaaagctaaaagaccaattaattccttctaatgtagggtctcaatctctctgcaatacaaaaggccacacccgtcggctactgcttgtcgctatcatgcacctatgtgggtctttttctgaataatcatacttctattatttataccttactaaattattgcttatcctccttatataaattatgtaccattatatattcaaaaatcattgaaatcgaattttcggaaaaaagggaaattaaaattaaaatctggcgttttccaagccgtgcatatcgctgactcgatttaaatgcttcctcataatagccactttagctaatttctcggcggctctccaagccgaagtaggggtaagctgctccggtttatcttcagttcggtttaatatactatttctcggtttaatccggctaagttcatttagctcaacctccaaactccttaaactatcatccgaatgagacgcattggaccgagccgtcgttagaacctgatacgctccggataaatcctcacgctcgataagccggcgtgaatccgctacagcgcggcacatggagtgtaaatttctcagccgttcgatgcttgaagatacatatctgacggattgtggccgtgggatcaaaaatcgtttttctttaggacatgtcattggctgatgtgtcatttggtcaacgatcgaagactgtacggacattacttggtgggaaccactcgacgaagtcggcactttgagctcaacgagaaactctctctcctcctccgcaaacaaatctccgacttggatgacagaaccggatccgaaattctcgagtcgaccggttaaagagtaaaccgatgaaatctcagtcaaatgagatccgttgaccaaactgagatttagcttcacgttatggagagtcacgttgagcaacgaagcgattctttcggtgaacgcgtctcgtagcggcgcgtgaagcaacgctccaggagaagcaatgtaaacggaatgaaccgggatctccggacgagagaaacgcgtggtagacacgacgaacggaatgcgcgttgcgtttagtttagctttcaaaactgcctccggttgatcttgaccgtccgataaaacaaagatgctcgttgacggattcttctcccgccgatcttcaacgactttaaccgctttcttagacgcgtcgntaacgctcattccaacatcggcggtggnttccattccggcgagtgcgtcgaccattcgccgcgccgatcgtct

SEQ ID NO: 306 - DNA, 1503 bp, Arabidopsis thaliana landsberg
aaagaatcctggatgtgttgctaacgcttgaatacgatcaaaattatcttacttggcagttaggttaacagttttactgcttttgtgtcaacgaaataacgcaaaaatcttatctctagatagctcgtactctagaccacaagagataatgacatgacatcagctttctcatatccacgtgtcttctctttgctcaccaatctttaagtgccacgtgtacactcttcctcacctaacaaaaacaaacgggtctagcatcaaacaatgtattacacgattttttacttagttccaaaaatcgtacagctagttctctcaagcctcaggtatatccgtattatatatatccattttgataaagaagagcgtgaaataaaacaatgcaaaaaatgacatttcgagcggctcatcttttgtatgcgacgtgcattacgattgtacaaaatcatatctaaaattaaattaaaaagattatattaaaagtcatctatacgacttcatatataaaaaggaatgatgatctcaaactttaggttgaacacattaccatttgacatttaccgtgttttttcggtgcttttattacacaaaccttcggctagaagtcaaacgtgttggctccgtgtgttctttactttttagtgcctgtaaatttgttatttcattcggtagctgatgaattatttcatgcgatcaaattttccaacaaaactaaagaattatatctgaaagtaaatttacagatattgaaagtaacattttcaagatactgtctaagtatacgaatatatatggcaaatgtgcataactttttttttttttggacaaaacaaattgtgcataacctttaaatctttaataataacgaaaacaaataattatttttcaataaacaatttaataatttaaaaatcttaaattcgtcaataaagagaggaacacttttattctagcctctgaatgtgcttcttctctctctcttttcttctttcatcttctctcttccttatcacttgactttagtccaaatctctagctcatttgtcagacaacaaatttctgacaatggaagcaatcagattctctaatttgtcaggtcttcttattctcttaatgtcactgcctcttttagtgacttcaaaggacgaaactgtttcttgcacaatgtgttcctcttgcgacaatccatgtaatcctgtcccatcttcttactctcctcctcctcctccgccatcaagctccggtggcggtggatcttattattactctcctcctcctccttcaatctccggtggtgttaaatacccgcctccgtacggcggcgacggctacggtggctattatccgcctccttactacggcaattcggggacaccaccacagcaggatccgatcgttccttattttccgttttactatcatactcctcctcagggatattcaggctcggctcgtttacagaattctatcctctttgctctgttcgccgtcttgctctgtttt

SEQ ID NO: 307 - DNA, 1570 bp, Arabidopsis thaliana landsberg
caccttgtaacgaaaatatcaatctgtggtgtatcgcgggtcaatatctagttaagtgtaaaagtgatacatgattaagcttaaatacaagtaaactaaatcaaaatactaacgaatctaaaccataactaaaccaactatatacactctaatatgatggtggagtcggatgagatgccgagaactccagcccacacttgcttcctcacctttgatctcctcggctgattctcaagggagctaccgcttccactgccacttccaccacctcctccgttactactccgtataagctccgataaagttttaacatcaactaccaccgtatccgccgcttgtatagcgtcgctatcgtacggactttgagccctctgaagctctgcgtaagcagctttaatggaagttgtactagcgaagatcttcgcaatcaacgcttttaaaagggagtctccgtcgtcatcttcatcgtcgaaatttggtttctgtgacttaaacgtaccgactccgactccattgttggaggagaccttcctcatcgtcgacgtcgaaactctattacatgtaaaacatatgttatacggacgatcatttgattattttgttacccttatattattcatatcatatacgagtgaatgaaactgtagtatgagaaatggtctaattaatgttttaactatatgaaaaaaaggctcttactctggtgtatcgtacatatcggtagtgagtttcctttcagaaaccacgaaacagtcgtcaatttcttctctatctccatttctttctctggagatatttgacagggctttcttaacttccttgatgattgaccttatgaaatccttctcagatttatcactttgatgtgtaaaagaaaagaagattaatgggtttagtagctttcctttacacttacttggtatcttgtgctacaagaaacagacaatttttatgattgaaaaatcgtaacctgtgttctggtaagcacaatgcaaacgttcgggaaacagaagtcaaagcttccgtccatttctggtatctttctggttcatgatgatatctctcaatcagatccctgaatttatcgccgaattttcctttaagacccttgaccactgcgggatcaagcttgtagaagatgggaatcgctatgattatcttttgatcaacgcatttcttgatctgtaccagctcgtccaaacaccattttgactcggcgtatccctcagagaagataaccaacgcgatttttgactcacctatcctactaaacaggctgattaggtctttacccctcacctcgtgctcatctataaagacgatgatgttacctttcttcacggcaggcacaagaaaactgctgaagcctttgcgtagctcttttcccctaaaactgatgaacacttgaggtcccgttgggatcactgatacatgagaagaagacgaagacgaaaaaggagaagaaggagaagaagaagctattgccatccgaacttgagtttttacttagaaacaaaaggagttagatcgattcttggttgaaagacaagaagaatctggaagacgcatt

SEQ ID NO: 308 - DNA, 747 bp, Arabidopsis thaliana landsberg
atgaatcacatcggcactgcccaggctaaaccgaccaatctatacttatgagcgagacaacgacactggggaaaatgggtggctgagattcgtttaccgaggaatcgaactcgactttggctcggaacattcgacacggcggaggaagctgctttagcttatgacaaggcggcgtataagctccgaggagattttgcgcggcttaatttccctgatctccgtcataacgacgagtatcaacctcttcaatcatcagtcgacgctaagcttgaagctatttgtcaaaacttagctgagacgacgcagaaacaggtgagatcaacgaagaagtcttcttctcggaaacgttcatcaaccgtcgcagtgaaactaccggaggaggactactctagcgccggatcttcgccgctgttaacggagagttatggatctggtggatcttcttcgccgttgtcggagctgacgtttggtgatacggaggaggagattcagccgccgtggaacgagaacgcgttggagaagtatccgtcgtacgagatcgattgggattcgattcttcagtgttcgagtcttgtaaattagatgttgccataggggtattttagggactttagagctctctgcgatggagtttttggtcattgcagagattttattattattaagggggtttgttatgttaatatcaaataagtttatctactttgatgttaattagtgttaatctctgcgtcggtccgagctgtt

SEQ ID NO: 309 - DNA, 996 bp, Arabidopsis thaliana landsberg
ccatccattgtaatatagtatcttaagttttcccatatagtgtattatgttcttaatctttcagttcaaaggaggttatgaggttatttaatccttagctgtcgtttgtccctcttaattcatccaaaacttctccaacatcttccacggaactgttataaataggattttctcaacatgcaactcgtgctacgaaccgtataaataggattttctatttgcgtgtggtatttttcattgataagattgatgcatatatcctcgaaatttttgtcactagacaaatcctgccgtacaagcaatctttttgttaatcatcatcacacaattttcttcctctttttttttttttacaacaaatgaattctaactgctccttttatgtatccactgtaccagagccaaggcaggaccagtcgaaagcaggagttgcatagggaccgttgagtataccctcagccatcttctggtaggcggcttcggttaaatgataaccatcccaattcacatactcggaaggattttgacaatagctaactccttcgtatccacactccttaccaatagtgaagttgtatttacctccgactccacagcaagcagctaaaggtttgttcttaaaccctaatgaaaaaaacaaaacaatatctcggttaatgaattaaaccatgagggtcaacgaaagagttttaagtggcacggaccatatttagctggttcttgataaaaccggtataaggagttatggtagtcagcgtaaatgatgttgacatcaggatagagtttttggagtcgtttgagttctgtcttaagttgttcgttgtcgtgctctccaagttcattgagccgtgggatacaacctgtcaaggggtcgtagtcttcttctgtcgcgttctgatattgagtaagacacgctgcggaacatcctgcaggaagcatccgggtaccaaaaatgttttgccccctaaagcgatcagatcctgtagttaggttgct

SEQ ID NO: 310 - DNA, 9700 bp, Arabidopsis thaliana landsberg
  unsure (1)..(9700): unsure at all n locations
gatgtgtccccataaacctaatttatgattaagcatcattgaatttatgatttgtctatattcaaatataatacattctctttgattaaattcagagtaaaattttgaactctgaaaataaacaaaggatcgatctatattaaaaggttttaaataatacaaatcactcctaaaaccacattgtattctcgacatgatcatgaatgacaaatacactaactctgtgtccagcttgttttgttccctccagcctaacaccttcgatttcaactcttctaaagcttttttgcatcatgttatagtaataacaacacaatggcgtattcattaaaattacacatacgttgaacaacaaatatcaggaaacattacaggaaacattcttttatcttcttagtttcgtcttctaactcttgataaactacataattccctagctatattaatgcacacatttatcttacatttccctttaccaattgacgtaacaagacatgagttacaacatctcacacccaaatgggagtaaaacaaggttttaatttaccgggtttggtccaaaagagttcccataagtctggaagaacgaagctgccgcccagaacaaccgtatcagcagaatcaccgtaaacacagttcctcctagattgcatattaccttccataaaagttagcaacacatatccatgagatcacactcaactaaaacaagttactctaattcataaacgctcataaatagtgtatgctacacatacaatccaatgcaactatcagatcaaactagcttcaacaagaaagctcaaaaaccaatcacacaaaacagaatcaaaccatatacgattcgatactagtgattcaattaagtaagcaaaatggtaaaagattacctcaagaaatgctcttgtaatggaaagtgaacctaataacaatatcccatctactgcaaaagacacctgcaaatcataaaaacagaggaaacatcaaaagtggaaacttgaggataaagaaacaaaatttcccacaaaactgaagaaacacttaaaagctttaatggagaagaagaagagactcacgagtcgaggagacatggcagctggcaaaatccgtcgcgatgcttttttagctcgtttcgagactttcttgaacatgcttctcaagaatctgatcaaaagatcgacactgctttctctttcgtcttcttcatcatcatcgtcgctaaatccgtcgtcatcgggaacaacatcgtaattgtcaccaccgccgaagaatctatcgtctgattcgtattgcctacgcgactaaggataaagagattgagtaaattcggattcggattacacaattctatgagtaggagataatcagaacgtacgtgggagctagacgaagcgagtgagcgatttaggcggcggaatcggcggcggaggaatatagagttagaagagaagggagttacagagacaaatctgtgtgaggcattgatgagagttagcgatggtgatgatgaagatgatgataaggttgttgtagctgcggccatttgtgagcagagagagtaacaccagatgattattcagtgattgtaattaaaacggacctttttgcaattaaatacatttgggatacttttgtaagtatacataaacaaaaggtactgtttcgtagtctttactttggtcgtgaccgagttttacttttagacttaaaagacttttttgataattaaataaaacctcggctattttagaaaagctacataaatatagggtaccatttatacttttatttgagagagaaaatcaatttatttcggctaagtctcgattgcttatatgttnnnnnnnnnnnnnnnnnnnnnnnnnnnnnnntaaaagcatagggtcgtaagtagtgacgactaggtaaagaaaaagtttgctaaaagtgatatatgtaaaaataatttttttgttaaaagtgatatatgtgcaaaatatgattttagacttgatattgaagagtttacaaagcgggtggtgggagaagccacttggatccttggatgtagccgagggataggaaacggctagcttctttgtcgtcaatgtcttgtgtgaatggtactctcttggctttgtgtgatcctggtcctgaacacttgtactctccgtagaacacggttctgtcatttttgatataatcagcataaaggacatggaccgattgggtgatattcatacgaattttctatgtaatgtgaaaagtgtacttacttgtcatgtgcgggagtcttattttcttgccatccggtggggttgacaacgctggtcatctcggtgtaggcataaacaaccttagggtggctcatccatgctcttcccaaataaattcctccaccggttccagtcaccttgcagtgcacgaaagagtatccactcttctcttctgcgctctttcctgcatgcgctgctatcactctaataccgtctccaaccacgtgcaattgtgttcccttttaaactcaaacatgcattagagatctcgcactttatgtattaagaaataagtatgagatgttacgtaccaagtacatagaggttccacttccgaagatgaaatcgaatgttccttcaacgtaacaatccttgaagaaatggtttcctgtatcgtcacagattgtgtcttggaaaccgtagaatttgcagttgtagaaagcagcaaaatttccggagattctcatggataaagcttgtgctcccttagttttaccatctggtgccggcgcagtgttctacatatgcaaaaaaataaatcactcggccatgaaatagtcgactagtcacatagatgtatgatatatagtaggatcacttaccttaacgacgatgttaacggccatgaaatagtcggataagataatgagagaggcgctatcaacggttccatacttggcggcggtaccgtcataggtgataacaggcatggcattgggttgtctcatcaatgtaatgaagggtttgttcctgtcgatagtgaccttctctttgtattcaccaggagccatctttatgatcacccgctttgtgttccctgcaggaacgctctttattgcgtccgttagtgttttgaattcaccaccctttggattcacctgcaataatttttacatgtttttcaaaaaaattgtatcaaaatctattgttacaaaggatgagtttaagacaataagtgtgaatagtacgttgatgatacgtggagcagcctcagcagctacaagagcaggatctaagcctttacgttgagccaatggaccaacgttggcattgaaccactgcgccacttggggtttgccctctgggattggtgtcacatcatctgcgaacaccatcggtgtaacaaagaccaccaacaggcctaataaaatggacacatttgtgtattccattttttattttatttttatttaaaaataaaaagttttttttgttttattatttttttttgttttttttcgttttttttttctggatgatttgatggaaagatggccatgagtatatatactgtttcagagacctaaattgttttgagttttgttctcgtttgctattattgtttgtggtgatccatttttgcaacccgctataatttctcttggaattttgtatgttttcaaaatattttattaattcttgatagattttactattaatatttttactacatcgttttttttttgtgattttgataagactatacaactgttaatttatgacattaataagaccataagtttattaaaaaaacaatttaaaaattttttttgattaaatccatgtcgagagacacatccgaggaggtaacaacatcaacatgttcaccaacaccattttgataataacatacctttgggctatatttataaagatggtttcttaaaagctttatgcaaataaaaattaaaagcattcagattgacacctctttcaagaagaagctgcaatcaagaggacataaacatgttatttttcatttacaaagactcacaacaaagtttaaaaaataaacaaatttacttgaaagatcgagattttcatttttgaagagcaattcttagagaagtatgtccaacttcattctgagcctcaatatcggctccacaattcaaaagcagctgagtcatacaactctagttacttaaacaacgcggagaggggtttcaaagcagtgactgcgagcttccaaagcggctctctatgttcgagaagacgaacaacatatcgcagacgttcaggctcaaaccttgcgacgtggagagaagtgtgtttatatgaacataagcaatcgaaaaagtacaatttgatagacaaaaacattagaaaccagttaaggacaacaaggagagggagttgtgagaaatacaaaggcggggatccaaacgtggtttgctttgacaagataacaccatcgataatatctcttttaatttttaagaaaaatcttttgcatttacatgtataaaagtttatttttttttgaatataatttaatattagatttaaaaaaaggacaatttttatgataaactaactttgggctatatttctaaagttacatgaatctaaggtctcatttcgtaaatttactttttgttcgccgtttcaaaaaaatatctctcgctaacagaaaagctttcagcttttttttcttcctcttcttaaaaccctaccgccgcgaccaccgacactgagagacttcgccgccgttaaaccaccagtgagaagcttaccgctgcgacttgaatgaagaggtacatgtgctttagagctcagattctaaccttttttcttgacaattcgatggtttcttaaaagctttatgcaaatggaaactatgagattttaggttttgtgtaacttggtttcgttgtttgaattcgaattatctggtgaaaattctgctatttgtttacatgtgtaggagacagaagaaactgatgataaacaatgagatggatttgtcagatgcagtgattgtaaaatctggtagattgaaatcagtagtgtggaatgatttcgatagagttagaaaaggtgagacatacattgcaatctgcaggcattgtaagaagcgacttagcggctcaagcgcgagcgggacttcgcatttgaggaaccatttgattagatgtaggaggagaactaatggtaacaacaacggtgttgctcagtatttcgttaaggggaagaagaaagagttagctaatgagcggataaaggatgaagaagtgcttagtgtagtgaatgttagatatgaacatgagaaagaagaacatgaagatgttaatgttgtgagtatgggtttggatcacaggcggtgtcgattcgatttagccaggatgattatcttacatggttatccgttgagtatggttgaagatgttggattcagaatgtttattggaaatttacagcctttgtttgagcttgttgcttttgaaagagttgaatctgattgtatggagatttatgcgaaagagaagcataagattttcgaagcgttggataagttacctgggaagattagtattagtgttgatgtgtggagtggttcgggtgattctgatgagttcttgtgtttggcagcgcattatattgatgaaggatgggaattgaaaaagagagttttgaacttctttatggttgatccatctcatagtggtgagatgcttgctgaagttataatgacgtgtttgatggagtgggatattgaccggaagttgttttctatggcgtcgagtcatgctcctccgtttagtgagaacgtagctagtaaaatcagagaccggttatcgcagaataagttcctttactgttacggccaattgtttgatgtgagctgtggagttaatgtcattaacgagatggttcaagattccctggaagcttgttgtgacacaataaacattattcgagagagtattagatatgttaaaagctcagaatctattcaagatagattcaaccagtggatagttgaaacgggagctgtaagtgaaaggaacctatgcatcgatgacccaatgagatgggactcaacatgtaccatgctggagaatgctttagagcaaaagagcgcgttttcgctcatgaatgaacatgatcctgattccgtgttatgtccatctgatttggaatgggagagattaggaacaattgttgagttcttgaaagtctttgttgaagtgataaatgcattcacaaagagcagttgtttacccgccaatatgtacttcccagaggtatgcgacatacacctccggttaattgagtggagcaagaacccggatgatttcattagctctctagttgtaaacatgagaaagaaatttgacgatttctgggataaaaactacctggttctagccatcgctaccatattagacccgcggttcaaaatgaagctggttgaatactattaccctctgttttatggtactagtgcttcagagctcattgaagatatttctgagtgcatcaaactgctgtacgatgagcattctgtaggatcgctattagcgtcgtcaaatcaagctcttgactggcagaatcatcatcatcggtcaaacggtgttgcccatgggaaagagcctgacgatagactcacagaattcgataggtacattaacgaaacaactactacaccgggtcaagactctaaatcagatctagaaaagtatctagaagagccactttttccccggaattcagatttcgacatcctgaactggtggaaagttcacacacctaagtacccaattctctccatgatggcacgtaacgtgttagcagttccaatgttgaatgtatcatcagaagaagacgcctttgaaacttgtcaaaggagacgggttagtgaaacatggcgttcgcttagaccgagtaccgtgcaagccttgatgtgtgcacaagattggatccaaagcgaactagaaagctcttgaaactctcgattcatcttattttgatctgagtgttgtttttctatagattagatctcagctccagcttgtttgtttattgtctgtacctctccacaacattcatatttatatctacctagctagggcttttgctgtgtaacatgatcatcatttctctgtacaaagttggcttcaatagaatttggtgatagcggtttcagttacttggaccagaatctttgcacacaaaaaattacggattttaaaagacaatggagagtttaacaaacagaaatagacgtaaggaatatgaaattacaaaaagtggttaagaatagaagcaaaagagacgaagagctagtgtgtggaattgcagctttagttcttttggtacttacaaaaaataatctggagtcttgcgagtggtttcgggttcgacttgacgtggagctggatcaaactgaaggaaattctggtccatgttctcaccgatctctagaatcgcagccatgttgccacaacggtagcaatagtttggggcactaaatacagtcacaacgttcttttcttggcaccaattaaaaccttccatgacaagttgatgtgctcttgaaatcagagagagtccattggtgtggttaaactgagtagcgatatcttgtccgaaagtgtagcctgcaccacgaggagatattccccaaccgcatcggtcatctggatcagaccataagagatcacacattggtccttcatgtggaacctagaggcaacacaaacatcttagtctcgttatgtaaacatcaagtaaggtgcatccttttgttggtttggattctggaactaacctcttgaattcgatctaaagatcggatgttgtcaagtgtatctaaagaaggtgaaagtcctccatgtaaacagaaaacctacagaaaaaaagagttctgtagtcaagtccaaaacagcagaaacagagaagagattgtctaaggtagtgaaaaagctcattagttttttaaatacctgactctcaataagagctgtaagtggaagataatcaaaaagatcagtgaagtgcttccatacattagcatttccatatttcctcaaacattcatcataaaacccatacctgaaaaaggtaagcaatcagcaagaaacattttgagagaggctgagaagcttataatacanaacttagtagagaaaacaacttacacttgagtaatttgacggctttcatgattccctcttacgatagtaagtctatctctgtaacgatatttcagtgctaccaaaagtgagactgtctccacagaataataccctcgatcttcacaagtttaacaatgatccattagttagctaattgagcaacttaagtaggaaacggagcttaaggcacttaaacagagaaaagagaaacacaaatccgagtactcgaacatgaagcttcacaaactacattaaaatgttatatctcccaaggtcaagttactccattgtagaagccctgagaatagttaacagctaaaacaaaagtttcgtcttttcaatgacaaaatcttccaaaaccaaaacttttcgatagataaacaataatctatccatttctagtaaacacttccaaataagtctacattagccccaaaaggtcaacaaaatcaaatccaaattagggaaaatacccaaatccaaatcaagagatgtgagaaatgtagaaaccctaaaaaaagctataaggtaaagagagactctcaccaacataatcacccatgaaaagataattagtatcaggagaagaaccaccgatacgaaaaagctcgattagatcgtaaaattggccgtggatatcaccgcagacggtaaccggacatttaaccggttgaacattatactcttccacaagaatcgtctttgcgtgctcacacaacatcttcacctccgtttcagataacgctttacactccataagctgctcgatctgacgatcgatatctccggtcgccggcggcatctttctccgatctaaagtaaatataaacaatccggattgtttttaatctcggatccggtttgtgtttggattcaatctatctatcatcatcatcactccatggatttagaagaagagaaattgtgaatttcgatttttgttggaactttgtatttgttttcttttcatcggagttgataattaattattctctccggcagccgcaccgagtcaaagtccattgtgggggtctgacacgtggctttcattttttcaggcccattcatagggtcgttaatcgtttagcccatttggcccaacgaaattgaaagaactataacatagcccaccataatcataaaactttaaccatcgtttaaactttaaagcttcgttgaaacttgaaactcataaacttttaaccttaaatgtaactcctaattccaaattagtaaaccctaatcatcattttaacgtagtcgaagctcagaccactgaaccttatcgtacatgcgaaagtgttcgctccaaaaatatgtcccaagagaaaaatgtaagataagagtatatgacatttggtatgcggatgaaaagtttcatacaaattaaactattttcataattttcctttaatttaattcgttcacctttattgttgtctttgtaattaagtaactatgaataattgttaattaaaatttctagagcgataggagcagtcgtatatgtttaagtcaaatgtt

SEQ ID NO: 311 - DNA, 498 bp, Arabidopsis thaliana landsberg
cagtcagctatggtgaaacatcaactgaccgtcttcgtagttttctgattgtcttcatcagtgtccaattttccccagtgccaagccacgtagaaggaaccatcacctgcacaaacaaaaaaatgagcagttgaaaacaatcaaattcacaaaagataaacctttcttaagaagaccttgaggatatagcttcagaaaagacaagaaccaaacagaccttttttgtgtgttctatctgataagatcctcaaggacagagacatccatggggatcacagtcacactggaaaagaaagagtagaggtttcaggctatgaagtggaagtacttacgacaaaggcaaagtcttcaagggcagcaccagagtagaggtttcaggctatgaaggggattacagtcacaatgaaactcaccagggcagcaccagatcttccaccatccagaagacatatttacagtaatttcttgcttccgtgggaggatcttagggataaatgg

SEQ ID NO: 312 - DNA, 3753 bp, Arabidopsis thaliana landsberg
tgggcaagaagttagccactccagctaagcgtccgtgtgagatatgcagccataccgatcatccgaccgaagagtgcttgtatccaccacagactatcccttacacggatgattatgccaagtgctattattgcgaaggaatgggacatatgtcaatgtactgcctgtacattgcgccgaatgcgggcgaaggatctttgagaggagtcgggccattaatgactacggcgactgaggagaaatgtttgaatgaatagatgccctcgtttttgtgggtaaggtgtgattgtcccaagtgtaggaacctttgaccgatggtccgtaagatcatatagaaaaaaaatatagttaacttttcggctaagtatataatcggctaagtcatagcgaagtttgtgtgtaaatatgttaagacttagaacttgttgaatattatataagactaagtctaaaatctgatacttatgacttgtatgaacttttgaatgtataataagttaagtagttgcttttttgtgtgtggccgaccattatatgagtgagaaatcacatgtataagaatgagatgattgtgtttgagttcaaaaccacatcagaagaacatcagcaactgccggccgaatgaagaatcagagaaaagaaattaaaattagttgggctcatgacaagtctaaaacaggcatacttcagggaaacaagcaaaagaaaggaagttcagttcgaggaacagacagtttgtataatctcgacaaggagattcaaaaacatttgcaaaaatgttgggagaattcatggaagttggaagtgaccaaagattagaattcgaggacgaattctattgagtggacacctcactcgtggtgccttgcagctcaagtaatcaacattggagccgaagtcgactgagttttggaacggacacccgtcgccaccggtcgccacgccatcacccgagacacctatcgcctgtgggcgaggcagctgtccgaacatgtggcagcgggcggtgcagtcttgccgaccttggacggactataaataaagttctctccgcccaatttcatttttcaaaggcaagagagagactacaaggctgtccgactgataactcgtccgtaaccgagaaaaacttgcccaaattcagtaaatcttgcccgtggtcgaagaaactttgtccgttactagagaatctttgcctgtggtcgagagaacttgacggtgagtaaggtatcatcgaccgtgattgaggagttttgcccgagacccaaaaaactttccggactaccgaatccgtgagttgtggtcgaattgtgtgtttgtttacatgctttctagagctagtctttagatcatatgcatgcttactcacttagacttaactaatcggaagtcggcttaagttaaaaattgaatcttaaaatgacatgggcgtatgaggaacttgatatcactaaggaatggaatggactagtatttgactaggctaaggtgaatatggacttaactaattttacttgatgaattaagatatgattcgagggcttacttgccttgttagattgttatacttatatgagatatgctatgaggttgtgaataagtccttgatatattatgtataactataaatacgtgaattagttcttgattgtattataattgtttggggtgtggtaaaatacttatatttagttctgcatgaggttattgtgtctaagtggtattcaggggtttacctaatacaatcatgcttagagtaagctgttgccttcctttttgtgttgtaattgtgtcagtaagttttgatcttgagtggtcacttacatgatggtacaatactcggagcgtatgccaggtaatgcatgacgatgcattaaaatgatgttccggttataagcctttgtggctatagctcgggtgttcacagttgtgtacgtacgtgtggtatgggtgtgcacgtacgtgtgtgtggtagcatacgtgtggagaacatgtatacacgtatgcgggagtttgtgctgatgttgtggtgcacctttttggtaaggttggcagtatgctgggcccaaggttcattcatttttctagattggctgcatattctggtattattataagtatatgataattcgtttattatgtactctgtgatccctgatggatacgtttacctattaagttgcttaacccctagagatttatttgtgcatagacccaactcactgagtaatgttagattactcatgattctacttgtcttacaggtaaccttagtgggatgaccatagcggggagacgaacactatgaaatgccggaactaggatgatttacgtcgcttctgcaaaattacttgttattatgtaaattttaacgaggatccgatataaagatatattcttgggtaaatctttgccaagtataagctatatactatgcataaaatgttttcttaaaggcagccgagtgtttaatgatataagacctagtccgggtcgctcaacactataatatcacgagggttggcaagcctaagtggtgttcctagtgggtggaaggtcgattataatttggttaaagaaccggattcatctggaacctctactaagttgtgatcgatcaacttcactgtagcgtaactgtgtcacccgtggcttgtctagccatagggcaattcgggggcgttacaatttttgttatcagagcatggttatgcgatgctcgtggacacttgggttttcgatgattttatcgagtaaatttaagtcgcagaatgcaacattagattccggttgttcgtcttttagatggctaagtgggggataggtttacctcgttttgcagatgttgtctagcaaaggaagcaacacagtcagttcgttgcacggtcttaatgtgcccaaccccgaaaactttgctccgccgagcagtacggacgatgacagtttgtctgtggccatgaatgatcaaattatggccgaagatagtaaatctactaagtccgatatgtcaattgaatctgatccgtctgagtgttcggagaatgatgatgatcatgatgacccgttatctagtgaagaagcgaaccatgttgagtggatgatcaccgatgatggcaatttatttcgggctatcaataaaccaattttcaccgattttatctatgttttaggtataagattttgagtctttatgttatttctcgagtctttttagtctcttttcaagtattctatgcaatgggacaacaatggagataaggagacattttggagcaaaagctaaggaaaaggaagctaaggacgattttggttcagaaatcagcgaggagtgtcgatcgaatcactctttgtgtcgatcgacaccagtttcggcccagcaaaaaccctagacgctttcgagtttacagaagctcaaatttgcccagaagacttccctatgtgcattattagtccctagacgtttttagggtctatatatattgtttttagacctaagttttgtaaataaagtcttttatcaagttctttgcaaaaccctattgtgagagacataagctattcatccattgttcttgagagattctagtttttaatacaatgaagagatcctttttttcccttctctatttattgtgtttatgctttctatctcaattatgtcgtttgtttcattcaatatgtatgagtagtctgcttgttaggaatagggttctcattagggatcatatggtttagtagatgcccctttgctag

SEQ ID NO: 313 - DNA, 7685 bp, Arabidopsis thaliana landsberg
aagaaaagtggcatccacaataacaacttttctcataactttgaacccttcaatgcaagtacccaaagcatcgaataagtacttgaacttttgttgtgcatccacttccacatatgatattgtcccgggattcacctcctttaatacgtgcagataagagtacaagtcggtgtagcttttttcaggactaccacgcacatcactaacgtgttgtcttttccctctccatgcggtagcatacgagcaatgcaaacccattcttccccgaacaatactcattatgcttttaggtgggggagtttgaaactcacctggataatcctcatgcaaaatagacgcgattaatcgtggtgtgccggtatgtttacaattgcctgagttcttattagaccgcttgcatgtgtgcatcttcctgtgaactctaacactaaaacaatctgaactctttacttttgcacatcgtaaataccatcgacaacctgttgttttagattgccgacatcgtaacatgagtcgctttggatctgacgctatagttgcggtcgcaaaacaatacttatttgcagctctgttaaccaaatcttgcacgacctccttagaaacaaattcttggtgcaattcaatccccgttccatcttcccattccgtaacactctgacttttctcactactctgacttccttcaccaacacatggaagctcataatactcaattctaccatcaacaccattatcttcagtaacatccatccggctatccacatgctccctatcttcaataactacattctccatagcctcttcaaaaacccggctatccgcattctcaatagcctcttctacactattagcctcttcaataatcggttcagcattaacacaattacctcctgcaccttctcctataaaaatcgttactactccaccattctccacatcaaatgcattcaactcctcataattaacaccaactgaacttcttctctctacccttgaaatttcttccaccctctcagattctttatttactacctccacgttcaaagctggtctaattcccttagcattcactaccgttagataacctaaaaagtcatcatcatctacaatagatgtctctctctgagatgtgcatagaatataactcaatttcaccttccttgaggtttcatctattccaatcttcttgcatattttttctactaacatagagtatgttacctttgacgtcctcaacaatacaccgcttaaagaattgtttgaaatccactcatgctcttctgaataatacccattgtcaaattgtatgaatgtgtgcttgttcttcatcgtctcctgtaattacaaataaattataaaaacacaattacgtaatcattcagatgtagacataattgtacctatattataactcactaataccatttgtaccacctgtcatattgtatctcaataaaacacttgtaccgcttatactattatatctcagttttaccatttgtcccagttcgtcaattctgggtttcacaaatcgtaaatttcgattgaatactcactaaattctctgattcaaaacgataaaacagcccagaatgaacaatatctagttcttatgctcaatgatacacaaagcatctagtcatatttgacaacaaatccgctagcaaagcttcttctttattcccaaagctttgatggtgaagccgaaattcttatgtgttttcggtgttttgaatcgtttaacaaggaagcactactttacttttcgatatctctttgaggttctagttttatattcaatcatacacatgacatgacaagtagtcatatttcactctaaaacgctaactaagattcttcttgcttcttaaagtattatagtatatatgatcctaaagtctaaacctaaaccctacaccttaaattccaaaacaaaaaatcaaaccccaaaaccctaacccctgaatcctaaatcctaaataccaaaaccgtaaaccctaaaccctaaaccctaaaccctaaacccctaaaccctaaaccctaagccttaaatcctaaaccctaaacccctaaaccataaaccctaaactttaaaatcgaaatcctactttaggcttccagaatccggatgtggttgtagttcttatgctcaatgatacacaaagcacatagtcatatttgactacaaatctgctaaccaagctttattcttgattctcaaagctttgatagtgaagccgaattcttatgagtttttagttttgaaccgtttaataagaaagcactactttacttttcgggatctggttgaggttcttgttttatgttcaatcatacacataacatctagtcatatttaactctgaaacgctaactgatggggtcggattccacctaggtaaagagccaaccatgtttcaacgcctcgggagacatcgaggagttatcccaaactgggccacaaaacacctcggagattgcatcaagaatccacaccgaggcgatatcgagaatgcttcagagcattctcgtgaaatggtcccccgacccgacctcgaaacacctcggacataaaacctggcaattcgtcctgaggcgggctccaagacccctcgggaacgtatcctcaaaaaccgcggtccgagcatcctgagcacaacccgagaccagctaaattacggctcggaaaaacctcgggttggacgaagaaaccttcaaaaaaggacttagccggtataagttcaaacacatcatttccaaaaaccccggaagagataatcttcaaagatatcaccgaatacggaaattcccagaatcttcggaagataaggacaatctacttcaacaacttaaagataaagggaaatcttccgagaatatcgcgagaggcgatattttcgagctctataaaaagcacctcgaaggaaaaacaaaaagacacgcacaaaaacgctctgattttgaaggcaaaaacacttattttcatactctagaacatttgtacgatcaaatcgatactttctcattaatacaatcaagaacaccgtccgcggtaattgagaattctgttgttctttgagaatctcacaaagattcgttctttgaagaaacccttaaaataaattctattgtgcgagtttcgactctcacactaacctggattctttttgcttcttaaagtattatagtatatatttgctcttaaacactaaacataaaccctacaccctaaatccaaaaccctaaaatctaatccctaaaccctaaaccctaaatgataataggtttttagtcaattatcctaaaacacgaatcatatcgttgtagtattttaggttgtcaatccaaatgggtgtgatgctaactatcaagatgtgatcagaagtcactaagtcaagccaagcaataacaggttttggttcgttctagcagtcctaagtgaacatgctgaaaacagaaaatcaaacagaaacagtaaaacactcgaccaacacagctctttgcagacactgggtgaggtcgagtgacaggtcgagtaacaggcagaaaatgaaacacagatactcgactgcacagtctgttgctagacaactaggtggtcgagtatgaggtcaagtaaccagaaagaactgcagaaattaagcgacagataacaagatgcagtaaacaacagtagagtaaacaaaggattcaatcagataaagaattcccgaggatggggtaattgagtagtttcgttttctcagtttacaggtgattgacatgctcaataaattaaccctagacaacaagttcattaaccaaatctaagtgccaccgcaacagagaccctcaagttaacctagtcccagactcaatcaccattgacgagagctaacctaacaggcattacgaatcaacaagttaaagccaaaacgctccctgcaaccaataccttggtacagggtcacgaatctctggaattagtggttcagacattttatcgaaaaccttttgggcgcggaaatgtctgggctcaaattccagttgatcagaaagcaataggcattaagaacaactaatccagaagggatctatcaatcaatactcaatcacctagcatactgagaattctacactactctaacccatcctcagaaacctattcactactcagacatcataacagaaagcataaacgttgaacaagttgaaaacatgataacaacagtgtaacagcaagatgataacagaatgaacaacagtaaacgaaaatcaagaaacaaaagctgaatactgaatactgaatagataaagagaaatccggattacaaaaggtctagaacacaaggtatgcggaataaaactagataaaaacttgtctgcgaaaatgtgaagtacatgctacttatagccaaatatccagaaaccctaatacttaaaacgacgaagtatcgggacggattatgaactgtactcgactcatgtggtcgagtgggaggtcgagtgaatagctggagtcttcttttcttccttgtgctcgagtgtctggttgagtgcagaatgaagaagactctgaagcttgcaatcgagtatgtagtcgagtggtggtgatggtgatactcgacttcaaagttgagtggtgtggtagagtagtggtctggtaatggaggtgaagacactcgacctcgtggtcgagtgatgtgatcgagtggtggtcagaagatggagatgaagtcactcgacctgggggtcgagtgatgtgatagagtggtggtgtcttctactcgacctgggggtcgagtgacttccaggactcgaatgacgaatgtctagcagggacctgtgagactctctgctcactaggctcaggcctgtgctgacttggctcagactcatcaaatctcctcgatggcatgtctcgaggaggttgtccctgtggaatagctatagtggaagagttgaagctcagcttatctatcagaaaattgatagtcttgaggcacttggggagtagcttgtcctgtttcttacagtaattctacagcttgctgttgtttctgtgagcttcactcaagctcttgctctccctcgttggaggtacatgttcactaaaattatacatgctagtgtcaaactccacttctctgacttcatccatcccatcctcagcagcttcttctataagatcatcctcatccaatggcggagcgttctcatagtagaggttcccaagcgcaggcctaaaatcaatgttatctccctctattatgcgtgtaacctcaaggctggggagaaggatgttggctctcttatctgtagagtgctcaaacctgaaacggtccctatcgccaaccattgcaaactccaggaattcgcaatgatgcagattctcgatatccattgcccgtggctcaagtccatcagatgtgattgggactccacaagcgatcagaatcggtgtcacaacaccacttatgcacagagcgcatcgtgctctcttgtggttattgctgacagcccagctcttgtatccacacaggtggatctgaagaagtatagagagagatgtgtcattgatttcaccttcaagagacatattgttcttagtttggcggagagtgcctttgagagccatagtgatgatctccatattcgaattggtaacagtccctgtgatctctcggagcagaggacattggctatagaacgttggaagtacctgatgactggactgcgtatctgattgctcttcgatatagaagaattcagcggtacagagctgccaatggtgatccatatgtctttcaactcttctctgtcatacttgggcttagtacctgttccacttgggaaaccaaacatagagaatcgcaagaatcccaatccttcgcattccaaatcatcagaggtcataccttggtaaagctccacttacagtgtggagaggaactaaattgtttcttcttcataggctacatatggatatgccatcagagtgtccatatgacaactctggtacaggtgctgaacatcctccagtaatccaagttgtgcaagtgtggtcgagcatggatatcttgtgctacagaactcattcagtttaaagaaactgatatactcctcagcagacaatacatcaggtttgtgaagaagtttggtggctctgcgagtatgctcaggcatgtactcgccttccagatcctcatctataagctcatacctctctgtcattgctctcttcccttgagctatctcagcttttctcttgaagttatcatattctctctgttctctttctggccttgaagacgacgactctgtctcacccatgttatagtcaggatcaattgaagaactgccactgtagttactcatgattctcctgcaaaagatttagaactcaaaacccaaatgtcaataggttagtctcaaagataacaatgaaaccaaaatcgctatgcaatgaaatggaccaaattgatcgagtatagccttgtactcgagtaaactgggctgtctccgagttctgctttagtgaatcgagcaaaacagaaaccggtggtcgagtaaacctttggaggtcgagtaatgttgaggaagtcggtacagctggtgagttcagacggtcgagtgctttgtcggtgagccagaattggcagggacgaagccacaaatcgatggtcgagtcttgtggatgtaatcgagtagctcttgggacttcgacggcaaactaggtggggactcgactgcggcggcgtagagacggtcgagtatggcgagaacaaagagacgatgaacggtgaagtgaattggtcgagtatagggacgaaagtgaacttggtgacggtgacgaagcggtcgagtacggtgagaaggggttgtgtgattttcttcaccgcggtcgagtggtagccttgaagacagattggtcgagtgaaaaagatgtgggcgatttcaaaaaggagtggtggagattgagtttgagattctctctccatcttatcttcagggagaaagcgcgtggtccacactctgttgacttgtctttgaaacttcaggaaatcttccgtaaacctgacaaaatccctacaagtcttcgtagctcctgttggtcgagtataatcatgatttaaaacttttttttttttgggttttaaacatcacatgtactcgactgatgtactcgactgatgtactcgaattcaactccaccggggtatacactcgatctccaggccttctgtagagtaaaagttttgaatttttactctatctccacgttgttcttttgttcctgagaaccaaaaacacaattaaaacaaataaaaaataacaagaaaggaaaaatttatttacaaagatagtcatgggacttcctcccaagtgagcttgtttaaagtcattagcttgactcttttactcctttaatcatcaagaagttcctggaaatgaaccaacgtcacctctggaaggatttgatcgactaagtatttcttgagcctttgacccatttactgtgaagtctccactcttaccagcttgagtgactgctccataaggacggacctcagtgatatagaaggggccataccatctaggtttcctggaaagagtttcaaacgagagttgaatagcagcacttgatcaccaacctgaaaatccttggtgatgatctttttgtcatggaaaagcttagttctctc

SEQ ID NO: 314 - DNA, 6189 bp, Arabidopsis thaliana landsberg
cttgagtatcttgctttaatttgaaactcgctactctgatgccattctctatctattagaacctgaacttaatttacaattatcatgtctttgtattgatttatgaactcatggctatcatatacatacttggattatcgtcttaacttcaccaccctttgttaatccaagttgttgactctcacttttagagcagtttcccataccctgaacttaaccttatttcaagccaaagatcatttgtgtgtgtttgtgaggtttatttccgagtgaactttctataacgtgttaggtatgagctgacaagagcagtctttcatttggacctagcccatgctttttgggttagctaggaataggtggagacttgtattgtgtatggaatgaatgggaatgagagtgagaatgaaaagaaaagaaaaaaaagagagtaagagtttagagttctaagggggatacaaaagtgttaagtctagtaaagggtttggaattcaaagaagttaggcactgtgattcaaagaaaagggtaaaacgccatatgtgctaagaatagaagaaaagccttaagtttgtcaaagtatagaaccaaacccgctagactcttaaatcatttcaaagagaaccccttagaacttgaaccaaaaagagagaaagaatgagaaaaagggtaccgttaggacatctatgggaatgggatcatcttctgagctatcatactatatcattgggtagatgagagtctcttcttgtatatgtccgttggcttttacctttagcattctactgaagctcaatcttttctttgagagtcccctattactcgaccaaaccattagagagaccatctttgtctcttagcctaaacccgaaaccaaatgagttcataaccattgcattgcttaatccactgttcgtgcttaataaatgtcaaagggaattggttaatgtgaatgcttgaatagattaaggcaagttgttaggttgcattgtgacgagtatggctaaagttttggacattgatctacctggacaaagggatctttcaccttacaacctagaattagctacctggacattgatctcacccgttatatatgcatgcttcggtttttgaatcccaaccttcaaaccttcaaacctctccttcaacttaagattttttgtttgcttgaaagcaagcaagacataagtttgggggagttgagaacattgtattttactcattttaggcatgtatttacgttcatttagctttgcatttgctcattgtatcatatcattttgcatcacatttagatcattttgcatacttaggcatttaggatcatcttgcatacacattgcatgttttggtgtgttttcaggtgcagaaggagcttaaaaggattatactcgacctctttactcgatctaggcagctacagaggaggctttagttcactcgatcctcttactcgatcaaggcagccttagtggaagcagcagattgatctactcgcccgtcctactcgatcctctactcgaccaagggtgaccaactctacaagacttgttgatctatcaaagtgacttcggatcctcctcattccccactcaaccaaacatctgagcatacagataggagaggaagatgcatctactcgaccaattgatcactcggagcatagacacaaaggcgcagactttgcagcatcctctttactcgatccccaagatcgagtatccgtccaaaccgcctcaagtctcttgtcttctagtgaatctagggtttcaacatcttactataaatagatcactttggggtttgtccaaaggatctatgctttatctttcaatttttctttgtgtttatgaatcttaaaaccttaattactcttaatctatttcttttttgcatttgattgtttaagtaaagttgtttagcttgtttagatctacattttggtatgatttcagtaatttatgggtttgtgttcttgagaatgttgcttgagtagtgattagggttcttgaggatggattagattagggtaatctctaggttagttaggtggttagtgtttaggtttatatccttatggattcgcttggcccctatgcggtttttgcaggctaatgtgaagattcgaccatagacgtccagcgtctaaaagacgttcaaatggatgtctgatcttacgaattccagagatttgtagacttgatcaagagattagctagtctgtttattggctttggtagattgttgcttaaaccctgctctgctatgtttcatcaacgagagttgagattaggaagtggtagagttatgggggtctctgtcacgggagtggattgacccggtttttgaatctatcgtctagggtttctgccttttacctgttagccacctgatgaaccctagagttgcccttatcaatgaatccatccttaggacttctattcttcttagatttatttgtattcaccccctgattgcacttgtatttacctgttacttgtgtcacctgttgattgcattttagttcttaatttgtcacctgttggttttactcgacccaatgatcgagtagggctcttaaagttctcatttttgttgtttgaatcctgacctaggattgtttttagaaaccaaacatctctataatctggcttgacttagttgcttttgtacacatctttattgctagcaataacagtggactggactgacaccccctatacgtgcatcgacatgttagtgtttgtaggggagttgaactgaacctcacattcagcatatataagtaggcctaaaaaaaaactacttatcaatttggcgccgttgccaattcattgttgcattgttacattcaagatcacagaaaaagttaagatcaagttcttttacatttatcaagttactaactcatcatttcgtctgcttgtttttgtggtataggtactaatctttgtgcatgcaaactcaatccaaaggttctgcacacctattaccattcagagacagaattgacaaaataactcttgagttacaagaaaccaagacaaaggcagcttgtgatcataacagaccatctgctatggatcaacagtatagaccagttgacgttcaagacccacctaatgttgatcaaccaagaaacattggtgttggtgatgccccaaggaatcatcaccaaagacaagggatagtgcctccaccagttcagaataacaactttgagatcaagagtggtctcatctcaatgatccaaggaaacaagtttcatggcctacctatggaaaacccctggaccatcttgacagctttgataggctctgtggccttaccaagatcaatggtgtcactgaagatatgtttaagctcatgctatttcccttctctttgggagacaaggcacaccactgggagaagactctgaccccagactccatcacctcatgggtcgattgtaagaaagcttttattgccaagttcttctctaatgctcgcacagctatattgaggaacgagatctcaggcttcacacagaaaaacaatgaaactttctgtgaagcttgagagagctttaaaagctacaccactcaatgcccccatcacggttttaagaaagcatcattattgagcacactctacagaggagctttaccaaagatcagaatgctactcgacactgcctcaaacgaaaacttcctgaataaggaagtagcagaaggatgggagttggtcgaaaatctggcacaatctgatgggtgctacaatatgacctatgatcgctcagtgggaggagttatagaaactgaagatagacagagaaaggatatcaaggccctgaatgaaaagctagacaaactgttgctggctcagcataagcagatacactatatcactgatgaagagcatttccaaatgcaagaaggggggaatgatcaaactgaagagcactaatgtagctaacccccaagatcaagtgtatccaccacaacagaatcagtctaagccatttgttcagtacaaccaaagttatgtccctaaacagtagttcaatggaggataccaacagcataatccaccaccagggttcactcaacaaccacaacaagccccagcagctcaagatcgtgaaattaagcaacttattcaatagatcattcaaggacaagctactggagctatggcttttgacaagaagatagctgaattacacaacaagattgattgttcttacaactatctaaatgtcaagttcaaagctttgaattccaaaatcaagtatgtggagagtcagtttgcatcaacctctgctccgaaacatcctcagcaacttccagggaaagcagtccagaatcctaaggactatgctactgctaatgctatcaccatccaccaagaagatgaatctccaccaagtcatcagactctcaatactaaggacagtatgaatcaagaagggggggattcaactcaaattgctgcacctgccacccaacaattcatctggaatatagagcacacacctttgctgaaaactcgccatccttaaaaaaagctcaagattgaaaaactcaagaaagatcagaatcaaaacatgattagcagtgcctcttagccttatgcctctctctacagctaaaaggttagggatcatggaatacaagttctacaacttagctttactcttagctgatggttctgttgcacatccacatggtctaatagaaaaatctgcccgtcaatctaggaatgttgagatacctacaacttttgtggtattggacgtagatgaagaaggcaaggatcccctgatcctagggagaccattcttagcttcagctggagctgtcatagatgtcaagaatggaaaattaatctgaaccttgaaaaaggcatcaagatgaagtatgacaccagagaagcttcagagaaaccaacgacaagaggttagagttttgggattcaggacatggatgttgatgaagaaacagaagctggaaccccaccaaaagttaactgtacttctcaactcaccaagttgaagagaacttttgaccacaagaaaagagcagtgacacggacaactgagcctgacgatcttacagaagatgactggtatgagatgagaaaaaaatctaaatggcaaagcagagtcatattaagattatcttcaagggtgatgaagctgaaagatcaactatggatgtttgaaaaaagagttaataatgctccaagtggtattgaaccaaaaaagatataaactacactagctatcaaggaggacgaagatttcacaacagaatgattagcaccagaagatcagaaaggagttcccttataggaaagaagcctagagagcaagttgttgagtgaggaggaaatccctattccgacttattctccaggattgcctaaacggcccaccaacccctctgttgaagaagaacacttgattcatgattctgttgctgaagaactcctggagctctggatttgatataaagctcaggaggatacaattggaaagttaactcataagatggaagagttaaacagcttcattctggaacttcaagaaatggtcaaggactaccccaactttgaaattgaggattggtcgaaggagcctggttcagaagaagaagactactctgctgatcagaaaaaagcttattttgaagaaaaatcaaatgagtattcatcctaccatatgtcaagagaggatgcagagtatgattcaagcattgaaagttcaacaactgaagatgaggacttctctgttcctctcttcaacctttttttgactaagctctgtaagagtcaagcttcgtgacttaaaacaagctcacttggaaggaagtctcatgtctatccatgtatataaatttctatttttctttttatttttgatgtttttgtttaagtgcttcaggtttgttttagtgaccttgaggaagtcaaatgtcgagtaaattcaaaccaagtcaagaaagatctcaaacgttgatcgagtagaatgaggaggagtgttttgaggcgttgatttgaatgaccaaatgagagaatcatcaccaccgtttgatcgagtgatttcttgcattctggtccgtttgatcgagtgcttaaagatgaagcatttctcaccgtccgatcgagtgaaaaaaccaaagagaccctcttcgtagacaccgacg

SEQ ID NO: 315 - DNA, 1727 bp, Arabidopsis thaliana landsberg
cgctttaagatctgtaataagtcaactctcggcgccctgaccaggtgttcgatgcgcgtctcacatggatgtagtgatgaaataatccacaccttatttgaaacttaatttttctaataaggatagccgagaccagttttctcgcacttaagctctggttcggacagaaagataagtcgaaccctgtatttcgcaatccgccgagcagatgctctacggagagtaagccgagcccagcatctcgctccccaagtaatatgccgagtccgcctcacttattcttaaaacagagtccagaactccctctttaagttatacataggcctactggacataagccgatagacgtctcgcgtccagtacatgctgaatattgtcattcttaaaagccgagctcagtctcgcacttaacatctaatccaaacttagacagaagaaattgagtccgatctccgaggtcgcacgcacaataagccaactgaaagcaaagtcatattatattaataaacgatcaaataagatcggtagtcattacaaagacgtttattctagaataaattagagacgatcaaacaagatcggcagccgttacaaaggcatttattcgaagaaaaacagagggaaaatgatctgaaggccactaaggatcatcttctatcatatcaaaagcatgataagagaacatttcgtagcattcaggagagctacaggccagatacctcaaaggatcatcttctatcggtaagtggttctcacattccatgcttaaacatttcatagcatgagcaggtttggctaattgctttctctttatacagtgacggagtaagcgaagggcagtttagtcaggttctgctacatgagatgactgctatccgcaaggcttgtaactctctccaagagaattatgttcctcgtgttactttcgtgattgtccagaaacgtcaccacacacgtttgttccctgagcaacacgggaatcgtgatatgactgataagagtggcaatattcaaccaggtttctcactctctgctcttctctatcaacttaattcctttaatgatccagatttcaagtaacatatttgtatttccttatcaggtactgtcgtggacactaaaatctgtcaccctaatgaattcgacttctatttgaacagccatgctggtattcaggtattgcttccagaatctagaccaatttatgacctgttttgtctcagcagaattacaacttcctttgaatgtttgaatggtgatagggaacaagcaggccggcacattaccatgtacttctcgatgagaacggtttcaccgctgatcagttgcaaatgctcacaaacaacctctgctacacgtaagagacaacaacattgtacattttccttatgacatgttttaactctctgaaactaacaaaacatataataaaatgcatatgcaggtatgcgaggtgtacaaaatctgtgtcaattgtgccaccagcctactacgctcacttggctgcattccgtgcccgctactacatggagagtgagatgtctgatggaggttcgagcaggtccaggagcacaacaacaggtgtgggtcaagtcatttcgcagctcccagcaataaaagataacgtcaaggaggttatgttttattgctaatgattcacttcttctcttgccagttttaaaagccgttaataattatgaaaactatattcggctctcggttatctc

SEQ ID NO: 316 - DNA, 934 bp, Arabidopsis thaliana landsberg
tgaaagcctaaaattgttagcagtttgttgggcacaagtaaagctttctttaatgttaagtaattgtgagatttgtttaacccactgatccttcaagcttaatgctcaaaagctggttaacttcggctccaaattcattaggcaacttgttgaaaacatctctgcaaaatccagagatcattgccgctaatgctctctcatgatcgatacctctctgttgaaaatagaaaatctgatcttctccaatctttgaagtacttgcttcatgctctattctcgccgatggattctttacctgttataagatcttcattagaggtgcttttatcataaccttataataaaaggttagatgatcatatacaaagtacctgtatgtaaggatatgtattagcggctgcattgtcaccaataagcatcgagtcacaagtcgaagtatttctagcgttctcagctctggattggtccatgtatcagcttgctggtagttattagtcaatgatacggattaaaactctccaacggaatcatctccttctaaaaccacgcttggatacttccaagttatcgcgaaccctttctcaacttgagtccatgagatcttggaacgatcaccagcgcagagaccacgctttgtgacgaaattgtaaatcccacctttaccttgttcatcccctgcatatcaattctgcaccgtcgagtacttaatctccgctccttcagcgcaatagagctcaacaacagcagcgtgaagctgattcttgtcatgagaaatagcagtgcatccttctgaatactcaacaaaactaccttcctcagcaacaatcaaagttctttcaaactgaccagtgttttcaatagaattcatccgaaaataactcgaaagaggcatcggacatctagtgtttttcggtatataacagaacgatccatc

SEQ ID NO: 317 - DNA, 1378 bp, Arabidopsis thaliana landsberg
  unsure (1)..(1378): unsure at all n locations
tatttagtctctagttaacaaacaatcaaaatcgctatataaataactccgtttagatgtaaacaaatcatcctaaacttgttctcttccagaagaaacaaaaaacaaaaatggcattgcaaaagtttcctctcatggggctgcttttgctcctaaccatcctcgtctctgtgacaacagcggtcgatgatcctgtttgcccggcgacttccaagctaagccgagcaagtttccctaatgggtttttgtttggcacggctactgctgcgtttcaggtacaacagatttaccaaatcatagttcaaatttttttatttttttaaagtagtgtcgttattgtgtttctatctgaactaaaatacacattcttaaaatatgattttgttttataatagttgctcaaaatatgttatacctatcgattgaacttatttgtgtatgtgaatatttcctcaactcattaactattttttgttatgtcattaggtcgaaggtgcaattaacgaaacttgtcgtggaccggctctatgggatatctactgtagaagaaatccaggtgagtgtactcgtataatctacattctcgatacagtatgtttagatattaaattaaacttaactaattaatatcaatacatagccattaattttcttaactactttcaaattacagagagatgtagtggcgaccacgccgatgtggccgttgatttcttccatcgttataaggtatatattaatataaatttaagacaaacataacttatattctcgagatgttattgaaattttgccttgtcttaaaaatgtttgtaggaagatattcagctaatgaagaatctaaacacagatgcattcagactctcaatcgcatggtcaagaatatttcctcgtgagtatatgtctgcagatctctagtttgattttgttttaatcgaatttggtgaaattagatttatgtgattgttatataatactaataaccaatgaatttagatgatgtatatgtgaatgttgaagtatcaataactaatgaaacaaactgtaatgctttattagatgggagaaaggagaagggagtgagtcaagctggtgtgcaattctaccacgagctcatcgatgaactccttaaaaatggttatatacatataaaatacctagttcacaaaaatacaagtaatatagtatccttatttaacatttctttctatttacgtcataaataggtatagttccgtttgtgactgttttccattgggacactccacaagatttggaagacgaatatggcggtttcttaagccaaacatngtgtatgtttttgtaaattaaacaaaaacatttagcttagttatatggaaatattaattgatatttt

SEQ ID NO: 318 - DNA, 567 bp, Arabidopsis thaliana landsberg
acgtacacaaggtgccatcaacgggcttgtagtctgttcctttaatctgcagataaaaaccaaataaacttttaacagagattatatgtggtgattacgcacaaaaaagagcctggtaaatacctgcagcccgggaatgatgcctcgtgcagcatcaaagcaagcaccagagatccgtccatgctcactgagttcaggtcttggagcttcacctagtctaccctcaggatcagacccaatcacattgaaatatctgaagaaaaccaatttgaagacagaatgaactcaacttcagggcaagagaaaacaaacacagaggtcacacacacacacataacagaattaactaacaaccttaggatcataactgccatattagaattcttggagaaatccaagatgatatcttctgccatctttttagcctttccatatggattgattggaacctgtggagtatcctttggtattggcattttctaaggctctccataagtagcacatgtgcttgaatatatcaaaggcttcacaccatgagcaggcattggctctaaaactaccaatgtg

SEQ ID NO: 319 - DNA, 703 bp, Arabidopsis thaliana landsberg
gacgcagtggaaatcaatgaacgattccttaggaagcttacgaaagggtataagtaaaactagcataactgattgcaaagccaaaacagaagtaacataaattttctttcaataaaaccgatatcggccattgtacattaacacaaataaaattacaaagtgaaaacataaagaaaattacattacaaagtagatgatgcttcttcgctacacctcggagaaaaactactcaagcttttcaaaataacaaacatcttttttttttgcatatcctcgaatatgttttgtattattagaactaattatttattgaaataagtaactgtattagcaactgttctttagacgacttgaaaatctcatttatttgaacacattcaaaacaatattcattgttttcttttgcatatcctggaatatgtccaatgtcttttctagttcgtcgatatgttgaacttagaatacgctatgttggacttagaataattttctaagatccaccgataaatggtctattcgcttgtagagaaaaatcacaacaaaacaatgctgtttcatctcgaaaacatccgtaacccaacgaaaccaaagaagaggacgggaaggaacgaaactgacacatggctggtgaaaattggaccgggacattgaacctaaacttctgacaaacgcaatcttcaaacttaactaatagacgaacgct

SEQ ID NO: 320 - DNA, 2782 bp, Arabidopsis thaliana landsberg
atacttgaatccaaccttggtttcaagctttaattagtatcttcgagaacgagtcaaggtttgatcatccaatgggtggcttagcgattccttgtcctgaagatacctacatcactgtaatccaacattttgttcttccgagttgaaaaatagacttactcattgtaaatgtaggagtttagtccctcttgttcggaaagtttgaagatagaatgccacgtttttgcaaaagacttgttcatgtcaatacatttaggatcgatcttagaaaaagaaagacaacaacatttgacgaactgtatttaaatatgattattctgctatatattgaatgaaaatgaataaccgaatgaagatagtcttgttcaaaaggacatgaaagccaatgaataaaaagaggagacgatgcaagaaacaaaataaagcactgcaaatggacttaaccaataatcttaatctttcttccttttttgttcttgttgcttttggtttcagaagatctaccttttcttttaccctttggttgcttgacaggaactttcactaaacttggaacataagaagagaacacaagtggctgaccatttccaacatccgaagctcttcccatattcacacatttcaggtatccatcttctccaatgatgtgagctttttggtagctacaatgtatatcgaaaaccgcagcaactttcttctcctcgtcaatgacgaaactatcagcgtaaaagtcaaccggaaaaccagtgagtggtgtgatatccactttcagaaacttgctccacgacaccgctttcggatcaatcttgtctgtaacccaaatctctattcccttatatgtcttgaagctttgatatagcataacgagccgctcttctcctatacaagataaagccacagtctcttcaacatgagggttaaacggtagaagcagacgcggaccaaatctctctgctgtataatcaaaacagagcaaaaaattatctttgggcaggacgtcgtcgtcatcttcgtaatcttcgtactcttcgtcatcttcctcctcttcgtcctcttggtcatcataatcattcccttgaagtaagaaatacgtatttcccttcaaagacacggagcttcgttgaacagaccatacatcccactctggtttcatcacttcctcatcaagcaaactccatgaattcgacgcgaatctgtagatttcgtatcctaaaccgtcgctgttcttaaaatctttcttaatcctcaagattttgtggctactgttgttgttgtcgtaaccaagagcatacctatcattcatgtcggcatcggaacttacttcgatcctcctcgtttgccctagatatggattccataccaaaagactacagttgtcctctatgacgcataacaatatgccgtcacagtgaaagattttctctacttctatgttgcgaggaatatcgacctgattaatgcacggaacgacgtagtcatccttgtgaatgtcatggagactgaaactcaaggaacagattttctttttgatcaacattaaaccttgctgcttccttgcagcttcaggaataatcttcttttttgagagattgttccactttttgcaagtagatcgcattgtcctcagagatgtaaccggagtccttgagagaatctcttccaaaacctctgcagggagattagacatcgtcgacattcttctaaatttcagaaaaccaaaactgcaaatggagtttttttctttcttttaggtgtaatgtgaaaggtcgcaatagggttgtaagattttaaataggcagataatgttggttgcgatttaagaatattctccaccaaaccttttcaaatttcatgtcaaatatctaaagcaaaattaaaggaaatgattgatatagtaggatatattacttggtcaattccgtatcttagattgtatgttaagtacaactgtaacaaaatcttgtaaatcagactttccatgtttacaaaaatgggccgttgaattgacaaaaactggcttatatgatttggtctaattaaatggccatgtcgaacccattagaaggaggactaaccaattgaaatccaactttggaataactaggtcaacccattgatagacaacccattttgtataaaatggagtaaagtgagcaatacaaattaattgagtgcattcgcttgttcctttttcttcttacgttagtgctgtcaccatcttcatcactttgctacgtaatttgtcgtagaatgtaataaagttccagtttttcgtatgtgtaacattgaatggttacaaagtttgataacttttacaagcattattgtgtagcataaggttttgtatttgaaccgaaaaaaaaaaggttttgtaaatgtcattgtctttgacaagcaagcaaaaaaaaaggcaagtaaatacttaatagtgattgtgggatcacttcattaaaatcagacaaaaagcaaaaccttacaaatgccaaaaccatcatgatattgacaaattcatgggtcctctgtagttgacaccttttacatccgtaaattttagacgtaaaaatgatggtatatgattattctgctataattcctaaaaatgtatgtaactgcagatgtcattattcctttttcgcagacgtggttatatgaattgacattacacctctttagaatcaagatactcttttattctttgcaattcaatttcttctgtccttctttttgcaagtttctcaagtagaccagattttgtaaagttttaacaaaacctaccatttgt

SEQ ID NO: 321 - DNA, 738 bp, Arabidopsis thaliana landsberg
tatggccgatcctgtttcaatacctgtaattcaaaaaacaacacatttcagctaagaggcaatgcagagatagaaaaataaaggaacaatccctattgaggaacaattaccaatgtcgaaaacattcgagcagctaatttccttgtctttccagccaatatcttgctcaaacttagatctccaatgctctacaatgttcaaagaatgttacacgttagtagagaaacaataagctctcaaagctagctacgtacatggtttttggaatctttatttaccttgttctctttggcaaagcatcagaaattatgggagctttcatcattttctcttgttgtcattataccggcgactactccaatggctccagcatgccaatgactttgcttgtgtcgtattggaacatgtcgaattctcgactttcttatcatttatatctttgctgattattttgatatgatcaaacgacgacgttttagtgatatgattactctcatgttgtgaattctgattttcaaaatgtgttgggttggtaggatttatattctcttaaattaatgtatcaagttctacttaaatttgtagcatccctagagaagactttctttttgtagtctcttttctttgattcatctagtgttcggcttttattggcttaaacaaatgattggtcaagtcaacatcaaaaacctggttcaaacccatgaccctttttactctcttacttaaaccgcaaaa

SEQ ID NO: 322 - DNA, 1109 bp, Arabidopsis thaliana landsberg
ccagtgttgcaattgtggtattttacaggttcccgaaaatatgacattttcaaaatttcttgtacaaatgaaattattttgtcaactacgctttcttttacaattgggctttgtcgattaggtgggcctattattatatgaaactgggtttcctcttgtgtagcccagtgggcagtataaaaatcagcccaaaacataactgcgaaattcaaattcttacccactcgcacaattagcgcgtcgacgccaccctacaaaaaatggctgtttttggtaaaattaaaaaattgggcgcgtgagggagttttctgtgttgaggagaaaaccaacggtcgttgacattttaactaaatgtgtacgttttatttgtgattagtttgcccaaaaaaaaaaaggaacacgcaaaacacattcccatcagctcaaaaccaacaaaagagaaaaacttatgaatagagatattgagagacagagaaagtaaaataattttctacgatgccaaattgtaatatcaaatcataactgtatcaatcacaacatacataaccccaaagagagacatatggtaaaagaaacataagcaagcacaaggctaaaaatccagagagcctacagtgaccaaagcaaaatatggtttaaaaaaaaaaaatggtaaagctaaaactacatcaaaggacaaggaatgatattacaaggacacctcaagactccatcttcaggttgttttctgaggtggaattggaggagctgtgcttgaaccagtcctttgcgcagaagagagcttccaaggtcacatgtcgaagggagctcctgtaattatccatctttttcacctccgtgtcaaaaacagaatctggagagacagtgcaaaagggtacagacaaaacatcagctgccatcttggagagggttgggtatttggttcggttcaggctccaccagcctagaacctcaaaatcttgtgatcgcggtattagagattcctctaggtattggtcgagttccgatttcatctgttggtgactgcctacctccgagatgtaaagctcaaagtctgagaaaccatcttcaatggtgatgaggggaaactcctgtgaagatgcttcaag

SEQ ID NO: 323 - DNA, 1986 bp, Arabidopsis thaliana landsberg
cagtcattagccggctgcctttatagattattgacatatgccagtcctttaagtactcaagatatttgtttacgatacaaaattaaaacatctatctttaagactttttgttagggttaccaactgcatggtggctttgtggccccgtaatatatcaccttcttgatgtaaatatgtaataatatatcacttacattgctcagaaccacaaaattttatccaacttaacttatcaattgtataccttgttccatatcaacatgttaagtaaaaaaaacaaaactaaagagatctatatgatacgcatcttcttatcataactatacattcttacattttcatttatagaaaaaaataggaaataactgaaagagtgtgttttgcatcagaattctttttaaaagtaaacacttattaaagcttaactagttcagcttatatcatttaaatacatccagattttgatataaacatgtatatatgttgttatattattttctcttttggatttttgataagtaattctagttttttctttagccacgttttaagattcgctggggcctgtaaactcaggaccgcctctattggacgtcggaccatgatctagattgaacaaacagaagtacgcatctcatcaggtaaataaaacagtgctaacattacattgtatattgtatattacaatatcaatttaatacgtacccatcgttacatttaacgtcttttgtttcatttcatgtgtatatatatagaaggaaaaaaaaaaggacaatcaaaatagtaaaaaagagtaataactacgacaaagatagctaagcgacctctttgtctaaccttagtgactcgagcctctcttccttaaccttctttataaacgcctcaattcttcgattcaggtcctctagactcggcaacatctctttctccatcttcaccggaggcgtcaccgtcagagacgactggtgatagtaattagtcacgtctctaaaagtctctgatttcctcaaagaatcaccaccggcgccaagtccgaatatatccggtctctggtaatgactagtactcaacggtcttgacgttccctcctccgatatcgtcttccacttattatctcgcttcgggttcaccactttcaacgccttctttctatcatcgcctgcaaaataataatccccctccgaagttacataaatagtgttccaaaattcgaataaaaacctatccgttgtcttgaatgacgtcacctttttccttaaacatttggaagtgatagtaccttttggagtcactttgaccattttccggtgttcaaatctagccgaaaccaaaggcttctcaaccggagggagattctctgattcttccaacacaacaaactcatctccgccgttaatcagttctgaaatctcctcctccttctcttcatacacaacctctgatctctccacctctggcggctgaatcgtcgccatgaagtcaaagtccacgtcaagatccatatccttaacctcaagccgtggcggagaagtttggttgacgattggctcagtttgaatcctatagtagccacgtccgtgtaaattcttctcgtctttaccatcgtgatcaccaatgctccggtaatatctggaagaagcaataataatggtgatcatgacgttgacgaagacgaagaggtacggcggtttcagccacgggaggaaggaactccaaagggtcgaaaaagataaggagaaatataatgttacgggaaggaaaacctttagaaacatagacatggcggtgatgattccggtggatataagcaccgccttgatgatggtcgaacaaaccattttctgagttggtttcctcttgatctatgcactggctgatgatatatataggtggagctcatggggaagcttaggatacgatttaatctacaccgttggatctaataacaggaagatggacggctgggatccattatgggcatggcaa

SEQ ID NO: 324 - DNA, 724 bp, Arabidopsis thaliana landsberg
acaaagtgtttggacagagaccctgctaagaggtggtgtgttgattgtttgctcaaacatgggttctttaaatggattgacgaagaggaggaagaagatgacttttatgatgaaataggacatgtggaggtagaatatgaagcaaatctataagctgaagcaacatttgaggaagaagaagccattgatcgagatgaagaatatcctaaagaagatccggaagataaccatgttagttttcacacttttttgtatcttgttacttttcttttatatgacaatctgaaaattaagtctcaaaaaagaaaaaaaaatagcaaacatccagcttccaattagtaatatggtacatcgcaggttaaatattttatttaattttgatttttagaaaatgaaaatttgttgtgtaattcgagtcaatttaaaattttcaatctaactaattaaaacttagtgaaacacaaattaatattatactttgagctatttttgaatatcattaatttatgataagtattttatgtttttgtagaaattaggtaagatctaactaactcaatttggatcaaaatcaaataaaaatagaccctattaaaatctttaaaatgtactataaaaatgttaatatagattaacgtcgaatgttatattgatgaactaaatgatcacaatttattttgcagtttttatatatcgaagctgaatatttttatgattattattt

SEQ ID NO: 325 - DNA, 1366 bp, Arabidopsis thaliana landsberg
cgggccgagccgtgtaatcaccgttgtactgatttgcgttgagctgagaatcacaaagggctcgtatttgggcaatcttcagccctcgagctatattaagcccggctacgagtgctttgtattcggccacgttgttggttgccttgaaatttagtctgaaagattgctcgagaacctcgcatgtgggcgaagtgagacggatgcccacgcccgaaccttgttttgatgatgaattgtccacgtgcaggagccaagtcgtatcgagcggattctctcgagctttttttgtaggtagttcgacgataaagtcggctaggacttgtgactttgcacatgttttgtttcgatatttgatatggtactcactgagtttggttgcccacttagccagtcgacctgattagcttggactatgcaggatagcgcagagcggcatgaatcccattaccacgatagagtgggactggaaatagggtcgcaatttccgagccgacattacaactgccaaggcgagcttctccatttgcggatagagagattccacgccggtaaaagtctgcgagacatagaagattggtttctgtttgcctctgtcttcctgcactaaaactccgctgaccgcagtgtttgataaggcgacatacaaatagagtagttctctgattaccagttttgcaaggatcggtggtgtagccaaatacttcttgagttcctgaaaagcctcctcgcatcgggttattcattcgaactttttgttccctcgaagcaggtcgtaaaaagccaagcacttgtcggtggatcgcgagatgaatcgtataagggctgcgactcttccagttaaacactgcacttcacgtttgttttgaggtgatgccatccctaataacgcctcaatttgcttcggatttgcctcgatgccgcgatgtgtgactagatatcccaggaactcaactggtcttacttcgaagcggcattcagccggattaagcttggcgttatagaggttaagctgctggaaacattcgcgcaaatgggcttgttaacgaaacgctgataagtcgccccagcgttgttgagtccgaatgacatcactcgataacaaaaaataccctgctctatgtagaatgcatttttctcttggtcctcggggttcaccatgatctggttatatcaagcaaaagcgtccatgaacgataataatttattcccagaggttgattccacgaggcggccgatatgcagaagtgggaaagtgtcttcggacaggctttgtttaggtcagtgaattcaacgaagactctccacttgctttttttcattttcagtaccagcggatttgcgagccagtcaggatattttgcctcgg

SEQ ID NO: 326 - DNA, 1220 bp, Arabidopsis thaliana landsberg
ttttctatgcaatcatttgcttcaaactattatatggatcgacctcccatattcatctcaaccacctcctgaatttgttggattttctacacaaatgacttttggaaggatgagcgatactaatgaagacactccaaataatgatgatttaacttctacgctcggaaaaaccccaaatagataactgagcaaaatttggtgttattaggtggatggattaaatatggaatagacatcattgttggcagaaacaaaagagtgaatcatactgggataaaattgttgagtattgtaatgagcattgctcatttgatcctccacgtgatggagtttcgtgtagaaatcatttcaactatgtgaacaaaatattaggcaaatagattggcacttacgataatgcaaagcgtatgcaacaaagcagatagtcggagaatgatgtattgacaaaagcacataaactatattcaagtgttaagaatgggcatttcaatttaatgttagaatgactcgctgtccatgatcaaccacgttatggtagtcacgtaggagggaatactaggcctggaagcagtggatcaagtgttcgtcccatagagaggaatgcagtttaaaaaaaaagctaaaaaaagagtaagggtgcaagatcggaagtcgttaatgaagagtggaatgaatttaagcaattgaaagagcaggagttggaacaattggaaaaaaatagccgaaaacaagagaggccaactaactgatgaaagaaaaaaactaaaactaagaagatgaagatgtttttgaagctagccgaaaaggagcatctagatgatcgaaactaagagctgtttgagaagttgagccacaaactatttggaaattagtggttgtttagtgtatgtctataatttgtcactttatactttaatgtttatgtttgtcatgtgtgtgtcagtattttatcatctacatatacatttttacagttattttgtgaaataaatcttagagttggaacttatttataatggctgccactggcttatttaatgcgaaaattaactaccaaatcaaagcaaatcttattcaaaggaatatgctcttattccatggcctaattatttttgccaaaatggttaaaatattttaaaaataaataatcatttgaaagaaaatttaaattaatttaaattataaatcttttaataaaaatattatttaaaaaagaaaaa

SEQ ID NO: 327 - DNA, 1590 bp, Arabidopsis thaliana landsberg
aaagtgatagcttataggttatagcttcaggttaacttaaaagttttaaaactcggtttgttttgctttcaactaatttctaaaagatttcatatttgctcatatagtagaagcagattaggttttgttataatctgattgtgtgattattgcttacagaaaaagacttgagagcatgttagtgaaattgtataaatatagctgtaactaaagaggcatttcaacaagttttggtgagaatattgtataaatgcatctagcccactttcttaagaaatctactcaaggcttataataattatgtaaaagactattattattgtgcacaaaggttaaggtgagtaataaagatcatgaaaaagacaagtaagtcttgaggctaaagaaaaggcatgaacaacaaaaaagtcatactcattcacatcaacgtacctgcaagataccatcccatgtatcatcaaatggtcagagatcgacaaagcccaaccgacacaatgtctatgtatccaaacacacagtcgagtgattcaaccttcccccaaatctcacctccttcacgtttttccaactcgatcattacgcaccaaatacctttttctccaatgcaatcaccagtaacatagctcttgtttctgcccaaaatcaccaactttccaccaaaattcgccattttcagacttagaaaagaaataactaggcaaactccccaaggattcacctttcacaggtctccaagtcttgtcctttggatgatacacgactattggatgtccaagagtacgccgaggatcagtcgtatacaacatatcatctaccacacaacaagtcttgtcccacaaatcttttaatggggttgctccgacggatgcgtcccattcaccgtttctttttggttcgtaaaccaaacaaaatttagaacccaacatgtataacttctcttccatcaccacataagcgtccaactcgcaacacgaactagttttagggtacggaccaggcaaagattcccaaatctgtgtctttagatcaaacacttcaatccattcagcatccggttttctcatcctgaaacctccgattacgtaaatctttccgtcgacaactccggcggctgctttgtaacgacctcttttcatactcggaagcgagcgacatttgtgagttctgcaatcgatgagagtcattacctgtaaacgtcttatgtctaggagtccaccaattacatacatctcttgaccgactgtgacgacagaacatccccacggcacaggtggaagtgaaccgacttccgtcagacgtaaagaagaaaccatgtttcgatggagaatgtaccagtttgcgggatttgtgtcagggaatttgatggtggcgtaaagaaaggtttcggaaagaccgaggcgcgaacgcgtttcgtagagtcctgacgaagcgatgagattgaaaaagtaacttgagacggaagatagactagggtaatcacgtttccggatgagtgcgacgcaagattccctcagctcgtttggaattggaaaagataccgagagaaaataaatttcttcttcctccttgggcttcttgttttgattctcg

SEQ ID NO: 328 - DNA, 4117 bp, Arabidopsis thaliana landsberg
gaattagaattccaagtggagacttggtgtacttaaaggcgatgacctacaaaggggcagggcgattcacctcaaggaaaaagtgaagcccaaggtatgttggcccatacaaggtgatcgaacgagtaggggtggtggcatacaacttgaacttcctccaaaactagacgcgttccacaatgtctttcatgtgtcacaactacggaagtgtttaagtgaacaagaagaaagcgtggaagatgtacctcccgggttaaaagagaacatgacagtggaagcatggccgatgcggatcatggaccgaatgaagaaagggactcgggggaaatcaatggatttgttaaaagtcttgtgaaattgtggaggccgtgaggaagacacttgggaaagcgaaaataagatgaagagacaattttctgaagtggttcaaggagatgggtaaagatcaacgtgatgcggattcgaggacgaatccaattcaagggggggagacttgtaacgcccgcgatcctcaataggatcgttggctaggacttggtccgagagaagaaggtggagtctcggacaagtgagaaggagctggccataagctcggacaaaggggaaatcatgctggctaagctaggatcataaagaaatcacttggatcagctcgcccaaagctcaagctcagctggaaggagtgacggttactcaggtcgagtgacagtccagctcgggcagctggacgagtgacggttgagctcgaggtagctggacgagtgacggacgagctcgaggtagctggacgagtgacggacgagctcgaggtaactggacgtgtgacggactagctgggcggttatgggcgaagagatacaactcttcggaaaggtgcaactcttcggaagggcgcaactcttcggaaaggtgcaactcttcggaaaggtgcaaggaatgtgttgatttgggaagcatccattcgccccctatataaggaagggcgcccaggaccattccactcaccacaacacaccgaaaacacaagaaactcaccattaaaactctctccctcttgggagaataaatagtcttaggattcggtagccgggctgtggccgacaataaagaagaagggtcggatcgacctaacctcgagaaggaaggtaagggatcctagactttgagtctaagtgttctaggatgtgagttaaaggatcgactagagggctgggtagtatccgggtcatgtgcatcctacacaagactcggtccgggtatggatcggctgaggcggggacgcagctcggcggaggaccggcgggtcttaattgacctgccgagaatcggctggactgatgcgcgatcttcccctctctgaatcctctccacggatccgagtagtgtatggcatatagagcattgctttgacttgcatatgactaagtaaatgagattacttatggctctatgactttcaggaacgaatggtgatcgtgggaaggactttgcttaggcgcgagagactcaaggctggaatgatggctggtgatagttcggatagtctagggatcgattatatgacttataatagcatatatgcaaactcataggttgtatcgaatcctttgcttaatcaataaagtttctgattgtttgtttactctattcgtctcatatattgaatcacataatcatatggaacggattagactaggaaagaacctcataaacggttagggctaagtcacttagtggcttgggtcgagagaactcgcccggacttaggcagtccggatcggggcctttcaaaacttatatgtgattgattagtttgaagattgttctaataaagtgtgtttattggagttgtggtcttgttctagtcaaagtacttaaggctctattacttcagttatgacccatgtgtctacatgagagtcactcaaacagacaaagctatctacttgttgctttatgttggtgatatgttgatagcttcagggaatatggctgtcatacgagagtttaaaaacaagctgaattgtgagtttgaaatgaaagatttggggaaggcttcaagaattctgggtatggatatcataagagacagagacaagggagaattaattttgtctcaaggaaactacttggagaaagttttaaaaatgtttggaatgcttgaagcaagaccagtgattacaccaactgctgctcacttcaaacttagaagtttgtcagaagaagaaaagaaaacagaagctatacacatggaaagaattccatatgcaagtgttgtggggagtttaatgtacgtcatggttggttcaaggccagatttagcatttgtagtgggttttataagcagatttatatcaagtccaggaagggagcattggtcagcagtgaaatgggtgttaaggtatttaaaaggtgcatacactcaaaacttgacttttaagaaggattctaaattctgcattaaaggattttcatattcagattatgcaacagacttagaaaggagaagatcagtgacaagatatatgtttaaagttggtggaaacacaattttgtggaagtcaagtttacagtctgttgtggctctttcaaccacaaaagcagtgtatatggctcttattgaagcagtgaaagaggccatttggttgaaaggtttgtgttcagaatcgggttttaaacaagacagtgttatggttcattgtgattcggagagtgctctagccctagcaaagagttcagttcatcacaaaacaaccaagcacatagagactaaatttcatttaatcagagatatagtgtctcaaggcggtgtagttttacacaaaattcacacaatagtcaacccagcagatttcctaactaagatggtacctggtcagaagtttcagctttgctgcgagcttctcaacatccaaaggaaagaggtggtttcagataacgatttcgtcgagaaagattgtgttgtgtcaaaaggtggagaattgttgtttgggtttgacataacacaattattgggctttaatgggccaacaaaattggcaaggtggagaagaacaaaagtgtaagcaaaagtttgtgggcccacttatgtcacctatatatgcattacaacgtacaacgtagtggaagtaggtgagaaaagaatctaaagagagttctagagaagagagataaaaagagcttcctaagcaagctttcttcttcctctttgttgttcttaaatatttgttcttcttgagtgcaaatctgtaaaaaccaaaagacaacatcacaagttagtggtgtgtttgtaattcctttgatatagtgaagctttgggagcaagagatctcccccgagatgtaacggttgaggccatgaactcggttaccaatttttgtgtctgtttatttttttaacaagcaatctctatcactcttttctccacaagtggtatcagatctctaggcttgtatagggttgctaaggagtttgagatcaggggttacaagaagacttacaagatgagtagtaacgctcgggttgaggttgacagatttgatggaaccggtgacttctctttgtggaaggtcagaatgttggctcactttggggttctagggctgaaaggtatcttgaacgaagagcagctgctaagagaccccacctgctacataagaggaagctgcagtagctggaagagactatcacgtcggtatagcaggagattttgagttgcctcccaacgttgatcctgtaaagtttgaaaagtcagagaaggcaaaagatcttatagtactgaacgtaggaaatcaagtagatcagaaactgtgagacagttgcagccatgtggtccacattaaacaagttatacatggagacttctctacctaatcgcatctacttacatcttaagttctatacctataagatgactgattctaaaagtatagatggaaatgtggatgatttccttaagctagttactgatctaaacaacataggagtaaatgtgacaaaagaggttcaagctatactattgttgagttcattatctaacatgtatgatcagctcaaagagacgttgaagtatggcagagacactttaagcatggatgaagtcattgagactgcaaaa

SEQ ID NO: 329 - DNA, 960 bp, Arabidopsis thaliana landsberg
attaggaatgcatgcaaaatcaatatagataacaatttactctttaccttagcgtaagcagtgtagtgggcaggggcaaggccaccataatgattgctaatcgcatacagctcgtaaagatatgactgaccgtcttcgttctttacgtacttgctaagatctagatcgtgaatatggaagttcactaacgtatcaatcttattcttgaaatatctgctatacgtgaaccgtttcaggtggaacacaagaatatctggcaacttccacaagtctagcttcttgttcgcttgtctatgttctttgcaaccaggacaataccacatgtcatctggtcctagaggctcttctgctagaaaggcttccaagcatgaaaacaaagatattccctcttgcattgtcttctttgccaagacatttttatgaaccttaggtagatcattcaagtagcttgagtcatatttctcatgctctttctcgttccacttgactaaaacctttgtaacactaccaggattcacaacggaatcggactcaagaggctggagattgaaagaatagtaatctcgtaagaggctcacggataattctctatcattatcctctgtttccgtcgtctctagataatatacttctggatgattcatctggaacgtggccattctcgtttccactattaactacacatgacatatgaacccggtgtaaaggtgacaacaatccatagatgctagtagcaatgtctgttccactaagtggttctttgttgatataagtcactaggggagtaccaaaacactttgggcccctgtcactagacctgtgaaatttgagagttataatccattagaagcggaactcaagagaggaaaaaaattctttaatgacagattttcaagtaagcaagctaacttttcatgctccccatgaagaatttctagtttgacttttcctggtcctttg

SEQ ID NO: 330 - DNA, 396 bp, Arabidopsis thaliana landsberg
tacaaaactggcaccaataatgaatctcacgtggtaagaacaatttgcgcaaagataacatatcgatatagtctaataatggattatgactattaacggtgataccagcgggtgccaagtagcgcaaccatgtgtgtgcatccacaggaggccctcggtttcattgcggtgccatcggttttagtcataacaccattgccagacataaccaataagaaatctcacgtgacactaatggattgggcaagggtgacaatatacaaagagatactctaccagtaaaaatggttacaagtagagagccgattagatcatggcccgagaacttgatgaaagaagtacgatggaagactgttaattcagccccaagcatatttctatgcccatcgcagagat

SEQ ID NO: 331 - DNA, 3813 bp, Arabidopsis thaliana landsberg
gtgactggttgtaaacgctggtcccccgggaggatcttcattccttttgtcgatttcatcttctttaaggtcgtgaggatctcggtaagttgtagccgcatcgcaaagcacatgggggctagagtcttcttcttcgctctccattggttcatgcccttctatgcatgttattaggttatcaactttctggtccaaatcaagaattctatcaagcaattccacgtatttccttgaggattccatcgtcactatcctaagtgatgcccgtatccttgattgatcatcaacgttcttgacttggttctcctcaacttcaccttgtcttcttatcacgtcctccaaagccacatcttctttcgcgtcattatcctctagtcgattaatgcgcgtttgaagcctccatctgctatcatcgacgccttccatcctggattggattctccttaggtcatcttggctaattgaagagaattcttcacctgggcgaggtgacaactcacgtttgtctctcggttcaagatcatccccgcccgcggcaaggatggtcttttctgacaaggtttcgtgaaataggttttgccggtagcttaggtcagcatcctcctttgttcctcatagaaactgtaacgcccccgaatcgctctatggccggacaagccaagggcaacccagaaacgccacattgatagctcacacggacaacccaacttaggttccaaatggctttagacccttagccagattatccacatgaacatccctcacgaacgcggtttaggcttttcaacccttgccatgaccgtgagttatgtcagtccggacaagactaatatcgcatgaaacacactctttatatgaaaataatcttttataatatataaatttctcagacaaccaagtatccaaaatgtttcaacaatggccccttgagcatacactctcaaatccaacaaaaatcataattattaagttttgcaaaaagcaacaaactctataccggctttcctacgtcctgagcatccctctaatggttcccactaaggtttcctacaaaacaaaatggagtcatacgtaatctaagattacttagtgagctcggtctacctgcaacagatattagttctccatcccataatcataacacgcaacacagaatatcaacgaaaggtagcttgccgaatcatctaccaaaaacatgcacatgcaattaagactctagttttattaatttttaaaggtcccgatatgctgccttccaacaccctcacaccaaaaacacaaactcctgggatctcctgctttacaaccacaaaggcacgtaaccagagcatccctacaaaaacgctacaccgtcgtgtaaacaactctgccatggtagctagccccgtctctccgagcctttcccactacatggcaatcgagtaacaacgttaacaagatcccacgatagcacgattcactacgaaggtcagacataccatgatcttgatacgcttatggtctctgcctcctaacccacgagcaccacgcatcaagacccaatattttaagatattatgagacatatggttacttaaacacatagaatcatctatatccttacttaccacaacctcccaaccataagccttaagcataagaatctaaaagatctcatatgcggcttagtaccaccattaatcaatactcatataattcatgaaataaatcaatgaatacaagagtatatatgatcatgaaaccaacaagcaatcaatcacccaaataaacactcaaacctatcatgtgccatattacacgcttcgagactcatagagattcggctgaaggtttaaggttagcttcaacgattctcggttgcggacagggatttctcatccacgaacaggttctcttgatcactgacatgaattctttagttaggggtaaaggatcttcatcaagagaaaagtttttcaatcgcggccaagttatctcttggttacgggtgatcacttaacaacttggcagccttttctttccctatctttttcctctcaaatttcattgggtcaagtagtgtttatataggggtgacaagggtgagtcagcatatacacgtgtcatttgcaagggcgagttagcagtccacgtgtcatccgcccgtgatgacaggctcgtcgccttaacagatgggcgacatgtggaagcaaaactttggctccacgcaactcaaattcggctctaagcaactttgcttgaaccccaagttagtcggcccacgcgtccatggcacggtcaaagggcggtcaatgcccggcagggaaaacttcgcatgcggcacgcgcatgttgcccaatcttgcccattcttgcccatatttgctcatttttgctcatctttgcccattcttgcccaatcttgcccattctttcccaaatagttatttgttctgccctttgattggttatcaccttttgggcacatatgggcaattttccatttatttggggcaacttcctctcgtttgggcttgggccggatgacccaattttgaactagaattggccaagttcatttttaccttgcccatctctttggatttcgtccctttactatttctttcttttctgttcttcctcggtcgttcctcgatgttttcctgcttggccgcttacccgttatggagggtcattacaatgcgtgttttatttcgcctcaggcttttacatgaaagaccacacgactagtgcaagtgtacagtatagcggagttgtattttaggatcgaatccacaaggagagaagtagttcagagaaatcctaaagaagagagtgaagctaggaccaaaattaagggagggggttgttgtatgcattaagtaactaaactaagagactactaactaaactaaacggtaagcaataagagagaagcgttaggtcatcgggggtttctccggatgttcacgattcaataataaggtatagatctcaatctaggtgataacatggctaggtttgtttacttccaaattcccgaacatacgaaactctatcaaaactagttaatcctaactgctagtaggtgaaaaccggctattatcactagtatattacgtactcagttgccctgtcggctagtaggtgctaacatggtttcaaaatacaagatcaggcattaagttcagattcaattctagttcataagtccctatcactcggcgggtgtgcaacggttatagttctttattcaatgagttaggtcaaacattcaaacgagattgtgccaaataatgaaatacctaaaggcaagtactaggtggcgttccggacatacaagcattaagaataaactcaactagaagaaatagtgtaaacgatcaaacaaagccatagaaaccgccaacctagatctttgatctattggtccccatgaatgtgcctttgaaacccccctgaaccccaactagagatctactcgctcatggcaaaggagctaatccaaagttgggttgagtaaaccataactaaaagatgaatcaaacttaaaaggggtttagagattacttctttgaatgtagaatacaagaggcaaagctccaccttaaagagtcttacacgaaaacgagaaagagaaagagagagatggtgtttttcaagcttcaagaggtgcgtcggctaagaggcagctcttggcgacggctagggttcgctggtgataaaggcacatttaaggttagggctaaggacaagtatttatacttgaggcccaagaattaggtttaggagtaagcacgtcattccgccccataagccagtgatcgggctgagt

SEQ ID NO: 332 - DNA, 4301 bp, Arabidopsis thaliana landsberg
ttcttctctaactcaaaaacagttagattgaggaatgagatctcgggtttcacacagaagcaatctgaatccttctctgaagtatgggaacgctacaagggatacactactcaatgccctcatacttcacctattccaaacatgacggctatgcttcaacaaaacctaaaaagtcaaactactagttctttggtcttggaaaaacatattattgagataaacactgattaggttcaaattaccctaagaactattatctcaaatatttaaggatcgattttcacaaagtttttttgttcacacaatgaattaaatatcgagattaagctagtagggaatgattgaaaataaaggagaacaaagtaaaaagacagcagattaattggttgtaaacgattaaataaagagttaggaacatggtattctcaggaaactattggttagtagatctaatgaaagctaggttgttatcgaaccattctcaaactcaaactctaattatggaagaaccggtggcgttcggcgaaactccctatatctattgctaagaataaccggagaagccgagaaattatcaacctaaatatgcattattaacaagttcgattattcatgttagtagataggccgattcttcagataacctagcaacccatatgaatccctaatgagaaaccctattcctaaccagcagattattgagacatattgattgaagcaagcaacatatttgagtatgaaagcataaacacagcaaatatagaagggaaaagaagggatctcttcactttattaagaactgtatgaatctctaaaaacaatcgatgcatagcttaagtctctcagtaacagggtttgcaaaagcttcaatagaacctgaaagaaacttgatgataaaaactggatgataaaaacttaggtataaaaattgtatataaaccctaaaaacgtccagggactaataatgcaaatagagaaatcttctggggaaaatttcctcttctgtaaactcaaaagcgtctagaacttttgctgggccgaaactggtgtcaatcgacaccaagagtgtgtcgatcgacactcctcgctgattcctgaatccaaaatcgtccttagcttccttttccttagctcttgctcgaaaatgtctccttatctccattgttgtcccactgcatagagtacctgaaaagacactaaaaagcctcgagaaataacataaggactcaagatcctatacctaaatcatagataaaatcagtgaaaaccaggatatatcaactcccccagacttagcttttgcttgccctcaagcaaaacacataagtcgaacccgtggaagaggttttgaaaacaaaggaactcccaacattctctaacctattgccatgatcattcaaactaagtccatatgcctaacaagtctaatcaaatcctaaccaacatgtacttttctgcaagcttacaaaacattcttgattccatacctaagttccacaattatatccaccaagctttcatcgatgggtctcatcaaacaagccaacattcaagatccttctagactcattctgtattataccatgataaattgaccgttctttatatttttttttctttttcggtgttctttctctctcccatacttattctttttagagagtaaacaaaggggaactcgcatattggatcgacaccctcggcatttttccaacctttgtaattgatcgttccaaataatgtataataatgggtcataggaaacattcctacccctatacactatctgaaagtcttctcaatctatcgttatttattattattatatattatttttttttgggagagaaatattttctttttgacacattagtcgatttatcaggtatgaataaggagtcaagtcctatgagcactaaccattttgatgaggtaaaaggaagagcagtgagattagctccagcctttgtggattatgttaggaatggatgtccttaagtttgttgattggccttatggatttttcattagtcggattgatttgaatctgcaatacttaaacaattcaggcaataaactcgagatatagatcataatttcagacgaaagttttgactcaataaaatgactatctaagttaaaatgacacaactgactcataagaaaagaaaagatgaagttattaactgactcaccaagacttagatagcactgtccccagagttattaagctagaggaatcgaaagagaaatagtcaaaagttaaaaagttagaacacgtgagttgccacctgagagtggtgtcgatcgataccatgatggtgtcgatcgacactttcgtgtttttggtcgacacgctttttttttttttgttttttttttgtctgaatattcttataaaataaaaaatcctaagttagaaatcaaatgaatgaaatgaataaaaggagaaatacttaccagttggttgccgcccactaagctcttgtttatagtcaatagcttgactttgcagttgcttaatcaaccggtgggtcctagagatccaaaggcttttctactggaatctcagcttcagcctagtagtgtttgactctctgtccattcacaccagatggttcgcaattgttgtttttgagaatgattgttccatatggcctaaccgagtggactgtgtagggacctgtccaacgagaagacaatttgccaggaaatattgtcagtctagaatcataaagaagtacctggtcattaggctcaaaggtccgagtaagaatcttcatgtcgtggtaggcttttgttcgttctttgtagagcgtcgagttgttataagcgtgaattcgtatttcattaagctcattcaactgaataagtctcctttctccagcttatttgatgtcgaaattcatcatcttgactgtccaagctactttgtgctctaattccactagaagatgacaagctttaccatatagaagatgaaaaggtgtgatcccaagcggagttttgaaagctgtcctgtaaacccacaatgcatcatctaacttgtaagaccactcctttttcgctttacccactgttttctcaagaatctctttgatttgtgtgttggaaacttcaacttgaccgctcgtttgtggatggtaaggagtagcaactcgatgttgaactccatactgtaaaagcaattttgcaagaatcttgttattgaaatgcttacctccatcactaatgactatgcatggcactccaaaatgagggaagatgatagagttgaagagtttcatgacaaccgctgaattgttcttcagactagctataacttctacccatttggggacataatccacagctactaggatgtagagattcttgttggaaggtgggaagggtcccatgaaatctataccccaacaatcgaagacttcgacttcgaggataaatttctgaggcatctcattacgcttgctgatctttccccttctctgacacgggtcacattgcgatatgaacttctgagcatcccgaaacattgtaagccaccaaaagcctgcttgaagaactttggatactgtcttgaaggttgcaaaatgaccatcatagttagagctgtgacaatgcgatagtatatgaggaacctctgttgcagcaatgcatctcctataaactccatcagaacaatgcttataaagataaggtttatcccaataatatcgcctaatctctcttaggaatctcttcttgtagtaatctgtgaaattataggttccacatatgcagctaggtaattaacaacatcagcataccatgggtagtccttctcgaccgctgtgacggcgcaattctcagttggtgaccaattttttgttgattcagaagggtgtcgatcgacagttccagtgtcgatcaacaccatcgcgcaactacgaatgtcaacttcctctgaaatgtgagtgtcgatcgacatagaaggggtgtcgatcgacactaaagttcgattctgcaacttatcacatttgcagtcatcttctccagctgtatcaatcatgtatatgttctcctcaggcaagaaatcgttaatagggacatcatcatcgatcctaatgcgtgacaaatgatctgctacaccattctcaatccctttcttatctcttacctcgatgtcaaattcctgaagatgcaaaatccatctcaaatgtcttggcttagcatccttcttttgcatcaaatacttcaaggcagcatgatctgtgaaaccttggatcccacaaaataatatttcaaattctagaaagccaacc

SEQ ID NO: 333 - DNA, 937 bp, Arabidopsis thaliana landsberg
tcgattcttattacacacatataaactaagctcatcaaataatagatcaaactacagatacatatggtgggcattaagaataatcaaagatgaagaattctacaaataacctaacagggggcgatctactaaaccatatgaatccctaatgagaaaccatatttctaacaagcagactactcaaacataataaatgaaacaaataacataattgagatagaaagcataaacacaacaataaagaaaagagttagaaaggatctcttcactgtattgaaaactgaatgaatctctgaagaacggaggatgaatagcttatgtgtctaaaaatagggttttgcaaagaacttgataaaagaaacttaggtctaaacaatgtatataaaaccctataaaacatccaggaactaataatgcaaacacggaagtcttctggggcaaatttcctcttctgtaaacttgaaagtgtcttggactttgctggaccgcaactggtgtcgatcgacaccaagagtctgttgatcgacactctcaactggatctgaaagtgaattcgtcctttagcttcttttcttcagcttttgctccaaaatgtcttctcatcttcattgttgtccttctccatagaatacctgaaaagactctaaaaagactctagaaataacaaaaagactcaaaactctatatttaaaacatagtttaaaacactaaaaatagggttatatcacatacaatgtctctttccatcctcttatgattttgtctatgcagtacgtgtcataccttccaaaattttcacatgcttcatatttcttcttcgaaaatccatccctttcttcattagtaattttcttttgagctcgtcgagaggtagttaagtcaagtcaataaactcttcgtttgaatttctatgaaatttttttttttgctctatatt

SEQ ID NO: 334 - DNA, 680 bp, Arabidopsis thaliana landsberg
ttaatttttaacttactgatcaaatacatttttacaatcaaataaattttaaattattatatttgacatttcttttttttgacaattaaacttccaaacctaattatatatttacgatatcttgcttatgggctgtacatgttaagaggcccaaacctaattacccaaactacacatgcttttcttcttctcatgtcctgctacatcttcttcttcttcttctctacaagatcttcaatcttcttcttggttgttttagagctgtccctgaaagattagaaagaagcaaaaccagaaggaaagaacatcaatacatgaatagagaatagagaatagagaacagagacgaatactagaattatgtacaagaatcagatataattagctcaaatgatgaaaccaatcacatttgataaggatgaagtcgattagtacttagagaagaccaatcagattcactagaaactctggtatttttttttagaacatacaagatgatcgataaggaaacttcttggccatctcatgtctaacaatgcgtttggttagcatatgcatatctctaacttcggtatcagttaatagcaaatgagtctctctcaagttgcaatttcgtggcattattaaagctaagcagagtatacaatcagagagcactaagcaagaggtgatgtgttatg

SEQ ID NO: 335 - DNA, 569 bp, Arabidopsis thaliana landsberg
ggccgtttgttttttctcaacggccttcggtctccatttcttttgcggtggcgggtatagtggatgtgtgtcattaaatgtcttttccgcctccttttcctggctctcctttgctcttaggcgctgtaattttctcttttgggatcgtgtcaatcccgctgggcaccatcgaggcatggagtattttggatcggctgttttgatggtagccgtatccttttcgatcgtgttggccgattcgccgaaaatcatcggccctttattatcttcttgtatgacaacatctgcagtgcctattttgatgatgtccttttttgttgttttttgagttgctgcaggcatatgcccccctgccggattggtttgtgcctggtgaccggattgagcagtgctcaatcgttcttgtactggtggcgtcaacctgttaaaaacagatgtttggggtgcccccaggcggggtactgtggcatccaaatggatatggtggcatgcccacatttgatttgggacatatggcggaggtaaatatgtgtatggatatggcataggtggatatggagggtggaggt

SEQ ID NO: 336 - DNA, 2142 bp, Arabidopsis thaliana landsberg
ttcatgatattatcgaaaaggtttttctcgatgtgcatcacgtaaaagttatgccgcaagaggagatccttccaatttgggagttgccaaaagatactttgtttgtgccaattgtgagtgcttccatattcgtcaggcatattcgccgtggtttgccaattatcccacgtttgcaggtttcctgagcaccataataatcgatctgttcaaacaaatcaattccacaaacataagatggcggaggaagacgaactattttattcttcctaaaaagttttttgttcctccgatacggatgatgcaggggaagaaactgacggttacaatcaaaccaacatggttttctgcctttctttagctgaaacgcatttgtacgacccataaagtagggacaagataatcttttgtacgttctccatcccgataacatttcatatgcaaagaagtcactaatcgtccacattaatactgcccgcatattgaaattttgtttactctagtaatcaaacatatgaacaccttcatagcacaaattcttcaattcatgaatcagcggttacaagaagacaatggttggtttaatttgtctcttgaaacataaatccgcgcaatccttcataaaactgtctcgtcacatcaccgctcgcctgatcactatgactgtacatccatcttcgtaatgtatatatctcatgatgctctccaccccaacaattttttttttgtaagaaaaagtttttgttaagattttttgttttttgtagtaaatagattgctttttgtagtaagtttttgtttccctcgcaaaagaatacagccgatttgcgagagaaatttttttcgcaatgttgcgagtgattggcgaggtgtggtactcgtcttgcaaatgactcacaaattcgtcgcaatattgcgagaaatttttgcttcgcaaatcggctgtattcttttagtgctataactgacagagtttttgtactatttttgcaggatacaatgatggagaacataatcatatattttaaatggaaaggtcgaatatatagcttgatgatgaatacatcagaggataagataactctctccatgttagaaggtaggatatgcacgaagcttggattagatgaaagtaaggttaaattgcaaatgaagtacaatgcagtgttgttaagaccaacttaagagatttacattagtgatgatgaggatgtcggtgtctatatatcttcaggtagaaataactgtagatatgtttctaatgtggacgtcatcactccatcagaattgcccgagcaactgtcgagagtggagctcctcaataaaagttatgttggtaagaaatatgctaaacttgattcaaatgaggatgaaatgagagatgatgctgccatcgtgatgggcgaatgcgaggaacaaggaaaagaactaaatgaggcaatagtggaggttgatgatactcaagatcctgagattggataacgtgatgaatgtgatgataggagtgatgaatacgttgagtcaccgcctgttgtaaaatctagtcagttgataaaagaatgggaagacggtattggtttgaatttacgaaaagaatttccaagcaagacggtattgcaggaagtggtagacaaatgtgtatttgctaacagttttgggtatgttattaaaaagtctgataaggagcggtatgtcctaacatgttcaaaagtaaattgtgattgacgtatacgagctccaaatattcaagatacaagtatttactctattagaaggtacaacaagatgcatacttgtacccggattagtaagagtagtacaaggataaggaagaggaaaggtacccctgaattagtagcagcttttcttcatgatacttttcctggactgttggaaactccagctcctaaggttatcatggggcttgttcagacaaaattaggtgtgaagatatcatactcctccgcattgagagggaaaaggcaacccgtttgtgatttaaaaggtagcgcggaagatagctacaaggatatcaattgttatttgtacatgttgaagaaggtaaatgaaagtacaataacatatctgaagttggatgagggcgggaaattccaatacctattcatagctttgggagctagcatt

SEQ ID NO: 337 - DNA, 1271 bp, Arabidopsis thaliana landsberg
tggtatttgttgaaggaaagtgaggagtgcttgtttttctgcggaagattcgaagctggcaaatttcgttatacaaataaccatctgatcactagctcgtcctgaggcatgtaacatatgctccgacgtcatcgatccctcaaagaaaaaggcaaccgttcatcattacctaaaagaagaataatcaaccaaaatgaattgaaaacatcaaacataatttatttatgaatgagaatacaaacatctcatatctgtgttcaaaatcaatctttttgttcgctaattgttgacataaagagtctccatttcacaaacgtttatgatcaacaatttcttgtacaagtaaaagatcataataataagtaacctacgggtaggcaaactgttttttggtttagggttggttcagattttatggttttttggttttacaaaaactgaaaccatatagtaaaaggtatagagaccaccacaacacagagagttgcttaaaagacttattcttattgataataaaactgttttacaagcattatctcgattcttacttgatctattctacccaaatgatcgaacccgactaagaatacctaagtctaattctcttctctgtttcttatcactctcacgtgaagacaaagagaactacacactcaccttcaagcttttgcaatgctctgaagtttacaatcgtatgacagtattctagagtgctcaaagcgcctcacgctaagttctagaatacttatacctactctccagaaccctaaacctaggatctccaagaatctcgttttaaggaatcttccttgtttccaagtttattcttttctaaatcttcgaaacgatatcttccatatcttctcgttgaatcgtgtctttgataccatgccaagtcagcttccatccttggctctccacatcatccgcctcgatgcagcttcctgaaatccatcagtgttctgattgctatcagctgattgattgaattctgcatcttcaatctccccctatttgactgagtttgatacacaagcattcttccattgatataacctgaaactcaaccaggagacataacacacaaccaatagacaaactctagaagaacattctagcataaacaacataatgcgattagtctaaaagttgacaatgtgttaaaaatattagagactcatgttcacgatgatacaatcatcggtttaaaaagaacaaacaaaaagaacattgttttggtcagaattacaaccgagcttaaaacaagaaat

SEQ ID NO: 338 - DNA, 953 bp, Arabidopsis thaliana landsberg
agagcacacgatatttcaccatatgattcagttaccttgcaccgtgcttacagagattaatggcgagcatgaggagctcggtttttgtcccgatccttccttttgcatgttgcaccacgcaccaggcgatagagaggttcaacttcaggatctgtgcatacatagactgaggacgagttcattgaccctgctgggggtccgagagttggatcttcctcttccgctctcccttatcagctgcattctcctcctcccagcccgatggagccacaggtctttcagcagtacgtcgtcgacagcttcaagagcgtctggaatgccgtagctacactctctcgttgtggttatgttgctcccacccgtcgccgtcgttacttttccgcacccacctccggctccaagcatgaggactagccatcctccttctcgtcttttgttttctgactttgtttcttctttatttcagactattggttatttgttttgaaacttgttgcacttattttcttatgctttgttggaacaattgatgtgtgttttagtgatttaacagtctaactggaggatccatgtgaaaacactaaccaaggctctacaacaatgagtagaatttacaaagcaatgcgaaacgaccagagtgtcgatcgacaccactctcaggtggcaactcacattttctaactttttaacttttgactatttctctggggacaatgttatctaagtttgggggagtcagttatctaagttgtgtcattttaacttagatagtcatattattgagtcgaaacttttgtctgaaattatgatctatctcttgagtttattgcctggattgtttaagtactgcagattcaaatcaatccgactaatgataaatccagaaggccaatcaacaaacttaaggacatctattcccaacataatccacaaaggcttgagctaatctcact

SEQ ID NO: 339 - DNA, 1237 bp, Arabidopsis thaliana landsberg
aagtaataaatgagtagatgtaaaactcccctgattaaaaaagactgaaatgaccatagttttgataacggttaagagcaacgagagaaagaaaattaggattaaacaccatgagattgaatactcaatgtctcatgtaatgtttaaaaaaaaaaagaaattattagtttgttactcatgtaacattcgtataaatagcaaatatttacacagacacaacacacacatatttacaagtgcttttgtttcctttgacaattgaagttactcaattactgaaagaaaaatggaagatggtttgctgtatcaccaacatttacggtatctctaacgtttacggcaagagtcctaaccttatcaatttgtctctttcatttaaggtttagactcatattacctttcagttttttttttctttttcttttagtttttgtgaatgatttcatattgtttaatgtttctaaaatggttatattgagtcttacatacatgtttttgttttgttctaaatgtaaatcgagaaatttttgcatcttttttttttttggaaatagccatcaaatgcactttaaaccataaatgaatatgaaagaggaagcaaaacatgcaagaatcccaaccttatcaatttgtctccttcatttaaggtttggattcataatagctttcagatttcgtttttttgtaagtttttgtaaatgatttcacattgtttaaagtttctaaaatagttatattgagtctaacttatatatttttgttagttttttttttttggtaggcatcaaatgcactttaaaccatttaaatggatatgaaagaaaaaactagcatactatggatagtagagtcaattgcaagagaaagaaagaatcaaagttttgatcattcataaaatacgaaaattcaggcaagtgttttagttagtctcaaaaaataacaggtatgaccacaataattatataactatttctttgtctttccaaattaaatattttgaattaaattttgctataaatagttaccaaattttgttgacttatatgctctctaaaacaaaacttaattttttttctgatttttagtataaggaagctaaactaagataaacattagttcactcctattaggaaattgcttaattgttttctatcattacttacatttaagagaatattacacggtagaggcactattttcaaaactttgggacaccaattagaacacttttaaaaac

SEQ ID NO: 340 - DNA, 1537 bp, Arabidopsis thaliana landsberg
aaaacaagatatgaacataacgagtttataacatcgatatgatgccccaataccgctccatgtgctgcttgttgttgacagacatcagatgttacaacccaaaccttggggcatccatcttctctcaatgcaaccacctatcaatatcagaaatgaagaaacatcaacaattattctcgtaaagccgtctatttgaacaggctttgggggtaaagagatcatttttccttgcctccttttcaatccaagcgtcagcacaagtttctcctgagaaaatcacatcaacactggccaaaaaggataaaactttttgagttgtcaaagtaaataaggatatcgaaaaacagacagaaaagggccaaatgactgtaccctgcaaagtcttccttgtgagtaggaagaccagacatgagagcatcaaacacaaccactaccttaacctctacaacaatttcaaatcaaattgtctcattactcattagccatagatgaaatcaaatgtagattcgtccaaagtttgtaccataacgtactttcaatgttaatattgttataatccaactctttttggctaattcgcgaagagacgttgaaaagtgaaatcttcccaaaaccaaaaaatagtttttaagattttaacagagacacaaaaagaaaaaataaatgggcgggttcatattgggccaaaattaacaatggtaacgatgtgtaaaataacttcgtcgttagtctctgtaacaaatgcattgcttagatatatagaactctaaaaactattcttacaagatagtaagtttggtctattgtcctataaattctagcatataactcataacaacatgaaaacataatgtaaaactatacatagattacaaaaatgtagaaatcaaaagataagattagcaaataacaaagatattccccttttatcaaagattagaagaaaaattcgaagttataattatatactaacaaaaccaaaaacaaatcgggggaaagtctcctccctagtgatgttttaatgttagagtttggtgtaccgtggatgttacgaggagtacatttattcctctatttccggagctcgtagattgagcaatgaaggtacctatttgttacttgagaatctacaagcatattctagtaagtgatggctgtcaatggcaatttttgttgaacaacctagaccaaatagaggagcaggatgactactcattatgtacttctctaatctaatagtagatgagacttgagccaaagtttttgtttgtcaatgtcttatattctccaacaatgagaataatcgttctcattgaagagcacaactgtaatagttttttttgccttatcagcacgtacattgtttaaaaaataaagtaaaacgagaaaagttagactttaaaatactaaaatcttctaactctgaaaaaataacggactacttataaagagtctgtaaaagttgtgtcaacttcttacaatctatttaataagtatgaaataacgtttaaaacggataataatatgagggatcaca

SEQ ID NO: 341 - DNA, 378 bp, Arabidopsis thaliana landsberg
tataggatcaatatgtatatactctttccataacaatatattttttctttacaaaaatattcttagaatatactctggaatatgttaagttcgtataaataacaaacttggcgattacacttaaaaagatatatttaaaaatatatctttcaacaagtagattttttgagtttgcggctccgattgatgttaaaaatgatgcaccgcaagatatggaatttctatcttgtaatctcttattttctatatgatatcatatggaactctgttttttataacttattttcaaatttatgtcacgttcactctcttaacttacattatatttgttgcttcagatgcaatgggtattattacaagggtttctaacattaggag

SEQ ID NO: 342 - DNA, 2050 bp, Arabidopsis thaliana landsberg
  unsure (1)..(2050): unsure at all n locations
agaaattattacagagagaagatctcttcattttctcaagctccaatagaaggtttaaaggcagcttggatcagcttgaatgagattgccaccgcaagcaaagaaaatcatgtttcagcaatctctgctcctgtccaagcccccccccccccgactcctcaaccctccttagacagtcgactcgactccatgcctgcgcagattcttgagagctaaacaaagctcgtggttgatcttaatggcaagttcgattatgtgtagatagctcttaataggtacatcgacaatttgagatctcatataccttagccttctcctacatcagaatttgtcaatgcagtcacactacgcagcgcaaagcagctcaacccaatacttcagcgcgaacgatcagctcaaccttcatcttttccaattgcagagaaaaaatcagtgcgatcgatacaccaaggtatcgatcgacaccaattactcttgacgactctgtttttcctttgtcgagtggaatcgacaatttcgcggtggaggaggaaactattcccgatggtgtcgatcgacacccagctcctgtcgatcgacaccgagctcgttcagacagtgtgcaaattccagctaaaaccaagtcagcaaatcggcgaatttccttctccaagagtcctaaaaagtcaagacaagccttagatgatgtcagatgcaaggctatgattgataatctgattgttgaaatgcctctagttgaagctattcatctatctcccacaatcagaaggtatgttaagacaatggtcactaagaatttgacgaaagaatgcagtgttacgatgatttcagagcagggcagcgacatcattcaggaatgaatcccaaaaaagctgcctgatcctggaacctctgtactaagtttcacaatcaatcttgatttcttcccaagagctttatgtgatctcggttctagtgtgaatctgatgcctcgttcagttgctatgcgtcttgggtattccaatcttgagcatacctttatcactcttgtgttggcagttcgttctacccgaattaaagatggaattcttattgatgctcctgtgatgattagaaagagcatgattcctacagactttgtagtcttgcctaatgagaaggaacctaaggatccattaatccttgggagatccttcttgcacacagctggagcaatcatagatgtttgacaaggaaggatagggctgaatgttggcgatcttactatgtagttcgatatgaacactttggtcaagaaaccgatcatataaaggaattctttcttgatagattctttcacttcattagcttcagatagtatttcagagatggaattagaagacccactagagcgagttttggtctcttccatagaagatagtgcatatttggatagtgaaacttctacatatagtaagctcctagatgagactaaacatgtgatgcaacttataattgaagaagatctttcatctgtgactccaacaccgactacttattctgattgggattcaacaaaggctcctaaaatcgatataaaaccacttccagcagggttaaggtacgcttttcttggtgaaaattctacttatcctgttattgtgaatgcttctcttaatcccgcagagctcaccttattgctaagcaagctgcgcaatcatcgcaaagctcttggctcttctcttgatgacattgcatttatatctccggatgtatgcatgcataggatccaccttgaggatgaatctaagtcttcagttgaacatcagagaaggctgaatccaaatctgaaagaagtggttaagaacgatattatgaaactgttggaagcagggattatctatcggatttcacatagcantttggttagtccagttcatgtagtccctaagaggcaggtgttacagtcgtcaagaatgagaaagatgagctgatccctactcgaacaatcacaggccatcggatgtgcatcgattacagaaagctgaatgctactactaggaaataccatgtccccttaccattatcgatc

SEQ ID NO: 343 - DNA, 525 bp, Arabidopsis thaliana landsberg
  unsure (1)..(525): unsure at all n locations
taaagaaactactaattttcatatacagtttttctctccaatccaaaagtttttccgagaacattaaaagactgttttctaaacaagtagtactctaaagtttttctccatctggaagaatgatcctccaaaaatcttagccctgcatgttgacagaatctcctgcagcaactgaattgctatttgtttccatcatctttttcagtttatcctgccagaaaacaaattaagttaaactggcaataagatttaatccaacaccagtgagtcagtgactggtctttgaagttgacaaacctgtaagaacttcttcacaagcggaaggaccaccaagcgatactcaactactgatagctttgggaatacatctattagctttttgtatgtgcattcgttccgcaaaatctttgaatcaatcaaaaggaactgcaaaacanaaaaaataacacctcatatcagccgtcacagatcaaatcctgttgaaatgattatataaaaagaaagaagaggaagaagaataccatc

SEQ ID NO: 344 - DNA, 1574 bp, Arabidopsis thaliana landsberg
ggagtttaatattccaaaaccaaaagtaagcatgtaaccaaaagtaagctgggacaccaacatgcaaataactttagttcaggtaactacgacacttacaaaacctttagttggacaacacatccatacgctgccataacttgtctatatggtactgcataaacaataagccttggatcagagaatattcaacaaatttcggatgatttcgatgcgaaagcatgcaaatgaaaaactcggtgtgtgaagcaaaatgatcggctttcaaaacgcaaaacatagacagatggttcatataaaaattcaaaagaggattataataccaggtcatgatgagctgtatcaagacacgcataccttcaactcatttgcaaaagtatggactgatccgatactgaagacgccacttaaattggagatccaatgtctagcaccactcttccattctagagtagataaacttacactccatcaattcttattgcagaagcaatggtctctccttcagactgaccaggagttcattgagacccactcacacttatttctctacaataggaagcatactagtctacgttactctcacgaaataagacaacaatgtctccactctctacatatcatattaagaaattggatatattgagtaacatgcaaatcaaaggagcatgaggcactactcgccgcaactttagtgacggttattagcctcttcaaacacgtctacaaaagtttgaacgaaaaatttacaactcgaaagcttaaaataaatttccacaaaagaatttttaagtttagacaagaaaagaacagttccaatttgtacaacaccttcaaatgaggactcttaaaaagcctttaagaaaattttgaaactgaggtcttaaccactctctttggagctgcagtcccctagtgaacagaatataaagaagattaagtagagcaagaaaaacaagaaataaaaaattaagacagtccacacacatgtaccctttgaagtctgaaaaaagaaataacacagtttgattcagttaataagatatgttagttagagaaagcagaagcagcttaaaggaattcttaactacctgaaccaacatacttgtgtaaagctcccaacagtttgattgcaagatttcaggtgtcatcagtaacatccttacaaaaatctatcaaatcatgtcccatggatagaaaaagctcttttgtcgtaacgaaattaactgcactgcagtttaacaaacatggatatcaggggctggaaatttctaagtagagaaaatttcaaaaccgtaagtttcaaaagttagacaccaaagtcatcaactggtgaacaatccataacaagcattcactaaaaaaccttgggattccttgtgctctttcatgtttttcaaagctacaaacaagagccacaaatcatcattttgatcagattaataagaaaactcaaagaaaagttactgaaccagctcataacctcttgaaaccaaatctaggaccaactgcttcgtagtattcagtagggtacttcatagcaaacagctcataacctcttgaaaccaaatcta

SEQ ID NO: 345 - DNA, 1373 bp, Arabidopsis thaliana landsberg
  unsure (1)..(1373): unsure at all n locations
cgatagtctagaacttgatattagataataggtatgtccgccataggttcttgttattagaactatcatagatgagcctaggcatttagagaaagaacaggtagtctcatagaagggctcttgtttagatactaggtgaacttatcaagcttattaacaatgcatgccttagcataggatttctcgacttctttggttatctagctttaagtatagagagtttcgcggaacgcnnnnnnnnnnnnnnnnnnnnnnnnnnnnnnnnnnnnnnnnnnnnnnnncaatcctaatattagctagatctacgatttatctatctctcgagaccattacttagacccgacgctttaatcatttgaatctacacctattttacttgcttatttgtcttttacattcaattacttcatctagcttattaaataacatcataagtctattgtgtgaacatcgagagctcagtggaattcgacccttaagtgccaatgacgatctcttatttgagggagtaagcttaaggcatttagagctatatcagaagcctttacccgatggtccgtaagatcatctaggaagaatatagttaacttttcgcgtaagtatagaatcggctgagtcatagcgaaattttgtttgtaaatatgctaaggcttagaacttgttgaataatatataaagactaagactaaaattcgatacttataacttgtatgaaccttttgaatgtataataagttaagtattttcttgcttttgtgtggccgaccattatatgagtgagaaataacttctataagcatcagatgagttcgaaaccccatcggaagtgcctcaccaacgttcggccaaatgaagaatcagagaaaagaaattgaacttagttgggctcaagatttgtctagatcgggcatacttcagggaaataagcaaaagaggggaagttcggttcgaggagcaggcaattgtataattagaacaaggaaattcaaagcccttgtaaaaatgttgggagaattcatggaagttggaaatgaccgaaggttagaatttgagggcaaattctattaaggaggggagaatgtagtgacccgcataagggcatcgggcacggccaaaggaccgaatgagaaacttttgcccgaatgcaaagcaattgaccgcgtgtgtacaaacggtgccaaaacatcaaagggcaagaatggctatgaatgggcaaagatggaaaacgttgggcgtgctgantcgaagtttgtcccgccggtcgcgaaactgacatgagtaggacacctcatgttaccaaccttggagccaaagtcagatcattcttggagncnaagttgatggggcggtggagtgacacccgtcgccaccta

SEQ ID NO: 346 - DNA, 590 bp, Arabidopsis thaliana landsberg
cccgaggcctaatccaaatcatgatcctacaccaggagttggaaaggtttgattttcatttctcagatacaaatgtctaccaaaattcatatataaattgcatactctaatgataatatttaatgcaggttttcttagagtatgcggatgtggatggctcatcaaacgccagatcagggatgaatggaagaaaatttggaggaaaccaagtagtggctgtgtattaccccgaagacaagtatgcacaaggcgactacgaaaactgagctatctatcgtcttcttcttaagctttttttgtttggttctcttaaatgtttcttgcatgttaaggtctctctactctactaaatagagatatctgtttgtctagaatctgactgagatagtacttatcgagatacaatcaatcaatgtatgcgttggtaataatagctttttgtgtcattaaacacttttaagtttgtattcgtttacaagccaaaataccgaacattcaaaagctctcatgaaatccaccactttcactttacaattattcaaaattcagttgacagatgtgaactatagcatattatgtataaatagtta

SEQ ID NO: 347 - DNA, 2312 bp, Arabidopsis thaliana landsberg
gaacgagtcctagtcgacacgggaagcacactagacatcattttccttacaactctgcgagaaatgaagatttacatgacgcaaatcgtgccaactccacgacctgtgctcgggttctcaaatgaaaccactatgactctcgggaccatcaaattgctagtccgagcaaaaggggtaacaaaaatcgtcgatttttctgttaccgaccagccgaccgtgtacaacgcgattatcggcaccccatggttaaatcaattccgagctgtcgcctcgacatatcatctctgcctgaaatttcccacaagcgacggcgtgaaaaccatctggggaaatcagaaaaatgcccgcatttgcttcatggcagcacacaagcttaggaaccccgtcaatgagtcgacggccgacgcgaatcataagaaggccaagcttggccgagctgaagaaaagtcaatttccgagcagttatagcagctaaggatcgaggaagctcgggaatctacaacgccaactcccgatccggtcatcttaatctttcttgacaaagcaaagcccgagcgatgcgtaaaaatcggcggagatctgggagaagaactaacagctaaactcaccgccttcctcaaagaaaacgttagtacattcgcctggtccccagaagatctgcctggagtaagtgttgacgtcgtatcacatgagctcaacatcgatccaactttcaaacccatcaagcagaaaaggagaaaattgggtcgggagcgagcagaagccgtgaaagccgaggtagagaaattaatgaggatcggatccatcaccgaggcgaaatatcccgattggattgcaaacccggtcgtagtaaaaaagaaaaacggcaaatggagagtctgcgtagatttcacagaccttaacaaagcttgcccaaaagacagcttcccattaccacacatcgatcgcctcgtggaatcaacttctggaaacaagctactgtcattcatggacgctttcgccggttacaaccagatcatcatgaaccccgaagatcaagaaaaaaccgctttttacatagaacaaggcattttttgttaccgagtgatgcctttcggactcaagaacgccagggcaacctatcaacgcttcgtcaacaaaatcttcgcattatagatcgggaagacaatggaagtctacatcgacgacatgttggtgaaatccatggcagagaaagatcacataacccatttccgcgaatgtttcaagcagcttaacctctacaacgtcaagctcaatcgtgcaaagtgtcgcttcggagtaagatccggcgagttcctcgggtacctggtcacgcaccgcggcatcgaggcaaatccgaagcaaattgaggcattgttgggaatggcgttaccttagaacaagcgagaagtgcagcgcctaaccggaagagttgcggcccttaaccgtttcatctctcgctcaaccgacaaatgcttggccttttacgatgtgctttggggaaacaagaagttcgaatggacgacccgatgcgaagaagcttttcatgaactgaagaagtatctggcaacaccacccatcctcgcaaaacccgtaatcggagaaccgctgtacttgtatgtttccgtatcggatactgcggtcagcggagtgctagtccgagaagacagaggtgagcagaaaccgattttttacgtctcgcagactttcaccggtgcggaatctcgctatctgcaaatagaaaaacttgctttagcaatcataatgtcggctcggaagctgcgaccctactgtcaatcccattccatcatagtaatgggatgcatgccactccgcgccatcttacacagtccaagccagtcgggtcgtctggctaagtgggcaattgatctcagcgaatatgatatcgagtatcggaacaaaatgtgtgcaaaatcccaggtcttgctacctacaaaggaggctcatgttcaaaatcaggagaagtatttcgactcgttcgagttgacatggattccccaagggcaaaatacatcggacgacccttagctgctttgttttgaacatccgacccgaacttgaggagaatcatcctagtggagtttatcgaaaatccaagcatcgagctcgacaaagaggaacatgccttcctcgtacaagttgccgcagattgcgaagatgcctcggatgtcagctcggacctgggctgcgattgagaatggattgaacccatcacaagctacatatccgaaggaaaagtgccctcggataagtgggaagcttgaaaattaaagctcaggctgcacgtttcg

SEQ ID NO: 348 - DNA, 801 bp, Arabidopsis thaliana landsberg
cggcacatcgaaacgaagaaaccatttcgtttctgaattccaaatatattggatacggacaacggatattgcattcacagcaaattggacgagatgcagaattgttgcgttgaaaaagcagttcaccaccagccaatgagatagttagaacaggcttcaaatacggatatgggccaagtaaacaatttatttgaagtgtgatgcaacatttatatagaacccttcttttcttctaattgctaattttcccacgcataactcacactaatttgcgtcatttgcctcatctccatgataaaatatgaggtaatgttcatcatgtttatactttactagacaacatataataaagtcgcattcaatggagtttagaaccttattaacgcccattaacttgcaaatgtggcagatcggcctctctttgggatctaaagctagaaataaaggttgttaatgaccttgataattaatggctcagaaatcgaggcatgcactatatttagagagtagatggtatccttgttgtaacaatcctcgttggtagactcatagctgaaactagtacttcagcgattacaagcatgacaggtgaatacgttttccacatttgcagctttttgtttaagtggatgtggatgcaattgatggaactttttacgagaagcaaatgcatatttttcgtgtaggatgaaatctcattcaacaaatgcaaaataatctcaacctcatcaatttcctaagtttgaccagccttataatatggatctaggccaagtaaacaataaatatgaagcgtggtgc

SEQ ID NO: 349 - DNA, 609 bp, Arabidopsis thaliana landsberg
agagctatcgaggaaaacttgatcgtgagcgatgaaaaataatttttggagctaagacaaggtattcaaggtttatcaaggttggacgaagaaaatcagctttggtacgaagggacagtagacgatctaaggagaagttattggtagttcacgggtcaatacggacgtttcccgcgaacgaacgagtgtataaggacgtttaagcctatctgttatggataagcatgaaaggataaaatcgttcaagcctatctgttgctaaaggataagtacgcccgagcctatccgagcatacggataagatcattcgatcctatccgtggttttggatagacttccggataagcttcgttgagcctatcatgtcacctctagcttacctaaaccaacctaccaacctataaataccccccccccccattttgtttcatttgtctcctcacaccaaaaatcaccaaaactagagactttagctctagttcgtcggagagttcccgagcgtgccttttaccggttagtcaaagtctaggcatctgatagtccttaatagcttagccgagctaaagttccatttgtttaagaacttgactttagctaattactatttaa

SEQ ID NO: 350 - DNA, 1309 bp, Arabidopsis thaliana landsberg
taagtttctatataagataacaaaggacataaaacgcaattttggtctattatcagacttggaccatctcacattatgtcgataaagaagaaaaaagaattgggacaaaatctctctaatggggacaacaaagcatcacctgctcttctaatcttcctccaaagattaacaaacactttccactgcagctctcaagctttatgatgatggaaagatacggaattgtattaagacaacatgggagtacaattcatattaggtcttcttgattttgccgacgtatgcctggagagacaaaacaagggttaacaacatggtatgttttgcggtggattaagtttaacaaagcaaaagagtataatgtatgaaagaacctgaaggagcttggtaagctttggtttcgaagcggatagataatggtcaatcttctcctgtgtttgaggaacgtttccactttgcattgtaccagtcactttctcagctaccttcttcactatgtttttgtaaccatctttgttaagcttacctacttaaacgcccgcattcctttcgggtctttctctttcttggtctcttcgtctcgcttccatcatcatcaccatcttcatctttatccacgacattctcagcatcattagtgtcttctccagttttcttaccctcttcttccttgctagcttcatcagtctttttgtccccgttttccttgggatctagcgatacttcttgaatctcttcgacattgcttatctttgatgcagtaaccgcggggactccttcagcgccagtgctcatccctaatccccatagctgatttggattactactcactacattactttgagtagtagcctgatttggttgaacagattctgaatgcagaggcagctgcaatgcctgttcaagctgtggaatgggctgaccatttgcaagaaactgcgctagagatgctgagatgttagtaatctgatcgatttgttccctacttactgtattttggaccaaaacaggtttctccacagttgagtgatgattatcttgataaacttttccactctcaagattgctcaagttggagcctactgagaaatttgtagcagcagcagctagcacttgttgacttcctccagcagttagtgagctttggtacggtaatgcattatgattctgattgaatgtttcaactggcgcaacattcactgaattactgtaactctgatgtgaagcagctacaggtttctcagccatagttctgccaccatgtgaaaacataccactactcctctgatcatctttaagggctcgagat

SEQ ID NO: 351 - DNA, 2383 bp, Arabidopsis thaliana landsberg
ttttccttgttaatttatttcaatttgtgtgaagataggttgttagtgacatgatatttgaaatgcattggtgacatgatttgatatatttattatatattaaattacagaaattattatgtatatgagattataaaactaaaaagaatggaaaagatatttaaggatgttggactgtaattgggccgacggatccattacaggtcattaaccgctaacgagcaatgagaggaaggatcgagttacgggccgttgtcttccagaaaataggcttgagtagccaagattaataagcttgagtagccaaagttaatataggcttgtgaagccataaagtaaaatactaaaactaaaaatgaaagtaaaatatattgttgtgagcaagagcgcatgtttgtttgtttgattgttagacatactgaatctatgctaagtaatggtcgttaattatatttggaacatttttactgtatgtccaatgggcagacttgatctcctcactgagtaaaattgttttactcacccctttttccctttttctccaggttagtaagtctcaaaaattacggttaaagtttgttcgttggtgaattttaaataaagaaaaggtttggcaagaccgaatgaataacacgctatcttggcctgtatggcgggacgggtgttatactcaagttgacggtcgagcatagtggtcgagtatgagttgacttttcctcgttcgatgccataacctctgtgtttggtctaaagaactatgttcttgctactgccatgtgtgagtccaatgacttatcatagcttaaggtctcactagggagatacctagcttcacccttcttggtcaaagcaatttgaaggtgatcttcttcaacaagctcttctagtagttcatcagctagtcgatccgtttgtgtataatcttcttttcgatgattgcactacactcatgacttaacacctccattccttgaccttctttgatcctctctgtaatcatatcctttatgtatttgtgggaatcttgtattagcgcataataatccactagaggcattgtggcttcaagatctttcatttgttaatctaagagaggctcttacttctttatcagttgcttattgaatcttccttgaaattgtagtgaaggcttgtagggtggaggaacaaagactttatccttggttttagtagcggcatgctttttaagagaaggaggtactacttgagcttgggatcgagtactacgatcgagtataggctcctctattgctatttcagctgaaacttcattctgaacgaaaacctccccttcttgaacttcactgtccctagtgatagaggtaaaggcatgtcgatttgggagctctcgatcatggcagatagtgatggcgtgagcagtggcatactccttagggttctggattgctttccctggaagctggcctgggatgttggtaatagatggtgaagtggggatgccttccagatatcgtatcctagtgctcaaagattcatacttgctgttaagttcgacaaagtgtcggtcaactttgttgtctcattcagcaaacttctgagtgatttccattgctcttgtggcttggccttgaattatctgcagaagcatggtcttcatgtttgaatcctgaggtgcagctgcttgatgttgctgtaaattagaaaccaggtggtggctgttgttgttgataacctccctggaactgctgctttggaacaaacccctgaccttggttgtatggaataaatggtttgggttgttgttgttgctgctgctgaggagggtaaactcggtcctgagggttggtgataaggttcaaattaccctaagaactactctctcaaataagagatcaatagcattatttaaggatcgatttccacaaatttcttttgttcacacaataagttgaatgtcgagattaagctagcaggtaatgattgaaataaaaagtaaacaaagtaaaaagacagcaaattgatttgttgtaaacgattaaataaaaagctaggaatagagaattctcaagaaactattggttagtagatctaatggaagctaggttgttatcgaaccattcttaaactcaaactctaattatggaataaacagtggtgttccacgaaactccctatgattatggctaagaataaccagagaagctgagagatctttgacctaaacatgcattctaaaagagttcaattgttcaccttagtagatatgccgattcttattacacacctataaacaagggtcatcaaataatagatccaactagagatacctatggtgggcatatctattgtctcgattcaagatctagttaattactatagatctagcattaagaacaatcaa

SEQ ID NO: 352 - DNA, 1077 bp, Arabidopsis thaliana landsberg
aagattcaagaagatggtctagttgcttctagctcaaggaacgctgaggaagatggtgtctcgagagatccacaggagaaacaagaatatggataaagttgtgaagaagccgagcaagagatcgaaaaaggaacagtgttcgaacattgtggagaacaatgcttaaggattgtctgcaatgactttcaagatcattgatcccttctttttttttggaacttttggttttgtcttcgctttattttttctctatggaacttaagcaacctatatctcggtttataagcaagttatttcctcttttcttctcttaacttttattttgttttcatgcgtggttttacatatggttaactgctaaacattccattatctctacttatcaatcaacagatcatagtaaacgtaatttcgtagaagttaagcacatacatcttctaaaaactagagattatttatcttgagaaatctgtacatatttcaaacaattctatatatatccaagggtgaatgggcctgaggggactgttaaatgggccatatatcaccctccaacccaacaatactgccagatggcgggattaggaatttagtattctttaaaaataaaattaaagaattacgaaaacaaatacacggcgtaaaatgcctaaattaattatcgtaaaatcatatagaatcgaagaagaagattcatataattataatccaatccaggtcttaatttacgctttcactcgccattattgttccctcttcttcttcttcttattctctggatctctccttctccctctcttctttctacagttatttcgctttagcagattacttaaatccacggtttcttcttctccgggagcatttatggcgtcagcggtgacggcgtcaggcaaggtggagaaaggacatcagctatatagagacggcaagtataaggaggcgcttctcttctatacggaggctcttactgctgctaaagctaaaccacagaagatcgctcttcacagcaaccgcgccggttgttacttgaaattgcacgatttcattaaggttttttaaaaaattctctttgac

SEQ ID NO: 353 - DNA, 647 bp, Arabidopsis thaliana landsberg
  unsure (1)..(647): unsure at all n locations
catattattgccttcttgcaccacttctatgatgatgctaagttagacaagctgtgaaaaaaagatgtataccttcactcaaggtgtgacagaagctttcaaggcagcctgggtttatttcaaggaatatcaacgggactgctagcatcatggcttcagtgaggtacaacttctaggtaccttcttcaaaggagttgattggagatatcagatggctcttgatttaatgagcaatggtaacttcaataccaagtatctggtagatgctacagctttgattgagaaccttgcctgtagcaacagtaccaaaaatgttgactttgagaggaagaagattgcaagagttgtttcaaggaatcagatggctgaggtacatgctaagctagattcagttcacaacttgcatgtacactttgctgctaaagaagagaccattgagcttgagccagagacagaagaaggagtcttctacattgatggttgatatgagtcaaattaccctaatgactactctctcaaataaagaggttgntatagcacttaaaggtcgaattccacaaaattctcggatcacacaatagactaacaatttcgaataaagctaaacagaaaatatataaagttaaagacangaaaagcatgaaagg

SEQ ID NO: 354 - DNA, 1759 bp, Arabidopsis thaliana landsberg
ttgaagaaataataaactggcattgtcggattctcctctcctgcctgatccaaaaccttacagacgcttgttgggaagattaatatatttaagcgtcacacgaccggacctagcatattcagttcatgttctagcacagtttatgcaaacgcctcgtgaagatcattggttggccgcactgcgtgtagttcggtatctgaaatctgatccaggacagggaattctgttaagagctgataataactttcaaatcacagggtggtgtgattcggactgggcgagatgtcgcttaactcgacgttccgtcactggctattttgtacaacttggggagtcacctgttgcatggaagacacgtaaacaacgatcaacgagtaggtcttcagcagaggcagaatacaggtcacttgctaatctcgttcaagaattgatatggttgaaacgtatgttgggtactcttggagtgaaacacgaccagccaatgatagtccgctgcgatagcaagtcagcaattcacattgctacaaacccggtctttcacgaaagaacaaaacacattgagatcgattgtcatttcgtgagagatgaagttgtcactcgcaatatccatttgaaacatgttgatacaaggtctcagcttgctgatatcttcactaaaccaattgggagagatggcttttggcgttttcgatgcaagcttgggatacaaaatttgtatgctccagcttgagggagggtattgagagttggttagtctcggttatgaagtttggttcaagttggtttactcaaattcagcatattccacagatactgcaaatattcgaaggttgcgatcaactccgtaacaaaggcaaagattgttgtaactagttagattgtacctagatttcagattcttgtttagagttagctatatatgtacgctcgcgaactatttcttaatacacagaaattctcagcctctgactctctctttataagatacatataatttttgtataattatcttatttaggtttttaaaacaaatttccatgaaatatttaacttttaaggacaaagtaatcatttttcctttcttctataattgatgtaaaatttcccttttttaatatttggtaatttgaattagaattagtgattgcttttctaatttctattttcattatataagatgcatattgtttttgtatatttatatcttatttatttttttcaataaatttccataaaatgtttatttttgtaatgagaaattaatttctacataatgttttttcatgaataaatattttatttgacacgtgtcaaaatctaaaattgataaaactgtcacgtgtcataatctcgtgagttactaacttttgaaaccgtagtttatataataagatgaaagagatccaagtttcctaaacttagataaaaccaaatataaataatatatttagagataatgttaaatttcctaaacttttaatattaacatccatcttctagaataatatattcttatcatttgttgatattatcatcttaccgtcgatctccagttctctatatctcaatatcctccggcaagctcatacatggtaacacgtatgagattggacatgcctttaaaatacggctttatactcagcaatcgggtcatcgacgtttatacccggtcataggatcaaatcggctacaaatcgagtcgtttggtcattgatatttatatccgatcgtagggttcaattctacatttgtacccggt

SEQ ID NO: 355 - DNA, 451 bp, Arabidopsis thaliana landsberg
  unsure (1)..(451): unsure at all n locations
tggactgcaaaaaactgaaacttgggaccaagtgatttctcaacatctactataagcaataatggatcatccgtaatgatacttgagatctgagaaactgtgaacccatgacttctcaaaagacttagaacagagtcaggattggccttgtcctcgaacccaatgaatcaacgaggtaagagactgtaaagttcttaccttttcgactatctataaggctcacatcagtagcagcactagcaacagtggagaaggaattggaaaaagcagagaatacattttgcaaaagcttcactgaaatactaaagttaccccatatatgtaactcaatagatcttcttccatggagtatcagagaacacatcacataaccagtcaaatctcttccgcttcgaggatcaatctcagaaccctacanatcgcgaagaacaagattttggagagggaaaac

SEQ ID NO: 356 - DNA, 572 bp, Arabidopsis thaliana landsberg
gttttctacagtcagagtcaggaagttggaagtgcacgcaggtaacgactaaatttgttgacccattgtgtcatagtccatagtccagaacttcaaattgtaactttattttagatgtttaaagcaactctttgttttggtggtatatacttctatcattttagggtgcacatctgctgcggctacctgtaaacggtatgaactaaagcacaataagatgttggagttttctcgcaaggccggaatgaggaggagactgatctttagttgcaggattatgcagttgagaaaaaatgtaaataagttgaatacagaaatcacaagacttgcacatgggggttactgaaagtgttgttaaagatatatacgagcatataagaaaagtgagctaccgatgaaattgaaggtccctatttctgtatttttgttaagatatgatatgtttttccttctttacccatgaatcttgtaaaatctatgcagactcaagaaaggagcttagtgtataacgagactgtggttgaccttttaaatcgtgatactgagcccgttggactattaaatgatctaga

SEQ ID NO: 357 - DNA, 586 bp, Arabidopsis thaliana landsberg
cgtctttaaagctaatacattcatacccatcttatcgtgcttcccaatctgcgttgcaaaaaaaaaaaaaattacatatatctcctactccatgtcacttgtcacccttttggatagctttttaccttttcccagccatacacattgaattctagaacctgagtcttgggatctctgaccgagaatttgaattcctcattccattcagggttcaaattcttgtgtttaacagttgtcttcttagatgaaattttatcttcagagagctcgatttgcacgtatggatttatcatgcccatctgaacttttttcctttgaaccacagccttcacaactttcacatggaggattccaacatgccttcttaatgctctacagattaaaaattaagatttgctttatattattgaatttaagacatggattaactattcaaaagataaaggcatttacatgttcacaacttgatccttgatttgctcctgaaacaattaacgcaacaatgaaactacaaatgaatatttgatccagcagaaatgtaaaaacaaaaagacaaaacaacttttcaccaataatagatttcata

SEQ ID NO: 358 - DNA, 568 bp, Arabidopsis thaliana landsberg
  unsure (1)..(568): unsure at all n locations
gaaacacgacttgatattttcatccaccaagctatcgtagctgtactttagaattttaaaatttttattttccatgtcagaaaaatctgcagcggatgtagatgtagtcaaaacatcgattgcatgctcccattcttgtaccatagttttagatgccatctctgttgccaactccacaataacaggatctctacttaatgtgttgtctcccaccattgtagagattcccaatccttgactattggttttgtggtggctctgtagagattcctagatctcttttctgaggggaggcatattcaaattcaaatccttgatttgatgcttaagtgatagcggagaaaacgaactgagtcgtaaatctagttagagaccataaacagagggataaagaggataccataacacgcaacaagatnnnnnnnnnnnnnnnnnnnnnnnnagcttaggattatatcacaattttagtatactcagaatagctctaggggattgacattagagaatctaattacaagatctgtttcatctggatcctgtaaattatcagtcacttattcgaccacac

SEQ ID NO: 359 - DNA, 1152 bp, Arabidopsis thaliana landsberg
tttcaaatagtgcctttacgtgtaatattctcttgtttttggaggataaaaggacaattctatccttcccacattaaaccatcaattgattaaccgggtctagggattttgtttgatttggtatataataaagtgccttctcctttacatggatacatctctacttcttaatatcatatatgaacacgtacttgcggactgtcagctataggaatccgtccattactctttgaatatatgttctccaactaatgaagtgttcttgtatttgattttggtgaacaatgtttagatttggtgttactcatctttcgtgtatctgtttgtgcagctaagacatttcaatctaagagctgtaaaatataggatcattcatatggtgatattcttatgattatattcaaaaatggttcatacaagtgagtataccctctacccttaacggaatgcactgacccctatgatacttaccctataattaaacccataccctcaacccatgatctttctccactaaatctgaaacggtaaaaacaaacactaaactcatacaaaaaatggtaattttaccgaccaataaaacatatttaaagcaaatcaaagacacaggtgtccattgatgactgtccaagcggtctagtccatgtggtcatctaatgacttacggggttgtttcatttcaatacacaagtttatacatgaacaataatcaccaattcaaacgccaattcaaagtacatcatcgttcatttttctttgaccattattccacaaatgcaaatccgacaacaaaacaagagaaacaatctcaaagacgttacaggcatcgaggacgagtcctcaccgaaagtaaacaaatatgagattcgcagctaatgacccagaacagaagatgaaatcggataaaattatttgggcatgcacttacctgcattgttgagccgtcacgcataatcgaagaagatggtggaagtaatggaagaaggattgatcattgtcagtcgtaagagagtagtacgaggaaattgaaacggtattgggaggagaaatcgatgtgtattgacattgagaagtgagaaagcaacaattacgaagatgccaatggattatttgaaagcgaaatcgccaaagagaagcatgaaccatctatta

SEQ ID NO: 360 - DNA, 721 bp, Arabidopsis thaliana landsberg
taaaaatatacgaaattatgctaagtataaaatacctaagatcatgtattaggtggtgtacgagacatacatgcattaagatcaaactcaactagaaagaatagtataaacgatcaaacaaaatcatagaaactgccaacctaaaccagatttaacatccccatgaatcccttttgaaaccccctcaaacccaactagtgatctactagctcatggcaaaagagcgaattaaaagttgggttgagtaaaccataagaaaaagaagaataagtcttaaaaagggtttagagattacttttttgaatgtaaagctccaccttagagaatcttatacaaaatgagtgagagagagagagagagagagagagagagagagagagagagagagagagagagagagagagagagagagagagagagagagagagagttggtgttcttcgagcttgaaggtgcggtggcgagttagcagctctcggtgtcggcggcagctagggtttgcttgttgtgaagacgcacctacggttcgggcatagaacgagtatttatacttggggctaagaattaggtataggggtaagaacgtcaattccgccggtttgagtaagtgatcatgccgagtagtgggattcatggtaaagcctaatgacggtgacacggagaggaagggtttaagcgtgagcctagtggtcggtggcaagcttgaagagctgcccgggtt

SEQ ID NO: 361 - DNA, 1264 bp, Arabidopsis thaliana landsberg
gtctatgctctttttaaagacatgaagaggagagaaatcgtacctgatgtggtaacatacacagttttactcaaaaacaaaccagaacggaatctttcaagggaaatgaaagcctttgatgttaaaccagacgttttctactacacggttttgattgattggcagtgcaagattggggatcttggagaggcgaaaagaatttttgatcaaatgatcgagagtggggtggatcctgatgctgcgccttacacagcactaatagcttgttgctgtaagatgggatatcttaaagaggcaaaaatgatctttgatcgaatgattgaaagtggggtaaagcctgatgttgtgccttacacagcgttaatagctggttgttgtaggaatggatttgtacttaaggcagtcaaacttgtgaaagagatgttggaaaaggggattaagccgactaaagcttctctgtctgcagtacactatgctaaattaaaggccaagggactccgatgattaagagtctatatctaaatggtcagctgaggatatgaaagcacagttatcggtcttgagaacaaaattctttgtcagttaacgagaaatttagtacctgtatcggcgtatatgagtatgaggatgtgagctcagtattatcctcagtgacagaagtatcttcagggctccagtttttgagaacgaaactggtagagtgagggacggaaaaagacaagggcgggaccgaagcttgtcttgtggagcttgagaacagaggaaccataaaggtagaaactttgcttatcgcaaaccatttcttagaaagttatccggttcaaggaataaactcacctaattcacaacaatgtcactgcaggaatacaggtaaagcacaaagatcggattgtggcaataacgtcgagaagaaggatcaggattcataagctctgaaacaggggattttcaatgctctttgcggcatcttgacacatgagtgatctccaggaaggatcacgagaatataaactaacaggaagccctattgattgtatttgtaatacgtaaaaaatgtaaagtgtaatttagtaacccacacaagccttgtaaacctgttcttaagaagctaaactgttaattgtagaagatcttcaatgaaacatattcataaataacaaaacccaaatcctcttttcaaaacgaataacccagtccaagatttcagcatcataagttcataactatttttattttttttctcaagtttaataactattcttag

SEQ ID NO: 362 - DNA, 897 bp, Arabidopsis thaliana landsberg
tctcagtatgtattttgcatgtataacaatgtacatacatctttgttggtaagctaaaattgttgagaacaaataaggttttaaactaaacccgtaaacaaacattataatattaagatacacgtacacgtgtacgaccactccaaacagttacatcctaaaaatatcaaaatcacatacatttaatactatgtacgtacacaaatatatttatcggaatgtacatggtactacattaaaatgagtgtaaaaagtctctaaccactatctacgaaaaaaattaatttatttttttgacatccaaattaagttattgtatataagttatatgtatgcatgtatattataatataaattataaatatataatatttcaacgaatcgtattctgattcaggtaaaactgatcttccaatactaaattgcacactattaccattcatttcacatctaccatgtctatatgtatttatgtacgtaaacatttacatttacataattcattgggtacataattagtagtgtacgtacatattctttgataaatgtactagtgtacgtacacaaattgtaaccatgtacatacaaatatgtacatgatattgttaatcttaaattatctttaatgtaaaaattaataaataaattattatttataataaaaatgaaaatatgaaagtgggtcttaaataatagaaaaaaatgaattttaactaaaagtacaaaaataataaatatttctaacacagaaaagaaaaaaaaaactggaaaaactaatgaaaatgaaatataataatattaatttttaattagctaactgtacattgtacttccgtctgatcgtaactaacgtgtccgtacgtatatatcacaattaggaatgataggggcattttc

SEQ ID NO: 363 - DNA, 563 bp, Arabidopsis thaliana landsberg
  unsure (1)..(563): unsure at all n locations
nnnnnnnnnnnnnnnnnnnnnnnnnnnnnnnnnnnnnnnnnnnnnnnnnnnnnnnncctcagtgattgagttagaggcatggggaatgggtagctctcgatcttggcagatagtgatggcgtgagctatggagggtagacttgttcctgcgagtttgcaacattgctacttctgtaaaacatattaggattgttctacttgaagttgttgaaacctttgttgtagcctccctgattttgcacataactaacttcttcttattggagagtctccccatcctggacttgaaatgtctcatcttcaatgagaaaatggacttgcttctattgcacaatgattagcttatccagcttgtcatttctagctttcatatccatgcggtgcttcattatagttgccatcagactaagctaagttctctaccatctctcatccttcttcaacgtctttgttcaggaaatttccgttggatgttgtatcaaggagcatcttgatcttaggaagaacgcctctgtagaaagtacttaggtgtgatgcccttagagaaccatgatgaggacgtt

SEQ ID NO: 364 - DNA, 580 bp, Arabidopsis thaliana landsberg
ctcactttctggaacttttcctccacgttaaatccgtccttcatgttggaatctgatgcatccatgatcttttaagagttttgctgctcagagattagagagatcagttgttaagaatcgacaagagaaaagacaagagagaacccgtgtatgtatagtatatattttaataacaacaacaaaacaatatattttaattcagtataacatatttgtttgtctttgttcacaatacataagtattttttttaatcgttaataaataaaaaagttaagccaaaactattaatttctctagaagagacacttgttttataaaataataataaaaaaaaatactataactcatttcatctcattcattgtacatatatgcatcaaaattataattttcttttactttattataaattatttatttttgtcattattgaaactcttttaaaatatataaacttcgtaaatagaataataaacaaatggggtattatggttaaaaatattgtttggaaatttagtgtacagagtttcgttcttttttatgatcgcttaatgataaatttttgctctttcatctact

SEQ ID NO: 365 - DNA, 1500 bp, Arabidopsis thaliana landsberg
gacctctggtgatgggttataatgccatgattgcgtactcgtcgttttatttttggatttgagtttgggaaactaaaagtgaataataccaaactcgcatctgaactccaaagtcattaccatatatataaattctcaaaaagacactgcaaaatgcttaaacacatgtgaaagattttctgattctcttcaagtatcgtcgaaatcaattaagctttcattcctccaaaaacttcttaagatgtttcaaccataccacgtactttcgcgtgcctgtcgtcatgtacttatacaaggcaaattttgggctataatcaaatatcatacgcaaataactgtgtctgtaatccacatttctgcaaaaggccatgaaaaaaagaaagaaagaaagaaaacaagattaattataacatttctgctgtgctcatgcctatctgactatatatacaaacattatggtgttttctgattcacaaagcttacttggaattagacaacaaatcacacggccgttgatcctcccaataattcccccgactaatcacagattaaccattcatggaagtaccattaagaggaaaagccgtgcacctaaactcgaggctgaggccactgatcttcttggtaaaattcaagttagtggaaaacataatccatcatattcttcatagggcatacctgctacaactacaatatattcctcttggtagtctctagtcaatgtcacagtcttacctccatcatcttcaattgtgtaagggtttattcctggagtcggctcatcatcctggaagcatattaattatcagtaaacttagatacttttattgcaatgtaagaaaggagcagagtccaacgctagtgggaataataacatatatgattatagaatgaacaactttaggtggtataaagccagagcagagcatataaagaaacctaaaccattactattagttttggaaggaaagcaaaatgcagaaatatttacaaaagcgagatcatggagttgcaaagcagaatagatctcggagtcaaatcaatcggagaagcatttggttggagctctggcgatcatcaatagctgtcgaggaaagaaagccactagagaccaagggacgcggcggagccaaactcacaacggcggagatagatcggaatcgaccacaaacggaagcaagcttagatgctgacctgcaccaagcgaaaaccatggtcggcgattgatttctctctacgaaaatggagttttaaggttttttagttccaaataaatatttatattcttttgattatttagttccaagccaacatgtcatcacttatagtgttgaagttgaatttctatcataaggaaacaaaagattttagggctgcaatcacttgatctccaagctaacgtatcatttcgtgaagtttagatagagcatgcattaatgagacgtaatcatagccgttagaattctaaatcaacggatacggactaggcccatatgtttg

SEQ ID NO: 366 - DNA, 468 bp, Arabidopsis thaliana landsberg
aaaaaatgcgtttttattttagttttgtcactcttctaatcggtaaaacaaaaatcttgtgaagatttgattttgatatctttgcatagattttgtgtaatttagccgttaaggattgataaaaaggaaatagttagttttttccttttctttcactctctcttaattaataagaagatctactataaaaaggaaagatttgcttgtccatatagatttgcgagtcaacgctccggtcaagttgttaaagtagttatactcattgttgctcaaaaacagagcatcccctgttccgttgtttctggctgtgttgtacgggactccgaccatatgagacgcgaagtaagaagcagctgattctgtgcagcttgagagaaagaattaggttttatcttgttgatatgtggctgagaaagctaagagagttgcagtgttgtgtgactgtgagttgtattggttgtgaaaaga

SEQ ID NO: 367 - DNA, 795 bp, Arabidopsis thaliana landsberg
tggtccttatctaaacatctctaactccttttcgtggatcgatcacccaatccttcccagctgatccttattttagtggtccttgtcgccgacgagaagtttagtctagtttctccatggtttgtgtagctattgagatgttcactctcatgctttcagcctccttttcgctgtctctatttgagctactcatgtctccacactacctatgaagtccgatctctacgactttggtgtgagctaccccctcagacctccagatccgccccctcaggccccaagttgaccattcgttccaatttgtgggagttttctccggtgttatgacctatgggccttccttttctaccacctcacctagcagcatctcctccattcacccttgtttggataatgatctttgtgtcttccacttgcctccttgcgatctattattgttgtgtgcagttcatggtactaaatctttcctctagcgcatatgtgcaattaactggatacttctctggtttatctttgtttgcatttcaggctagtctactttgcttcgaatctagaatcacctttgttagtttattttctgtccacatttggcagagtttgttcaccgaatacttctttagaatcttcgtgtctagggttaagaaaaatcaaacttttgcctacatccatcaaaatttgctcaccctatacatcctcagcgtttccatgcatatgtatacggatgatcccttttgggtgcatcatcagaaatccttttatggggcaacgaccaccttcgtctcactgttgatgaat

SEQ ID NO: 368 - DNA, 612 bp, Arabidopsis thaliana landsberg
gaactgctacacgaatcccgagtctcttccgtgcccaatggataatgatggtttgcgaatagctgaagaaacataacgcccagatgtaatttccgtcaattatgaatagtataccggaagcaagtgttgcatccgcttgtgctggagcatgacgacgcaaaagattaatggctccctggatgtcacgttgatgcgttagaacacgcataacctcgtaatacactattgtgggattgtcagcagcaagacaccttaagcaaaatggtcgatgacggccttcttcctcgactccggatggataatggtcacctctagcttgaatgtcatcgggatcgccgcacaagctgaaaatgtctcttccacgattgcctgatcgtagtagtggctgaaggtcccaccagcatttgtctgctattttcttagctatcttagcgagtaaatcgtcggaaatagttgggttgaccattttagaaatgagatagtccgatatagtcaaattctgcttctttataataacctaatatagagatattgttggggaacttatggttgcattcaatggcacttacgtgtccgtcactgttgggattcaattcaatgtatgagtgttta

SEQ ID NO: 369 - DNA, 545 bp, Arabidopsis thaliana landsberg
gaaaagggatgattagcaggattgagtaatttgggaaatacctgctttatgaatagcgctcttcagtgtttggcccacacacctccaattgttgaatacttcttgcaagattacagtgacgacataaatagagataatcctttgggaatgtgtgtaagtgcttgatacttacatgttctatttcctcgtgatggtactcacatgcattctgaatataattctaactcttaattttcagggtgagcttgctatcgcgtttggtgatttgttgaagaaattatggtcatcaggaaggaatgcagttgcaccacgcgcttttaagacgaaattggctagatttgctccacagtttagtggttacaatcagcatgattctcaagttagtcattttctctaatctgtatgatggtgcataattaatcagattctttgttcctgacattggtgttgtcttaagaactacttgctttcttattagatgggctgcatgaagatttgataaggtcaaacgaaaaccttacatcgaacttaaagaatctgacagt

SEQ ID NO: 370 - DNA, 34820 bp, Arabidopsis thaliana landsberg
  unsure (1)..(34820): unsure at all n locations
gattcttttatcggttgttttttgtggttgccagtcccgaggctggttttggagtacgtgacatcgtaccagatcgccctctcgcagatcacgatgcggtccttgagacatctgctcgagattttgattcggagttatgaatccgaaactgacattgcgcttgctcatctgagaaatcttcttgagatccggcgggttcccaaatccgaggtggatcggtattacatctctcctgctaagggtaggaaagttattgatgggttcccgagcaaggatgagccgtataccgatcacttcttctttgtagcgctcgaagatgttgttcacgaagacctccttgggtcggtcctgacgagatggagaattttgggtagttgtagctaacaatttatttgtgcctgttgcggatatatagtttctttttcttactgtagttttcctttgttgcagaacgcaccctaaagttcctcgagccgattccagacgactttctttcggcttttcacgcgttatcggctcgaaagtgcgattagctgaagcatttctctcgggagcgagttgaacgtgcgcttcgtcttcttcacggcgtttcttgtcctactagctctgagtcttccgaccatcgcactcaatttttcgtagatatgcaatcgacgaagcttactttgcgggaggtctacgccaagaagaaagaggataaggagaggcgattggcggaggagaggcgccttgttaatgcgggattgatctcgccgcgggccgatcctgaggcgacccaagatgggaatgttattcccgatgctgccgcgccggttgatgcggggttgatcttgccgcgggctgctcctaaggcgtcccgagatgggaacattattcccgatactgccgtgccggttgacgcggcacccgctgaggctcagggaactaagccgtctattggtgcgcccgaggcggttgtggtgttacctgtaagtgacaaagtggcgggtaagcgcgttcgggttgacgatgaatcgtcaaagaagaagaagaagaaaaagaagacatctggctccgaggcggagaaaatactcccgatcttcgaagatcgtactgcctcggccaatctgctcgggggatgtgttggccccttgcttcctcctccagatactcttcttgaatctcggaagtatgccgagacggcatctcattttctgcgggtatgagctttgttacttgtaacttgttttggtgttgtcattgtaaatctaacttttcccatttccaggttgtcgcttcgatgaaccggatggtacattcgtatgattcggctatgcggagcaacatggaggtggctggtaagttagccgaggcggagtctcggattcaggccatcgagcgagagaaaaacgaggcactctccaaagatgccgcagcgaagctggaaaggaaggaggttgagaggatggcctttgtccgtctgtcttaagcggttgttatccgaggagagagggcttcgtgacagcgaggtggctcgggccattcagacgacgaggtgggaggtttccgagaccttcattgccaaaataaggaccgccgagcacaaagtatcgctccttgatgaggtcaatgaccgattcatgtacttgtctcaagcgcgagccaacgcgcagctgatcgaggcgctcgaaggtggcggagttctggagagagagagggagcaggtcgatgagtggttaaaagatttcgctgatgctgaggttaatcttaatcgcttcatggccgagctgaaagatgatctcaaagctccagctcccgagtccgctcctctgagtccgggtggtcataggtcggtcgagtcattaaccgacgaggcgggaattacagagcaagctggatcgctcctccctgccaaggataaccgcccatctgaagatctcgattatggacctgaggcggtttttgttttcctcttctctttctgctcgattataatacttatgcttggatggctttatccgatggtatgtagaacctgtgcctggacggctttatccaatttaagtcactttttgaaatccaaaagttatggtttattagtcccgaatcgttttgaaatccaaaagttatggacgattataatatctcggttgcgatccgatcgtattcatttctcggccagcgtttaggaacgagctgggataccggtgttaaaagtataaccgggtttctgaagataaaaatttcttatcagaaataatctgataagtttcacctcgtatttgtatagcgcgctatagccgaataggcgtaatggatactccgagccgtcgctcattgtattagccgagtaaaaagttgcaaagaatttttattcatgtttcggttcaaaaacctacaagataatagaaatgggagtatgaatatacggacccactcccccttttttaatgggggggggtagctgaactcgtccgaagacgagctgcctacgtacccttttcagggatcaagccacctcgtagttcaagtttagtcacctcggatttagttgtagtatttccttaggtgcattgcgttccatgatcttggaacggcttatgccgcttaagttggcgagctcatatactccgggtcggatgacttagagattaagtatggcccttcccagttcgtcccgagcttcccggcgtttggctcgacggtattttgaaaaactttccggagaactcgatctccttcatggaatcttcgttgtcggacgtgtgagttgtaatgccgagccgtttcattctgatagttttgtatgcgaaccaatgctgaatctcttcgttcatcgagcagatcgagtttgtcgaggagcctctgagtattatcggggttgttctcgggagatagactccgacgtaggcttggtactatcatttcggctggaattacgcattccgttccgtagactaagacgaaagggttttttcctgtgcaatggttcaaactttgaataagtcttgtttgcattgacatcgaccacgcctaagttatttacccgtacccctcgaccacacctaagttatttacccgtacccctcgaccggtcacaagatcaaaccaatcacacttgaaaaggacgcatttccaattcaaaagtctcggatattcgacttcaagaatttgttgtagaatctcattaaactctgtttcaccttcgacatggattccataatctgcagttgcccttcgactttcatttggatatgtatgaaaggtatagccgcgagtgaagtacatcggtgcggttgtgatcttagatcttggtttttgaacgatctcatgcaaccaaagttgtaaagcttcacttccacatccgttagtaacctacataaagtaaatattatgtaagtttatcatttcaacataagtaattaagatatcaaattttccaaatattacttacatagaattttaaccatctaacaaaatcactgaaaggccccgatccggactgcctaaagtccagacgagttctctcgacccaagccactaagtgactcggccctaaccgtttatgaggttctttcctagtctaatccgttccatatgattccttgattcaatatatgagacgaatagagtaaacaaccaatcggatactttattgattaagcaaaggattcgatacaacctatgagtttgcatataagctattacaagtcatataatcgatccctagactatccgaactatcaccacccatcagcccggccttgagtctctcgcgcttaagccaagtccttcccacgatcaccatttgttcctgaaagtcatagagccataagtaatctcatttacttaatcatatgcaagtccatgcaatgctctatatgccatacactactcggatacgtggagagaattcagagaggggaagatcgcgcatcagtccggccgattcttggcaggtcagttaagacccgtcggtcctccgccgagccgcgtccccgcctcagccgatccctacctggaccgagtcttgtgtaggatgcacatgacccggatactacccagccctctagtcgatcctttcaaggatccgactactaactcacatcctagaacccttagactcaaagtctaggatcccttaccttccttctcgaggttaggtcgatccgaccctccttctttattgccggccacagcccggctaccgaatcctaagactatttattctcccaagagggagagagttttaatggtgagtttcttgtgttttcggtgtgttgtggtgagtggatgcttcccgaatcaacacatccgttctttgcacctttccgaagagttgcgcccttccgaagagttgcacctttccgaagagttgtatctcttcgcccataattgcccagctagtccgtcactcgtccagctgcctcgagctcgtccgtcactcgtccagctacctcgagctcgtccgtcactcgtccagctacctcgagctcgtccgtcactcgtccagctacctcaagttcaaccgtcactcgtccagctgcctcgagctcgtccgtcactcgtccagctgcccgagctggactgtcactcgacctgagtaaccgtcactccttccagctgagcttgagctttgggcgagctgacccaagtgatttctttacgatcctagcttagcctgcatgatttcccctttgtccgagcttatggccagctccttctcacttgtccgagactccaccttcctctctcggaccaagtcctagccaacgatcctattgaggatcgcgggcgttacaagtctcccccccttgaattggattcgtcctcgaatccgcaacaagttgatctttacccatctccttgaaccactccggaaaattggccttcatcttattctcggtttcccaagtgtattcttcacggcctccacaattccacaagacttttaacaaatcccttgattttccccgagtccctttcgtcattcggtccatgatccgtaccggccatgcttccaccgtcatgttctcctttaacccgggaggtatatcttccacgctttcttcttgatcacttaaacacttccgtaattgtgacacatggaagacgttgtgaaacgcgtttagtttgggaggaaggtcaagtttgtatgccaccgcccctactcgttcgatcaccttgtacgggccaacataccttgggcttaactttttccttgaggtgaatcgccctgcccctttgtaggtcatcgcctttaagtacaccaaatctcctacttggaattccaattcctttcgacgtttgttggcgtagcttttctgtcgatcttgggcttcctttaacttgatttttaagaacttcattctctccgtggtttcatccacgatcgtaggtccaaacaaccgacgttcgcccacgggcgtccaacacaacggtgttctacaagctcgtccatacaacgcctcatagggagacataccaatactagcttgaaaactattattgtatgcaaactctactaaccttagatatttctccctatttcctccccaattcaagaagcatgccctcaacatgtcctcgagggtttgaatcgttcgttcggactgtccgtccgactgtgggtgataggcagtacttaggttcactcgagttcctaaggccttttgaaaagccttccaaaactttgacgtgaatcttgtgtctcggtctgacactatactaaccggaatcccatgtaaccgcacgatctcgtctatatacttctcggcaatgatttctgctccatccttatccgagatcgccatgaagtacgcagacttagtcaatcggtctaccacaacccataccgcattgtgtttggacttgatccccgttggcagtccagtgacgaagttcatcgttatgtggtcccacttccattccggtataggtaggttttgtaacaacccacttggtacttgatgctctgccttgaccagttgacaagtcgggcacttggccacccatctggccacgtctttctcatcccaacccaatggtagtaccttttaaggtcgcggtacatcttgttcgacccaggatggattgagaactttgattgatgtgcctctcttaggatctcctcctttaatgccctatcgttcggcacacatactcgaccgttcaccacgattgtaccattgttcgaggtttggtactcggtcttgttgtttagtgcccatccttttatctcctcgtcccgttcctgagccagccggatcctactaagcaggtcggcctgatcggcggctcccaaccctaagggttcaacttctttagacaaggcattcacatgcaatgtccccatcatgttaaccaagtccacttggctccgttccgcctcaacttccgagcgtctcctactcagggcgtcggcgacttggttggccttgcccagatggtacgctatatccaagtcgtaatccgccacaagttccatccaccttctttgccttagattcaactccggctgggtgaatatgtactttaggcttttgtggtcagtatagatttgaactttagcaccatacaagtatgatcgccaaatcttcaaggcaaatactaccgtggccatttccaaatcatgcgtagggtaattcttctcatgtttccgcaattgccttgatgcgtatgcgataacactccccttttgcatcagtacgcatcctagtcccactatggatgcgtccgtataaaccgtatatggctcaccttcctccggtaagaccaatactggtgcattagtcaacatggcctttaactccaggaagcttttctcgcactcatccgaccagttgaatgcggtgtcttttccggtcagtcgagtcaagggttgggccatgctcgcaaaactcattacgaaccttcggtaataccccgctagtccgagaaaactcctaatctcggtggcattccttggtcgtggccactcctttatcgaccgtattttctccggatcaaccgatactccttggtccgagataacatgaccaagaaaaccaacgcttctttgccaaaatgagcatttacttaactttgcaaatagctcatgttcccttagccgttccagcaccgcccttagatgttcttggtgagcttcccaagatttcgagtaaacaagtatatcgtcaatgaagatgataacaaactcgtctaagaaatcccggaacaccccattcatcattttcatgaagnnnnnnnnnnnnnnnnnnnnnnnnnntggcatgaccacaaactcaaagtggccgtaccttgtccggaaagccgttttcctcacgtccgttggctctatgggaatttggtgatatcctgaggccaagtcgatttttgaaaaccactgtgcacctccaagttgatccatcaactcatctatccggggtaaaggatatttgtttttcaccgtaactttattcaatccccgataatcgatgcatagcctaaagctaccatctttctttttcacaaacagaaccggcgcaccccatggtgagctactcggcctgatgaatcctttatccaacaactcctccaactgtttctttagctccgccatttccgccggtgccatccggtacggagctttagatatgggggttgtcccgggctcgagttctatcgtgaacgggtctgaccggtccggtggtacaccactaacggccgcaaacacgtccgagaactcgttgacgatcggaatgtctttcaactccgcactcgcccccacttccttggttgtgatcgtggctaaatatgcctcacatcctttcccgagcatcctttcagcctggattgccgagattaccaagcttcccgaggttgttcttattccttggaattttaacatacccacgtccctctcgaattgtatccgtcctcggtgacaatctatgtgagccttgtacttccccaaccagtccatccctaagataacatcatgtttctttagtggaacaatgattaggtccgcgggcatattgacaccgttcactacaaccgagatgccccgaacaagtccggtcggatacattgcctgtccgccggccgctcgtaccattccataatcggtgtttggttctttcctgaacccacctatttcaaccaattctggactaacaaaacaatgtgtagccccagaatcaaatagagtgtgcgttactacgtcacctactctcaaggtccctacacattcccttagaatgctgagtacctcccctttcccatatgcatgatgcaatgcaatgcagttattgaaataatgaatagggagttgtgagaacgtaccagtgatcgccctgaagtttccggcatcgttagcttcctccgacaactcataaactcgcggtgccacggcttgccgctttgggggaggcggcagtccatttcccccgcgattgtccctttgtccggcctgcttctccgcagtcaacttagggcactctcgctttagatgtccagtctttccgcaataaaaacaagtccttgtctcttcaccgagaaccttggactgccctggttccattctcgggcaactttggatcgcatggtccttgcttccacaccggccacatgcacctatggccttccagcaagttccgctgtggctcttaccacaggtcacgcattccccggtcttagcatcggacttagtgttatccaccttgtcaaatttccttttcttatccgcaggtttggtggattgattgttccggatcggtgctttctcccggttcaagtacctctcctcctcgatcccttcctcaatcattgctgccctttcaaccaattcggaaaccgagttgaatgtccggaccaaacaatggttgcggatctctatccttagtccacggataaatcggcgcacttgagcttgttcctcctcaagttcacgtcccacataacgccttaggcggttaaattcctcatcgtattcacgcaccgtgcggttcccttgaactaggtcgaggtacgcacattcaagcctatcccaagcctccggtggaaagtacttcttgttaaactcgtcttcgaaatccgcaaaggaccggacctcgtcccctctgcgtttctcgacggttaaccaccaattatgggcgtctccttccaggaaatggaccgcaatgtccctttggtaatcctcagggcagcgggtagacttgaagttcctcttgagtctactcctccactcatcggccacaatcgggtccgtactgcccatgaagtgtctcgtgcccagccttgagacatgttcgagaagactcagatagtctcctcttttccgcccataattcggttgtggattcacttccacaacttccgagtcatcgtccttttggttatccccttttaggaccaccggatctgctacaacggccttggtcaatgtggctagttgcgccatcattcccttcatcaaatcccactgttcttgggccgttggagtattgttccggttatccgtgatgtcccttgcaccactactctccggtgcttcctcatttatggacttcttcccggcctcaggtccggccgagtctgtcccatcgaacatcgtcccgactctggttttctcgttgatcatcgtttcctcctcaaccaaagtctcctcgacaatgcccttgtccttcttactctttcccgttttgctgctcttacccatctgcgaaacctctaaagttaatccacataactcctagtaaaatcgcaaaagagtaaagaacaactaccgcgagattctcaagccgacgagtggtgataccccttaacccaacacctagtcctagaaccaagcatgctctgataccaacttgaaaggccccgatccggactgcctaaagtccgggcgagttctctcgacccaagccactaagtgactcggccctaaccgtttatgaggttctttcctagtctaatccgtttcatatgattccgagattcaatatatgagacgaatagagtaaacaaacaatcggatactttattaattaagcaaaggattcgatacaacctatgagtttgcatataagctattacaagtcatataatcgatccctagactatccgaactatcaccacccatcatcccggccttgagtctctcgcgcctaagccaagtccttcccacgatcaccattcgttcctgaaagtcatagagccataagtaatcttatttacttaatcatatgcaagtccatgcaatgctctatatgccatacactactcggatccgtggagagaattcagagaggggaagatcgcgcatcagtccggccgattctcggcaggtcagttaagacccgccggtcctccgccgagccgcgtccccgcctcagccgatccctacccggaccgagtcttgtgtaggatgcacatgacccggatactactcagccctctagtcggtcctttcaaggatccgactactaactcacatcctagaacccttagactcaaagtctaggatcccttaccttccttctcgaggctaggtcgatccgaccctccttctttattgccggccacagcccggctaccgaatcctaagactatttattctcccaagagggagagagttttaatggtgagttttcttgtgttttcggtgtgttgtggtgtgtggaatggtcctgggcgcccttccttatatagggggcgaatggatgcttcccaaatcaacacatccgttccttgcacctttccgaagagttgcacctttccgaagagttgtatctcttcgcccataaccgcccagttcgtccgtcactcgtccagctacctcgagctcgtccgtcactcgtccagctacctcaagttcaaccgtcactcgtccagctgcctcgagctcgtccgtcactcgtccagctgcccgagctggactgtcactcgacctgagtaaccgtcactccttccagctgagcttgagctttgggcgagctgacccaagtgatttctttacgatcctagcttagcctgcatgatttcccctttgtccgagcttatggccagctccttctcacttgtccgagactccaccttcctctctcggaccaagtcctagccaacgatcctattgaggatcgcgggcgttacaagtctcccccccttgaattggattcgtcctcgaatccgcatcaagttgatctttacccatctccttgaaccactccggaaaattggccttcatcttattctcggtttcccaagtgtattcctcacagcctccacaattccacaagacttttaacaaatcccttgattttccccgagtccctttcgtcattcggtccatgatccgtaccggccatgcttccaccgtcatattttcctttaacccgggaggtatatcttccacgctttcttcttgatcacttaaacacttccgtaattgtgacacatggaagacgttgtgaaacgcacttaattttggaggaaggtcaagtttgtatgccaccgcccctactcgttcgatcaccttgtacgggccaacataccttgggcttaactttttccttgaggtgaatcgccctgcccctttgtaggtcatcgcctttaagtacaccaaatctcctacttggaattccaattcttttcgacgtttgttggcgtagcttttctgtcgatcttgggcttcctttaacttgatttttaagaacttcattctcnnnnnnnnnnnnnnnnnnnnnnnnnnnncaaacaaccgacgttcgcccacgggcgtccaacacaacggtgttctacaagctcggccatacaacgcctcatagggagacataccaatactagcttgaaaactattattgtatgcaaactctactaaccttagatatttctcccagtttcctccccaatctaagacgcatgccctcaacatgtcctcgagggtttgaatcgttcgttcggactgtccgtccgtctgtgggtggtaggcagtacttaggttcactcgagttcctaaggccttttggaaagccttccaaaactttgacgtgaaccttgtgtctcggtctgacactatactaaccggaatcccatgtaaccgcacgatctcgtctatatacttctcggcaatgatttctgctccatccttatccgagatcgccatgaagtgcgcagacttagtcaatcggtctaccacaacccataccgcattgtgtttggacttgatccccgttggcagtccggtgacgaagtccatcgttatgtggtcccacttccattccggtataggtaggttttgtaacaacccacttggtacttgatgctccgctttgaccagttgacaagtcgggcacttggccacccatctggccacgtctttcttcattcctacccaatggtagtaccttttaaggtcacggtacatcttgttcgacccaggatggattgagaacttcgattgatgggcctctcttaggatctcctcctttaatgccctatcgttcggcacacatactcgaccgttcaccacgattgtaccattgttcgaggtttggtactcggtcttattgtttagtgcccatccttttatctcctcgtcccgttcctgagccagcctgatcctactaagcaggtcggcctgatcggcagctcccaaccctaagggttcaacttctttagacaaggcattcacatgcaatgtccccatcatgttaaccaagtccacttggctccgttccgcctcaacttccgagcgcctcctactcagggcgtcggcgacttggttggccttgcccggatggtacgctatatccaagtcgtaatccgccacaagctccatccaccttctttgccttagattcaactccggctgggtgaatatgtactttaggcttttgtggtcagtatagatttgaactttagcaccatacaagtatgatcgccaactcttcacggcaaatactaccgcggccatttccaaatcatgcgtagggtaattcttctcatgtttccgcaattgccttgatgcgtatgcgataacactccccttttgcatcagtacgcatcctagtcccactatggatgcgtccgtataaaccgtatagggctcaccttcctccggtaagaccaatactggtgcattagtcaacatggcctttaactccaggaagcttttctcgcactcatccgaccagttgaatgcggtgtcttttccggtcagtcgagtcaagggttgagccatgctcgcaaaactcattacgaaccttcggtaataccccgctagtccgagaaagctcctaatctcggtggcattccttggtcgtggccactcctttatcgaccgtattttctccggatcaaccgatactccttggtccgagataacatgaccaagaaaaccaacgctcctttgccaaaatgagcatttacttaactttgcaaatagctcatgttcccttagccgttccagcaccgcccttagatgttcttggtgagcttcccaagatttcgagtaaacaagtatatcgtcaatgaagatgataacaaactcgtctaagaaatcccggaacaccccattcatcattttcatgaaggctgctggtgcattggtcaatccgaatggcatgaccacaaactcaaagtggccgtaccttgtccggaaagccgttttcctcacgtccgttggctctatgggaatttggtgatatcatgaggccaagtcgatttttgaaaaccactgtgcacctccaagttgatccatcaactcatctatccggggtaaaggatatttgtttttcaccgtaactttattcaatccccgataatcgatgcatagcctaaagctaccatctttctttttcacaaacagaaccggcgcaccccatggtgagctactcggcctgatgaatcctttatccaacaactcctccaactgtttctttagctccgccatttccgccggtgccatccggtacggagctttagatatgggggttgttccgggctcgagttctatcgtgaacgggtctgaccggtccggtggtacgccactaacggccgcaaacacgtccgagaactcgttgacgatcggaatgtctttcaactccgcactcgcccccacttccttggttgtgatcgtggctaaatatgcctcacatcctttcccgagcatcctttcagcctggattgccgagattaccaagcttcccgaggttgttcttattccttggaattttaacataccctcgtccctctcgaattgtatccgtcctcggtgacaatctatgtgagccttgtacttccccaaccagtccatccctaagataacatcatgtttctttagtggaacaatgattaggtccgcgggcatattgacaccgttcactacaaccgagatgccccgaacaagtccggtcggatacattgcctgtccgccggccgctcgtaccattccataatcggtgtttggttctttcctgaacccacctatttcaaccaattctggactaacaaaacaatgtgtagccccagaatcaaatagagtgtgcgttactacgtcacctactctcaaggtccctacacattcccttagaatgctgagtacctcccctttcccatatgcatgatgcaatgcaatgcagttattgaaataatgaatagggagttgtgagaacgtaccagtgatcgccctgaagtttccggcatcgttagcttcctccgacaactcataaactcgcggtgccacggcttgccgctttgggggaggcggcagtccatttcccccgcgattgtccctttgtccggcctgcttctccgcagtcaacttagggcactctcgctttagatgtccagtctttccgcaataaaaacaagtccttgtctcttcaccgagaaccttggactgccctggttccattctcgggcaactttggatcgcatggtccttgcttccacaccggccacatgcacctatggccttccagcaagttccgctgtggctcttaccacaggtcacgcattccccggtcttagcatcggacttagtgttatccaccttgtcaaatttccttttcttatccgcaggtttggtggattgattgttccggatcggtgctttctcccggttcaagtacctctcctcctcgatcccttcctcaatcattgctgccctttcaaccaattcggaaaccgagttgaatgtccggaccaaacaatggttgcggatctctatccttagtccacggataaatcggcgcacttgagcttgttcctcctcaagttcacgtcccacataacgccttaggcggttaaattcctcatcgtattcacgcaccgtgcggttcccttgaactaggtcgaggtacgcacattcaagcctatcccaagcctccggtggaaagtacttcttgttaaactcgtcttcgaaatccgcaaaggaccggacctcgtcccctctgcgtttctcgacggttaaccaccaattatgggcgtctccttccaggaaatggaccgcaatgtccctttggtaatcctcagggcagcgggtagacttgaagttcctcttgagtctactcctccactcatcggccacaatcgggtccgtactgcccatgaagtgtctcgtgcccagccttgagacatgttcgagaagactcagatagtctccccttttccgcccataattcggttgtggattcacttccacaacttccgagtcatcgtccttttggttatccccttttaggaccaccggatcagctacaacggccttggtcaatgtggctagttgcgccatcattcccttcatcaaatcccactgttcttgggccgttggagtattgttccggttatccgtgatgtcccttgcaccactactctccggtgcttcctcattcatggacttcttcccggcctcaggtccggccgagtctgtcccatcgaacactgtcccgactctggttttctcgttgatcatcgtttcctcctcaaccaaagtctcctcgacaatgcccttgtccttcttactctttcccgttttgctgctcttacccatctgcgaaacctctaaagttaatccacataactcctagtaaaatcgcaaaagagtaaagaacaactaccgcgagattctcaagccgacgagtggtgatacctcttaacccaacacctagtcctagaaccaagcatgctctgataccaacttgaaaggccccgatccggactgcctaaagtccgggcgagttctctcgacccaagccactaagtgactcggccctaaccgtttatgaggttctttcctagtctaatccgtttcatatgattccgagattcaatatatgagacgaatagagtaaacaaacaatcggacaccttattaattaagcaaaggattcgatacaacctatgagtttgcatataagctattacaagtcatataatcgatccctagactatctgaactatcaccacccatcatcccggccttgagtctctcgcgcctaagccaagtccttcccacgatcaccattcgttcctggaagtcatagagccataagtaatcttatttacttaatcatatgtatgcaagtccatgcaatgctctatatgccatacactactccgatccgtggagagaattcagagaggggaagatcgcgcatcagtccggccgattctcggcaggtcagttaagacccgccggtcctccgccgagccgcgtccccgcctcagccgattcctacccggaccgagtcttgtgtaggatgcacatgacccggatactactcagccctctagtcggtcctttcaaggatccgactactaattcacatcctagaacccttagactcaaagtctaggatcccttaccttccttctcgaggttaggtcgatccgaccttccttctttattgccggccacagcccggctaccgaatcctaagactatttattctcccaagagggagagagttttaatggtgagttttcttgtgttttcggtgtgttgtcgtgtgtggaatggtcctgggcgcccttccttatataaggggcgaatggatgcttcccgaatcaacacatccgttccttgcacctttccgaagagttgcacctttccgaagagttgcgcccttccgaagagttgcacctttccgaagagttgtatctcttcgcccataaccgcccagttcgtccgtcactcgtccagctacctcgagctcgtccgtcactcgtccagctacctcgagctcatccgtcactcgtccagctgcccgagctggactgtcactcgacctgagtaactgtcactccttccagctgagcttgagctttgggcgagctgacccaagtgatttccttacgatcctagcttagcctgcatgatttcccctttgtccgagcttatagccagctctttctcacttgtccgagactccaccttcttctcccggaccaagtcctagccaacgatcctattgaggatcgcgggcgttacaagtctcccccccttgaattggattcgtcctcgaatccgcatcaagttgatctctacccatctccttgaaccactccggaaaattggccttcatcttattttcggtttcccaagtgtattcctcacggcctccacaattccacaagacttttaacaaatcccttgattttccccgagtccctttcgtcattcggtccatgatccgtaccggccatgcttccaccgtcatgttctcctttaacccgggaggtatatcttccacgctttcttcttgatcacttaaacacttccgtaattgtgacacatggaagacgttgtgaaacgcatttagttttggaggaaggtcaagtttgtatgccaccgcccctattcgttcgatcaccttgtacgggccaacataccttgggtttaactttttccttgaggtgaatcgccctgcccctttgtaggtcatcgcctttaagtacaccaaatctcctacttggaattctaattcttttcgacgtttgttggcgtagcttttctgtcgatcttgggcttcctttaacttgatttttaagaacttcattctctccgtggtttcatccacgatcgtaggtccaaacaaccgacgttcgcccacgggcgtccaacacaacggtgttctacaagctcggccatacaacgcctcatagggagacataccaatactagcttgaaaactattattgtatgcaaactctactaaccttagatatttttcccagtttcctaatgatatcgttagagattgtaagagataatggtaacggatttattttgttcgtttggactgtccgtccgtctgtgggtggtagcttgaactaatggtccctcgagttcctaaggccttttggaaagccttccacgcctttgacgtgaaccttgtgtctcggtctgacactatactaaccggaatcccatgtagccgcacgatctcgtctatgtacttctcggcaatgatttctgctccatccttatccgagatcgccatgaagtgcgcagacttagtcaatcggtctaccacaacccataccgcattgtgtttggacttgatccccgttggcagtccggtgacgaagtccatcgttatgtggtcccacttccattccggtataggtaggttttgcaacaacccacttggtacttgatgctccgctttgaccagttgacaagtcgggcacttggccacccatctggccacgtctttcttcattcctacccaatggtagtaccttttaaggtcgcggtacatcttgtttgacccaggatggattgagaacttcgattgatgggcttctcttaggatctcctcctttaatgccctatcgttcggcacacatactcgaccgttcaccacgattgtaccattgttcgaggtttggtactcggtcttattgtttagtgcccatccttttatctcctcatcccgttcctgagccagccggatcctactaagcaggtcggcctggtcggcggctcccaaccctaagggttcaacttctttagacaaggcattcacttgcaatgtccccatcatgttaaccaagtccacttggctccgttccgcctcaacttccgagcgcctcctactcagggcgtcggcgacttggttggccttgcccggatggtacgctatatccaagtcgtaatccgccacaagttccatccaccttctttgccttagattcaactccggctgggtgaatatgtactttaggcttttgtggtcagtatagatttgaaccttagcagcatacaaatatgatcgccaaatcttcaacgcaaatactaccgaggccatttccaaatcatgcgtagggtagttcttctcgtgtttccgcaattgcctcgatgcgtatgcgataacactccccttttgcatcaatacgcatcctagtcccactatggacgcgtccgtgttcaccgtatatggctcaccttcctccggtaagaccaacaccggtgcattagtcaacatggcctttaactccaagaaacttttctcgcactcctccgaccagttgaatgcggtgtcttttccggccaatccagtcaagggttgggccatgctcgcgaaactcattacgaaccttcggtaataccccgctagtccaagaaaactcctaatctcggtggcattccttggtcgtggccactcctttatcgaccgtattttctccggatcaaccgatactccttggtccgagataacatgaccaagaaaaccaacgctccttgccaaaatgagcatttacttaacttcgcaaatagctcatgttcccttagccgttccagcaccgcccttagatgttcttggtgagcttcccaagattttgagtaaacaaggatgtcgtcaatgaagatgataacaaactcgtctaagaaatctcggaataccccattcatcattttcatgaaggctgctggtgcattggtcaatccgaatggcatgaccacaaacttaaagtggttgtaccttgtccggaaagccgttttcctcacgtccgttggctctatgggaatttggtgatatcctgaggccaagtcgatttttgaaaaccactgtgcacctccaagttgatccatcaactcatctatccggggtaaaggatatttgtttttcaccgtaactttattcaatccccgatagtcgatgcatagcctaaagctaccatctttctttttcacaaacagaaccggcgcaccccatggtgagctactcggcctgatgaatcctttatccaacaactcctccaactgtttctttagctccgccatttccgccggtgccatccggtacggagcttttgatatgggggttgtcccgggctcgagttctatcgtgaacgggtctgaccggtccggtggtacaccactaacggccgcaaacacgtccgagaactcgttgacgatcggaatgtttttcaactccgcactcgcccccatttccttggttgtgatcgtggctaaatatgcctcacatcctttcccgagcatcctttcagcctggattgccgagattaccaagcttcccgaggttgttcttattccttggaattttaacataccctcgtccctcttgaattgtaaccgtcctcggtgacaatctatgtgagccttgtactttcccaaccagtccatccctaagataacatcatgtttctttaggggacaatgattaggcccgcgggcatattgacaccgttcactacaaccgagatgccccgaacaagtccggtcgaatacattgcctgtccgccggccgctcgtaccattccataatcggtgtttggttctttcctgaacccacctatttcaaccaattctggactaacaaaacaatgtgtagccccagaatcaaatagagtgtgcgttactacgtcacctactctcaaggtccctacacattcccttagaatgctgagtacctcccctttcccatatgcatgatgcaatgcaaatgcagttattgaaataatgaatagggagttgtgagaacgtaccagtgatcgccctgaagtttccggcatcgttagcttcctccgacaactcataaactcgcggtgccacggcttgccgctttgggggaggcggcagtccatttcccccgcgattgtccctttgtccggcctgcttctccgcagtcaacttagggcactctcgctttagatgtccagtctttccgcaatagaaacaagtccttgtctcttcaccgagaaccttggactgccctggttccattctcgggcaactttggatcgcatggtccttgcttccacaccggccacatgcacctatggccttccagcaagttccgctgtggctcttaccacaggtcacgcattccccggtcttagcatcggacttagtgttatccaccttgtcaaatttccttttcttatccgcgggtttggtggattgattgttccggatcggtgctttctcccggttcaagtacctctcctcctcgatcccttcctcaatcattgctgccctttcaaccaattcggaaaccgagttgaatgtccggaccaaacaatggttgcggatctctatccttagtccacggataaatcggcgcacttgagcttgttcctcctcaagttcacgtcccacataacgccttaggcggttaaattcctcatcatattcacgcaccgtgcggttcccttgaactaggtcgaggtacgcacattcaagcctatcccaagcctctggtggaaagtacttcttgttaaactcgtcttcgaaatccgcaaaggaccggacctcgtcccctctgcgtttctcgacggttaaccaccaattatgggcgtctccttcaaggaaatggaccgcaatgtccctttggtaatcctcagggcagcgggtagacttgaagttcctcttgagtctactcctccactcatcggccacaatcgggtccgtactgcccatgaagtgtctcgtgcccagccttgagacatgttcaagaagactcagatagtctccccttttccgcccataattcggttgtggattcacttccacaacttccgagtcatcgtccttttggttatccccttttaggaccaccggatctgctacaacggccttggtcaatgtggctagttgcgccatcattcccttcatcaaatcccactgttcttgggccgttggagtattgttccggttatccatgttgtcccttgcaccactactctccggtgcttccccatttatggacttcttcccggcctcaggtccggccgagtctgtcccatcgaacatcgtcccgactctggttttctcgttgatcatcgtttcctcctcaaccaaagtctcctcgacaatgcccttgtccttcttactctttcccgttttgctgctcttacccatctgcgaaacctctaaagttaatccacataactcctagtaaaatcgcaaaagagtaaagaacaactaccgcgagattctcaagccgacgagtggtgataccccttaacccaacacctagtcctagaaccaagcatgctctgataccaacttgaaaggccccgatccggactgcctaaagtccgggcgagttctctcgacccaagccactaagtgactcggccctaaccgtttatgaggttctttcctagtctaatccgtttcatatgattccgagattcaatatatgagacgaatagagtaaacaaacaatcggatactttattaattaagcaaaggattcgatacaacctatgagtttgcatataagctattacaagtcatataatcgatccctagactatccgaactatcaccacccatcatcccggccttgagtctctcgcgcctaagccaagtccttcccacgatcaccattcgttcctgaaagtcatagagccataagtaatcttatttacttaatcatatgcaagtccatgcaatgctctatatgccatacactactcggatccgtggagagaattcagagaggggaagatcgcgcatcagtccggccgattctcggcaggtcagttaagacccgccggtcctccgccgagccgcgtccccgcctcagccgatccctacccggaccgagtcttgtgtaggatgcacatgacccggatactactcagccctctagtcggtcctttcaaggatccgactactaactcacatcctagaacccttagactcaaggtctaggatcccttaccttccttctcgaggttaggtcgatccgaccctccttctttattgccggccacagcccggctaccgaatcctaagactatttattctcccaagagggagagagttttaatggtgagtttcttgtgttttcggtgtgttgtggtgagtggaatggtcctgggcgcccttccttatatagggggcgaatggatgcttcccgaatcaacacatccgttccttgcacctttccgaagagttgcacctttccgaagagttgcgcccttccgaagagttgcaccttttcgaagagttgtatttcttcgcccataaccgcccagttcgtccgtcactcgtccagctacctcgagctcgtccgtcactcgtccagctacctcgagctcatccgtcactcgtccagctgcccgagctggactgtcactcgacctgagtaactgtcactccttccagctgagcctgagctttgggcgagctgacccaagtgatttccttacgatcctagcttagcctgcatgatttcccctttgtccgagcttatagccagctctttctcacttgtccgagactccaccttcttctcccggaccaagtcctagccaacgatcctattgaggatcgcgggcgttacaaaacggttagtaaaccgagggcggtcgtagtgttaaacgaccggaacggaaacatggatggttcgataagccgagggctcaatcgtccaccatgtagccggaggggcgtacgtttggagaacgaatggaccaataagccaagagcttgattcagccgtcgtgaaccaagggaatcgtatgatccccaatctctatcgttgtacttagaccaatggggttggttggttgtatggctaagtaacgatagggattggttcatcaattcacgaccgatgacgagtcgttgaacgaatggagtaaggcgacaaacgggctaaggaatcaaatccgcatattggccaaggtatgtaacgatctagcttattagttaagatagatgtttggtaattcaccgtgaaagtaggataaaggaatatgcgattgtttggcttagaatggttagcgaacaatatgcatgtcttgatcgagtaaaggatcgatctaagtctaagggacaaagacgatgaaaccggtacaagagttggttagaattaaaccaaggttagaaagacttccgctgtgtaataagagagcgattatagaatttagcctcgtaaaggcaattctatgttgaatcgcgacaaataaagaggttcggcctgcaataggcgcaaacgtgagtacaacgtcgccagacgccgagacgtccgggacggggtctcacaagttggttcccgaggtatcttgaaaccccccctcgggatgattgtccgggttggcatctgaggcattttgagtccgggtcggggaaaccttctgcggtgatgctccgaggcattttcaaggtcacctcgggatggttcctcgacgtgatctccgagatgttttgaggccggctcgggatggttcttcgacgtgatctctgaggcattgatcatggtcggctcggttaccagggtgaaatccgaccccaacagatagtagactgcacagtctgttgccagacaactgggtggtcgagtatcaggtcgagtaattgcaaaaacgaagaaacaggcaatgagaacgattaagcgataacgataaaacagagaaatcagatagacgagaaattcctaaggatggggtaatcgaataaagtggtatcctagcctatccgaatggttaacaagcgcaatcaagctatccctagacaacaggttcaacaatagatcaattgaattccgtgatagaaatcctcaagcaaagctagcccacactaattcccattaacagaatctaactatgcaggcaataagaacagactgataaagccattaaacgctctaaacggccaatcccttgggatagagacgcatatctcaggaatgcttgggatgtaattccagttgatcagaaagaaataacgcagtaaacgcaactagtcctaaagggattcaatcaattctaaaacttaatcattctacagactacgaatcccacaactactctatcccatccctaagaattctaagtcactactcagacaacacgctcaaagacataaacgcagataaacgataatattgcataagtaaagagataaagagtagagaaacaagatgacagatgaaatcaaatgcggaatctgaatagcttggaaaaatctcgaattacaagtttgtagaagcaaaagcggcgcagcagagtaaaacagaaaaataaaactaaagcaaaaactcaatgtcgactagatgtctcaggatagaaccctaagacatctatttatacaaaacgaaataaaatgatagtagtgatgggccaataacctaatcgcccggcccatagagtgataatgggccgagatgggctttgtgatccggtggagctccaggccgcttccaaacacttcttcttctcctcttctcttccttgtgcttagcttgtctggttgagtgcggatttgagtagactatgaagatgtgatcgagtgcttggtcgagtgatggtgttggtggtgagtgatgatacttgaccagggggtcgagtatgtcttcttgttccggctcgcttcttctaatttgctcgcaaacaggtcaaatcacctgaaaacaactcagaaatgcaatatgtatgcaaagccatcctaatcatgcaaagtatgcaagaatgataagaaatgatataaaatagtgatgaatgatataaactggactcaaaacgatgatgaatgaacactgaaaatatgcaaattatagacatatcacatgccttgtagctctagaggtggcacagcaagaagaaaacagcataagagttagacttgtcacctaccaacacagtgttgttcttggtcacaccaaagggttccttcagcgccatcaccatcacttccatttcagcgttgatgatggttccggtgatttctcttgcgaagaggacattggcaaggagacggtggaagtagcggagtactgggctcctgatggtgttgctcttggagagggctgagtagaacttgacatcatcgccaatggtctcccagagcccagtaatctccttccttttgatctggtggccagtgccaaccccgctatgaaacccgaagagagactctagctgcttgatagtgaagacatagtctttaccatggatagtgaaggtcaggtagccaagtccgaagtctctttctctcttactcgacctcttagagaatatctccacctgcaaagaggacagaaactggatcgtttcttccttgaacgcgttgtaggcacggttcatcagcacgaacagactggtctgttcgtagagatactcgatatcatcagagataccaagctccaccattgtctcaggatgcgggtacctcgttccgacgaaattgtgtcgcctgaagagctcacagtactcttccatcgagacatcgttggtctccctcttccaaggcttagattcagcacttctcaccgagttgtagtcgatgaggttagttggctccctaacgctttgctttcctctaacgatgtcgtctcggaaccgagaatactattggtcttctctttcaggttgagaagtggaccatgactcctcttcattgacattctagtcaaggtcttggctggagttgtagctgaatgaagtcattggcgcggtcaagtgagttgggttgagaaacggactaagggtgagccttggtgatcgagtatgacaaggtggttagagggcgagtattttgatccgtgatcgagtaaacgaaaagagaagatgggcggttgtactacttcggtgatcgagtagactaggtgagaaactgaacggttggttggctgtttgactcggtgatcgagtgagagcggtgagaggctgttgatggaggcttggtgatcgagtatgagcgatggagggctagtgtttggctggtttgtaggcagtttctagagagagaagtgagcttatgatgctagagctttgtagtgaaagagagagaggtgttggtgtgtttgattcttcattgaagcttggtatttataggtgaatggtgagttaggagcgcccttgagtgtgtggaagagagtgtgtgcagcttttggctttagatcatgtggaggagagtggagcttccattgaacacatggggaaagaaagtgggtaagttggtggcttcttcttggtgggagacaaggcatgggcgtgggggacaaggagacatgatgggatgtctccattgactcaagatgagaactccttaagcatcattaaccaattcgcaacccattagagttggattactctacctccgagcttgattaacacttgatactccagctatgccttagctccagaacactaaaatcggccctccttgacaattatactcgatcctcatggtgacagggtcctttgttacacattctcatcgtcgagttctccttgtgatcgagtatctagtgatgaatttgaatttttgtgagcaaaaccgcaaatactcgaccccatactcgatcacaaggtctccaggtgcaacagaaaattttcaaatttttgcactcctctgaactggtatactcgatccccacctttgagatagagtaaattttgaattttttttactctatctccacgtcgttcatgtgttcctgagaaccacaaacacaacaaaaacgaatcaaaaataacaagaaagaaaaattatttacaaggatagtcatgggacttcctcccaagtgagcttgtttaaagtctctagcttgactcctttactcctttaatcatttagaagttcctggagatgaaccgacgtcacctctgggaggatttgatctgcttagtatttcttgagcctttgaccatttactgtgaaatctccactcttactagctagagtgactgctccataaggacagacttcagtgatacagaaaggaccagaccacttagacttaagctttccaggaaagagtttcaagcgagagttgaatagcagcatctaatcaacaacttcgaaatccttggtgatgatcctcttgtcatggaaaagcttagttctctccttgtagattttagttacctacattagtgtttctgtaggagaggtttgggttgggcttgtagttgttgtagcccttgttgaaccatccttggttctgaatgtagcacattgataataggtttttagtcaattaatcctaaaacaccaatcatgtcgttgtagtattttaggtgtcaatccaaatgggtgtgatgcaaacagatgagatgtgatcagaagtcacaaagtcaagccaagcaataacaatattggggtttctaacagtcctaagtgaacatgcagaaaacagaaacaataacagaattactaaaatcactcgaccacaacaggctgatgcccgaagtaggatgtggtcgagtaacaggcaggatatgaaacagatatactcgactgagtctgttgccagacactgggtgtggtcgagtatactggtcgagtaacagacaggaaatgagacaatcgtactcgactgcacagtctgttgctagacactgggtgtggtcgagtaagttgatcgagtaattgcaaaaacaaagaaacaaggaatgagaacgattaagcgataacgataaaacagagaaatcagatagacgagaaattcctaaggatggggtaatcgaataaagtggtatcctagcctattcgaatggttaacaagcgcaatcaagctatccctagacaacaggttcaacaatagatcaattcactcccgtggtagaaatcctcaagcaaagctagcccagacttattcccatcaacggaatctaactatgcaggcaataagaacagactgataaagtcaataaacgctctaaatggccaatcccttgggatagagacgaatatctcaggaattagtggatcaagcattccatcgaacaccttctgggtgcgggaaagcttgggatcgaattctagttgatcagaaagaaataagcagtaaacgcaactagtcctaaagggattcaatcaattctaaagcttaaccattctacagactacggattccataactactctatcccatccctaagaattctaagtcactactcagacaacatgctcaaagacataaacacagataaacgataatattgcataagtaaagagatagagagtagagaaacaagatgacagatgaaatcaaacgcggaatctgtataacttggaaaaatctcgaattataggttgcagaagcaaaagcagcgcagcaaagtataacagaaaataaaactgaagcaaaaactcaatgtccactagatgtctcaggacagaaccctaagacatctatttatacaaaacgaaataaaatgatagtagacgggccaataacctaatcgctcggcccatagagagataatgggccgacatgggcttcgtgatccgatggaggtccatgccgcttccaaacactttgtcttctcctcttctctttcttttgctcagcttatctggttgagtgcggagttgagtagactgtgaagacgtgatcgagtgtccggtcgagtgatggtgatggtggtgagtgatgatactcgaccagggggtcgagtaacggggtagagtgaatggtttattgtggtcaggtggtgtggcgaaaccatactcgaccagggggtcgagtagtgtcatcgagtggcctgacctgaggttactcgacctggtggtcgagtggatgggaagaatggctccaaagtcactcgacctaggggtcgagtatgtgggaagaatggctccaaagtcactcgacctgggggtcgagtatgtcttctggttctggctcgtttcttccaattagctcagcaacagctccaaatcacctgaaaataacacaaatatgcaatatgcatgcaaagctatcctaaacatgcaaagtgatgacaaatgatgagaaatgatataaaaaagtggtgatatgatgctaaagtgatgacaaagggatgctcaaaacacgtaaaatgcacacttatcagtttgtatgagtctttgtctttgtatcttctaacaaggatacaatacttaggctcttatgattcggttgcggttctagttcttatactcaatcatagacatgacatctagtcatatttgacttcaaaaaactaaccaagcttcttcttgcttctcaaagctataatggtgtagccgtagtctatttgagtctttgtctttgtatcttctaacaaggatacaatacttaggcttttaagatcatgttgcggttctagtttttatactcactcatacacatgacatctagtcatatttgactccagaacactaaccaagcttcttcttgcttctcaaagctttgatggtgtaactgaagtccgtatttgccgctggctttgtattttctaacaagaaagcactacttaggcttttaagatccgattgcggttctagttcttatactcaatgatacacatgaaatcaagtcatatttgactccaaaacactaaccaagtttcttcttgcttctcaaacaaagctttgatggtgtagctgatgtccgtatgagtctttggctttgtatcttctaacaaggaaacactacttaggctattaagatcgggttgcggtttaagttcttatactgaatcatacacatgacatctagtcatatctgactccaaaacactaaccaaacttcttcttgcttctcaaagttttgatggtatagttgaagtccgtataagtctttggctttgtatttttaataatgatacattacttaggctttcaagatccggttgcggttctaattcttatactcactcatactgatagactcccgaagagagattaatcccaatttcggcacttggaagatctggagtggatattcccgaaatagagacgacacacgactgaaagacgagatgatggattgaatgacgccacaaaaggatgcggaaaagccttttcataagtcgagaaagatcaaaattcgacatacgaaaatggatccatgatctatttttaagaaagagtttttgataaaaaaagatagatcagttctcataagagattacaaggagtttataaagaagaaggaagtcttggaacacactcacaagactaccttggaaaataaaaagaaataaagactagtttgaaagtttaaaaataacccttccacttcttggctccaaaatgactcttgatatgctattttcgtcacttctcttgaccagcaaattacccacttggtttgggctcttcttgggcttgtgatggtcataaaattggctggacttcatatatattccattgggccaacttctgaatgttataccatggtttggatcatcaaatgggtgatttgaatgtgaatcatttgcctcattaaaaaccttgtcaagaaaacccattgggacaaaacttgacaagggaaaaagagtacaaatgagacacatgcccatttgatgatcatgtatcaaaaccaatgaggttaagataacatctttcccatactctttctccgttataagttcattttctgcttcaaaatgctcctcaggttcaagctgctcctctgcttcaagctcttccgcggctacaagctcttgatcaaattccatgtcctttgtgctttccatgatcacatcatcctctcccacttgaaaaggatttgacctcaaatccaattcacctacaatgaaaggaacaagatcagcaacattaaaactattacttacattatacttaccttgcaaatccaaagagtaggcattgtcgttgatcctcttgagaactttaaaaggtccgttcatccttggcataagtttagacattctctcctcatgaaaacgttcttttcggagatgaagccaaaccaagtctccttcgttgaagataagctccttatctgtgtttattggcatgcttagcatattatttggtcttctcttcaatgttctttcgcgcctgctcatgaatctgctgcactaaatctgctttctcctttccatccatgctaactcttacactcaaaggtaaaggcatcaaatccaaaggagtaatgggattgaacccataaacaatttgaaaaggtgaaaatttagtagcataatgcccagaatgattattatgcaaacctcaacatgaggtaaacagtcctcccaaggcgataaaatcctctgttatcaatgcacgcaggagtgtagacaaagtcctattaactacctcagtttgtccatcagtttgcgggtgacaagtagtagagaataacaacttagttcctaacttagaccaaagcgttttccaaaagtaactaaggaacttagtgtctctatgagatacaatggttttaggcatgctatgtaagcgaacaacttccctaaagaaaaaattggctatatgcatggcatcatcagttttatgacatggaatgaagtgtgccattttagaaaatcacaaaaatggaatctttacctgtcctagtccttggcaaacctactacaaagtccatagaaatatcattccaaggatgcaaaggaataggaagaggagtatacaaaccgtggggttgtgacttagccttagcttgtttacatgttgtgcacctttcacacattctctccacatctttcttcatatgcggccaatgaaaatgatcttgcataaccttaagagtttttgagactccaaagtggcccattaaacctccactgtgtgctttccttacaaaaagctctctcaaagaagaattaggaatacactgtcggttatcataaaacaggattccttcatttctataatactttccaaatgcaggcttttcacacgatgaatatgtcttattaaaatcagaatcatatgcatagagagatgttatatgcttagatccaagtgacttagcatcaagagatgacagaggagcatacctccttgacaatgcatcgacaactacattgtcctcactttttatgtatttgatgacataggaaggcgtctcaatgaattcgatcctcctagcatgtcttttgttgagtttttgctgtcctttgcgatgcttcaaggattcatgatcggtgtgaatgacaaactccttaggccaaagataatgctgtcacgtttgtaatgctctcaccaaagcataaagctctttgtcatatgtaggataattgagagtagctnnnnnnnnnnnnnnnnnnnnnnaagcgatgggctttttatcctgcattaagacagcaccaattcctaccccggaggcatcacattcaatttcaaaagttttaagaaaatcaggaagagataaaataggggcatgagtaagcttcttttttaaggcttggaaagcatcctcttgagcttgttcccacttgaatcccacgtttttcttgacaacttcggtgagtggggctgctagagtactaaaatccttcacgaatctcctatagaagccagcaagtccatggaaactccttacttctcctacagattttggacttggccattcccgaattgctttcactttctcttcatcaaccttaactccatctgtactcataacataacctaaaaagacaaggttatccgttccaaaagtacatttcttaagattggcataaagcttttcctttctaagcacttctaaaaccggttttagatgctcaacatgctcttctagactcttgctataaactaagatgtcatcaaggtaaacaacaacaaaatgtcctctataagctctaagaacatgattcattagtctcatgaatgtactaggtgcatttgttagcccgaatggcatcactaaccattcatataatccttgtttagttttaaatgcagttttccattcatcaccttctttcatcctaatctgatgatatccactttttagatcaaccttagaaaagatgctagaaccatgcaattcgtctaacatgtcatctaatctaggtataggatgtcgatacttcaccgtgatattgttgactgctctacagtcaacacacatacgccaactcccatccttcttaggtacaagcaacaccggaacaacacatggactcatactctcacgaaaatggcctctctccatcagcacattcacttgcgtttctagctccttggtctcccgggattggtcctataagctggtctatttggcaaagaagctcctggaacgaagttgatttggtctcaatgcctctaatgggtggtaaaccttctggatttacctcgggaaaaatatcttgatagtcctggaaaagaaacttaatactacttggcaaagccggttccaaagctgttttgttcaataattttctttaaagacaaacaagaaattaggtttagtattcccctttggtttactctcggaagtcttggattgaacagcttgagatcctttctttttcatgctaagctgatctaagtagacttcattaggtgccataggtgccaaaacggtctttcttcctttaaactcaaagctatgtctgttggtaaacccatcatgcatcactttccgttcagataaccaaggtcttcctaacaaaacgtgactagcttt

SEQ ID NO: 371 - DNA, 13167 bp, Arabidopsis thaliana landsberg
taaaataccccaactggtaaaggaaacactttctgacaaagaaatcttaagataatttacatggaaatgcctaccttctccaggtgctatgagagaaagcgcatgagcaggagacagaacaacctcttctttaatcccttcaatataggttccctataatcagcaataaagagagaatcagtgcagaatttaagagggaaagacacttaatgcaatagaggtagtcatgtttattctaaaattcttagcccaaccaatagtcaacaggtacaaatctagtatacttgaataaaaaatgtgatccagaacattcaaatatagatagataatcatgccactttgcacattatttgcaggatctcagagaatttcatttatattaaaatggaacaagtactttcatgcatctagccgagaaaagatgtatcctctaattaaacaaaaatggtgtgctaggatttaggattctataatgaatatagtcccaacaaagatattatgagacagtgcaatccgcgctaagcatgtcaccaacagaaagtaaataagagtatcaaatactataacaagtacctacaaatttgcaaaagaacgatccaacttgcaaaaaaggttcttaaattcgaaaaactattgtcgcttgggggaaagctttatttatataagacctttccttgcgccttaaaccactggtttcagcctttgagctctcagcctgccaggtcaatgaggttctgcagatatatgtgaaattatggtcagttgttcatctttaagtgttcagacagtgcaataataaacaatttgtcagagttaatgaaacagtaagctattactgaacataaaaatcacttgataaaaagaaaagatgttatagcagctgcgagaggtgtacaactccactttcattattgtcaaccaatgtattgatcatgggtgtcataagagaaaagttctactaggttgcaaagtgtgtaaagcagagaactaagctaaagaatgcaactataagctgactagagtaaaagtaaaggctttatagggtcaacagaacaacactagctacatgcatagtatgagtttgatttcctgtctgggacctcactcaagcataaacaaatgttaacaatccacagaacaaacatatcaaacaaagtgacagtgacattttctttggaatgcaaagccttaagtggtacctttcctgtataatgtaactgcggcttgctatggctatccacagatgtctttggataaagttttggaagacgaggttgttgaagatacaggggaatcacaagtctttaacttgcttaatccagcatttgtagactttgatacttgtttagatcctatcacaaacgaaattccaacttccggtgactgaaaaaaagatgcaagtacaaaactttatcatataataataagagctagcaacatgtatactttttgagtttttttagagtttttaagccaatcagaaggctctatttcgtaccgagtcgcagaaagagcgcgttgagcgagtgaaagcgattctgtgggtaaacccttttccaattcatgcttttttttatcgacgcacatctctccaaattctccatcgcgtgactcttttagtttttttccacaaaaccaatgaaaccgaaccgaaatcagttttaatttcaaaaccaatgcaaaccaaaccgaatcagcaaatagtgtgaagcaacaattctggacagaaattttctcaacatcttaacaacgggaaaaagagaaaacaccacaactcaaaatcacaaagaacaatctactgcttcagttaaacatgaaaaacgattagacttaccagttgaaatctgaaagcatgaatctcgttgtgagctcttcgtgtttgcctcgtccttttattatctttcttattttctcttctttgtgtgatttcaactcacaacttttatattttactctgctgcttcgagatcaacgcattaaaagtaatggggtaaattaagaatatttagattttaaggggttgaagttgtaattttgaagaagtggaagatcaatcaaaaataatagaagaacagagacgacgaaacctgccggagaaccgaggagagaaaaaaccccggcgaaaatgggaatttgaattcgtcttctgttgatcatcgcttcacttctgcttccaggtcttcatcggaaccaaactcactttcactctctaatttctaaattgaaaatcgatcttatcaattgtgtgtgtgtgttttgttgcagagcttttactcagaagaagcttgatgatctcaaatctctctttgtttccctcgcttccaagtctcacagcaatgaccaatacgtctcgtaccctgttttccaggttttgaccaaaaaaaaaaattgtgttctgttctcatctggtttttgtggttgataattttgaattaagccttacacgatgtgtcggatttcgattttcacaggagtattttggtctgagtggttctttaggagaaaggatctttgatatggttactcaacacaggaaagatgataaaatgacttttgaagatcttgttattgctaaaatgacttttgaagatcttgttattgctaaggtacacacttaagtcttttcatcctcttaatcattggtttcttcttctgagcttttgaagatcttaaaatgcagagttcaattttgtaatctccatatgaaaagtgattgtagttataaatgtagaaccagtctcacgttgaatagaatccttcctcaggttaactcactgatttttctgaaaagtctattcctttttgttaaaaccctggtttcaatgcttgccattggaatttttgtggtaaaataaagaaaattcgcaaggatgaagaatgatgaagaagcttctaggttatggtaacatgacacgtgtatcaatctcagacgtccttttttgttataattgaggttatataaaatcagagtgatgttattttgtcttttgaattaagagtactctgcctctggaatttctgggttcttctcggattctctcaaaggtactctcttttcttagctcttgttcgaactcttcgattatcttatagaacgataggttatatactctatttgaaaatcatctattagagatagagatttggtgaagtttgtattcaatttaggttcttcatagagatttttgcttgatgagtatagagaagagtttctgagatcatgatactatattttatgcaaaaagattgcagagataaaaagaggaattaggaaaatgggtgatccatttggtggtagatttggaggatttagaggtagcttgtttggaggaagagatccttttgatgatccattcttctctcgaccatttgaggatttgctcgaaccatccaacacctttagttcaggtgcttcctttagtaatgcacataagaacaatggtggaagaggtttaacaattgaagaattaccgtctgatggagaagttgaagaaaggaaagatattggtagtgatgatcaagaacatatcagttcagtgaatcaaccatctgttgagcaccctgaagatgattctgatggtaattaccactagggattagataactttgtttacggttatgtgtatgtgtgagacttgcttggttgttgttgtagctgagaggaagattcagaatgtgaatcaaaggagtgattttaaccgaagagagggtacacagtctcgagctaacacattcagacatcacatctctaaggttacatatggtggcatagatggtgcgtactatacatctactagaaccagaagaaaagacggtgatggagtaagtttgtttctattttccgatcctttctattagtggaagttttacacatactgataagattctgtttctagatggtggttgaggaaagcaaagaagccgataagactaccggtgaagccactcataggatctcaagaggaatcaatgataaggtgattggttactctgttgatgttttgctccatcacttcttggttccaccaaggttcagttttagatgagtcttgactctcgagtctgagactgttggtttggtgtattcagggtcattcagttactaggaagctcaactcaagtggtggtgtagagtcgacacagactcttcacaacctcgatgaaggtcctgcagaatctacacagccttatcataacttaaagttctttgaaagaaaactggcaggattctaaaagatcgtttctttaatttttttgttttagatgaattaagtggctttgaagaagcatggaaaggcaattcatctcttggcaagcatgaattcactggttagtaaactcttcatctcaaaactaatctttgatctcaagagtttcagtccattatactgtattgtttttgttactgtacaatgttacaggctctgataatagttttggagggtgggtacttccatctcttgaccaaattcgtcgccaaacagaccaaagtcagactggttcgagccgatctgcaactggagctaagaaggttgttcgaatcaacattgaatgaatcatcagaaaaccatatatcaatctatgtgcgtgtaaatcaaataattttgtagttgttttgaagttgtagtaattggcaatattttacattcgtggaaaaacacaacatacatacagtattagacttttgattatgggaaaagtaaaattattcaagctttgttaacgtatttatacatctctacaatgaagtggtggaaaaagggtaaaagaggaaatccaaatttagcgtctgaacaaatgctcctctcccgacagatgatccacgtgtctaatccaacggctacgaagattcctcgagtccccacgaccagtagctcccacgtgtacaatatccaacccactaccaaccggtaaaaacacggatctcaccacacgtgttcctcttttcaacacatcgtgccatttaaaaccagagattgctctatgcatggcgtttttacacaccaaaacggcacccttgttgctcagcttcgcaaacctcagcgttctgacgaactctcgccgcttcgagtccaccaccaagaaatccacaccgggaaactcctccatcgtgttctcaacagattctccgaccaccacaacctccgtcgtaacaaatcctctcatggccaacacgtactcaagtttagattgctcgtcaggtactatacacacgtgtcttccacccgtgtgagttgcagcaaccgcgagtccgacgctagtcgtgattggatcgccgcgtgaccatgtctcaacgatcagcctcgcgttccatccagccgctgtagctgataaaaattctgccactcctgactctttgtcgctcttacactatacacacatatatttacatgcaaaatcaaataaagattatataaaaaagcatgtaattacacacatatgtaatctagttaaaaggcataccgatttaacggtgtcgatgtaggcgtcagaagcagtttccggcgaccagacaagcttcatagtgaaagtgaaatggagtttgatgatttgggaagaagaagaagaagaagtagttaggttttataaatggacaaacgaagcgttgacatttgcttacactaataacaacgtgtcaattggtctcattgcttccatttattactccttatttagcctcaccatcttcttttttataaaaaacactttgttacaatcaataaaatctaatttataattccatcctattaaaaattcgagaatttatgtcgtcgatttgcgttagcccacgctcttttcacaacctatgcaaaccaatatccataaatatacacagtaaaatttatctagacatgaattacatatttgaatcatttggttttgttataatagatagcagttgaatgtttttattttgttacttatttcagtttcgtcagaagggtagctagagtgtgaaaaatacctgtagtagatcaaaggataatttttgattgctgacattgtggacttagtgagacaacttgaataattacatgagatggtcagcttcaatctttgattttttccttttcttttctaaattttcaatcttttgattaaagcctttgttatttcaacttaatgacgcgattcatatactatcttttttctttgacactcgctttcatagtgccaaccaacgaatctataatcaaaggttatataagaaacaccaagcctatacaaacataatttaacgccgcctagttttgtttattctgcacgtaacatataaagctaacagatatgtgacaaaatatctataaattacatatataagtatatataatataagaatgttggatgtatatattagtagtttaatcaatgaaaatatatctttatatctttattaaaaaaactaaaaatgtatctttatatacatttcgtagtttaaaatcaaaattcaagatagagcgaaattgatttttttttttttaaatgaaccaaaagtacaacattcctacctttatttttaataactcgtttatattcgccaatcagacacacacatagacttttaaaatagtaaaagtaacttagccgattatttatgtaaaatattcgtataaaatttttattaacaaatatatttgatttctcatcttataacctgtttattgatcagattacacgaaaaaataactaaacagataaatttactcgaactgcatacaatagagatgtatttgtgcatgagtgtagcccaaaaatgtgtaaggaaataacacccattggtaggccgagacatgcctgtaccatggccgctgaaatagtagaagaaccaaagacctaccaaagtactcttaagctaacgttgacatgatttaattagattaacgattgagtaaacgacaaattagcgctttcgttttatattaaagacgcacgatatttaaatggcaactatacattaaaattatataaaatatataactataaccaatttgataaatgagaaaaatgtacgatatgtcgtaccactccatcctgactatgacttatggaggaagtcaatgcttatcaactacttgcttatcaatatcctatttatcactatcagtttttctcttttctatacatatattatttcctatagatcatgttggtcataatgtaatcaacttaaaatttaagatctactagtttgtgttgaagtataactgtataagcctaaattcgaacgttagtctgacttaatagttaattccattttgttttggagtaaatgtttcagtttcactgctgtttggaaaatctttggacagatattgagattgggcttataatatttattattgggccttaatttaagagcccttttataggcagatacaaaaacgacggcgtttaactcatccgctcagcgacttccacatagccgttaaaacgatgataataaacccaatccggttcatctccaacagaagaacgtaataactgatgcttgtcttcaagtcaaccatggagtgttcgatttcatccaccattcatgtccttggaagctgcaaaacttcagatgacgtgaaccaaatccacgggcgattgattaagacgggaatcatcaaaaactcaaatctcactacgaggattgttctggcttttgcctcttctcgacgtccgtatctcgccgatttcgcgcgttgtgtcttccacgagtatcacgtatgttcgttttcatttggagaggtggaggatccatttttatggaacgccgtgatcaagtctcactctcatggaaaggatccgagacaagctctgctcttgctctgtttgatgctcgagaatggggtttccgtggacaaattctcactgtcacttgttcttaaagcgtgttcgaggttaggttttgtaaaaggaggaatgcagattcatgggtttttgaaaaaaactggactttggtcggatttgtttctacagaattgtttgattggcttgtatctgaaatgtggttgtttaggtttttcacgccagatgtttgatagaatgccgaagagagactctgtttcttataattccatgattgatgggtatgtcaaatgtggattgattgtatccgcgcgtgaattgttcgatttgatgcctatggagatgaagaatttgatatcttggaactctatgataagtggttatgctcagacatcagatggagttgacatagcgtctaaactgtttgctgatatgcctgagaaggacttgatttcgtggaactcaatgatagatggatatgtaaaacacggaagaatcgaagatgctaagggtttattcgatgtgatgccgagaagagatgtagttacttgggctaccatgattgatgggtatgcaaagttaggttttgttcatcacgctaagactctgtttgaccaaatgcctcatagagatgttgtggcatataattctatgatggctggttatgttcaaaacaagtatcacatggaagctcttgaaatatttagtgacatggaaaaggagagtcacttgttacccgatgatacgactttggtaatagttctgcctgcaattgctcagcttggccgattatccaaagccatagatatgcatttgtacatcgtggagaaacaattctatctaggtggaaaactcggtgttgctctcattgatatgtattcgaaatgcggaagcatacaacacgccatgttggttttcgagggaatcgaaaacaaaagcattgatcactggaatgctatgattggtgggctcgctattcatggtctaggggaatctgcattcgatatgctcttgcagattgagagactctctttaaaaccagacgatatcacctttgttggcgttttaaatgcttgcagccactctgggttagtaaaggaaggccttctctgctttgagctcatgaggagaaaacacaagatagaaccaagattgcaacactatggttgtatggttgacatactatcgagatccggaagtatagagctagccaaaaacttaatagaggaaatgcctgttgagccaaatgatgtcatatggagaacgtttctcaccgcttgtagtcaccacaaggagtttgaaacgggagagcttgtcgcaaaacaccttattttgcaggctggatataacccgagctcatatgtgctactctctaacatgtatgctagttttggaatgtggaaggatgttcgtagagttagaacgatgatgaaggaaagaaagatagagaaaattcctggttgtagttggattgagctcgatggaagagtccatgagttctttgtagatagcattgaagtttccagtacattgtagataaaacgaatgtgcagcaatatattttcaagggcttaaacctattctgcaattccttggcatacatgaagacaatgtcacatggttggttttgtgcagctaagatatgtctggaaaaaaacttcccacaagatcacttaaaatgtctgaaaagtgattgtttttacagcctaagtacatcagctacagttacaaggagataagattgttacatcatgaaccgagtttttcggatcccctatactgaacctaaaacagagttaacatcaggggaatggtgatagtctgaaaccttggtatgctttatattcttggactatcaaaagcaagaatcatgttaaacgggaaactaataatccgcggcgagattattcagttcttggataacatcttccatggatggtctttggtttgaggattcatgagtgcagagaagaccaagtctagcgagctgagccgcttctacttccgggaagttctttcgaagatttggatccatgaagtcttcattcagtcttcctgactctacagcttgtaagatcatcaaatggctgattttgcttttaccactcagtatctgcaacagaatcataccaaatgcataaacatcgctcttatcagtgtacctccctgtagttatgtactcaggagttaagcatcccattgccgcacttgctttgagcttcgagacaaccttatcatctgtgaatagcttgtgaagaccggaatctgcaagagaggaattacaccagtgcgcaattagattcttctagtgcagatagattctggtgagcttttgcaggtttgttcccattttctccatgcaagtacacaatccctgaaaggaagataaaaaacttatatatttcacatacaaaaaaccagtgtagtttacgaaagaatgaatagcagaatccaacctctggcgattccgtttatgatggaaactcgagtagtccattcaagaacctctccagtctcatccttcacatcaagatactgcaaaagattaccattgggaacaaactcatagataaggaaacattctccacgtcctttcgagcagcagaatcctctcaacctcgctaaattctcatgcttcaacagtgtcagcatcttcaaccctttgagaaactcggattcatcggatttacagctcgatttagctatacatttgatagctgcaacagaaccatctctaaggatacctttataaactgaagagacattactcttccccaacaagttaacctcagagaagctctgagtagctctctcaatctcctcaagattgaacataaagctctcaaagacttcttgagacaatgcactgttgttgttactgctctgtcctcgtcctaacggatcccaaccacttgcgtactctaagctgatcaatggagaagagctttttcttctagaaacttctttgaagttgtactcagtactaatcctaccgtccattgcatcaagactgcttccaatcttctgtttccttcgtctgtaccatgtgaatgttgaaccgccaaagattgcaactgcgaggattgatcctattagacccatgacgattcctaaaggtgaagactttgaggattttgatgaacacccgccattgttgttactgcaattgcttcgttgtaaatctgctgattctggtttcacgtcaactgttgtgaaattcgttgggtttgttgggtctggtcggttaaggttcggaccgtttaagccggtgcaagctttcaaatcagtgaaaccatctccgcataaaccgtgattgtttgaatactggaatccattgtttagcctcttcaaagcttcataattcataaaaatcaagaaacaaacaagtcagcaaaacatctttaatgtggttgtaaaaaccggtttagaattgatatggtttaagttctccacgatccggttttggattggttcccggttctgtttaatcggattggtcaacactgaaccggtttagaatctgaagaatttatgaatcttgagggaaaagaaattattaccagagggaacgaagccggagaaggagttattacgaatgtcgagaacttcaagcaaaggagcaccggcgagtttcaccggaacaggaccaaagaggttgttgaagctcaaatcaagcctcgttaacgtatcaatatcgcctaaactcgccggaatggcgccggagagttggttatactgtaaagccaagacagttatcttcttaagagaaccaaactgtgtcggtatacttccacaaaacttgttgtaacataactgtataactgcaaaaaaaaaaaaaaaaaaaaaaagtgttatgaatatatagatgcaattatatttgcccttatttttgttgagttttacattttagtttcaaaaccccaaataaaattgtttttgagttttgcataaaaaagagtgaaagatgaaggagacaatagagagtatccctagtttctaggagactcaaaaatctaaaaacttgaatggatgattaaaaaaaaaaactaaaatctacaccattcaagacctaaactctttttagctaagttttaataaaccaaatttgacccgcttaaggtgttttagctgcaataaatgaattatagtgagtgaggttaacaaagaacacatgcataaatagaccgaccttgaagattgtctaagttcccgattagaggagggatttaccggagagattgttgacattgaggtataaatcggtgaggagaggcagatttgagatatctttaggaatatgaccggtcaaggagttgaagtgaaggtataaaccggttaagcttgtgagaagaccgattgaaggagggatagttccagtgagacccattccttgaagagagatgttagcaacacggcggtttccgtcgcacgcgacaccgtcgaaggagccagaggagcaagggtcggcgtcgggagtccatgaagtgaggaaacgtttttcagggtcgagagaggatttgatatcgaggagaatgtcgagctctgaggaggaggaagacagtgcagaagaaaggaagaagaagaagaggatgagaaagagtgtgagtggagaggccatgtttggttggagagaagagagagagagagatgaggaagaaaatgaaaatgactctctcttgtggttttgaagaaaaaatcttgtccattgtatttataaaatagtagttcttgattgttaatactaagaaaagcttaaaccacaaaagtatagatatcgtgaacataataataaaaaaaagttagttcaactatgaaaatgtaaaatgataacatagagaactatatagatcgacaactctaattttttaatatataaatgtatatagactaatctccaatgtaagttattgcaatgtattaagacattcatatagtagctaactatacataattgttattgcaatgaaagtatttgaaccatagtccatatgttactcttatgataattttaaaccacttgactttttatcactttttaattacacatattactgatcaaaatcaacagtaaatttttttaactacaatattttgattgtttgttcatgttacatcaagtattctacatgtatagtttcacatttttgagtggattgtttttgattgattagtatatatatataagtttatttggaaattgaaggaaaacaaaagactcatgaaaattgaaaacattgaagtccacgagttcatttcattttctgtactttatacggtaaagattacttttaaagtcttttcagaggaaaacaataatagttaggcgaatcttagctttttttcaaaattgaaaatgataccattctccctggattt

SEQ ID NO: 372 - DNA, 6719 bp, Arabidopsis thaliana landsberg
atacccaacgctacacttctccaagtcgatgagcagacacttctactttagccaagaccatttccgaacatcttgtactctgtacttacatctcatgattctcgcccataagctatgatgatcctgaattagacgccatcctagcttagagagaagagctttattcatatcttgagctttcctaattcctagcccaccttcactcctaggcttacaaactcttttccaggaaataagctgctgcttcctttgagttacagagctgccccataagaacgatctagacactttgtctaacccatccaacgttgatttcggcaaagcaatggtgctcatggtgtgaaccggaatcgacgaaagcactgccttggtgagtgtaactctccccgcaagactaaggaatctgcccttccaaccagccagccttgttgtcattttttccaagatatcaccgaaagtgtccttattaattctcctctgaaggaccggcattccaaggtattttccaagctctctagttgagctaatcccactttcatcgcttatcaacttccccaagtcccgagacacattttcagagaagaaaatcttcgatttctctaggctaactttttgaccagaagcaacacagaaacgttccagaactcgtcttatcacctgaatctgagccacagatgcttccgcaaagaggattagatcatccgcgaagcagatatgtgaaagctttggtccaccctgagagagactaatgggtttccaatctttccgagcaatagaatgctctataagatggcatagtctctccatgcagagcacaaaaagatacggtgacagtggatcaccctggcgcaacccccgtttcggtctaaacgcttctgttcgctcaccattccacaatagactcattgatggctcagtaacacactgcatgatccatacaatccacttctctggatgcctaactgcccgtagagtatcctccaaaaaatcccagcgaatccgatcatatgccttttctaaatccaatttcaaaagcatccaacccttacgcccttttttcctcctcatcgaatgaacagcttcttgcataatcactatattatcagctgccaatctacccggaataaaactagcctgagccggcccgataagcttcgatatgacccgcttcaaacgcatcaccaaagttttagtaattgttttgaacaaaacattacataaactaatgggacgaaactgtgttatcctttccggtttcagaactttagctatcaacaccacgattgcatcattcgtaccctctggaagtttcccgttggcgaagaagtccaacacaaaccgactaacagaatcacctactatatcccaacaatcctggtaaaaaacaggttgaaagccgtcaggccctggagccttatacttccccatgcttcgaattgatgtctcaacctccatgggattaaaaggcttgctcaaattagacagctcttcctctgtaagtctagtaaaaccgtctggaggtaacctctcaacaacctcatcgacatcctccatagaataaagccgtgagtagtaatcgacagccatcttctcaagttcctgctgttgtgaaacccaactcccatcatccgctttgagcatttcaattctgtttctccgcctcctaacaacagtcatagtatggaaatactttgtgtttcggtctcccaattctacccacttctctcgggatttctgaaaccatagtacttcctcctgctcaaggaccacatcaaattcctttaaaagttctgcctccctacccaacagagcatttgtatgagtatggtccaacaacccttgcaccatattaatgtcactcataagctgctctttacgaacttgaatctctccaaagacctctttgttccacttccgaagagttctttctaattgggttagagcttttggggtcgttaaatctctactccatgacgagacaagaagatctttaaacccaggatgactaagccacgctgcttcgaaccggaacggtcgccgttttaaattacctctattctctggttccaattggacgtaaagcggagcgtgatctgaagccaaaaaagggagatgagtcaccaccgcctcctgccaagttaatctcgcttgtgcgcaacagagcactctatctagtctctttgcaacgcaccattgctcttgtttacccctcctccaagtatacttgttgccacggaaccccatatcaattagggactgcccattgatccaatcaccaaacgccaacgagtcctgagacagttgtccgttaccccccgatctctcatcaagacgaacaattgtattgaaatccccccctaccaccagaggcccgactatccttcccatcacttcactcaactgagtccacagcccgctccttctactcactgtcggggctgcgtaaacaacaataagatgcaaactgacttgctcttttgtgactttcgcatgaataaattgatcagcgtggtccacaatctcaacttcccctacctccgacttccataagaaccatagcccaccactctgtcccactgcatccacacgaaacgactgatcaaaccccaacccttggcagatacgctttgctcgctcacctcccgcatgcgtctcaaagacggctaagatatcagtcttgaacttcttcaaaatataacgtatagaacgtctaaagttgggtttattcgccccccggcaattccataaaatgcaattcatcatatcttttaaagggcaatacagaagaaccggggacacctgctatgcgttcgtgataatctggtcttgcatatccagactaccatgagacaccatatctttcagacccgagatccccccagactcaagcccccgacctcgtcacccacggcatcaactttcgccgaatttataactgcccgatgactcgcagcgcccacgaagactcctctggcccgccccatactctgtttttctactcgcagacgttttctagaatcagacatctttgtttctgcaatcgtgggcccaaaacttattcctcttgtcggcctgacttgtttcccaactctggatttaggcccaatttttttgacattcttgttttgaccaactcttttctgctccttttgggcctcgcccactgggcttttctctaaatttcgaactgcactaaacaccaccgccttcgctttcgccccacactttcccccgcgttcttgaatccccatgaattcgttttccttatttgcttccgtaatcactccactcgcatgattcacggaatctgcatatctgccttcaaactaccaaaactgttcgaagacacaatattctctaaatcctttccttttgtgatatcccgaagattacgtcccttcaccgtctccctcctccctggcatcgacgcaccagctttcgctgggttcttcccatttctcaccaccgtaaaaccatcatccacctgcgcctcccgaccaacttgcgacccctctgctggatgatttgttggcaccacacgcttctcctctctaggtctccgtggacatgaatgaactaagtggccgtacagtccacacatagaacaaatgttcgccaacccttcatatgacaccccagacctctctccattgatcataattgtccccttgagcggcttccttaggtccacttcaacacaaacccttgcaaacctagctctctcatagtttaaggtagtcaagtcaactttaatcggttttcccaacccccgcacaatactcattagaattggtcggtgatacagagtcaccgggatgttagataaccggacccagactggtgttgttgtaatctcatccctcaatggattaaactccggattccaagcctgcaccatcaaataacttccaaacactctccatggtccacccgtcaaagctgacaagtactcatcctcctcctcaaaacgtaccataaagaaatgtcgtggaagatccatcacatgcatcgcgcccttaggtttccacaattttctcaacttcctacttaccaccgcaatcgagatgttcctccccagaaccttaacgatcatgcatcttttccacaaacccctcatagcatccattacttcttggccaattgttatcaacggttcaccatcctcgccatccgggaactccacagtgatcctggccgtaacaaactcatcatccaacacacactccggtctcatcatccctccgcccaaatttcctaccaccttgtttacccacgagccttgtccgtccggcggaacattcggaggtctaactttgtccccgacatcgaccatagtgacctcccgagcctccgttagtaaaaccctagaatcgcccatatttgagtcgtcagctcaaagcttgcagatggcttataattaagtcgatctaaaacctaatttcaagattgggaatccgatatggtaaatacgtaatcaaccgacggaggttcacaaaaaaaaaaaaaaaaaaaaaacatgaacttgtatttaaggacaaacattttattcaaatataaaagtctgaaagataagagtggtcgacataagtcaaccgacctaaaaccttcctagctcccaggtcgacaaataacaaatatgtaggtaattttataaatattgtatatataaatatcataagtttatatattatctatatgggggggaatcatatatatgaaagttggtcaactctctccatatgattgacacatcatcactttaacatgtgccatatgtccacttaataattaatgtaagttaatggtttatggtgatttattatttaattgtatatattataaacattttacataattaattgtatcaataataattttcttttattttgtatgtctttttcttaaattaaattatttaattgattttctcatactgttggaaattttcccctaatttttataattttaagtcaaaatatgattaaataattgtatagtggattagctaatagttttcataggttgttctttttctatataatatattaaaaatggtgagaagtacttgagaactctagcatcaaattcttggactcaaatcctcggtgatagagtttttcggttatggagttcgtattattttgttttcttttgcaaaagtggcaacaatgaaaattgaaagaagaaaattattttacatttatgtttcaacaaatcaataaggcttatcaaagtttggttctatttgtctattttactataacttaataatatctttttatttaaatcttgactaaaaatgttgatttaacaggagtaattcaaatacgttgatgaattatgtgtatgatgcattgttgagaatgttgttagaaaaaaatatttttaatactaaaagtaattgcttatgcataagtgaatgattagataaataaaaattatatttgaattaaacaatacaaaaaaatccgaaaaaaccgcggtgtagcgcggttgatcacctagtatatcactaaataagtaaacataattcaaagagtagaatcaaaatctagtttataaaccaaaataatttaaagaatagaattcaaataattataatcccaaaaagaaagatatgaagaatattattaaacacaatataaaatgaacaaatcgacttaacatttctgaagtacattttaagaaatctaattgggtcggatttcttatttgattttgacccgaaaatcttcaaccggatcttctataattagtttttattactattttctaccaaaaataataattaaaaacgaaattaatttaattaccaaatttaatatataaaatatttctaaactaaccatatttgttatttaccttaactaatttcctataacatatttacctaatttaaacataaatatatgattcttttttcaaatatatttgatattatatttaatttattttgaatttatataaaatagaaatagttaataaaatattatatattttctgtatatgacgtaattcaaattatttaaaacggatatatattattcaatcgatgaagaaataatatgtatacaatatcccacatcgcttaaaaaaattgaacattggttcagagccatactataaaaagtaccaaaatgattccagtacgaataagcaggaaacttgatttatcaagcgtccaatattaatttagttatccggtttactcggattttttattttaaataatagaaactttacaaagtcttaataattataaaattttccactttttaccaaaagttagatattatagtttaaaaactttatatatatatctttaaattataaaaatcacataaatatcttcgggattcaaattttaataattatttgaacatgttttttaaaatatataaaaaccaagtatattgaagataaaaaaatacaaatagaaaatatattaatttaagagaaacaaaatatttaacaagaaattatattattttttgttcaaagaattcgatataaaatcttcaaaatgatcctatattgattcttatagtatacaatttttcttattagattgaaattgtaaattgatccgaagtatcttacataaaaatattattgaaaaaagaacaatttaatttttagttatcacatgacagatttatatggcagaatgggtttagaggagacgagtttacatggtaggacgggtttggatgagacga

SEQ ID NO: 373 - DNA, 5211 bp, Arabidopsis thaliana landsberg
  unsure (1)..(5211): unsure at all n locations
tttttcaaagacataatggcaatttattcgttcacaagatgttggctaagctctttccgtttgaaaaagaagaaatattcttccttcacttttgacttttgtttttcaatattaaacgattgttgctgactgttatgcaattggcacaatgaagggggtgttatgtaattataaatatattaaggcaatataatggataatcaaagtcattctgtgtcaaaagataaacacgaaaaaataatgaaatcgataaacagattttcgatagcatcggcagatttggatcaaaaccctaattctccagttcaatcttcggaagatggcaagcctgtggcgagctgtaatcggcggtcagaacaacaattccgaagactacggaggcgtagagttctggtctaacccagaacgaaccggctggctcacgaaacaaggagagtacatcaagacttggcgacgccgatggttcgtgctcaaacaagggaaactcttctggttcaaagactccgacgtcacgcgtgtgtcacgccctcgcggtgtcgtccccgtcgcatcgtgcttaaccgctaaaggagcagaggatgtactcaacaagcaaaacgcgttcgagctatcgacgagaaatgagactatgtacttcattgctgattcggagaaggagaaagaagattggatcaattccattggacgttccatcgtgcaaaactccagatccgttaccgattctgagatcgttgattacgataacaaacactaaagtttctctgtttttgtcttttgtcaaagtgattatgatcacagctttcattgatggagtcttaaatgtaaatcttacaaaatcaagaaatgaaaagctttgtctctgcttgaaaacatgaactcatatccgaaaaacatataatataaaacctaattcttcaagggcaacgcttctggttcaaagacttacatggttcttcaaacatgtacttaccaaatatggtaacagaagcaataccttttgcacgtgatcaaatacaataacttcgtcgtacagactaagatgcatgtatggaaagttcctctcgtcattaagtgtcctaaaccctacccgcttccattcagggccgggtctggaaggaacaacaaaatacctaaaacccctctcctcttcttcttcttcctagtccgacactcttagagtcttcaaaaacattgcaagaaggaaacaaaatccatcttcttcgtctattagaaaccctaacttgagaatgtaagtattgatttcccacaacagttttctttttcctttaactaattaggtttagcagaaaacaatcaatgtaggcaagttattttttttttttcggccttgtgtaaattacaggtcttggataatcgttaagaatcttccttccaaacatgtgacagaggaacgacttcgagatgtcttttcacgaaaaggagaaatcacagacgtgaaattgaagcgtaaaaggtacattcaaatcgagtgtttttcacagctaattcttgtgttttatgttggaatcactatatttcgttttgcttttgcagtgatggcaaaagtagacaatttgcttatattggctttcgtactgaacaagaagctcaagatgctatcacatatgttaacaagtgtttcaatgatacttatcgaatatctgttgaggttattaatcttcacttaattactcagtttcacttatgtagtactagtttcaaatctaaatcagattctccttggtatataggttgcggaccctcctccgagggaagaagggaaggttaatgaaaatagtgaacattctcatgaacaagatctcggctagcctttcaaactctttttctgttgtcaacattctttatcaaaaacactcaaacaaaccgaagcattcattgtaacaaagtttttttggttgaatctatttttacattctttcaaaaaaagaaaatagtgaacatttttctaatgcttatgctaaaggagacaaaaagattaagaagaaaccagaggttgatcatgatcctcagcttcaagaatttcttgagcttaataataagttgaaaacctggtccaatgatatgtgtccaccggcaacgatcaggtctcgcccgatggtgctgatgagcctaacaaagcgacaatatcattattagattctaaaaagactagaaagattaaagttgttgctctcgttggtgatgatgtttctgatatggaatactacaagagtcggacaaagaaaaatctgtcggattcggacagtgattgtgaaacttatggttgtgaagatgcaattcatgtttttcctattgatggggatattgaagctgacagagttgacaaagagtttacaattcatgttttcggattcggacatcaggatgtttaatttggatggtgttgcagggcaatggagaaattagataaattaccctttccagggggggacgttgcatatttcaccagctaagccccgtgattatggagaccaaagaagcactttacttttaacgaataggtgattattccctaacctggtcttacttgacttttcaggttgttttccttgaaccgattgaggcacgtgaagctctgaagggaatgggcgtacaagcgtatcaagttttcttcaacattattgtttctctatgtataaagtctaaaatcctcattctttcttcccctaaagtgcttcttggagataaatggttgtcctagtctaaccaaactgcttcatcacatttccttattattacagaggggctcccctgtatctgggctcctggagatattcttgagccaaaagcacttgccgataacaatgaaaatacgagtgatgttgaagaaaatgatgtgagaagaagactcaacttggatcagcaggttggaatcgattcggatataactgaggtatgcccactttatgattgctgtggacgttttgaaaccatgtgttcgtccttttgtgtggtattgaagtatctgtactaatttatgttcgggtttagtattacagtgtaagtttcaggttaggtactgtataatttatgttcactggcttcaagttttctgatcaatcttgtaacatttcctttaaataatgcattatatttcagtcaaatgtcctttatgttaagattctgaacttcaagacactgatgagagtttgaagaagcatttgactcactggtgaagcagggaaagattctgagttttaaggtaagttttgctgacagatgatgatatgcagttaaccatcatgtctgttttttatatggttttgtagaatttgactccgaagagacagcgaccagtgtctacagagatctacaggtatattatcctagttaagtctctttaatttgaaacttgaagttgattggactcgatgaagtagggtgacaattttttgcttgctcctagggaactgttgtggatgggcatgctttgatcttgagcttctctaaaaacaaaccgagtggaacggctgggaagatttatacaaggacacaattttgacaaagttacatgtgaaaaatatatcttctgaggcaactatgaaagaagtaagacagtttttcactccatttggacagatcaagagcgttgggcttccagagaggactaagggaagatatgctggttatggttttattgaatttgagacaaagcaagaagctttaaacgctaaaaaggcattatccaacacccatttctatggacttatcttgtgtactcatctctctagcctgttcatctttgacatccttgaatgcatcctcaactcgctatttgccgtctttgcaggtgatcgagtggaaaaaggttgacaatagcatgaaggcgatccgatatcgttctgctgccaagtatgtggaccaagaaaacaataatccaaagaaaaggaaaagctcgacagttgttggttaaagaagaatcaagtttgggagaatagctgaatattattgaccatggtttctattgtaacatttttcagagcttcattaatggagtctaattgcaattctcacaaaatcaagaaaaagaaaaatctttgttctgcttgtaactgttttatacacatgaactcggagttcaaagaaagccagcctctgttcttgggcacaatcattttttaacaaatgcagattcagccaagtcgatggctcgagcaagaccagcggctttgttctggcactcacagtgttcgtcttgcgggtcactatcagctactacaccagctccagcttgaagataagccacccactcacgccgtttgttagcatccttgtaagagtacattgtattgtattgacatgctgtcggaaaaacgattgtcctaagggataaagcaatgtccatgtcaccagtgaaggagactccaccaaaacctccactgtatggtccacgtctcgttggctctagctcatcgattagttccatagctttgacctttggtgcaccactaactgttcccactggtaaagccgcacgtagtacgtcccagcaagtcaaaccatcttgtaattctcctgtcacctacacacagaattagaacttaagatattaaagaacacactatgcgagactttagacatttgatctactactagttatctaattaacagttaccgtggagcttatatgcataacatgggaataacgttcgatgttcataagcttctctactttcactgatccgtattttgtaacctttccaacatcgttgcgtccgagatcaaccaacatgatgtgctcagcacattgcttttcattctctagcagttccttttctaatctcttatcctcaacttcattcttccctctcttgctggttcctgccaatggccgattcactatcttgttctgcttcaaatatgatataaaggttagcttcaaatatgatataaagattaatgcagctttnnnnnnnnnnnnnnnnnnnnnnnttactttggtgagaatttctggacttgatgctaccaaaatgcatcctctagcctgaataacagaacgaaaacagtattaatggtttatccacaagtacaaaatgcaaagttgttgaagaaatgttctctccgtaaccaacctgcaaataacccatatacggacttggattcacaactcttagtgctctataaacttcaaaggggtctgcaaatgttcgccgctcaaaacgttgactcagcacgatcagaaatatgtct

SEQ ID NO: 374 - DNA, 2016 bp, Arabidopsis thaliana landsberg
aggcaattctataagccatgtgtgtcgttcactcaaaatttttatgaacactttgtctttatcaaaacagggcggcttttaacaagataaaacatgaaacgatgtaaacatgtaaattattcaaatgtgaaatcaatccatatcttatcaaattgattcatacacacacacaaagtttgcctaatactcaatgatgagtggatctcataaattcatagactcatagtcatataaaaacgtggttctcataatcatagaaacaaaggatttcaaaaataaaataaaaaaagttcatgcggctactacatggaaaagccacaactctttaaaaagacaacatcaattgatacgacatgacaaaacacagaaactcttcctcgtggtgcaggttgctagatttgcacagaacttggaacataagagcacgcaagtggaaagcaatatttgtgtacagactcaccgagatccactggtttgatgtatccatcttctccaacgatgtaagctgtgttacgagtggggttaagtatactctcgcctttatcaaaaagcaccacgagtttgttctcttcgtcaacgaagaaagtaccagatgcagcctcgagtggtcttatcctacccattggaaaaatagcttgctccacgacactgcattaggctcaatcttattactaatccatatccccgtccacgttatatcccatcgctgatataacaccgcaagtttctcttctctaacactagatagagtcccttatattagtatagccattagcttcaacgtaaattggtataggcagaagcggcccaaatctctctcttgtaaaatcaaaatagattatgtgattcttgttacattcggagctccttttattagcacaccaataactatttcccttaagagaaacgctaggggaagatcaatatatacgccaacgtggaatgacatcaagagttgtccaatcacccgagttaacatcatagatttcataccaaaaaactgtgtttcgggtgtattgtagaaataatctaaaatcctcaacagcataactataactgcacttgtcatgtccgtctctgagatcaatccaccttgtttgccccaactacggatattccaaaccacgatcctcttaacttcttccaatttgcataaaattaaaccttcatagtggtattataagatatgctgacttgactgtgaagaaaactaaggttatctgtgacctcctgatgtttatacctataatgtgtatatcaatgggttatgcaagctgaacaatatccaaggcgctataaagatgatgtcttctatgaaaaagctaggttctgagcctaatgtagttacatacaatatattgataaaaggattggtttaagctggagatctgagtcgagctaagactctatggaaagagatggagagacgaattgagtttagacgaggttgtttgtgctcactgtttattggaataagcatttaacatgagttcaagaatttcggaagatctgccttgactgaactcacaccatcacattgttgacattcctttcctggatccttagccgtctccacagcttattgttggaacttttttgacataaaattttccggtgactttccggccaaattccggccaaacggctgaatggaattgtcgggtcattagtgaattggaaatctggtaaagagtactacaaaatagtatactcatacgtcaaaaaaggagttgtattgaatgagaaataagggtgtaaagtgggacacttgctcttcctctactcaccaatacatttttctttaccaaatatattcattgatttaaagagagaaaaataacctttggtaacatacacgtagatagagatgtgtttcaaaagacaagactgttatatttcatctttccaggaaagcgaaattttcaaagatgcaaaacagagagaagtaagaacagagtgcttctgctgttgtggacatggagccatcataggtttctagttctcagcaagtgctcc

SEQ ID NO: 375 - DNA, 895 bp, Arabidopsis thaliana landsberg
gactcaaatataatattctactactataaaacaataaaaaaattgcaatatttaataaaatatggtcgtttgacattattgtagaatatgtccaagtaaggtaactgagatgtgtcttgtatcttctcaacttggagaggaagttgtgacgtcttgaaagcttcttcatgttatggaatgtcttaagttgacgctcaaacaaaaggggaaagatccatgagacatttatgacaaacgggtccaaatatggtaagtatagctcaaaattggtccaatcaaatgtggtgtggtgtattttatagcgtgtagtgaatcctctaagtcacctagaaactctgcaggccgccaaacaaagctttttgacatgtctaagtgtagagtaaggaagatttccttgtcttgtttcatttggtgcagtacattataaggtagttcagcgggtaaatcaggaagtagttcagccggtccgtcagcaagtacatcagctatatatacttgtaacatcttcaaatttccatattatggtgattcgggttcgctggtctttgattcctcttgaaccatcattaatcttctaagggttgattggttgttgaataattaaccataggcattgagactccaattggacaagaggcctccaaaatgctccttagcaagaaccgtgactaagagaaaaaaaaaggtacttgttttaagcaaaattttggtatcctcaaatttgacacaataatttggtatattagtaaaatacaaagttttttgaattgacgggagttagattaacttggaagcctgagatgaaaaatcaactcgattatatgcgtattttgtggcagtgtaacaaaatactaagtggccgcattggtatttcgattaattcgataagaggaaa

SEQ ID NO: 376 - DNA, 1443 bp, Arabidopsis thaliana landsberg
ttgaatagagagaagattaaatcgagaaagttcgtgattaaaatacaattgtactgtcacagtataatcaaagtttgttctgatcaaataagagcaaaaatgcctttacttcaagttttttcaactagcaagatttaaacaatttctgttattttcaaccgccaacattcaaacatatttgcgattttaaaaacttgcttgggatattatagacgttataggccaaatagagaagttatgtgattcgaaaacatagtttgtacaaaacgtggtaaggaaaacactcaaaagaaaactaaacatcatcctacaagttcttcctcttgcataaggaactaacattaactagcaaaaataaagtcttacaaatattagatttaaactctcctcaccgagctagggaacggatgcatccactgtgggagaacgaacgaggcaaagtttgattctaagatgtatgtcatatctctcgggcaatcaacggaattcagaatgcgacccgagctgctatgttccacatccttgtggagcacaatgtctccattgtgtaagttaatagataacaagcatttgcgactccaaaggtagactgctttagcatcaaaagggtctattcccaacggaatataatcgaaaccagtcttaatagaatccaaagatatttcggatactagtcgccattgccagctctctagcctccatacacataacttatcctctaaatttccatcaacttttggtatggagaatatgttcatatacatgagacatccttgagaagttgtgcaagttcttctgaatttcggaactttatctaaatcaggaaatggcgtagcgcggcatcgatcagagcggctatcaacaacatagaaatcgatggatacaatgaaatcttgatagtcggaaccgtgggcgagccagtaaagacttccgttcaagctaatgggattgttaaactcttgagatatatagctgaaaggaaaagtgtcactgttgagactccacaagcctgtctcagatgaatatatgaggaaagtgaagttaggtttcaacagaacaactttgtaacttaaaacgacgccgttctcaactcttgtagctattcccaaaatccagaaacgttccagtttctgtgaaggaagaatctctacgcattgcctagaaacaggattagctacgtagaaagactgacttgacactcgatgaaccaatatcaatccaacatccgtgtaagacacgactctagcttcattatagttctcgaatttgtcggtaaggaaagaggagatgtaataaccgagagaatggttaagattccaattgtcagatccatagtgagacatgatctttgtctcacaacctctacacatgagtgaccatgaagaatgatgagagctttggtgcagagattggaaaaggtcgcggaaacaccgagactcaatg

SEQ ID NO: 377 - DNA, 1299 bp, Arabidopsis thaliana landsberg
  unsure (1)..(1299): unsure at all n locations
gtctctagcacatctaatacattgaccatcttttttatcttgggagtcgccgtgaggtctttttgtgccttcggcactatcattcctgcccaagggcttgtaacttctactatctttgttttcgcggcctctatttctttaatattaccagcctttggtatcatagccggctcttcattcttctgtgtaagagcaggtcctttggcttcagtagtcgtagacgtttcaccaccaaattcgggcactgaggccggtttgatgaagcgtggtcggtgagtaaggaccttcacctttttcctctttggtgcggcctcacttagagcagctaaagcatcaccttttccagaagttgcgctttttctcttttgccctttcagcgggtatcggtaatcagggtacataaacccaatagcatcgaaaactctattcagcctcttcttttttcggcctccgaaggntgctgacatcgcggtatcttcggccttcgagtaagcaccaagcaattcgtcacttaaattttcaatactttttaaccagtcgtcatctggctcagtaaatttatctccaaacttgaaggtgtatttcagtctcacaagtccaccttcgtcggtctcctttatggtttcttgaggcatttcccatttctccgcgagcggccataccctgaaggcaatgtgctcttgtactaaatctctggttccaataaaagaacagataacgccgaaggctctctggcattcttcgacagcttcattcatttcaaccttcggcctccgaaggccgaagctttgccaaatagggcgcataattacacctttgatatcttctcgtatnnnnnnnnnnnnnnnnnnnnaaaaccactctgtcatccagtctccgggccatctcttccgaaaggttggcacgggacagcttgacccggaccgagaaacgaaactgtagcagccaaaattattgtgatactgttccttaccccaaggttttgtttcgtatgataattcgtgtatattgcagaaactttttgcatcaggcttcagaccttggcttctcacggcccacacgaagatattcagccttatgattgcctcaggggtaagttggtgaagatagacttcgaatattttcagcacctctacaatgaagctgctcaggggaaatcttagtccagctttcaaaaagcttcggtacactacgacttcattctcttcagggtgtggacaagtcttctccccttcgtcggccctcacaacggacaaatcccggaaataccttcctctcatgttgacaagatgattctct

SEQ ID NO: 378 - DNA, 1599 bp, Arabidopsis thaliana landsberg
  unsure (1)..(1599): unsure at all n locations
accaacttcttgaacccattctataattatcctttgtttccacaattcgatcattagccaaatgacagcttttgcagccaatgacaacaaacgttcagttcaaaacagaaataaagattgacagagcttaaaagtgtcccaaagccaagaggactaggagtgcttggaatttggttatatccaatgaatctcatttcgtagttagtgtctgtatttgctaaatcttgaatggtggtagnnnnnnnnnnnnnnnnnnnnnnnnnnnnnnnnnnnnnnnnnnntcacacacacagttatcatcaactatcatgtatgaaactgaccgttgcttttcgctactatagtaaagttttgtttaatcacagtcttaagagcatagggaaatgttgcataatcacaatttaatcacatgaaattcaaagtctccactgctcctaacgccgaccatattacgtccaccaagactaaatccaaaatcaagactttctaaatctgaaagcatcattgcctaattgttccaatcaagcatcaatcaccataaaatagattattgtttttgttcttccctagtaatagattacattgttgctaagagatgaggaggtcctgtaggatcatagtttgactaaatctaaggagtttattattaatacccaaatcatcagacccaataagcttcatcatagccatcatcagttcgtgattttttcatttcatcgcagtaacaaaatattggccaacaaaaacactaatgtcggttccagattctaattcaaccagtagtttctattatagaccaaacaagaaaacaaagtatgaacactaaccataagccttaagtcctcaagatatagcacaaaagcaactaacttggaagcattcttctataagataatatctccttgttcgatgtgccataactacatgtaacaaaacttatgctccaatcattgtttctaacaaaaatcaatccaaaccaacactagttaagagcagagattagtgttttagccttagttttataactaccaccatctcagaaattgaaagttatcagttggggaattagccaatgaataaaacaccatcgagcaaacaaacccaattcaaaatttcacaaattgatcacacaaacacagattaaaaacgagattcatgtacgcaaaaattcaatgctcggaacaatttctaactaaatctgacaggaaactaacaaaggagatcgaaaatcgaaacttacagatcaaaatgggtataaagcggagtcttcagaatcaccaaagcgaaagggatgaagcagtttcaaagatgatgaatttggtgggtaagcaagagaaagaggttgaagaagaaaatctggacaaaggagactgcctcaaatgatcgtgtcaatcgtcggagcataagtcaccggaatcaccatcgctatcgccatcgcatcgtcggagaaagtcggggaaaatcgaaaaatgtttgggtttaattgttcacgcgtttttttttccttcttttgtcaaacatccgaccaatgggaacgcgccacgtcatcgtctctcttacctctcaaaacctctctcaagagagacagctctctcaata

SEQ ID NO: 379 - DNA, 4568 bp, Arabidopsis thaliana landsberg
cctaagtgagcggcagtaatggaagtaagatgcaaactctgttggatgacctctgcataacgtttgcaaagttacagtactatctatgatcaaccgtctctacctgatcataatcctttgaaacatggattcgtataagtttctaaatgtaaaccatataagaagaacttacttcgatggaagttgaaaccttcttttcgctgatcttatcatacttctgtttcttgtttccagctttcagcccttgccaagggagactacaagagaataagatattagagatggattgggagacaagaatcagaacagaaagaaaagttacttaatgactctcaccttcccttgaggaaatacatgaggatgtaaccaagcgattctatatcatctctccgactttgctctaccaagtgaaaaatgtcaaaaagtaatcagtgaaagaggagaaaaagatccgcgattatcatgagggtttatagaaagtgatggagtataccaatccctaggtgagtgttcaagctggcatacctcggagtcccaattagacttttattctccctgaatcatttacacgtagaatccaaacaataaagaacccgttgtcaggaaatctgaagctgacatacaatatgctgaaaatgctgaatctgtgacatccaaaaccttgttacctatatggaatatgtctatgagttgagctatctctatatttcctagccaagccaaagtctataatgtagacctagagagtgatgatacaatagtcatgagatcccaaactcaaagttgagagttcatgaagaaagattacctgatttgccagccttcccaaacccataagaaaattatccggctttatatcacgatgaagaaacgacttagaatggataaactcgagccgattaatctgacacaatgtttaataaacaagttggttaaatccaaaacaccattaacagtgacaatgaatcaaatccaaagcatattaccatttgatcagcaagcataagaacagtcttcaagctaaactgcctcttgcaataactaaacaaatcttcaagacttggaccaagcaaatccatgactaagacattgtagtccccctcaacaccataccatttcatatttggaatcccagctacattaacgaacatacacaagaaatgaataaccaaatgagaattcaataacaatagagataaacatttcattgcatacttccaccctgaagaactctatatatcctcgactcatatgacaattgcggatgcgcagtcttcacactttcctgcacacacacaaaaaaaactaagttttgatgatccaagttgggactttgaagagatgaaacactcacaagcttaatagcaacttcttcgttagtctgaacatcagttcctgcaatcaaaacagtctcatcaaacgactattgaagagattttatatgtatagagaggggaggaacgaaccgaggtaaatctctccgaaagagccgctcccaattttgcggccaaggcgaaacttgttcccaacacgaggttccatacccaattgaaaaaaccctaactttgtggttttatctatctactacgtcgagcggatttctcgatttctcatgcggaggagagtgaagtgcgatgatcaaaactagggcttttgcgaagaagaggggaagaatcgagcaggttgaaattggaagtgagtaggtgaggaaatttagggagattccatggtgttttggttaagcaaccagaagcaagcaagatgaagaagactgcgcgtgtgtgtgtgtctcgcttagcctgttgcttttggtcttttctattccttttctcaatttattaaatatctttattcggtgaaaaaaatatacagtatatttcttagaaactttataataagaataaggattttgtttttatattttcctaaattccataaatctcttaagtttacaaattcatatatcttttaacatttaaacaaataaccagacttctagtaatctatataaatttatttagggagtgttattggtttgtgatgtattcgaagtttcagtgacttaaaatgttatgaagaatttgttgttattcaataaagatttttcaattttttgttaaagtttggtgttattagtttaagatttgtaaaaagtaatataaaatcttcataaatgtagagttattggattcatatttttataaagttattaaattttttgtgtaattcatttaaaacaaagaatctatgattgttataatgaattaaattattgtgttattggtttatgactttctaccttttttttttacaaaataaagttgtgaaaaatatcataaaaataaagagattgtttgagaaactttacaaaattattaaaaactaatcaacaagtttattaatgaccttaaaccaaaataggtacatataatattagatagatcatgcaaatgcgtttggtggttatgttacttttgtatcatttgattggcatgatgttctacatttttttaccatttctctattcttaagtcgaaatccttaggaccaaataagcatttttccctaaactaacaaagcagcatctcactagatgttttccaatcagatttgcttactatagtgtgctaatatgaaatttgagtgacttatgacaatgcatcaatccagattaagcattaacatgtgatcagctagcattcatgagaatatgagaattgtcttcgagctaaaagaaagtagactcttttttcacttgagaaactcatgacatactttttttttatatacatttgttttttgatgattgagttaaacttttgcaataaataaatttttagttaaataaataaacttttatcatcaaaagactcgtgagtttcttcctatgttgcaatgaaatggaaacgaaaacgcgaatacgaaacgtttcggaaacgggaaacgattttttcttaaaattagggattggaaacgattttttcttaaaattagggattggaaacgtatacacatacatacatatatatatatataacattaacataaaactatattaaagaaaaaatggtttaaacaatacaagtccaaaacatcaatattaaataagttaactaaaccaacatttttattagtttcatcaaaaataatataaaagtcacttgaaatctagtttatcaagagaaagatcttaaacctcagagtgttccaaaattagatatatgtattaataatcttaatatttccaatttaagttattaaattaaagtcaataaaaaagatttgtcatatgtctatttcgtgtttccaaacatagattgttaggaaacgtatttccgtgatatttttcgtgttttcgaagagtttctgtttacgaaacgtttcgaaaacgggaaacggacctcgaagcaagtttccatgcaacctaacttttaaccatgtggcatgacgttaactataaatttatctttagtttcacaaaatctgaaatattaaataatatgagatcataaaaatgaaacaaacaaaaattaaagtcaacgtaaagtttactaaatttactttaattaagtttccattatcattaacatttcttaaatttctttttttaacatcattaatttttatattggatgcctaagatcaatgatctatagtttaattatttaccttagtcttctttataaagttatgaataagggggttgaagtagggattttagaaaagtttggtcatttttataaatcacctgttattcaattaatgatttctaaatatctttctaaatcctctgttattgaaaatgaaatttatttaaaatcatttacaattccttgttattcaactaatgatttgtaaatctcatattaaatactctgttattcaaaaattagctagttttaaaaaagaggatttcaaaaaagattgtaagagatttcagatatatttttagttgaaaatataggcaaacaaatcacacctctagattccaccaaaatttaaattgatgttcagtggagaaacggtggaaccagttcaattttaccaaaaaagcttttacactaagctcataaacaaaagacgagaatgatgatgcattgaagtcgaacttgtgcggacactggattcgagctctttgtgttgtaatgtagaagcttcttctggtactctgtcaccgctgcggtatggcttttaggaacgttgtttccatcgctcatcttctacaaatctcaaaaatcaaaacaaagcatcgatgtcccaacaacagtttatcaactttctgaattctgtatcaagttatatctttaatcgatagagatctaccgtagaagtcggagtttggacaatagggcggagaacgtgtaaaagaactacacatgtgtttgatttagtaatggagatctaccatggattcaaactgatacgaaagaggaattgagttttttgtaagttacgagagcaatattaatcccacagaactctcaaaaatcatcaaaagttttagtataaatttcaccaaatcactagattttattttgaaatatttaaaggataaaagttaaaagttt

SEQ ID NO: 380 - DNA, 6148 bp, Arabidopsis thaliana landsberg
  unsure (1)..(6148): unsure at all n locations
tattcgttattgattaagatcacaattacgcttagtaaatctgataagatcctgaatattttgaggaagaaactcaaaatctttaatgtctcttctttaagattcttcttccattgatcttcttcctcgatgtttccttcggctaagacttcattcagtttggaaataagcttttgaaccaaaaaatagagaatagatgcacattgaagaacaaaaaaaatagggacaaaaatcgaattgatcattggagatttgagagtaaccgtaccttagagataaatttcattaggccttaaagaacaaaaatgacatcttagttgtaataattttttgcttgtttacacaatacatcaacaatgtcatctgtaatatttttcagcgtaagcttcttctccaaaacttccaaatatgttggtgatttttatcgtgaaaacgctaggtttttctctatcaaaaccatagcatcaaaccaaactgaaaaatgataagatactgtattgtagtaatattattaatccggaagatccaaaaattgaaaatattttttttagtttgtcatattctttttttttttgtttgtaatttgcatattacttgataatttgtttttatgaactaaatgcatatttgagtataaaatttaattagtttgaataattaggaagaattttattttattataagttatatttcaatttcataatttatcataatagtataatattgttttggtatttttatactttgtataattatatattatatttttgagttattttttatttaaccgtaataccacgtgttggttaaccagtcataaaactcttgcaaacgctttaacttttaaccattaaaccagtggttcaaaatgtttcattaagcttgaaatcgcaaccgtccgcttccgtaaactcatgcattcataaccgcaaacgatgtgtttaaatcagccagacccttaatcattataaccctctcataatatcatactactatcaccatcatcatcatcatataaatatatcatagtcataatagctatcatcatgataataacattttcataaagtcgtaatttttctgttaaaaacataaactcttaatttttgtcccaaaaagtaaacctgtaattttcccgccaaaacacgtaaatccgtaattttcctgccaaaaaagtaaacccataattttcccgcaaaaaaaacgtaaacccgtaatttttacgcaaaaaacgtaagcccgtaatttttccgcaaaaaagtacacccgtaatttttctactataaatgtaaatccgttaaccagtcataaagctcccgcaaatgcaccaatttttaactgctaaacaagtcgttcaaatttataacccttaaaaccccaaccctctgattccgtaaacatatcgcaaacacaaccgtaaccgctgcgtttcaaccagtcaggctcttagatatgttttcttagtcatgggcattgggttatgtgttcagtttcggtaagtactcattcggttatttattccttcggttataaagtttagtatcattcagttattttgaaatttttgttcggttctggttctttcagttttgaaatttattatacattcggttatttttctttgaatattctcggaaattactattatctatatatttttaattatttattctagaaataactaatatttttgaaagtataattatattttggatattttcgattcgttaccgacaccgattcggttttggttcttttgcttatagaatttaatatctattcggttattttcatattttcggtccgatttggtttggttcgggtcgattcttttgattcggctttggttcgaattcagtttatttgtcgatgctattgtatctatagaataaagtcctcgccgagaaatcatctcataactccccttatgcaatcaacaagtctctcaactccccttattgtctctatatccctttctcttttaatgagatgtatagagactaaattacccctcctccttctttttataatatctattataaaactaaataattaaaaaaaaaactatattgaaaaaaaaaaacagaaaacgatactctctctcctctcctctctctctcctctcctctcctctctctctctcgagctcactcatcgctctcttgcttactcatcgctctcttgctcaccattgatgccatatccttatcttcggcgagcttcgtcgtcatagaaagaaaagagaagcttctcgagctgaatgaagcttacaattgaagattagaactaagagattttgtcaattagattagagattaagcaaatcgagttagggtatgcacattagaagtttatgcatactttctgggttgaatagatttttaaacgggtaagaaatggtttccaacaactgaatcatagtgaatttcagttttgaacccgaatccattcaatttgagctcttgtcgggaaatacatctggtagaactgcgtagaactgcacatgattcaattaaaaaatatgtgtagtatgacttagttgcaccagtattaaccatttacatgtagtatttatttgggtttagtagtattacccattttcatgtagtatttatttggtacaggagttttacccattttcatgtagtattattagttatacctgtattatacaaataggtgtagtatgactagttatacttgtgttacccagaattgtagtataactagtatatctgacagagtttttgtattgttgttgtaggatacaatggtggagaaggtgatcatatattttagatggaaagatcgagcgtacagcttgatgatgaatgggaaaataactctctccatgttagaaagtaggatttgctcgaagtttggattagatgaaagtaaggttaagttgcaaatgaagtacaatgcagtgatgttgggaccaactcaagagatacacattaatgatgatgaggatgtcggtgtctatatatcttcgggtgaaatggttagtagatatcctttgactgttgacgtcatcactccaccggaattgcccgagnnnnnnnnnnnnnnnnnnnnnnnnnnnnnaagttctattggtaagaactatgctgatttgggttcaaatgatgatgaaatgagagataatgcaaccatcgtgataggcgaattagagggacaaggaacagaactaaatggggcaatagtggtggttgatgatactcaagatcatgagattggatcacgtgatgatagggatgatgatgataggggtgatgaatacgttgagccaccgtctgatgtagaatctagtcagtttaagaaagaatgggaagacggtatcggtttgactttgcgacaagaatttccaagtagggcagcattgcaggaagtggtggacaaaggtgcatttgctaatagttttggttatgttattaaaaagtctgataaggagcggtatgttctaaagtgttcaaaagcgaattgtgactggcgtatacgggcttcatgtattcaagatacaagtatttactctattagaaggtacaacaagatgcatagttgtacccggattagtaagagtagtacaaggatgaggaagagtaaatgtacccctgaattagtagcagctcttcttcatgatacttttcgtggactgttggaaactccagctcctaaggttatcatggagcttgttcagacaaaattaggtgtgaagatatcatactccaccgcattgagagggaaaaggcaagccgtttatgatttaaaaggtagcgcggaagatagctacaaggatatcaattgttatttgtacaagttgaagaaggtaaatgaaggtacagtaacatatctgaagttggatgagagcggaaattccaatacctattcatagctttggcagctagcattgaaggctttcaagcgatgaggaaagtgataattgtggatgcaacacatttgaagaacgaatatggtggtgttctagtctatgcctcagctcaagatccaaatcgtcatcattatatcatagcggttggcgtactcgacggtgaaaatgatgctagttggggatggttctttgagaagctgctaagtgttgtacccgatactccaaaattggtatttatgagtgactgaaattcaagcctcatcaagggcatacgtaatgcgtatactgcggctcatcacgggtattgtgtttggcatttatcccaaaatgtcaaagctcattccactaacatcaacagagacgtactcgcttggagattcatggagttaagtcggatttatacctggtcagaatttgagatggagtatagagtattcaaggtgagatatcctaccgcggagaattatttggaggattcaaccgtgaaagaaaaatgggctaggtgttgttttccgggggaacgatacaatttggacaccagcaattgtgtggaatagttgaattctgtttttctcaatgcaaggaagtattctttaatacccatgctagatgcgatcatggccaaaatttctttttggttcaatgaacatcgcaaagatgccgcttcaggatctgttgataataagtttgtgcctttagtggagaactacttgcataatttatgggtggatgctgagaaactaaaagtaaaagagctaaacactttccggctcgagtacaatgtccggggagttgaagggaacgaatatttggtcaacttgtacttcaaaacttgcagttgcaaggtgtttgatatccaaaagtatccatgtattcatgcgtaagccgctttcattgtattcgatagcgatacaacaagaactcgaggtatggaattacatgaattggtttctaagtattattgggcggaattgtgggcattggcgtaatatgaaactatttatttagttccggatagatcacagtgggatatcccggatgatatcaaagcgttgaaggtattacctctgcctcggaaaaagaagaagggtttaacattaggattccatcttaagctatatagtatcgttatatagcttaggattccatccaccggagaaagacgtccaaaacgtcaaaggactcagaacaaaaggaggccgatacagtctctgcaatggttgttatttggcactcgtagtatttgattttaatcatgtaaaccctattcgcgttgtgtgcaactatgtaacactacactttcgttctgtaaaactatattttatttcactcggaattcaagtttaacgataatactaagaatacaggtgaaaactatgatttgacgataatactgagaatactgggtaacactattatttgacgataatactaagaatacaagggaatgctatgatctgacgataatactgggaatacaagaataactatgaaagatatgaaaattcgaatttatgtttgtttgaaacatcaaatattaaataaactgtaaagagataaagaactcttaaaaattaatttaaacgaattaaataaagaggaaaaatatttggtcaaaatacatcactacaagaatattaaccatctgtagcgtccgaataacgctatataacgatactatagcgtttaagaagcgctctatcttcttccgtcataataggtcgaagacataatataatggattttctttgtgctataatactgttagttattatagcacattctttgctggaatattatattttacaatagcacttcttctttgttattaatgatattattcaaatcgatttgaatttagattttaaattttaataattccaataatcaattcataatagatagaaatcgaaatctttttattgatataaatgttttacataaaaattcaatgaaacaaggaataaactatctctcaagaggaaaacaaaatacaaagcaaacatgattggaatcttctttggcttctaaaaaatcatggttgcgatgaccacacttcttcttcttcttctttgcagntcacaattaacagttcacagcccttccatgaagacgagcataacacctaacagaagacattaagttacaatagactaatcttaactntataaaaaaatgggacgtacgtcaaaatacaacaacatcacaacactaaacatattcaaaactaatcaacttaagatnttagaagtatca

SEQ ID NO: 381 - DNA, 4491 bp, Arabidopsis thaliana landsberg
  unsure (1)..(4491): unsure at all n locations
ctgaatattggttgtgtttattgatttgttggagtatgaatcatagaagaaccaatgcaatcattttgaaatttaaaacaacctttttttaaaaaactttattctcatttcgcgagtgtttttagtgattgtggtaagtgggtaacctttttgatgttaggattacttttgtttgatgttttttttttcattgtttatcgtgcaggtcttagccaatcaccaacatggcgactggggcagcaactgagaaccagtggctcaaagggagagtgaaggctgttacctccggagactgcttggtgatcacggctttgacccacaacagagctggcccacctccggaaaagaccatcactctttcttctcttatggctcctaagatggtcagctttgttaaaaaagcatttcttttcacaactctttttactaacaaaagttttcaatttcatagctacttattatgtttctcattgtttggtttgcctttgtttcaggctcgcagaggaggtatagatgagccttttgcatgggaaagcagggagtttctaaggaagctttgcattggaaaggtgctttgtttaaactctttatcacttatgtgttataagttatggaattgaaaagttttcttcatattaacagtttaaaccttttttttttcttgagcaggaggttgctttcaaagtggattacaaagtggaagcaattgccggaagagaatttggctctgtttaccttggtaacgaaaatcttgcgaagcttgttgttcaaaatggctgggcaaaggtgattaccgctttatttcatagatagccttgtctaaggtatgatgctcgcatcagctttctcatacggtggaggaatgcttgtactttatatgcacaggtcagacggccaggtcagcagaatcaggataaggttagtccttacattgcggagctggaacagcttgaagagcaggctcagcaggaaggatttggtcgttggagcaaggttggtgtctcttagtctgtttctctaaatttggtttatcaaaacacgtctagagttcagtactgaggaaaaacttgttgggctgtcgaagtttctaaaccagtggaataattctatctattgtctactcaaaatatggggaacaaacttgaagttatttgggtttttatctctgtgggattctcctgagagttttattattatatatcttccactgaaattgacttgggagagtttgacatctgtatttgatcttgatttggtgatggaattaacttgatacaggttcctggtgctgctgaggcatctatcagaaatcttcctccttctgccgttggagattctggcaattttgatgccatgggtcttttagccgcaagtaaaggcaaacccatggaaggtattgtggagcaagtgcgtgatgaaagtaccattcgggtttatcttcttccagagtttcaatttgtgcaagtatttgttgcgggagtccaggtaactaaacttgtttccttgtttntactgcgtgaggagttgacattttaatttcatggtgtaagagtgctggaaattttctatgtaggctccatcgatgggaaggagacaatctacacaagaagctgtcgttgatcctgatgttacagcaacttcgaatggagatgcttctgctgagacgcgtggccctctaacaacagctcagagacttgctgcctcagcagcatcgtctgttgaggtttcctctgatccgtttgcaatggaagccaagtactttactgagcttcgtgtgcttaatagagatgtaaggaggttttacaacaaattaacttacacgtatctgtatttgacatttagatgatctaagttgagctggattgtgcaggttcgtattgttcttgaaggcgttgacaagttcaccaatctgattgggtcagtatactattccgatggggatacagttaaagacttgggtttggagctggttgaaaatgtacgtgcctaaactagatggttatttggttttcgacatgattacatattgaactaattggccaacaaagcttggctttgccacaacgatgctggcgtaacttaaagatataagattaacgttgacctgttacttagtttgtggttttcttggtagatttgatacagcagttgtgatatacgaaatgcaaatataatctttggatggtgttgaataaaagttgtgacactggctactattccttttgctcagggtcttgctaagtacgttgagtggagtgccaacatgttggatgaagaagccaaaaagaaattgaaagctacagaacttcaatgcaagaaaaaccgggtgaaaatgtgggcaaactacgtccctccacctagcaactccaaggcaattcatgaccagaattttaccggaaaggtaatatttgcttgcacacatttcttggtaaatatatttccttccgcacatttcaccagttcttagttcttactagtttgtactctcttcaggtagtggaagttgtgagcggggactgcttagtagttgctgatgattctatcccattcgggagcccaatggcggagcgcagagtttgtctttccagtatcaggtctcctaaaatgggtaacccacgcagagaggagaaacctgccccttatgcgcgcgaagccaaggagtttctgagacaaaagcttatcggaatggaggtatctattgcgttgtgccttcttacttaaatcatctcggtgtgccacacaggtcacgatcactgacatccattttcccggttcaggttattgttcaaatggaatactcaaggaagattagcccaggagatggtgttactacttctggagctggtgatagggtcatggatttcggctcagtgttccttccatctcctaccaagggtgatacagctgtagcagctgcagcaactcctggaacgaatattgctgaactcattatttcccgtggcttagggactgtggttcgacatcgtgactttgaagagaggtcgaaccattatgacgctctcctggctgctgaagctcgtgctattgctgggaagaagaatatccattctgcaaaggattctccagccctacacattgcagacctgactgtggcctcggccaagaaggctaaagatttcctgccatccctgcagagaatcaaccagatatctgccgttgtggaatatgtgctaagtggacatcggttcaagctatacattccaaaagaatcgtgcagcattgcctttgcattctctggtgtcagatgtcctggccgtggcgaaccctattcggaagaagctattgctttaatgagacgtaagatcatgcagagagatgtcgaggtaatatggacatattacgccaaagatacatctcaatttttctttcttctcttttcttttctatgaaacttacatagtttcttataatcacatagattgtagttgaaaatgtggatagaaccggtactttcttgggatcaatgtgggagaaaaactcaaagacgaacgcaggaacatatcttcttgaagctggcctggcaaaaatgcagactggctttggtgcagacaggattcccgaagctcatattcttgaaatggcagaacgatctgctaaaaatcagaaactgaaggtaaacatcaatacatgatatattttactaaagaaatgcatcttgttaaaaaaactgtacttgctaaaccgcatgatgtcacagatttgggaaaactatgttgaaggagaggaagtagtaaacggtagttctaaagtagaaaccaggcagaaggaaacactaaaggtgaatttagccgtattattcgttctacaagtcattgaccggaatgtctcctttgtcttcgtctaaactaaaaccaaaacctcaattcactcttaattgcttaacacttcaggttgttgttacggaagtacttggaggcggtcgtttctatgttcagacggttggcgatcaaaaagtagcttcgattcaaaaccagcttgcagctctgagtcttaaagacgctcccattattggatcgtttaatcctaagaagggtgacatcgtccttgcacaatttagcctcgataactcctggaaccgcgcaatggtaaattataaagtttctaaatatgccaaccatgatttcttctttttttactatcacttatggttgtttattgtatttcgtatctgtgttaagattgttaatggacctcgaggagcagttcaatctccagaggaggaatttgaagtgttctacatcgattatggaaaccaagaaatagttccgtacagtgcaatacgccctgtggacccttcagtatcctcagcaccagggctagcacagctctgcagacttgcctacataaaagttccaggcaaggaagaggactttggtcgtgacgccggagagtatttgcataccgtaacactcgaaagtggtaaagagttcagggcagtggtagaggaaagagatacttcaggaggcgagt

SEQ ID NO: 382 - DNA, 2267 bp, Arabidopsis thaliana landsberg
  unsure (1)..(2267): unsure at all n locations
atatgaaagaccacgtattttgctctaaaacaacacattttatttgcttgaatgttgagttgtttcattatatcattggtgaagtctaaatgttgatttgattgccaagaagatcgatcaaataatggaagaagtgaagaagcatgtgatcggctggctaacgataatataaaaaggccaagtagagatttaataataattaaaagacaaggccctttaagtatgtgatgtcagataaagtgatctctcattaggttttatagaaaaatcactcattgaatctattttattattattaattttgttataatgttgaattgacacataatcgaggcttgtaaagatcttgtgcaattagggaatttacttcatccgtatccaaatgataatgatgtatagatttttttgtcaatggataatgtatattattatccattcttcaatcttaaatatttttggatattttcgatcatgaacataaaaatctttaaaatacattgctattgtatctaacacaatttagagatgattaaaaatatgttaattttttgttcttcttgttttctattcaaatatgaaaacaacgatttttcaataataaatattaattttcatgtcagagaatacagaaatctttattttgtgatataattaaaaaaaaaatcataaattgagttggcaaaactaggacaacttgggacagaaaacatgtatttaaaagcccatattaggcccatataaacgacaactttgtaataggcctgacagtataagacgacaaaaaggtttcttgcggtcaacgaaaaaagtcaacaaaacatcatagttcttttcattcacagaatttattaaagtcaaaagatacatcatgaaacaaaaacaagatttatacaactgattttacttcttcaccgaagaacaaaacaaaaaagtgaagttggcaactttacagtaaactcaaggtttgatgtttttggtcatcttccaccagataattcaatggcatcttggttatgcatagaatcttcaccccaatcaaatctcctctgcaaccgttcaaactcatgacgtctcgtgacttccacgttttgccactcttcccatctctccgcaagcccttctccttctaacatcctcacaacttcagacatcactggtcggtcttctggtgaaccttgtgtacaaagcaaagccacttgtatcatcatctctacttcttcttttatatactctccatccaaattcttatctacgattgctcctaatctcttctctctttccagtttcttcacctgtccaaaacaaaaaaaagatccaaaagattatggtcaataaagcttgagagaagctactttgaggtaggattatttgattatacatacgtggtcaagtaacaagacatcatcttcttcctccaaacgtgaaaagtctattgcgcgttgtcctgtaacaagctcaagaagcataattccatacccgaaaacatcggttctctctgatgatttccctgttgataaatattctggtgcaatgtgacccattgttcctcgaacttgagtagtcacattagtccttctaacatctactagcttggctaaaccaaaatcaccaaccactgcttcaaaatcttcatctagtaacacattagctgctttcacatcacgatgtatgatcttcggattgcaatgttcatgaagatactcaaaaccacgcgctgctcctaaggcaatccgtttcctcgtctcccaatctagaaccgggtcgcctgctttgatctctctcagacgatgtgcaagacttagattctgcatgaagggataaaccaaaaggcgttctgtttgtgtggtgcagaacccgataagacggagtagattcctatgaacagctacacttatcatctctacttccctttggaaagnnnnnnnnnnnnnnnnnnnnnnnnnnnnnnnnnntctcttcacagcaactttggtgttatccgaaagcactcctttgtaaactttcccaaagcctccttgaccaagtacattcttttcgctgaagttatctgtcgctaactggagctctctccatgcaaaccttttcaactgtccaaatgcaattctcctgtccacttcacctgaaaaatagtaaagttccacaaatctgcatatcaatacatcataacataccgaaatacgaaatacgaaagaaaggtttccctgtagggtatattacagacctgcaacatccacaaacacatcacgtctatatcctttatgcctatc

SEQ ID NO: 383 - DNA, 7264 bp, Arabidopsis thaliana landsberg
  unsure (1)..(7264): unsure at all n locations
gggtgccggagcaagtgggttttttaggcctacttatgtgctgaatgtgaagttcatttcaattccccttaaacactaacatgtcgatgcaggtatagggggtgtcaatcgagtccacagttattgctagcaatcaaggtgtgtacagaagcaactaagtcaagcctgattataatgatggtgaatttctagtaacaatcctaggtgaggattcaaacaacaaaaataagaacattaagagccctactcgatcattgggtcgaatagaaccaacaagcagaactaaaatgtaatcaacaggggatataaataacaggtaaataaaagtgcaatcaacagggaatacaaataaatctaatagaagttctaaggatggattcattgataagggaaactctagggttcatcaggtggctaacaggcgaaaggcagatacccttgacgatagattcaaaaattgggtcaatcaattctcgtgacagagacccccataactcgacgacttcctaatcttaactctcgttgatgaaacataacagagcagggtttaagcaacaatctaccaaagtcaataaacagtctaaacatccaatctcttgggctagaatctacaaatatttggaattcgtagatcagacatccatttgaacgtcttttggacgcttgatacctatggtcgaattcccacattagccaccgaaaactgcataggggcctacaaatccagaaggaatctaacctaatcttaaccacctgactaatatagagattaccctaatctaatccatcctcaagaaccctaatcactactcaagcaacataactaagaacacaaacctagaaattactgaaatcataccaaaatgtagatctaaacaaactaaacaacttttctcaaaaaaaactaaatgcaaaaacaaaatagattaagagtaattaagttttgaagattcaagaacacaaagaaaaactaaagggtaaaagctagattctttggaaaaattccaaagtgatctatttatagtaaaatgttgaaaaccctagattcactagaagacaagagacttgaggcggtttgggcgagtgctcgatcttggggatcaagtaaagggtgctgcaaagtctgcgcctttgtgtccatgctccgagtgatcaattggtcgagtagatgcttcttcctctcctatctgtatgctcagatgtctggttgagtggggaatgaggagtatccgaagatgctttgatagatcaacaagtcttgtagagttggtcgcccttggtcgagtaaatgggtcgagtagaggatcgagtaagaggggcgagtagaccgatcttctgcttcatctaaggctgccttgatcgagcaagagggtcgagtgaattgctgcctcctctatggctgcctggatcgagtgaatggatcgagtagaatgctctactgcttccctcctggttggatagagtagagggtcgagtaaagtccttttaagctccttctgcacctgaaaacacaccaaaacatgcaatgtgtatgcaagatgatcctaaatggctaagtgtgcaaaataagctaaaatggtgcaaaatgatatgatacaatgagcaaatgcaaagctaaatgatgataaatacatacctaaaatgagtaaaatacagtgttatcaactcccccaaacttatctcttgcttgccctcaagcaaacaaaaaatcttaagttgaaggagaggtttgaaggtggggattcaaaaatcgaagcatgtatatagaacgggtaagctcaatgtccaggtagctaattctaggttgcaagatgatagacccttacttaaaaactttagccatattcgtcacaatgcaacctaacaacttgccttaatctattcaagcattcacatcaaccaataccctttaacattcatttagcacgaacagtggatcaagcaatgcaatggttttgaactcacttggtttcgggcttaggctaagagacaaaaatggtccctctcatcattggtcgagtaacaaagactctcagagaaaagattgagctttagcagaatgctaaaggtaaaagccaatggacacatacaagaacagactcccatctacccaatgatatagtatgatagctcagaagatgatccctgtcccatagatgtcctaactttaccatttttcccattctttctctcttttggttcaagttctaaagggttcttttttgaaacgatttaaaagtctagcgggtttggttttttaaactttgacaaacttaaggcttctcttctaatcttagcatagagggtgttttacccttttctttgaatcacaatgcctaacttctttgaattccaaaccctttactagactaacacttttgtatccccctttagaactctaaactcttactctcttttttttcttttcttttcattctcattctcatttccattcaatccataaacaatccctaccctaaatacaagtctccacctagtcctagctaacccaaaaagcgtgggctaggtctacatgaaagattgctcttgtcggcccatacctaacacgttatcttgtcggctcatacctaacacgttataccaagctcaatcggaaaagacctcacaatcacacaaaaatgatctttggcttgaaataaggttagggtcagggtatgggaaactgctctaaaaatgagagtcagctacttgtattaacagagggtggtgaagtgaataagataatccaagtatgtatatggtagccatgagttcacaaacaatgcatagacttgataatttcaaattcaattcaggttctaatagatagggaatggcatcagataagcgagtttcgaatcaaagaagtatagtcaagttgtaaattcaaagcagggtgcagtcttacttcagagatacaatcggttatgcaacaaagaactaannnnnnnnnnnnnnnnnttacttcattgaatcaaaacatgcttaatggtttgaaatcatcattctcccctatgcaaatgagcaatcctaaatgaaaaccttctatatacaatcctaaaatgaaatgcaatctacatgacactctgtttttgtgaaatcatttttctgaaaattttttaaatttttatggtttttttctatgcctaagatgatgcgaaatttgaaataagaaaagagaacacaatgttaaacatgtcttgaatcctcccccaaacttaaattatacagtcctttgtgtaataaaaatctgagaaagaattcaagaccaaaacacaaaacacacaaagaaaataaaaagatgatgttatatacaatggttgaggtagtgttacctcaccggtcaggtgaagtagatggaaacgtaatcgtccatactctcttgagtataagcaggggctgaagttgaggcgggagggttttgctcgttctgtccggtcgagtagttggtcgagcgtgtggaagctcgtctctgcctactccttggctctctcaactcagagatcgcttcccgaggctcaaaagatgaagctcggggttgatcaatcctttcagccctccttgcagctgagcttgtggaaccgcttcttcttacttcgggggtcggagatggtggccttggcttgctctggaagtccttgatttgagcagccatactcttcagcgacttattcattgttctcatcttcttcttgaaaccctttactgttttgctgtgaaggttcccaagctcttcaagcacaccgagcttcttgtgaacttcagctatctcatctcctccttgatccgcattttctctttggtgagcttgctcgaattcgttcgcctcttgctccggttgctcgctttgttgctcaaactcggtttgctgctcatagtcatcttgagtgaaatactcctgttgctcatattcagcttgactatattccggttcatcttctcgagctcctccaatgttgatgttcaaggcagagggagatgacatgaaattgatgttgcgccttgtcttcaccggttctcgtatgggtagggagtaacagagaaggaccctgctccgtatggttgaacttgaagaggtagcgatccgctggagttgttttctcaagaaaatcattccccttgtgatagtctaggtcaatgaacttaggcaacacgtcaggggttccgaattccgtacccacagctcctagtattggcgttaagataccaccaacacaaagactttcgcgaatttccgagcgatggatggtggcagcatactctttgtagctcaataggtgatccaagagaacaacactcagcgaagtgtctgctctatcaccccccatctttctcccatcttttgtctctctcaaaatgaagaccaaagattggtctatcatgcatagctcctcttcaccaacaaatccggtggcgttgtttggaaagagggtgttggcgatgcattggtggaggtatctaatcacagaattttggattgaagaactcttgctcttggttggcgagaagggcttcagaccggcgattgtttttcaaaaagattggccaattccatcaagtattccacattaacacaaatactaagctcttgcatcgtttccttatgagggtatctagttccctcaaacttcaactacttcaaatattgatagtactagcttggggttggctctctcttcctccttggccggnttnttctcccaacaggtgctggtgtatcatccccgatgatctcaacctcttcctcagaaaccgcttcttaaagggtgcctcttcatggtgttcttcttcagcctcaacgaccctatttcgccgagctacttcttctgtttgcatggctgagcggcttgagcttccaccttgaatcaagcttgatctttgagcacggcgagcttggcgaatttggggttcagtcatgccactcatgtcaaacccctcaacctcttcattatcaacggaggatcttctagctcgagatgaactttttcttcttgaatccataaagattggtggtgagcttcaacagggcaaacaagaacaactctccaagaggtatcaaagcggaagggaatcagtttctttggtgacgaaattttgagcttgaaaccgattgaatgtttgaggatagacttgggagtgatcgagtaactttttggtgaagtattggtgaaggggaacggattcttaaagagtgatagggagtgtttggggaagggttttgaatgaagacttcaaagctttgtgagagaatttcgaaaacgagatgatgaaagagagagtttcaaggagggtttgtggaattcaatgggtggaggagacaggtctttggtttgtttttggaagagatagaaaagttgattgtaaatggtgaggggcatgggtaattgctttgtccatcgagtaaaagagtgttgggggaacaagtggggtcacgcaagttatgccatggtcttcaaataatgagagctcgagtaaaggatcgagcatcctcttaaagtgcgaaaaatttgatccaacgacggggaacttctcattcttgcttactcgatcaaacgggccaaaattaacttctgaaagtcacgatcaaacggcggtgatgctcctctcatttggtcatccaaatcaatggctcaaaatactcctcctcattttactcgatcaacggttgagatctttcttgacttggtttgaaattactcgaacgttgactcccttagggtcactaaaacaaacttgaaacacttaaacaaaaacatcaaaaataacaagaaaaatagaaagttatttacatggatagacatgggacttcctcccaagtgagtttgttttaagtcactaagcttgactcttacaaagcttagtcagaaaaaaggttgaagagaggaacagagaagtcctcatcttcagtggttgaattttcagtgtctgaatcatactttgcatcctttcttgacatatggtaggatgagtactcatttgatttttcttcaaaataagcttctttttgatcagcagagtagtcttcttcttttgaaccaggctcctttaaccaatcctcaagttcaaaactggggtagcctttaaccatttcttgaagttccaagattgtatggttcagtccttccatcttgtaagttagctccccaatggtatcctcttgagctttgtattctatcctgagttcaagaagttctttagtaacagaatcaagtgtcaagtgttcttttcagcagaggggttggtaggttgtttaggcactcatggagaataagtcggaatagggactttctcctcactcaacaacttgctctctaggattctttcctctaagtgaactcctttctgatcttctcgtgcaaaccattctgttgtgaaatcttcgtcctccttgatagctagtgctatttccatcttctctggatcaatactatttgaaaacttattaactcttctttcaaacatccataattgatctttcagcttcatcacccttgaagataatccctatatgactctactttgccatttaaatttttttctcatctcataccagtcatcttctgtaggatcttcagtctgagctaacccttctattgctcttttcttgtggtcaaaagttctcttcaacttgctgagttgagaagtacagttaacttttggtggggttccagcttctgtttcttcatcaacatccatgtcctgaatcccaaaactctaacctcttgttgttgatttctctgaagcttctctgatgtcaaacttcatcttgatgcctttttcaaggttcagattaatttttccctacttaacatctatgactgctccagctgaagctaagaaaggtcttcctaagatcagaggatccctagattcttcatccgtcgcaagcacaacaaaatcagtaggtatctcaacatttccaatcttgacaggcagattttctattagatcatgaggatgtgcaacagaaccatcagctaagagtaaagctaagttgcagaacttgtattccatgatccctagccttttagctgtagagagaggcataaggctaacatatgctccaaaatcacaaaggcacctattgaatgtcaatggtcctagagagcatgatagagtgaacgaaccgggatcatcaagcttttcttggatgactttcttcttgtatgtttcttgggtggaggccctcgtaatcatctattgattctgatccttcttaaaaatttcaattttgagattttttccaaaatggtgagtattcagc

SEQ ID NO: 384 - DNA, 1883 bp, Arabidopsis thaliana landsberg
tagaaactatccttatacttccagctcttgtcctctacaactcgcatctcatcacccaccttggctcttactctttctctggctccagaaatctcctcaacttctctttcactattcctttgctttttccaaaacaactcacctgctttcccacttgccctcacttaagttacaatccctcgttactgagctcggccataattcttcaacactttaaaatcttggttacgatcccccacgaccatccattctcgatccaatccaacataaactgcaacaacaacaacaagggtaaaacctaacccattacccactaacccgggacataccggtctacctagttgcttttgagactcatttactcgataaaatcttaagaaaatgtgtgtccggttagcatcctgaaccatgctcttaaaccaaaaattgcaacgcccttgaatcgctctatggccggacaagacaagggcaacccggaaatgctacgatgatagctcacacagacaacccaattgaggttccaaatgaaccatccctcacgaacgcggtttaggcttttcaacccttgccatgatcatgagttttgtttgtccggacaagactaatatcgaatgatacacactctttatagggaaaaaataatttataacatataaatcttcttaccaccaagtatccaaaacgttttaacaatgggcccttgagcatacacgctcaaatccaacaaaaaaatcaaaatcattaagttttgcaaaaagcaaccaactctataccggctttctacgtccagagcatccctctaatggttcccactaaggtttcctgtaaaacaaattggagtcataagtaacggttcactacgaaggttagacataccacaatcttgatacgcttatggtctctgcctcctaccacgagcaccacacatcaagacccatggttactcaaacacatagaatcatcaatatccttgctcaacacaacctcccaaccataagccttaagcataagaatctaagagatctcatatgcggcttagtaccatcattaacattgttggagctggattcccctccaggaatccacctacgaaaataccaagccaacccacaaagcccaccaagcccaccaagtagagaacctacgcaactgaagagcacatacgcgaatgggtatttgggcctgctaagcccggttacctgatgaagggagataagcgaataacaacctaggaactaacaaggagatatacgcggaccggacctaatatctcagaactgacctgccgaatatgcaggaggatctccgcagatcccggacggagctaccacgtgcgtagacctatataggggagcaaggacgacttggaagagacattcaatccagctttacattcacacatacttttacacttgtaatctcctttcacattgtaaaagctttgtcacaatcaatacaaaaagtccattcgttcttagccctcatttggcgtcgtctgtggggacggaaatagatcattccaacaccaaaacttacacatcaattttgaacactgatcatggatcccaattcatccaattcaacgagatatggcttaccagttcagatcccaaacgataacgtcacggacgggcacatcccaacatatctccctctcggaacccaggttgatgctctccatgacgttgatgctgagacctcttcacaacacctcgaactctactggatctgaccaaatcctccccccccccgcaaacaagggatggagagcaaaatatcacgatacagcctcctaacgtagataacccggccaacccgtctaatcaggtccctccgagacttgccaccgacctggccgagctccatgcaatgatcctgaacgc

SEQ ID NO: 385 - DNA, 8808 bp, Arabidopsis thaliana landsberg
attttcctgtgaaagtgaatatgttggtgaagaagaagattttggtgttgtatgtctctgtttttagtaatagagatggattttgagaattttcattgaacctaacgagggtcatatatagtaatggaggtggagaatcacaagggtgcagatttagcaagtttttaattgaaaatcttgaattgccttatatgggcgttgaatagtttctaattgtgtgtattcaaacatccatgaatatttaaattttcatttttcttttttctattgaatagtttctaattgtgtattcaaaacatacatgaatctttaacaattcatattttttccctttatttcttaagaacatagacaaaagatgggattcattaccttgtaaagaattaaaaatggtattcataattggtctttcttttttttttttttttttttatgtaattcaaaatttagaagtttattttatattatggtcgttattctccaaagtgattttttttttcttctttgtagacctctcgttgattaataagttatcgaccatgttatgtagttcaaaagtttttgcaaatggtgtcgttgaattaaaataaaaagttatggaccgtttcaaacgtttttgtttgcgaatgcccactgaggacaggagtccaaaggtttgcgagtcactcgaatgacttatgagttcagtcacattcaacctaaccatgtttttttaattagaaacctaaaacaagagcgtcgaccataagtatagctgtcaaatggtccgtccaaggaccattgggcgtgtccgtacggacagttttttttatgagccaagttggacggtccatagtggacaatggtctgaaaaatgtccatgcccaataaagaccatgtccatatgggcaagcccatggttagcccattttattattgataaatcaaaaatcatgattttaaagaattgtgtttttgcattttgcatttttccgacaaaacggtaaaattgtgtttttcttaccaatacaataacatcacgatattggcggaaaaattatgaaattgttttttccagccaaaacggtagaatcgtaaaattgttttttcccgccaaaacggagaattgtgttttctcaccaaaactttaaaattgtgtttttcgccaatataataaaatcacgattttggcagaaaaattgcgttttcccgccaaaaccgtaaaatcggagaattgcgttttcccgtcgaaaccgtaaaattgtgttctcgccaaaataataaaatcgcgttttggaggaaatttgcggaattacgtttttccgtcaaaatcgtaaaatcggagaattgtatttttcccgtcaaaaccgtaaaattgaaaaattgtgttgtggaatactatctttccttcaaaaccgtaaataatttaataagaaataatttattaaaatttaaaattttcataaaaatagaaatttataaatgtaaaatatagaatttgaaaattatttagttgtaattgtaattaaaattataaaaatatgattaaaatgaagacatgtctattgactcaattcatgcccatgagcagcccattgtccatatggtcaagcccatattatccgcggacaaatctggtcatatgcccaattggaccatttgttttatggtctggaatataacccgtccatatgcatttggactgggcaagcccatgggcggcctgtccaattgacaactctaaccataagacctacaaatgctttcaagactccgaactacattatcaaaagtaaagtctttgacaatttgcataccaaacacacccaaataattgcatgaaaaattccgtgcaattaaatttgaacaagagaataattatgaccaagactttggattccttatcaccaaaactctcaacaatgcaacatcaaaatccgattgaagaagtcacaccaaaagtgaaagacaaaaaagttaataacatataaggatggtttgagatatattttagttattttgaagaacaaaaacaaacttgtttggactttgatgtggtacgatcaaatcatttggtattatctctgttcttggaaccaaactattttgtgtgaacaccgaattaggtctaagtatgttcttgcacattagtaaatagtaagtgactgatccatcaatatcataaagcttcttaaatatttcacacacatacaaagtaatttacaagatatgaaatctgcatcacatttccaagatgcaacaaaccggatacacacaactcgatcacaaattaaactcactttccggggacgaagttggtagcgaaggcccatgcattgttgttgactggatcagccaagtggtccgcgaggttctccaacggtccctttccggtgacaatggcctgaacgaagaatccaaacatagagaacatagccaaccttccgttcttgagctccttcaccttcaactccgcgaaagcctcggggtcagtagcgaggcccaatgggtcgaagctcccacctgggtaaagcaagtcctctgattctcccaatggaccatctccggcgactctgtagccctcaacagctcccatgaggataacttgagtagcccaaatggctaagatgctctgagcgtggaccaagctcgggttgcccaagtagtccaatcctccgtcgctgaagatctgtgaaccagccttgaaccaaaccgcttctccgaacttcactccgttcctagccaatagctcagggaaaacgcagcctagggctccgagcatggcccatctgctgtggataacttctagctcacggttcctagcgaaggtctcgggatcggcggatagaccagcggtgtcccatccgtagtcaccggggaactcaccggtaaggtagctcgggggctcgccggagaatggacccaagtacttgactcggtcagatccgtaccatgggctgcctgatggaccctttggcttggcgacagtcttcctcatggtcacacggccgcttccgaggacatctgatgcggcaggcttcacagcctttccggcgaaggcaggggaggacaaagccatggttgaggaagccattataatctttgtttttgtgttttcttttttttggttgtgactggtgagagtgattgaaaatggttggggtatacgtccactttatagcaatgttaagagtaaggtttgttatctgtgaagtatctgtatctgtttagtgattggcttatgagattttgggattgtcgttatcttgtcctatgtgtcactctctagtccataagcttttgctagattctttagctgcaacgaaaacacttgtcatttgtacacaaagaaactttggggaaattttcaaagataaatgcttgaattattggaaagaaatatttgaaattattccaatctatttttttctttttccttgttttctttaattccaatccagttcatgctctcaataatattttcttttttttcttatcaagtttgtttcgcacgccaagctacaaagtttttaagtgaaactagaaaaactcaccaaacaaatatatatctatgttatgtaaaacaatgcagttagatgaaacaaaaagtgattcgaagttctgacgatcataattaataatataaaaccgtcgacaattatattaactgatacctttgattgattttgttgaatgttttcggcaacaaatatgactggtaagtttttcttgccaatacgaattagaaaacatgtctttgaagatgaactgtattttttttttttactttgttgtcattttaatgtactttcttatcaggattaaatcttctgtaatttagagtagtttttttaacaagataattaacaaacttagagtaatgaaaattgagatgttcagttttcactcatatttcacattttggtgaaagagtgggtagtatgcaacgttctaagtatgtttggactttgtatcatgttgttttgattctttgacgacatgtctatttgggaaacaccaatgacgtgtaccttgagactgatacgattcaaagggatagaaacacgtcagatttacaagtggcacgtcttcaatggacaatgggtattccaatatgctaagatgctacgagatatctaatttatctaaacacaactcaattccaaaccaaaaatctgatgccagctcggcaagacaaaaaatctaagctcaaaaatgtcaacaaccaatagaaatcaaggcattgacgatatcacgagataagcaaattaaatcctcaacttttgaaattcatatttacgttataaatacccaaaaacctcaccgtaacctaactatccaatttcatcacatcttattaactaaagagccttttacttgcgccacactctcaccgcaatggccgcctcgacaatggctctctcctctcctgctttgaccggaaaggccgttaagctatccccggcggcctccgaagtatttggaaccggccgaatcaccatgcgcaaagcctccaaacccaccggtccatccggcagcccatggtacggatccgaccgagtcaagtacttgggtccattctccggtgagcctccgagctacctcactggagagttccccggtgactacggatgggacaccgctggtctatccgccgacccagagaccttcgccaggaaccgtgagctagaagttatccacagcagatgggccatgctcggagccctaggctgcgttttccctgagctattggctaggaacggagtgaagttcggagaagcggtttggttcaaggccggttcacagatcttcagcgacggaggattggactacttgggcaacccgagcttggtccacgctcagagcatcttagccatttgggctactcaagttatcctcatgggagctgttgaaggctacagagtcgccggagatggtccattgggagaagcagaggacttgctttaccccggtggcagcttcgacccattgggtttggctaccgacccagaggcattcgctgagttgaaggtgaaggagctcaagaacggaagattggctatgttctctatgtttggattcttcgttcaagccatcgtcactggtaagggaccgatagagaaccttgctgaccatttggccgatccagttaacaacaacgcatgggccttcgccaccaactttgttcccggaaagtgagccaagatttatctgcattttgcttcagtctttgcttcctgagtgtgagaggagaaagagagcttgattagatgtaaaatttgcaagactatgtattttttttcattaatcaaataactcgtttttctctcaaattatctggcaattaccaaattggattcgttttatgtccttcggatcactcaattgcagagtttattaccacaattgaacaacttatacatgtcaaagttaagttaatggtattggagaatcaaaaattcattgattttatccgtacaaatcaaacacatttgtttaaaaattcactttgaccaaaaatagatgacgttttccactagaaaatatactaacaaagcaaaaccaaaaactgatgaataatatattcttctacacactagtacattgtaaagatctggttatttttttcttcctctggtgtaaaatcttaatcagttactccttctctatcgcttaactgaagagtcatcttaatattcattgaagccaactctgcagccaagtacctgaacacatagggcattgcaactgtttccatgcctttacttgtcttgcaagaatagcaagttaccttctttggagttctaccaggaggtaactttccaatttcttgaataagcttcttctgttgaacgttcacaacagatgatgtgagcaagcttccacatagcgaacacacatctgcaatgtggtgatctgaagatgtatgaagcctgtcgtgtaatagataggaggctccatgagcaagtagtgagtctcgctccatttcaccaaaccgaatcccaccacctcgttttcttccctttattggctgatgagttagctgatccacttgtcccgtagatctaacctgtaagccagagtattatgattcagatatagcacgaagatgagacaagtgccagttggagactatatgtcaggatgataaaagaaatgaagccagaagggtcgaaaaacctggaatttgtctgagaccatgtgacgcagtctctggtagtaaacaggccccataaatatctcacacttcagttctactcctaaatacccactatacaatgtctcggtaccataatggttgaaccctttttcctttaacatggagccaagatcatcaacaagcaaactggacttgctctcctcttctccgtttgttttttttactgcatcacgaaacggtgttgcatctacaaactttccatgcaaactacctccctgtaaaagccgaggatataagcattacatatactttacttaccagctaaaaataaaaatgggaagggttcaacaacacatgaaaagaagatgcacagcatcagcgtcgatggaacctaagaatcagacaaatttctaaggagaaaaattctgaaggataccttagcagcaatagattccaaaagcatagcaattgtcattcttgatgggaaagcatgcgggttaatgatgagatctggacgcattccagtaactccattaaatggcatgtcaatatcaggccacaattgagaacaaacacccttttgcccatgtctactgctgaacttgtcaccgattatggggtatctggcatgccggaatcgaatattcgcatgccaagtaactcgaaaattagattttaagccaattggaatctgtctatgcgatagttggagctaaacctcaccctttgaggatgtttcttgcttttcatgtcgacagagacaaagtcaactatgacagggtcggtacctttacgcttcatgtgccttgttttgttagttgcctcatcatagatactacaatgcggctcatctggatataatttctgcgttaaacccaacaaattagtgagtttctatgaaagttgacaaggaaactaaaattaaatatttaacttacagtacatagagaggatagaaagcagttatttacctgtccaacagatggtaacccatcagcatcgatacgaaaatgttctgctttgttagtactcctcctaaaacttttagaaccactatcaaatcggctattctgatctgaaagatcaatattttctgtctgggagatcatataaagacaagggttaggaaattaaaaaaaataagaaatttgggggatttgtataatgatactaaatctctcgctgcaactacaagatttttttatggggttcataaaggaacaagtgtaggggacattgacctaggggacattgaccaggattatgataaagctccagacccaaaggaacttattacatcaagcttaagcactatattcagctaatcagcaggactcttaataaagaaatgagaatgggaactcgaacctggtatatttgcccatggcacattccccgctccacagatgatttgttcaaaatcatcgcgtcttccatatcaaatctgtgagacaggtaggtggataaaagaacaagagaagaaacattaacgaaaaaagcttatcactgacaagatcttgtacgcaaaagcagtttcttaccctgtatgtgcgaggacagcaacaattgcattagtccctgtaggattctcatcaatactgtaagtggtgtatgtttttgtgcggaccacaggggattgaggagtctgtagcatacaaaaagaatttaataatgggaccaaaagagacgaaatgatcaactgaaaattgtaccatgtactttcagctttctaagagtaagataggaaatgacctgcaggtggtaaatcttctggtcggcacgaaattggagtgcttgagtagagtacgccatggtttgtttcgccatctgtataactgaaaatttaaaaaacttccagcagcataatcataaaaaatttgcatcgaatttctagtaatacctgacactgatacatgttacggggactttggttatgatctgaccaaggtgtaagattagcaaccacacttatcatcccggttggatgaatttcctcgtgagttgctagggaagagttattccttcctccatttccaccatcaggacagcttatttccataaaaacctggtttggtagaatctttttcttataatttgattgtataccaggaaaggtggatatgaagataatattgataggatttgctacctgttcgaatggtccaatcagttcaatattatcagaaggtatagatatatttttaacaggcctaatgaatcttgcgggacatgatgccaaatacaatccagggtaagatccacccatgcttgtaggtacgtatcccacttcgaggtcttcaggaatctgtaaagaagcattcgcatatatagttattttctaatgaaataggttgccgtcaccaaatactgttaagaagtaaatacgccttaccactgaaggagcctccactttcagtctccgtatataagagacaactttcgtgactaggttagaagatagcgtgcctacaacttgaccatctaaaagaacatggatgacttttggtggtccagctcgtactagctttggcaatgaaggtaccatacccgccccagtaagaacatcaacaactgactttcttattttcagaaaatctctgatgtttcccttggaatcgaactgagaaaagatacctgaaaacacaatgaccaatcagaacacaatagca

SEQ ID NO: 386 - DNA, 2141 bp, Arabidopsis thaliana landsberg
cgatttatcaaaacaatgacgaatataagcgtccattttttaccctcaataaaccctaacactaatatctaattaacctaatataaatataaaaatatggtgccgcttttgtcaattctatttgcacgtaaaaagaaaaatcgtctggccagtcccttttttgcaaagaggaagccaataaatccttctaaaaaacagaaataatttttgttttaattttaattcgaaatatatggatattacaagtatagccccatccgaacctattaattaccagaaaaacaatggttcgtttccgaaccaaagcacccgaaccacctttactctttatttgaaaatcaaataacttaaaccctaatatttccagagagaagcgccggcgaagaaggagaaagagaaggtgccggcgaagacagagaaagttaaggcgccggcgaagaaagtgaaggagaaggtgccggcgaagaaagtgaaggttaaggcgccgacgaagaaagataaagagaaagtgccagctgaggagcagtcgacggctcaaacgactacgacggcgatagacgctacggctccaacgacggctccaacgacgtagagcccgatgcttgatgattctacgttttatgatgctctgaagcaaattcctgctgaagaaattcaagagaatatgcaaactgatgaggtggaagatgaaaatgaaaaagaagaaccaagtgaagaagaagaatcagggagtagtagtcgaaccttgggctccgattccgattcagaggaggcagagacaaacaaagaactcgcgtgtgctaatcccgtggaagaggcggagagacaagatgacggcctagccgttatcgaggaggaggaggagaggagctccgcgagcgacgatgacgtcaatgtggaaaagtccgtggaggatgagggacacgaggacgagagagacgaggacgtgatagtggaaaaatccgtggaggagaggaccatagacgaggacatcgcaaatgtggtaagtattccatttcgtaataccgatctaattgggtaataatgcaattgtgaactgtggacagtactagtaacattgggaaatgctatgttgatatttaggcaatattggcggatgtgggtaataccttagagtagtactacaattgtgatttatcagtagttagtactagtaactttgagaaatactatatagtaaaataggagtatctgtgttatactggtaattacggggaatacttgtaggaaatacagagtaataatgtggcagtactatttacaattgagtgatatatgaatagtaggatttgtgtaatactggtaattacggggaatactttttggaaatacagagtaataatgtggtagtactatttacaattgagtgatatatgaatagtacgatttgtgtaatactggtaatttcggggaatactttttggaaatacagagtaataatgtggcagtactatttacaattgagtgatatatgaatgaatgtttgtttctttcaggatatggaggaagcgatggcaatgcagccacttggtatgtacttcccggcgttggagtataccaagaagatgaagttagcaacgagatgttatatctcggaggtgttgaagaccttcgctgacttggaacatcctctaacgaatgttgaaaataattattttatggagcatccgagtttcaagcacatctaccacctgccttccggatatacccacaaattaatggggatgtggatgctttttcttcgaacggcatctattgagaagaagaaggaggtttggttcgttgttaatggagttcccatccgctatggtattagggagcatgctttgatctctggtttcaactgcaaggcctatccagctaattatcagagtgctggtaatatgaacttcgccaacaggtacttcaaaaccggggtaattagacgtgaagacgtgaaaaccaagctaatggagatggaaccggctagatcaaaggataggttgcggatggcggtcctctattttctaacaagcatcattgtcgtgcctactaagaccggagaatgggcaagtccaattgatgatttctgtgtgaggtcaacaaaaaatcttacgttttgtaacacatttccatggggc

SEQ ID NO: 387 - DNA, 6908 bp, Arabidopsis thaliana landsberg
  unsure (1)..(6908): unsure at all n locations
gacgtctcttaccctttttcttaccgaaacgactcctactcatactattcaatttttgtactaggtcgtcgataagggccggggcctattcgatgagaggcagcggttgggcctcaagaggcaaacgctcaaggcctaaattgccggtatcgagaggaaggtgagggccatggagagagatcccttccaatgggaatggaggaactttgactgtgtggcgaagatcccgcacatgctttggatgtacctccgtgctcgaggtcaagtttctggtcccgtaaacgctccggtccaagtgattccgtctgacagcaaagaggttgacgacgaggaagaggacaacaacccttggaagcgtgtgaagaatgaacccaaagtagacgtcaagaacgagacatccacctcgaaccccaaaccggcgatgaaggggcctgttcccgagccctttctgtaaatgtcccccgaactcagatttttatttttttaatttttgtttggacttactcttgtgccatggcccattttcacttaaggaaactttccaattttccttgatttttcaaatattcgtttttgagatattctttgaatgcagggcgagtaggacgacgtgaatgttccgcgaatcactccgaccttgaatggaatcacatctttgaaagaaaacctaaagagacaattaatgccaagcttgcctgctccttcctccttcttgctatcgaacacgcgtttcaaaacataatcacccacaaagaaagggctgctttttatttttaaattgtaatatcgagctgccgcttgttgataatttgaattcagatcagggcctgatcttgcctctcgttgatggtatctagcgaatcgtccagcatcgcagaattctcttcttcgtttaaaggagcttctgttcgacgaagtcctggtacattaagctcagttgggacaactgcctccattccgtacaccaatgagaacggggtttctccggtcgagcgcctaggagttgtgcgatatgcccatagaaccggctgaagttcgtcataccagcctcctttcaaatgactcaatcgtttcttaagattgcttagaattgtcttgttcgcaccctcgacctgaccgttcccttgtggatatcgcggagtggaataactaactttaatcccccaatccgagcaaaaagcttcgaattcatgtgagataaattgtggtccgttgtccgtaactatctcgtatgggacgccgtgcctacatatgatattcttccaaatgaaagtttttaccgccgaatcttcgatgtttacatatgcttcagcttcaatccacttcgaaaagtaatcatttaggaccaagagatactgtacacctcgagttgacctgtgcaatggtccaatgatatccatcgaccatcacatgaacgggtatggggcagagatcgaagaaaataactctaaaggttgatggatgagaggtgcgtggagttggcaacgtttgcatcgctgagcatacttaacacagtccgtgatcatagtaggccaatagtatcccatcctcttaatcttgaaagccatagcccttcccgaggaatgacttctacatatgcctttatgtacttcactcataacaatctcgactccgggcccaaaaatgcaaagtaagtagggatcacttacacctcgtctatacaaagagttctttgatagccaaaatttcgcgctaatgattctcattttcctagctttccatctgttctttgggagctcacctgtaacgatgtaaagctttattggctccctccaatcagcccccccaatctttagccggaatttggtcaatttcgtgaaatactcgagcttctggttcgggatgttcatttggtgctagtatgtcctcgtcaacccacggttcggtttcagcttcgactctggcgccaggggtgatttcttctattagtttgagcccaatatcttccggcacagtaggcttaggtacaattatctcttttgactttcgccttttgacaggtggtaattcaatagcaagttcaccacgatctagggctgcagctcgggatcttgtgacgacgaatgtctctttttcatccttaatgctcctttccaaaatacactctattggaatgattcttttgacttcgggatcggatgttgatgtcagggctgcgagcgcatctgcggtagtgttttctccccgtggtatgcgaatgagttcgaatttcctaaactttttggccaagtctttgaccacctcaagatatgcctccattcgtgagtcttttgcttcataatcaccattgaattggttaacaaccagttgcgaatcacagtaggtgaccacttcatcggctccaactccttgtgccaatctgagtccaccaatgaacgctcatactctgcttcattgttagatgcagtgaatagtaaccggaatgactgctcaaggatttccgaggtgggagactctaatccattttttgatgaggatccatcaacatgtaacctccaagtctgattttctggctgctcctgccctccaagtaccggcaattctgttaaaaagtcagccaaaacttgagccttcatggcgactcggctcttgtactctatatcatactcacttaactctaccgcccacttcgccaacctcccggattggttcgggctatggagaattgttcagagcggttgatttgataacacttcgattggatgagattgaaaatacgagcgaagcttccaagctgaagttactactgcaagtgcaagcttttccatcatcgtatacatggtctccggatctgtcatggatttgcttatgtagtaaatttttttctgctctccccggtcttctcggatcaagagcccgctaactgcatggcccgagaccaagacgtatagatagagcttctcatccgcttctggtttggacaatataggtggagtggtcagatatgctttgagctgtccgaatgcttcttcgcatttctcatcccaaagaaactctttgttcccttttaaaatttgatagagaggcaatgatttatcggttaatcttgaaatgaaacaggtcaataccgcaatccgaccgcttaaccgctgtacttccttcaaatttcttggagatggcatattgagaaaggcgttaatttggtttggatttgcctcaattcctagctttgtaacaatataaccgaggaattcaccagatgggactccgaacgtacacttccccaggtttaacttcatttgatattggtcaaggatagcgaaacattcttctaaatgcttgacaccccttcctttttcaatgatttgactagcatatcatcaatatagacttccattgtctttccgaggtgctcgttgaacattttgttaaccaaaggttgataagtcgctccgcgtttctttaaccccaaaggcattaccttataacaatagatgcccctatccgtgatgaatgatgttttttcttgatcttctggattcatcatgatctggttgtatcccgaaaaggcatccatgaaagttagcaattcatttccggcagttgattccacaaggcgatctatatgtgggagtgggaaactgtcttttggacaagctttgttaagatctgtgaaatcaatgcacactctatcctttccattcttcttttttaccacaactgtatttgccacccaatccgggtactgcacttcccttatagatcctatttttaagagtttatccacttcgtcgtttaccgcttttgctcgttccactccgagtttccttcttttctgttttacaggtttgaagcttggatccacattcaactcgtgacaaattatacttgggtcaatgccgggcatatctcctgctgaccaagcaaatgactccttgttcctccataacagctcgattaaagcttcttttatttcgtaggataaggtagctccaattcaaactttccgatccggtttatatttgatataacccgattttcaccgattttatctatgttttacgtataggattttgagtttatgttatttctcgagtctttttagtgtcttttcaggtattctattaaatgggacaacattggagataaggagacattttggagcaaaagctaaggaaaaggaagctaaggacacttttggttcaggaataagcgaggagtgtcgaccaacacactcttgatgtcgatcaacaccagtttcggccttgcaaaaaccctagccgctttcgattttccagaagctcaagtttgccccagaagatttctctatttgcattattagtccctggacgtttttagggtctatatatattgtttttaaacctaagtttcttttatcaagtcttttatcaagttctttgcaaaccctattgtaagagacataagctattcatccattgttattcagagtttcattcagatctatatacagtgaagagatcccttctttccccttctctattcactgtgttcatgctttctatctcaaatatgttgatagcttcattcaatatgtctgagtaatctgcttgttaggaatagggtttctcattagggattcatatagtttagtagattgccccctttgctaggttatctgtagaattcttcatctttaattatgcttaatgctagatctagagtaattaactagatcttgcatccagacaatagatatgcccaccataagtatatgtagttggatctattatttgatgagcctggtttttaggtgtgtaataagaatcggcctatctactaaggtgaacaaacgaactcattaagaatgcatatttaagttgataatttcttggcttctccaattattcttagctatagatatagggagttaagcggaacgccactgtaacgcccccggtccgcgctagaactcggtcagtccggcacggcccagagacgccacaatggaaatgaattcccatagagtagccgaggttcagaaacacattccgacccttagcccactcaaggttacccatttccccatttgggatccatttaggtttgccaaccctcactttaccaattgttgtgtcgactcagacaaattcttatcagtttgaaacccgtatactttaaactaaatccccatttcattatcttagagttacgaaaatacaaaaaaaaaccacaacataaacttcgtttttatggccaaggcatgaggcccaaaagtacatgatacgaaaatacatactttaagttatacaaaaggacactgaagaactactgcgggttccctagtgttcaccactccctctaatcccctctaaggttacctgcaaaacaagtagagtcatgagtaatctagcattactcaatgagcttgggttccccaaggaaacattagtctaatcaccacccataatcccacatgcataacataaataatcagagtacacagagaaggtagcaagcaacacccaagacaacaagaagataacgtttcttaaagttttaattaggacccgaatgcactgccttcctcagcacatcgtgaacacccgagttataaccacaaaggaatataaccggaaaatcaccaaagctacaccgtcgtgtaagcgacaccggcccttgggtagctaacccagtctatccgggtccttccaatccccttgtggtcactttgcatctcgtcaagcacaccccacgaaagaacggagtcacaaggcaaggacagatacattccacttaaccgtagcatgcttatgtcgttaacttggatactctccaagctccacacactacgatcttccaatcaacactatgaaacatgcggttcgttttcaacacacatgttcataaacttctctctaaaagtctcccgaatactagcgagtagtgtcttgacaacgcaaccatccctctcaagcgaatggtgctattatatcacaaccactcctataggggaaggtgctttngtttcaacaatcctaactatttcgttaacaacctctacaaactttaccacatcaaccacaaatttaagagaagggagaatcgagaacatgcaaaaaggaaaatcaaatatgcaaaacaaaaaccggaactcacaatccctgatgaatcttcctaactcgaccgatggtttctactcgggatctctctcttggactatcctaaggcttggcgatctctagctcggactctctctctctctctcgggttttaaggtttcgacaatctctctctcgggttaagggttcagacaatctctctctctctctctcggtttggacagagttttggtgcgaaagcttctaaggtttaactaaaggggggtaaggttctatttataggctcaaagtttggatgtgaggagtgggacaaaacttggtcaccaagtcggctttgggacgaaacttggtcaccaagttggctcgcccaggtggattcggctccaagttggctaaggcgtgggctcgatgttggcgtgcatggctcaggacaaaacttggtcaccaagtcggctttgcccgaatagatttggctccacgttttaagaattgggctctactctagcttccgcagattataaatactcggtccttcctttcatttcgcgcaccattctctcttcttcttctcttgcccttctttcttgcccggggtcaatgcgcggggtactacatttgccctccttataggaatttgtcctaaattccctgagtattggatggactggcttcattgtcatctccttcctcagcgtcgaacagttgaggatattttgcccggaactttttttcatcctcccatgtaattaaccgtcggttttgttttcccaaaatacttgaacttgaggaattaaccgcttcttaaactttcgaatgcgtcgttctccgatctcgagtggacctctg

SEQ ID NO: 388 - DNA, 1058 bp, Arabidopsis thaliana landsberg
  unsure (1)..(1058): unsure at all n locations
tcactgcgattcacagctggttgcaagccagtactccggagactacgaggctaaagatagtcgaatggaggcttacctggatcaggttcgggagctgacagcaaagttcgaaaagttcgagctgacgctctagccgctttagcatctacttccgaagtaaccgtcacacggataattcctgtcgaaacaatagcttagccaagtatacatctcgaggaaacgaattttgtcaccactcgagctatgcgcaggcgacttgacgaaaaagcaggcagtcccgaacctcaacaacctgacgacggggatgacagtccagaatttgtacctcccgttgccgaggacgaggtgcccataactgataatcccgaggtttctaatcagatacctcacgattggggggcagactggagagaaccaattcggaattacatcctccacggagtgcttcctcccgacaaatgggcagctcgtaaattaaaagctactaacgcgcgtttttgcatagcaaatgacatcctctacaggagacttatttcggctccggacgctatctgtatctttggcgaacaaccncgaaccgtcatcaaaaaaattcatgacgggacttgtggaaatcactccggaggtcgttctttggcgttcaaaggggagaagtacgggtatttctggccgacaatgatggcagactgtgaagcgtacgcacgacgatgtgagcaatgtcaaaaacatgcaccatacatcctgcaaccagccgaactccttacctcggtgtctgcaccttatccatacatgaagtggtcaatggatatcatcgggccgctccacgtttcaacccggggcgtgaggttcttactcgttctgaccgattacttctcaaagtgggtcaaagctgcgacttattcaaacataactcaagttcaagtccgagctttcatttggaaggaaatcatttgcaggcacggcttaccatatgagattgtaaccgataacggacctcagttcatctccaaacatttcgaatctctctgtgtacgtaggcagcccgtactttgggtctg

SEQ ID NO: 389 - DNA, 1599 bp, Arabidopsis thaliana landsberg
atcccccatcatttttcacgacatgtgattcaattagaactattgtacttggtgtgataaagtgattatatgtatcattttgaagagcaattagagcatcttcagaggtctcacgaacacctcgaggcataactttcgtacatgcccactagtcgtttgtaacggtatgtcggacacgtggataaggaatgaaacctacttgatcacaattaccagataatatgaaaggacatatttttcatagtgtctacgcggtgccacatcggtgcgacctgatggatgttttcttattcgtctatctatagttgtgtcaaaccacctgcatttgaaaaccatggcctttaacccaacagccccatgatattgaaacatcattatctcatctatcaacccataataatccgtgtcagtggttccacgaacataaacaccgtaattttgagttttcttatcttttccttggttatgcgtatgaaaacaatatcctcgtgagtggtatataggccaagatgtataattacgggttaggaccttggacaaaatccaacatccacaatgaaaattcataagattccgtggcatcgttaatctgaaattgaaccacattatagttattaattataaagaacgtaatcatatagtattaatttacaataattatttaaataattatacttacatattctttacaccattcagcaaagtagtcgtctttcgctttttccatttctttaggagaaattcttgggatttaatccgtcgtatactcttcgaacatcctgtaattgtagttagcgttagaatattatatatgcgaatattatcatactaaaaaattcataccgttcataaggttcaaaggcatcacagttaagcagcaaaaacgtttggagcattgtatagtcataatcattaaaccatccatttgtggcttttccactaacacaaccttcatagtagaacaagcttggaacatctggataaaagtatgtaaatcgaatttctccaggatttggaacatcatcatctttaatttcaggacgtccaaaataatttgcagaagtatttgctatctattcattcacacattgtgcaacaatcgaacccgcaatatgtgccttgttcttaactttcctctttaaatggtacatgtatctctcgaacggatacatccaccgatattccactagattgcctagcaaagcttcaacaaaaaagcatcatctctgcataaaatcttcgatgagatatcccgaaagaagagtgaaatatctaaaaatatatgtagttaaattaatttattgatataaatataatacaaaaaataagtacaaagtagaaaaataagaaattacctgaaatggccgtgtgaacatttttacgaagaagttctgcaaacgcacacggcagtagtcgttgcatgatgactttgcaatcatggcttttcagcccagatagcttccaatggttttcgtcaacacaacgactaaactttgacgagtacgcatctgaaaaccgtaaattatttttcatccaacggagaaatgcttttttttgtcaatcgacaatctaaatattggcactggcattgttccatct

SEQ ID NO: 390 - DNA, 2985 bp, Arabidopsis thaliana landsberg
tacattctctacatagttgaagtaatctctctaattagtgaaaattatttcgtaaaaaccacattggtttctttctaacgatcagttaaaaatgggtggctaatatttatacaaaattatctcacctgcattcatatccacttaattaattaatcatattaaagaaaataaaactcaattaattaaaagaataattacgaatttccatgcgtcacccaaaaacactcccaaaatcctcaaaattcgacaattcctctctcaagtctctctcaacaccttcctttcagtatcaaagagattctcgcttttgtctaactttatcgtctctcttcctttttgcctccgattggctgattttttctatggccgcttcttaccgaagcaccgactggtttcctcctactactactactggtaagcctcgcttgcttctctttaaaaatgataaatgttgaacctttttcgttttattttcgtgggttttattgtttcgtcactctaacgaagagattacgttgtctgttgatgaattttgcccactcttgttgtaatttctcgtaaagccttaacctttttgggattctctcacttactaggctttgttagattcttccacttcaccttgatcctatgattattctctcatgtttagctttttacttatggtggttgtgtctgtctgctttttatggattttttaggttcatttacgggcctaaatactgaccagagtgttctccaagatcaggtgagtgattagtggaattgcttgtgtcatataatgtaagctagcaccaatatgacacattgtgttatgattttacaggacatagttagcagtcgccctttttgtggacagggcacagaatcatttcacattggaggttagatctatatgatcctttcctaatcagttctattgtattttagctgtagtttagtggttacaactaatcttctgctggtttgtgacctttgttttgttttctctctggtattttggcattttcatttgcaacttgattttggtttttggagaagaaaaagctactgttgttttatgttcttaaaccaagagaactgattattctttcttataatgaagtccacctacttatgtggactattccaaattgttatctttgttttggattattctcatatgtgcactagaggaaacattgccgcatacccatgaaaatctttaccactttttttatttctgcttcgccatgtttgtcttgtgaccaaaattgtggattttattgcttcttagctgttattgtagtactgttttgaaatttccttgttgctctttaatgtcgtcgttctctcaatgaatatgcagctgatactccaaggtcgaaccactcacactcggatgttcctagctttgacaaagtctctcctgtgcgtaaatcatctaatctacgccttccacactacttgattttgatttctgatattcatgatgtgttcatttatttcctatctcttattaaattgatatagggcatgataaatgaaatgttttaccatagtaatggtgtaccatcagattttcagaggtcatctctttctaccagaaatcaatcatcactgcagcattatggcgacctctatgctgatgattcaagatatttcgttccttttcacttatcaaatcagcagtatccaacccctgaagatattcatctttctccggagtttcacatgtttcaggcgaactctagacattttgataggcatgtgaatgagagaaacagtagtgagattgataatatgatgcgcgctaggggaaattctgtcttaagagataatctcaaccccttcagtggagaaaacatgtttcctccattggcatctaccagtccatgtatgagacaccttggttcagcagaattgctggcaaatgattttaatatggtttgtttctgtaatcactacctctacctcttttaacggacaaagtacatagaatttctatgtagatctgattgatgaaatctatgcagggtccagcacatggaggtttgcatgatgcttttgaatctgctgcaaacttaagttacagagagcaagcatatgctcaatgcaaaagaagccctttctctgcttcttcttctagcccaacttgggagaatgattataacttgccaccacttgatgaagcaagaagtgaaagctacaatgacttcagccactgccctgccatgcttgatatgcttaccgagagtaacagaggtccgagagcatccaggctaaacagtaaaagtaaaatgatctcttatgatcgcgttgatcgtttttgtcagcaagaattgctctcccaattcagggacgcaaagttcttcgttattaagtcatatagcgaggataatgtccacaagagcataaagcattgtgtttgggcaagcactaaaaatggaaacaaaaagttggatgctgcctatcgtgaagcaaagaaaaaggacgtggcatgcccagtctttctcttgttttcggtaaatcgcctatttttcttcattacaaatcaaaacttgttggaagctctgagtgttcagactgataccttgcttggaagatatatacacttgcttgtttattcaaccatgaaactgcattgtcaggcctttgtcttcctagattaaccggcatcacatcaattcatctcatgctatatctgtgtgtctatacttcaatccactgagatgatactgttaatgttttttttttatcgctttggtttggatctgaaactcataatagaaaaagggctcaaaaacttgatttcaggtaaatgccagttcacagttttgtggagttgctgagatggttggaccggttgacttcaacacaagtgtagagtactggcaacaggatagatggtcagcacacttcccggtccaatggcttattgtcaaagatgttcctaacagtctctttcgtcacatcataattgaaagcaatgacgataagccggtc

SEQ ID NO: 391 - DNA, 6022 bp, Arabidopsis thaliana landsberg
aagaggtgttctaggttcaatatggtttttatacttaattttgatttttggcacttgtttttcttttattaaagaatatttttagaattatatttttatattactattaaaactttaaaggttttctttttattaagtgttacatttctaggttttgtgtaaactaattggatacataatccaaacccctaagaggtgctctaggtttaatatggtctacacttaattttgattttagacacttgttttccttttattaaaaaatattttaaaaattatattttcatattactattaaaactttaaaggttttctttttattaagtgttacatttcgagattttgtgtaaactaattggatacatcatccaaacccctaagaggtgttctaggttcaatataatttacacataatataaatttttatcacttgtttttattttattaaaaatattttaaaattatattttcatattactattaaaactttaaaggttttttttttattaagtgttaaatttttatgttttgtgtaaactaattggatacgtcatccaaacccctaagaggtgttctaggttcaatatggtttacacgtaaaataaatttttaacacttgttttttttaaaagctcatatttttgtattactaataaaactttgattatttttactaagtttaaaattttttctacacaaaatccaaatttctaagatagttctagttcaatatggttaacatacaagtgatgaaaagttaatggtttaacccacaatatttaaaagtgtcagtagaacatacacgttgatatggccgagtggtctaaggcgccagatttaggctctggtccgaaagggcgtgggttcaaatcccactgtcaacataattattattattttttttaatttatatataggcttcaaatcaaacagtgacacttttttggtacaaatcaaatagtgacttatatattagagaaattgttggaaaaaaacaaatgtgatatccattgcttttgcggaaacgttgacaaattattggcgaaatggtgacttatatatttgagcaacatacacactcgtttttatcttatttttatccaaaaaggggaaagtagatgaattatgtggattttattagtgaatatgtgatgcatttcattagtgaatttgtttgtttcgaacacctaacaatcaattatgtttgagaggatattttcagggcggtcctgaggagagcaacatgaaacatttgtatgtgaactcatagtttttttcaaaaaattacattaaaatttatttgtaaataggcccccaaaaatatttaatttgaaaaaaaccttaaattgcaaaacagtttatactccctccctctctttcatcaaaattgatgttataggtttcttttcttgttccaaaaagtttgatgttttagatcaatattattagtatttttatttgtgaccaatatagagaagagagaggcaatgtctgatattattaaacaaacaaaagaataataaaaaaataaaaaagttatttttcttaatttgtgtgaaaaacccacaacatcaaacttcatgaaacagagggagtattaatttcaaaatatataatttatggtttagatcccagattgtcatgaccgaccgttgatactttgcatagcttagaacttccatctctgcgtgtagtagagaatgactagtttggtaacctaatttacttatagatctttaaacatatagatcatttgacccaatttactgccacgcgttttaaatgtactaactactaagtatgaataaaatgatcaatttgagtcacaaaaagtatgtttattgtgatcaattgtgaaatgccaactcttttacaggtattactaggttgatgggaaatattttgctagggtccccgaccaaaccgcactaacaaaaacatgaaatttaattagaaaaaaaaaagttgcaatatttggaggacgatagttccgttgtcaaatgatgaacaacgaagaaaccgtacattgatgagataagttttatgtgaaacacatcttgccacctatatttatgtaactatgtgaaccataataatcataagctctttacaatatattttcttaggtttggttgtgaagcaaatttatggaagaaaaaaaaaatagtcgtccacatatttccaatctcttccactttgattctcttccatgcaatctttcttcgaggtttaaagcattttctatgatacaaaagtataagagatgtgtatccagttgcaaaacttatactatgaattgactatactattttgataatttctataaccataacggctgcatgaactatatacttaaaactatgactacgatagtcgcaataaatgtatcgtactatccttcgaactcttatacgatttaaaaccttagcatatcaaacatttaaatttctagatagtgatatcaaaatcctacagccgcaatttttccagaaaaaggtgataattttttttttttatcagcatattgcttcgatgcaaaatacgtggaatctatgcaaacaaatttgtttcttctgtatagttgcttattgagctgagtggttgtcagtcaccaaccctcttcagatctcaaagccacaataaaatacgttaaattaataattaccaacctcaaaactataatctatatatatatatatataatcagcattttcttcagtgtctctctactctctctcagatttgcatttgcttttttttggtttggttatggagcgcgcaaggagacttgcttacagaggaatcgtcaaacgtctcgttaacgacacaaaacgacaccgtaacgctgaaacacctcaccttgttcctcacgctccggcgaggtatgtctcttccctttcccctttcatctccacccctcgatctgtcaaccacacggcggctttcgggaggcaccagcagacgcgttccatctccgtcgatgctgttaaacccagcgatactttccctcgtcgtcacaactctgcaacaccagacgaacaaacccacatggctaaattctgtggctttgaccatatcgattcactcatcgatgctacggtgcccaaatcgattcgattagattccatgaagttctccaaattcgacgctggtttaaccgagagccaaatgattcaacacatggttgatttagcttccaagaacaaggttttcaaatccttcatcgggatgggttactacaacactcatgtccctactgtcattctccgtaacatcatggagaatccagcttggtacactcaatacactccttatcaagctgagatctctcaaggtcgtctcgaatcgctcctcaatttccagaccgtgatcacagatctcacgggtcttcctatgtccaatgcgtcgcttctggatgaaggcactgctgctgcggaggcaatggccatgtgtaacaacattcttaagggtaaaaagaagacctttgtcattgctagtaactgtcaccctcagactattgatgtttgtaagactagagctgatgggtttgatttgaaagttgtcacctctgatcttaaggatatagattacagctctggtgatgtttgtggggttcttgttcagtatcctggtactgaaggtgaagtcttggattatgctgagtttgttaagaatgctcatgctaatggtgttaaggttgtgatggctacggatttgctggctttgactgtgttgaaacctcctggagaatttggggcggatattgttgttggctctgctcaaaggtttggtgttccgatgggttatggtggtcctcatgctgcgttcttggctacttcacaagagtataagagaatgatgcctgggaggattattggtattagtgttgattcttcaggaaagcaagctctgcgtatggctatgcagactagagaacagcatattaggagggacaaagccactagcaacatctgtactgctcaagtaattacttcttagtatctgattactcatttttcacttttcactattagttcgttcagataactagatgatatgttgattcatgttgatgagtacttcatcttttcattttcttgcaggcgttgcttgccaacatggctgccatgtatgctgtttcccatggacctgcaggtctaaaatctattgcccagcgtgtccatggtctcgctggtatattttccttagggttgaacaagcttggggttgcagaagtccaagaacttcctttctttgacactgttaaaattaagtgttcggatgcacatgcaattgctgatgcagcttccaaaagtgaaattaatctgcgtgttgtggactcaaccactgtgagtctcctttgctttggcctttcaaggtttttactctcatagcatcatacagatttgaatatttggatatgattacttaattcagattactgcttcctttgacgaaacaaccaccttggatgatgtcgataaacttttcaaagtttttgcttctggcaagcctgtaagtgttgttcatacctctttttgttattgatatatcatttctaggatccttgcatgaaatttgactatctcaattcgcttcaggttccatttacggctgaatctctagcacccgaggttcagaattccattccttctagcctaacaagagagagtccttatcttacccacccaatcttcaacatgtattattctgttctttgaatcttgagtggcttattacttgtggattggcagtatctcatttttgttttccattttgataatatgattaggtaccacacagagcatgagttgcttaggtacatccacaagttacagtcaaaggatctatcactgtgccacagcatgattccgttgggatcttgtacgatgaaactaaatgcaacaactgaaatgatgccagtcacatggccaagtttcactgacattcacccttttgctcctgttgaacaagcacaaggttatcaggttagtgactttcttgattcatctgaggtttgatttagaaagttgaacaatgaactgatatcttgtccacatgtatgtaggaaatgttcgaaaatttgggtgacctcttgtgtacgatcactgggtttgactctttctcgttgcaacctaatgctggtgctgctggtgagtatgccgggcttatggttatccgcgcatatcacatggtaacatcttttatcctaaatttggatcttattctacctaacaatcttctattcaattgtattaagctgaaaagtgaatgaatgaatgcatttttcagtcaagaggagatcatcaccgtaatgtgtgtatcatacctgtctctgcacacggtacaaaccctgcaagtgctgctatgtgcgggatgaaaattattacagttggaactgatgctaagggaaacattaacattgaggaggtgagaaaagctgcagaagccaacaaagacaacttagctgctcttatggttacatacccttcaactcatggagtctatgaagagggcatcgacgagatttgcaacataatacacgaaaatggaggtcaagtgtacatggatggtgccaacatgaatgcacaggtgaaatatcttactaaaacagaacacagagatcttgaattttgtctaatttgtaagagcatggtgttgggtacgtgtaggttggtttgacgagccctggttttattggagcggatgtgtgccatctcaatctccacaagaccttctgtattcctcatggaggtggtggtcctggtatgggtcccattggtgtgaagaatcatttggcaccatttcttccttctcaccccgtggttagtcttttatccttcatcacttttatgtttcttggtgattgatgattaattccttaattttttgtttcttccatttccatgtatacagataccgactggtggtatcccacaacccgagaagacagcacctttgggtgcaatatccgctgcaccatggggatctgcgcttatcttgcctatatcttatacttaca

SEQ ID NO: 392 - DNA, 3827 bp, Arabidopsis thaliana landsberg
tcgttacttagccatacaaccaaccaaccccactggtctaagtactacgatagagattggggatcatacgattcccttggttcacgatggccgaatcaagctcttggctcattcgtccatccgtcctccaaacgtacgccccttcggttccatggtggatgattcagcactcagcttatcgaaccatccatgtttcgatccggtcgtttactacgaccgcccatggtttactaactgtttatccgtctggtctatggtggtcgataaagctttcggcttatcgatccatccttacgatccgaacgatattcttaacacacccaagggtccgtggattcatctatcagatcatcgtaggctagactatgaaatccttcttccgtcggccttaggtttgctcgtgggtccaacgtccgttttgtccatcggttcccactgtagactttcctgttggttatcagtcgagtcaccctttcgtcttaccgatctccgatcggttttaccatagctgaggagatagatacatgaaggcggccgtgatactgatcctatatggtgaatcacgttccttacccattcttggtgctttatccctttaccggtaagattgcatccatgggcgacccttgggtgtgttcggatgcacttctccttgtgcttcctcaaacaccattccatgtcctgcccgatctgatctgtccgacggtcggtttgtccgattcgatccgacgatcggtctaccagatccgattcatctctaagacgatcagtctaccccatccatcctctacactccatcgaaccgttggatcgggaggtagcatgcacatcagttcggtcgagttatactcgccgagccgcacccccttttcgatcaacaacttcgggatgtgttgggactgggtttggattgtgttgtggtgtgttgtgatcgatgtgggatgacctaaaggccttgggggtcctcccttatatagggggcgaatggatgcttcccgaagcatcacatccattcattgcatccttccgtaaggtcacattcgttccttgcacccttccgaaaggtcacatccgttcattgcacccttccgaaaggtcacatctgttccttgcatcttatgggcgatgcaaatgttcattggtacccgctcgactttacaccttttggccgagacacctcttcacccgtgagctaccacagtccaccagctcgagtgtcagctgaccggaccacccagctgggtcagtactcgatcagctcaccgagctcagtcgagctgtcggtcagctcacctagctgagctagctcgtcttccagctggtttagctcacctagcttagctagctagttcatccagcttgtccagctcacctagctggttcaacttgaactttctcgttcttcctactaagtattttggtccgttcctcgaccatgatctagttttctcctaaaataaaccggcctctttatgaaagcgggacgcggtcgttacagacctagttacgctacagtgaaaatgatcgatcacaacttagtagagtttccagttgaatctggttctttaacgaaattataatcgaccctcctcccactaggaacaccactttggcttgctaatcttcatgatattctagtgttgagcgacccggagtaggtcttatatcatttaagaaaacactttatgcatagtatatagcttatacttggcaaagagttacccaaaaatatatcattttatcggatccttgttaaaatttacataataataagtaattttgcaaaagcaacgtaaagcatcctatttccggcatttcctagtgctcgtctccccgctatggtcatcctactatggttacctgtaagacaagtagaatcatgagtaatctaagattactcagtgagctgggtctatgcacaaataaatttctagggtttaatcaacttaatagggtaaacttatccatcagagatcacagagtacgtaataaacgtattatcaaatacttataataataccagaacatgcagccaaactagacacatgaatgaaccttgggcccagcatactgccaaccttaccaaaaaagtgcaccacaacatcagcacaaactcccgcatgcgtgtatacgtgttcttcacacgtatgcacacccacaccacacgtacgtgcacacccacaccacatgtatgttaccacacacacaattgtgaacacccgagctatagccacaaaggcttataaccagaacatcattttaatgcatcgtcatgcattacacggcatacactccaagtcttgtgccatcatgtaagtgaccactcaggatcaagacttactgacacaatcacaacacaaaaaggaaggcagctgcttactctaacatgatggtatcaggtaaaccctgaataccacttagacacaataacctcatgcagtactatatataagtagtttaccataccttaaataagtatagacaatcaagtagcaaatcacgtatcaatatatatacataatataacaaggatttattcacaacctcatagcatatctcatataagtataacaatctaacaaggcaagtaagccctcaaaacatatctcaattcatcaagtaaacttagttaagttcatattcatttagcatagtcatgcaccagtccatcccattccttaatgatattacttatcaagttcgtcaaataccatatcgtttttaagattcaagttctaacttaagccgaatccgattagttaagtctaagtgagtaagcatgcatataatctaaagactacctccagaaaacatgcaaacaaacacataattcgaccacaactcacggattctatagtccagaaatttttctgggtcttgggcaaaactcctcgatcacggtcgacgatctcttactcatggtcaagttctctcgaccacatgcgacgattctctagtcatagacagagtttcctcaaccacgggcaagatttactgaatttgggcaagtttgtttctgttttcgacgagttatctgtcggactgccttacagtctctctctctccttcaaaaatgaaattgggcggagagagcttcatttatattctgcccaagattggccatgcagcaccgcccgccacatgtccggacagctgccgcacccacaggcgacatgtgtctcgggcgatggcgtggcgacaggtggcaacgggtgtcactccaccaccccatcagcttcggctccaagactcagctgacttcgggtccaaggttggtgacttgggccgcaaggcaccgcgagtaaggtgtctactcatgtcgtttccatggccggcgagcattcttcgccgcggcacgcccaaccttttccatctttgcccattcgtacccattcttgccctttaatgttttgacaccgtttggacaaatgcggtcaattggctttgcattcgggccaaattttctcattcggtcctttggccgtgcctgatgcccttatgcgggtcactacacttacccttaacccttaacccaaaaccctaaactatagaccctcaactttataagctaaatcctactttagcttccggaatccacttgcggttctagttcttatactcaatcatacacatgacatctagtcttatttgacacaaaaacccaaaccatgcttatacttccttcacaaagatttgaccatgtatcagaagtctgtatgattttttgttttccgatcttcctacaaggaaagaacactttagcttcaatgatctggatgtgctttcagttctaatactaaatcatgcacgtgtcatgtagtcaaatt

SEQ ID NO: 393 - DNA, 12226 bp, Arabidopsis thaliana landsberg
atctcgggttagtcttgttgtcatttctcccaatctcgacgtttaaaacgcaccttaacttacttctttgggtatattcaggcgatctacgaacttaacgatatgattgagcactatgagggactactgcttagtagggagcaagatatcaacgcttggaagggcaagctttcttcccttgaggccgatctccgctctacttctgatttaaagcagaaactagaagactgagttgaccatctctcttgcgagcttttgaagtcgaacaacgagttgcaggatcaatatcaaaggtaccacaagcttcaggatgagctctcgactactaaaggccggctctttgaatctgaatcagccgcttatgatttgaacaactagttctccgaactcaaggcgaagtacaatgcaattgttaagctctgagatgctgagctggccaaattggcgtctaaggccagaagagaggtgaaaggtcgtgggatggaattgattcaaggggatatccttttcattcagaccgagaaaactaggacggagctggaatcagacatcaaagagtatgaaagcaacttactccttctggatcaaactcacgatgaggacttctccgtagaacaagaaaggtccgaactggaggctgctttaaaggaaaagcgaactcgcttagctgcccttccaacttcatccttcaatccccagcactttgaagagttctttaccgaatctcctcctttgagtgaatcaggcttagattgggatgttaagcttttatatcttaaaccttattacctattattattgtaatcacgtttgctaatttgcaaaactcgcttcaggttctagggaacccacagaacccgaggtgtaccccacaccgataaaaccaaccgagctagtcaccactctacctgaggtcccgtcgtctataaacaatgagacggtggtcattccggatgacaagaatgaatatggtcccgagccgggggtctccaccgagcaacctattgctgattaaacaatcgagccggagcatgcttccatcgaccatcaatcctgagctagttcacgttgggtccgagttgactgaagactcatagtggctgtatccacttaatgtgggttgtcccaaaaactttgaagttattttttgaactaatttgtttatcgctattcataggaggcttcttattttcgaacaagtatttgcctgaagaggcttttaaacctttatgactatgatcccgaggggattattttatatagaaagcggatttacaaagtccgttcttttaagtatattatggccatgtggctaagtttcaagatatttgggttgatcagacctttctcttaaaacgcgagaaccgagctcgcttttagatgcgaatttcccaactcgggtttaatcaatttggctctttactgggcttgggcctcaactattcttctttgtatttaatgagacttttgtctttaatgcgaccgttgccatttcctttctcgaaaaacaggagaaagcttcacgcttctaaggcaataattgccttttcctcgatcccaaaaatggataaactcattcggatacgccacaattattaactttgtggtttcgagtaaaaccctaaatcactataaataagggcataaactttcttaactctcgaaagacatgttcgcagaaatttacttgaacaacacctatagaatggaacgcgaaggagcaaccaccgtctgcccccatgaccccgggagtcccttgtttttgcccggcgatggcttcgagcccgccggtgtcctctttccacacgcttgtttccactttccttcgaaggaaaacaagcaggcatacgactttatggacaaggtaaagcctctcttgttctctttttcggaacgagttctacttgttttctaaccagttcgtactttaggtcgtcgataagcatcgccgcctgtgcgatgaaagacagcgtttaggcctcaagaggcaaacgctcaaggcccaaattgctcgcatcgagaggaagataagggccatggagagcgacccttttcagtgggagtggaggaacttcgactgcgtggcgaagatcccgcacatgctccggatgtacctccgtgctcgaggccaagtctccggtcctgtaaacgttccggttcaagtgatcccgtctgacagtgaggacggtgacgacgaggaggaggacagtaacccctggaagcgcgtgaagaatgaacccgacgtggacgtcaaaaacgaggcgtccacttcgaaccccgaaccggcgatgaaggagcctgttcctgagccccttccctaaatgttttctgagactcaaaactttttattttcgcatggacttacctactcggcttcggcccattttatttaaggaaactttccaattttccttgattcaggaaatattcgttttggagatattctttaaatgtcgggcgaacaaggcgacgtgaatgctttcgcgaatcactccggctctaaatggaattaaatctttgaaagctaagaaaacttcttataaatttcctctctaggtcctccttcattcctcactaacaataccgtgtttttctttcgcagttatggccttcaacgtccgatgctcggaatccatgccagacttttcgagggtcgagatgatcgatgaggacattccgaacataccagacagaggatgctccctactttgcaacttcagatcccaaatccgagctccatgtgcgttaatcaaggaccttttgagcagagatcaggacatcgcgatgtcctttattaaagctctagcggctcaacacaaaaaacaatcaacagaaaagaagaaacttcgaaagaagatcaaccaaatgctgtagagagtcaccgtgatatcaagggagttacacaccctcaactctcaccccggagactggatcgaactcggaatcgcagaatttgcccgcatcccggactgtatgatgcccattctcgacatcgccagtcaaggtgtcgaggtgttcttcaagacgaggaggatttcctagtttgaagcgtgtctaagacttctgcattttttccttgttttttgttttgaataaatttagctttgcttcctgctttgtatgttcgcatagtcgaactccctttttttattcattcgtataatcgaactattcttcaacatgagtaaaacaaatcttattaatagctgaactcgcttccgagatgcctacatacccatttcgagatcaagccacaccgtagctcatgtacaaagaatgcgtgtgtgtttttaaacataaaatttttgtaagttcaccacattccaaggacgttggactgtctgtgttataaatcttttaatctgtaaacaccattccagaccaccttgataacaatataaggaccttcccaattaatgccaagcttgcctgctccttcctctttcttgttatcgaacacacgcttcaaaacataatcacccataaagaaaggtctgcttttgattttcgaattgtaatatcgagctactgcttgttgaaaattttgaattcggattaaggcctgatctcgcctctcgttgatggtatctagcaaatcgtctagcatcgcagaattctcttcttcgtttaaaggagcttctgttcgacgaagtcctggtacattgagctcggctgggacaactgcctccattccgtacaccaatgaaaacggggtttctccggtcgagcgcctaggagttgtgggatatgcccataaaaccagatgaagttcatcataccatcctcctttcaaatgacttagacgtttcttaagattgcttaaaattgtattgttcgcggcttcagcctgaccgttcccttgtggataacatggagtagaataactaactttgatcccccaatccgagcagaaagctttgaactcgtgtgagatgaattgtggtccgttgtccgtaactatctcgtatgggacgccgtgcctacatatgatattcttccaaatgaaggtttttactgccgaatctttgatgtttacatatgcttcggcttcaatccacttcaaaaagtaatcagttaggaccaagagatattgtacacctcgggttgatctgtgcaatggtccaatgatgtccatcgaccacctcatgaacgggtatggggcagagatcaaagaaaataactccgaaggttgatggatgggaggtgcgtggagttggcaacgtttgcatcgctgggcatacttaacgcagtacgtgatcagagtaggccaatagtatcccatcctcttaatcttgaaagccatagcctacctgaagaatgactgccacacaaaccttcgtgcacttcgctcataacgatctcgactttgggcccaaaaatgcaaagtaaatagggatcgcttacacctcgtctatacaaagaatcttttgatagacaaaattacgcgctaacgattctcattttcctcgcctgccatctattctttgggagctctcctgtaacaatgtaatgctttattggctccctccattcagtccccccaatctttagtcggaatttggtcgatttcgtgaaatatccgagcttctggttcgggatgctcatttggcgctagtatgtcttcatcaacccacggttcggatctagcttccactgtggtgtccgaggtgatttcttctattggttcgtcattttcttcgagtccactatcttcttgcacagtaggcttaggtatggttgtctcttttgactttcgccttttgacaggtggtaattcaataacaggttcgccgcgatctcgggctgcaggtcgggaccttgtgacgacgaatgcctccttttcgtccttaatgctcctttctgaaatacactctactggaatgattcttttgacttcgggatcagatgttgatgccagggctgctagtgcatctgcagtagtgttttctccccgtggtatgcgaatgagttcgaacttcttatagtttttagccaagtctttgaccacctcaagatatgcctccattcgtgattcttttgcttcatagtcaccattgaactggttaacaactagttgcgagtcacagtaggcgaccaactcatcggccccaactccttgtgccaacctatgtccagcaatcaatgcttcgtactctgcctcattgttagatacagtaaataacaatcgaaatgactgctcaaggatttccgaagtgggagattctaatttgattcccaacccggatccattttttgatgacgatccatcaacatgcaacttccaagtctgatttggcggttgctcctgccctccgagtaccggtaactctgataaaaaatcggcaaggacttgagctttcatggcaactcggctcttgtactctatatcatactcacttaattccaccgcccatttcgccaatctaccggactggttcgggctatggagaatagttcgaagtggttgatttgataatacttcgattggatgggattgaaaatatggtcgaagcttccgagctgaggttactactgcaagtgcaaggttttccatcatcgtataccttatctcaggatccgtcatagatttacttatgtagtaaattggtttttgctctccccggtcttctcggattaagactccgctaaccgcatggtccgaaactgagacatatagatagagtttttcgtctacctctggtttggacaatacgggtggagaagtcagatacgcctttagctgtctgaacgcttcctcacacttctcatcccaaagaaatactttgttaccctttaagatttgataaaagagtaaagatttatcggtcgaccttgaataaaacgattcaatgctacaatccgaccggttaatcgttgtacttccttgaaattcttcggagacggtatgttgagaaaagcgttgatttggtttgggtttgcctcaattcctcttttcgtgacaatgtagccgagaaattccttggatgggactccaaacgtgcactccgccggattcaacttcatttgatattggttaagaatcgcgaaacactcttccagatgctttacgtggtcttcctttttcaacgacttaaccagcatatcatcgatgtagacttctattgtttttccgagatgctcgttgaacatcttgttaaccaaacaatgataagttggtcctgcattcttcaacccgaatggcataactttgtaacaatagatacccctatccgtgataaataaagttttctcttgatcttccggattcatcatgatttggttatatcccgaaaaggcatccataaaggataacaattcattcccggcggttgactccacgagacgatctatgtgtgggagtgggaagctatctttcagacaagctttgttgagatctgtaaagtcgatgcaaactctatcctttccattcttcttttttactacaacggtgtttgctaaccaatctggatattgtacctcccttatagatccaattttcagaagtttatccacttcgtcatttactgcttttgctctctccactccgagttttcttcgattctagaatcacttcgatcacaacatcatccactttctgcccgctaggaaatcttgggattactcctttctttgcgggtttcgttaattgctattggatttttaatcggtggctagctaaataacaagttctcgaagcttcttgatctgtctgaattgtttccactccgctcggagttgggaattagagacattggtgataggtagaaggaaccgctttcatttgatagatccacggagttccaaaaatgatgttataggatgctggtttatcgaacacgacaaaatccgcaatcttcgagatctttccagccaaaactggtggcttgatagttccgagagacattgctgattcactcgtgaaagccactaagggtgatgggggtcctaccacgtcggctctgcttatccccattctttccaaagtgctaagaaaaattaagtctaccgagctgccagtatcaatgaggatccttgacacttcgaagttagcaacatccaacgtaactacgagcgcatcatcatgagatctttcgaggtgttgcgtctccttctcatcgaacaatatcgaagtgctttgaaaatctacttcctcacttaagcttaatttcaaatgaacgttacggctatgtttcttgattacactgatggaatcacgacagagtttagatcctccgagaattacgttgattttaccctttgaagttcttggtccctcttcgctcgccggccttggtcttttagagttttgattctctggattatcccttgattcatgatattgtttgatgaagttctccatgtcgaattttgagagatctccactggcctataattctgcgagatgcctcttaaggatgctgcagtctttggtcagatgtcccgtgactcggtgtatatcgcaatacgagctttcatcacggatccaggtattcgaccttcctttcccctgaaactgctttccgacgttgttattgaatggtagcaaaccaaacttccttggtccctgattctcccgaggttcgaactttttgggcgaaaaagtgaccgctggttttgcttgcttatctctttttgcgaaactttctttttcatcttcgacttccatccaattattcgctcgaaatagtgcgtcttgaatagtatcaagtttatgaagtatcagatcttccttaaacctcgaatcataccataatccctttcgcagagccgacagagccgattgttgtgagattctagagagctttgaaagcacgtatttgaatttggtaatgaaagcccgaagtgtctcattcggcccttgagatagattccagaggtcggtgtccgaaatgctcttatccatcagaattgagtattgttttaaaaatactgccgatagttcgttgaaattactgatcgatcctggttccaactgagtgaaccacatcagggcttgcccacacagattttcggagaaaagtttgcaataccctacgtcttcatcggcctcgtttaggtcaactcacccagcggctatcagaaaggctgcgagataacctttcggatcttccaaaccattgtatgattctaagttgagttttcgagaatctctgattctcaaacttgtaatttgcagagtgaatggtgttcgcctagctttctcgataacccggttgatatccggttccgagcttgtagcttggaggaatttcgacctcatttctttgaactccagacttacttccttcatggtttcgagttggtccaagttttcctgatcgtgttggtcacccaactggttatcatcttcaggatgcgtttctccatcttctggttgattctacgcgtctgtaccatccggggtcgtatggtctcttgttgcatttcgcggaagatcatatggggatccgaagatagttcttcgaactctacaattccctgcatttaaagaacggacacgagactgaatggtactaacattttggctgagcgatacctgggttgtttgcagtgtttcaacggttttttccacgtttgaaaacttttgcgccatatcaaccattgtttgttgcatggtcttgagggttttggctatcgaagtgttggtagcatcctctccagacattgcggatcacttcgggtatgtaatgcacagaaaaaatctgatgactcaagaatcctccgtccccacagacggcgccaaaatgtggatgtcggattcgcacactcaagtatttatttgttttgtgggagagattattcttgaggacaaatatacttgaaaatagatagatgattatagagaaaactatgagtattgtcaaagaaggtgtatagctcgtttgcaccaagaaatgcgtgtgtgtttacatggtctttgacccacaatttatacccaaagaatacatttaatacatatttactcacaatcattctactttaaatgtatccgtttttagtctttgaatttacttatttgaacgttaaaaccgagtccactccgggccttctggacctcgcctctcggcccatttggtttcttcaattcgagtagtcctgacttcgatgctgccttcaccccgcaaaccaacatctcgcccatactctcacctcgaggatgcttatgggccctccctcttatgggcttgttttacttgtgcagcaatctttggctggatccgagcccatggtgcgggatccgacaccaacaattagccccccaagtctttcgaattgttactccagtttggaaggcttttaatgttctaaggacaaagattgcgccaaatgactctccgatttcccgcctaaattacgtaatcgcgttgatttcggaatctcttgcaatcactcgcgtgacacctgtcacaattatgaccgtatattatttatttactattaaagcggggaaactcttacacttcctccacgacttccaaggcggttccgtcatcatcacttgctcgcttgtaggtaaattcactttaccctttccttgtcatttttatttttgacacttctctctcaaagcaaagttcttctctctctccaaaccttcaatcctcttattcactatacgatgaattccgaaattgaaagacctgaatccccctctttcaacaacttcggctctagtaacgacctctgcacccggccaaacgacatcgccgatccccactatcaatccacatgcactctccaatatcttaatcgattgggagagctctgtcggatttcggccgaagtaatgagggatttacagatgccggagcctaccgaatcgccggaggaccaccgacccgcgttcttctgcgtgtacgagatttacttcaaagggtgtggcttgatttttcctctccccaaagccctcgttcgttatttgtcggcccttgaaatcgccttaccccagctgacacccaatctcctccggactattctgggaattattaccatcgcggctgaagccggatacgtcatttttgtccccgaattgaatgaacttctcagcgtgaggagttcttcgaagaaagtcggatacttctcggcttatccgaatgccaacagaaatctcatctcgcatctcccgaacaaggatgagaattggcatcacccgtggttcttagttaaaaagaggtctgcctcgatcggaaaccttccggacttgctcccctcgaagtggactactaagcctggtagttgttaggtcatgcatatgaacttcattttatttcttttcttatctgaccaacttttatttttcacttcgcagctttcatcgcacctacccttccgaccgccgaatttggcgaattcttcaagattgtcatcgaaggagaaaccctttggaactcctttactctcgacaggttcatagaggtcaaccacaagcttaggatgagcccccgtagacatctcctccagctgccactgccccctcctttacctaaaattacttctgctcgggccatcgcagctcgacgcaagacactgtccaagtcgattgtggaggcttgcgaagtgaacaaatcattcctccaattcacagtcgacaagaaggaatatagaagaaccttgctagtcgacgatggcagtgccgaaggggcaagatctgacggtgcttacagacccactcctcaccgtgaaggtcatagcggtcgatcatcccacagggagcgatcacctcgtcgtgactcacctcggcccacctcccgaactggactaagcagcgagccacttgctgacctgattcggaagaagagagacagatcaacccgcatcagctcctcccccaaaagagacaagaccagggcctgaactgaccgctctactcgaccgaaggcgtcacaccgatctatgggtcctccgactcccgtcggtgtatctaccttgtgcggattaggaggggaaacggcggagcgaagtactatcccttggcgggatgaaactgaggtccaagatgccggagctaaagctattttggttcctcagtccaagtcgctcacgggttagaaatttcttcccatttttttttgttatcacattttttgccatttcggcttattgactcagcgtcgttcgaccggtctgaccccttttttttttaaacagcgatggaaacgtacgggaacgtctttcgatgtttcaaaacccgaaaagacaccatccttacaactttcgatagatggcatcctgcaatccgcgagcgattcgtactccatgcccatcactcatctcgggttagttcctttttcccaccataaaccttttaatctttgctcctttactctgtcgctaatcccttctcgttattatctgatccaggcgaacagcgaactcaacgacatgattgagtactatgaaaggctactgcttgacaaggaaaaagatgttatggcgtggagagataagtcttcatcccttgagtccgatctccgctcttcaaatgatgctaggctgaaattggaggatcagttggataacctctccatcgaactcatgaagtccaacggcaagctgcaggagcagtaccaaacgtacgacaaggtccaagaagaactctcaacttcccgggacaaactttcaaaatccgaatctagtgcctaagagttgtccaaccagctctccgaattgcagcttaagtacatagggtggccaactatcgggatgctgagttggcgaagtcgacgtcaaaggccaggaaagaggtgaaaggtcgcgggatggaattgatccaaggggcaattgtcttcatccaaaccgagaaggctggagcggagctggaatctgacgttagggagtacgagagtaatctcctcctttttgaccaaactcatgaatatgatttttctgaagaacgagagagggacgagttgaaagccgtcctggaagagaagcaaaatcgtttagctgcctttccttcctcatcgttcaacccccagcagttcgaggagttcttcaccgaatcgcctcctttgagtgaatccggtttagactgggctggtaaatcccaactcttctccctttttcttaaaaaaaaatcgatccacagtgaattactcttatattaatccaagataagtgcctcaggtgtcagcggttccgcggaacccgaagtgcctattgcaccatcatcagttctggaggcgataatcaccccgtctgaaattcctccatccacgaactcgga

SEQ ID NO: 394 - DNA, 2750 bp, Arabidopsis thaliana landsberg
taacaacccagcagggtgagcttttcttgtctactctataactctctaatgaattctgtttgccactctgtgacaacctaaatggttcttttttgtttagactcctttctatagcagaggaggccctagcagagttcctttccaaggctacaggaactgctgttgactgggttcagatgattgggatgaaggtaatactttctggcctgaatactcttaaagttgtataatctgatttctgttctttagttgtgtctgaagatgaagttgtttatgattatttgatgaaccttcattgctggtgtagcctggtccggattctattggcatagtcgctatttcgcgcaactgcagcggaattgcagcacgtgcctgcggcctcgtgagtttagaacccatgaaggtaaagagtgcgatttgttacgttctggcttgtgtttataatcattagcttacgctagtcttgatttgaaaacaaatataggttgctgaaattctcaaagatcgtccatcttggctccgagattgtcgaagtgtggatactctgagtgtgatacctgctggaaacggtgggacgatcgagcttatttacacgcagatgtatgctcctacgactttagcagcagctcgtgacttttggacgctgagatatagcacatgtttggaagatggaagctatgtggtgagttcttgaatctgctttttctgttatgtagtttctgttttaatacttttgtcttcactcactgtcttcaggtttgtgaaaggtcgcttacttctgcaactggtggccccactgggccaccttcttcaaactttgtgagagctgaaatgaaaccaagcgggtttctcatccgtccttgcgatggtggtggttccattctccacattgttgatcatgttgatctggatgtaagtgacaactcgaatcggttcataacacttcagttctctctttataatatgatcatgactttgttttttcggttttgcaaggcctggagtgtccctgaagtcatgaggcctctctatgaatcatcgaagattcttgctcagaaaatgactgttgctgtaagttcaaatacctttatccaaactgtatatgacctgaacgacttggtatgctgcaatgtttcttaagttcggagtcttatttcaggctttgagacatgtaagacaaattgcacaagaaacaagtggagaagttcagtatggtggagggcgccaacctgcggttttaagaaccttcagtcaaagactctgtcggtaagtatctactttacttaatagctttatcaccaagagtttcttttattcttattctaattgttcaatatggatgaactttcaggggtttcaatgatgctgttaatggttttgtggatgatggatggtcaccaatgggtagcgatggtgcagaggatgttactgtaatgataaacttgtcccctgggaagtttggtgggtctcagtacggtaattcattccttccaagctttggtagtggcgtgctttgtgccaaggcatctatgttgcttcaggtacatgtcttaaggatttgataataaaaaaactaatattctgtttctgtctgtttctaactaacttgcatctttttttttttgtttgaagaacgttccacccgctgtgctggttcgattccttagagaacacccatctgaatgggctgattatggcgtggatgcttatgctgctgcatcgctcagagcaagtccttttgctgttccttgtgctagagctggggggttcccaagtaaccaagtcattcttcctcttgcgcagacagttgaacatgaagaggtacttttatcaaagaataacacagcttcactttctcctctctctaaatacgtgttatagtcctgaaacctttcttggttacttgtttcagtcacttgaggtggttagacttgaaggtcacgcttactcacccgaagacatgggtttagctcgggatatgtatttgctacaggtttgacttcatactttaactccaaagtttctatgctcctttgttctcttcatgacattttggattcttttttgcttttgtctagctttgtagcggtgttgatgaaaatgtggttggaggttgtgcacagcttgtctttgcccctatcgatgaatcatttgctgatgatgcacctttgcttccttccggtttccgtgtcataccactcgaccaaaaaacaaatccggtaaaaagaaaactgtttatgataagaaatttgatatcttgaaattgacacagtcctttttcttttattcctgtatgtaacgttacagaatgatcatcaatctgcaagtcgaacacgggatctagcatcgtccctagatggttccaccaaaaccgattcggaaacaaactctagattggtcttaacaatagccttccagttcacgtttgataaccattccagagacaatgttgctacaatggcgagacagtatgtgaggaacgttgttggttcgattcagagagtggctctagccattacgcctcgtcctggctcaatgcaacttcccacttcccctgaagctctcactcttgtccgttggatcacccgtagttacaggtactcttcttagaaccttaatctaaagacttgtaacaatatagaatgtgcttatctcatttaataactcaataaaacctttttctccgatgttaaagtattcatacagaagcagatctgtttggagctgattctcagtcctgtggaggaaac

SEQ ID NO: 395 - DNA, 1890 bp, Arabidopsis thaliana landsberg
aggtagacataagaggtccgcctatttaggcgggtgtacccgaaattttcaaatactcgaacgggtctaatcttcaaaattcgaaaaatttgaacccaaacccgaataggtatccaaacatatctcaaatataagtatatattagttatatttatacttatatatagaaaatattaggatttttttggatattttagtgatttttgtgtatttttagatatattcaagcaaaactactcgtgttgttttgggaatttttgaaattttcaagtaatttaataaatttgcacacaaaatttcatatttcaatatataaataaactcgaacccaaacccgaacccaaacccgaacccaaaccgaacccgacccaaaatcttaaattacccgaacgggtcctaaacttctaaacccgaaaacccgaacccgaaatacccgacccgaatacccaaacgcatagagctaataattaataaaaaaacagaaatccacaaaaatatttagaaaccaaaacattgttgaaaatatattttttatatattttcaaatatattgttaaatgaaaatattctcattaaaaataattgaaaagttaaatcctataatctaagctatttttcacaaaatgttctattttcacttatgattacattagttaaagaaaaatttgttaattttccttttgtcgaataaatgttaattgtttataaatatcttattatataaagtatgattttcaaagttaataactcaaagttattatataataagatatgaaaattcttccaattctcatttgtctcctctatcaattcttttggctacagtcggcattctctctccccgtaatccggattccatcaagtttactcatcgttttgctggtccatatggatttggtgaaaattgagggaattgagaataaaattcatatggatttggtgagcctagagtaggagatctaccaaaatctcgatccactagatcgcaatcttaagctcatctttgacaagattttcttatcacactacttcctcccagaactatattctgctacagcttacagattccgacttaactatcatccaagccgattatcaaaaacaaacgatgaagacaacaatcaatatagaaattaaaatgcgaatgggttttgtgaaccttgtcagtgagaaaaattcaaaactatgggtgtcacgcaactaatggagtttttgttagtttcaattaattgtgtaataatatatataaactttgtattgtgggtataatacaaaaactttattgtggcaaaatagtttcaaatcttgtaatttgttcttcaagtctaacgaaaagttaattatgtcatcgttctgttaacaaaactttaaaaatatgctttaaaatgtgtagttaacgaaacttagctaatttattgaaaagtcaaaaacaaattcatgattaaaataatatttcgaaagttcctgctttttcttcccaaatttgaaaattcttgattttttcgacattttttcaccaaaagtttgaaattaccaacaaaagttttcattactataaaatgtttggataagttaaattttattttcttcacaaaaaatattatttaatattttaatttaaacattcaactaataatagaaaatattgcataacatatattgattagagaatttcaccaaaaataaagaaaatgattagaggatatgaaatatatttaagttttggatagcattttttttttcacaaagatatttatttattaacatttcccttacaaactcgactaatcgaaatatttaattaaccggtgtgtcgccgagtcacggtcggtgacactaagcgcggttcgttgggtgacagtcggacaaagagaaccctggtggcgatag

SEQ ID NO: 396 - DNA, 3257 bp, Arabidopsis thaliana landsberg
  unsure (1)..(3257): unsure at all n locations
cgatccaggcacatctgatgccgacatttggtcgttatctcagcagccgaacgagctacttagagatttcctcacaaagtttcgatccaccctagctaaagtcgaggagatcaacgacgtcgcagctctatcctctctgaagaaagcgttgtggtacaaatccgaattccgaaaggaattaaatctgtccaaaccacaaacaatctgggacgccctgcaccaagcctcggattaagtttcccatgaggaagaaatggagctgctgtcgaaaaatctcaacctagctctccaaaccataagaagggcgcccaaggctagacgtccgtacatcacgaggggcgaaacttctccggtgcccacaattttcaagccgatacgccccgaggtcgaggacgtggccgcggccgaggtcgtggacgagaatcccacacttggacaaaggaccaacctacaggaaannnnnnnnnnnnnnnnnnnnnncacaaaagttacggtcatcacacctccaggtgtcgtagtctcaaggcgaagttagcggccaaattcctagtagggtgaaattggcggaggcttgaccatcgaggatttgtaagcagagaaagccaaaccaagcaggtaaatgctttggcgaaccccgagcagacagcccttgcggcaaaccctgaatgatccaagaggggtagaggtaaccgcgaggctgaagacgacgaaccggaagctgctctgggaagaatcttcacgattttgggagactcgatcttttgtcaagacatcacggcatcaatcaaagcctataagagaaaaaccgactcaaatcgtaactgaacacacccattcaacagaccagatgacaaaatcactttccatgagagcgacattaacggtttggatatgccgcacaacgaccccttggtaattatattgactatttgggatttcaacgttgagagagttttagttgatataggaagcacgctggacgtcattttccatgcaaccttgcgagaaatgaaggtcgatatggcgcaaattgtaccaaccccgcgatctgcgctttggttttccggagagaccaccatgactctcggcaccatcaaattaccagtccgagccaaaagtgtaatgaaagttgtcgatttctccattacggatctaccaaccgtttacaacacgattatcggcataccattgctaaatcaatttcgagccgtcgcctcgacttataatctctgcctgaaatttcccacaagcaacaacgtgaagaccatctggggaatcagaaaaacgcccgaatttgcttcatggcaacacacaagctcagaaaccccgtcaccgagtcaacaaccgacgcaaatcacaagaaggctaagctgggccaagcnnnnnnnnnnnnnnnnnnnnnnnnnnnnnnngagctaaagattgaggtggctcgagagtcaacataaccagtccctgacccagtaatctccatctgccttgatgacgaaaaacccgaacgatgcgtagaaattggcggagacctaggcgaagaattaacagccgagctaacttctttcctcagagaaaacgtcaatatattcgcgtggtccccggaagacttgcccgaagtaagcgtcaaaattgtagcacacgaactcaacgtccacccaacgtataaacctgttaagcagaagaggagaaaattatgttgggagcgagcagaagctgcgaaagccgaggtagaggaactgttaagcttcggctccatcaccgaggcaaattaccccgactgactcgcaaatctaatcgtagtaaaagagaaaaacggcaaatggagagtctgcgtcgacttcaccgacctgaacaaagcctgtctgaaggatagtttcccattgccgcatatcgatcgtctcgtcgaatcaacctccgggaataagttacaatcattcagggacgcttttgctggatataaacaaataatgatgaaccccgaggaccaggataaaatggcgttctacacagagcaaggcattttctgttaccaagtgatgccattcgaactcaaaaatgccgaggcgacttatcagcgtttcgtcaagaagatcttcgccttacagatcggaaaatgatggaagtgtatatcgatgatatgttggtaaaatctatggaagaaaaagaacatataacccacttgcgcgaataattccaacagctcaacttttataacgtcaagcttaatccagccaagtgtcgctttggggtaagatccagtgagttcttaggatatctaaatacacattgcagcatcgaggcaaatccgaagcaaatcgaagcactgttgggaatggcatcaccacaaaataaacgcgaggtgcagcgtttaactggaagggttgcagaccttaataggttaatctcccgatccaccgccaagtgcttggctttttacgatgtacttcaaggaaagaaaaaatttgagtggacggctcggtgcgaggaggcttttcaagaactcaagagatatttggcgagcccactgatcctcgcaaaacctgtaatcgggaaaccactctatttgtatgtcgtcgtgtcaaacactatggccagcggagttttagttcgggaggactgagcaaacagaaacctatcttttatgtctcgtagacatttaccggcgcggaatctcgctacccgcaaaaggagaagctagctttagcagttgtaatatcggctcggaaactacgaccctatttccaatcctaatccatcgtgatgatgggttccatgccactttgcgctatactgcatagtccaagcgagcaaggttgtttggcttactgggcgaccgaactcagtgaatatgacatcgaatatcgaaacaagacctgcgcaaaatctcaagtcttcgccgactttatnnnnnnnnnnnnnnnnnnnnnnnnnnnnnnnnnnnnnnnnnnnnnnnnnnnnnnnnnnnnnnnnnnnnnctcattgtcaaagaaggatcgggcgtgggcatccgtctcacttcacccacaggcgaaagtgcctaggatgaaagctcagtcttgggctgtgattaagaatggatagaccccctcagaagctatatatccgaggggagtgtgcctttggataagtgggaagctcgaaagttgaaagctcaagctgcgcgtttcgttttggtcaaggagaaactcttcaagtagcgattatccgggtaattaatgacttgcgtggaaaaagaagcttctcgcaaagtcaaaaaaaaactg

SEQ ID NO: 397 - DNA, 2824 bp, Arabidopsis thaliana landsberg
actgcagagaagcaggtgttaggaatctccagaaacagatcgagaagatttaccgtaagtaagttttgctacaagactccgaattgattcctcaagccctcaatgtcgaacaccatttacttttctgttgtagattgcacttaaattagtgcgtgaaggagcagtccccgaagagccttcagttgcaagtgatcctgaagaagctgaaatcgtggctgatgttggcgaatccatagagaatcatactgtcgaagaaaacactgtgtcctctgctgaagaaccaaaggaagaggcccaaaccgagaagatagctattgaaaaggttatgattgatgagtcaaaccttgcggattatgtaggaaaaccggtattccatgcagagaagctctatgagcagacaccggtaggtgttgtgatgggtctagcttggacatcaatgggtggttcaacattgtacatagagacgactgttgtggaggaaggggaaggtaaaggtggcctgaatataacgggtcagctcggtgatgtgatgaaagaaagtgcacaaattgctcacacagtcgccagaaagatcatgctagagaaagaaccagagaatcagttctttgcaaactccaagcttcatctccatgttcctgcaggagccactcccaaggatggtccaagtgcaggctgcaccatgatcacatctttactatcacttgccacgaagaaacccgttaggaaggaccttgcaatgactggagaagtcacactaaccggaagaattcttcctattggtggggtaagtaactccggacttctctcactctattctattagagcctctctttttttttccttttttgacaatgtacacaaaaatgttacaggtgaaagagaaaactatagcggcgaggcggagtcagattataacaataatatttccacaggcaatccggaaagactttgataagctggcgagaaacgtgaaagaagggctcgaagttcatttcgtggatgaatatgagcagattttcgagctagcctttggctatgacaaacaagaagactgagaacacacataagccacgttgaccttctgtcatctgttgttgtctccatttaaacaacactaccattcttgattctctttgatctttttcttccttcaagaagaaagttattctgtaactttttttttatgattagggtaatttattggtggttgaattttattattttggtatataaccaaagccaaatatcataataagacatcagaacaaagtaaaaaaaacaaagttgtttctcattttgtgcttgtaatttcatcaacatattcgcgtattactttcactgttgctatgtgttcgatcacacttcataacagactagtaacttgttggcataattttctgttttatattcctttctactggattagatgatgggtaatttgactattaaactatgtaatgaaatgtatatatattcttagttcgtactcagacaaaaataggattgagaagatagcattcatacttaggaaaaacatacaattcaacacaaactcttcatcagacaattaacctcatataatctgatatctgaagtagaaacagaggcacggacttgatagaagctacagttgtcatggttatagagaaagactgaaaatttgctctgatgttgactcaatggtgacgtcgataggtcttgctctgtgtttgacacaccgatattcaccaatggttctgtccattgttgatgacggggatctgacctaactcggtctggtttttctcgggttgtagtaacagaagcttatcttgtagtacccgtagaccactttctaatgaatccttcatctctaagactttctccgagagcttactgttgtcgaggatcttcttacgtagaaacagagaaaggttggttcttttcttgcgtcgctctctctctcgtgtagtttgctaaacctctctgccatgtctcgaaccttggattgatcctccggccatgtcttgatgagttctccgtcacgactataaagtatgacacagacttcgatatcgcacagagttgaaagctcgagggctttcttaaacattgtatcttctctcatagacaagtttggtttcttctcacagaaaatttggttttcttcttgacatcgaagaatccattgtgatgttttgtttacacagagataggaaaaaaattaagcttttagcttgttctcaaagagaaaataaactctgaaggagagaattgggatacagatacaatagggtttagggtagtgactccttcaagatgaatatgaatgcttaccaaccaccaatggctatgcctctacgtctccgtcttcctttttgcaaccatccaatgtatcaagcaaagatatcctctgtcaacaatggttcttcaccattcacacagccttgaggtgcacactcgatttgctcatagttaagttgtctggacgcttcatacagagcaatccctacactcaccgaaagattcagacatctcacatacgtttctaccatgggaatacgtagggtcccccctccatatggttcgtgattgcagtctgacagcgcttcaggaggtagaccgcttgtctctgacccgaacaagaggtaatcgcctgatcggtaagaaaaatcctgcatcaagttgtaaccattgttttcagctacccaattgctagtgattgttgctatttctggttggtaaacaataaactagaggtggaaggacaagcaagcaacttactgaatgtatccttgttcctctttttgtaaaagctatcattcgtttttctccttctaaccca

SEQ ID NO: 398 - DNA, 1650 bp, Arabidopsis thaliana landsberg
ctggtttaggtctttttggtcttggcacccggtagcatctctgttctagcaagcaccatttcggttcttcacattgaaggtcacacaaatacaggtgcaaatccagactactaagcttggcaccgttcatatcaagttgtcaaggcgtggcttctgggttcgctttctgaagacattctcagtgtggttgttggatctaaaacatctcaagaggtatggctaaatcttgttggtcatttcaatcgaatctctgcatctcgtgtctttgagcttcagcgccgtctccatggtttgtcaaaagaaggaaaaaccatggatgaatatttgcgttgtctcaagactatttgtgaccagcttgcttcagttgggagtcttgttacagagaagatgaaaatttttgcaatggttcatggtttaacccgtgaatatgaacctctcatcacttcgcttgagaataccttagatacctttcctggcccaacctacgctgaaatcatgcatcgtctcaaaggctttgatgataggatgcaaagctacaacacaacggacgtttctccgcatcttgcttttggtacattcaacaatcaaggtcgaggcaaaggatcaaaaggaagaggacgcagaaactactcaaccagaggtcgaggttttcagcaacagtttccctcttcaggttctcagtcttcctctcctagtgaaagaccaacttgtcagatctgtggcaaaagaggacatcctgctcttcaatgttggtatcgcttcgatgaaagctatcagcattctgaagctgctgctgctgcgttctctgctttgcacattactgattttactgatgatggtgcttgggttcctgactctgcagcaacagctcacatcaccaataatggtcagaggctttaatgcttcaagacccctagagagagttcactgtgatctttggggtccagctcctgtttcttctgttcaaggttttcagtactatgtaatcttcatcgataatctatcaagattctgttggttctatccattaaagaggaaatcagatttttgctcaatattcatcaagtttcagagtcttgttgaaaaccttttgcaaacaaaaattggaacttttcagagtgatggaggagaagaattcattagtcaaagacttctcaagcatttacaagattcagggatacaccatttcatatcatgtcctcacacacctctacaaaatggtatggcagaaaggaatcatagatagctaacataaatggggcttactctaatgtttcaaagcaaaactccacaaaatttttgggttgaagctttcttcacagcaaattttctctgcaatctcttaccaacaacagctcttgcaactaatgtcagtcctcatgaagctctcttcggtaaaactccaaactattctgctctaagaatctttggatgtgcttgcttcccaactctcagagattatgctcgcacaaagtttgatccacgatctctaaaatacatttttctcatgtataatgaaaaatacaaagggtatcgctgcttctatccaccaacaggccgagtttatataagtcaacaaaacttgtttgcagaagagttctttccgtttgcagactcttacacagatcagcagaatgcatcttcaactcc

SEQ ID NO: 399 - DNA, 1934 bp, Arabidopsis thaliana landsberg
cacattttcatccattgcataattaattttagctaggtaatacaaaatcccattgattctataattgttccattactatgaggaagatagcgtaagggagattggatcttcctccacccaactgtttcagctcctaatgtaagaatatgatgatccgtttgatgtttatcaaaatcgaatatcgggattaataccttgaattgcttgtcaatcggatcaaaccctaaaaatttaccgtaaggcttgctcttgaaatccagtaaaggtggtaagatcacatacccatactgccctgtgctagggttacatatcacacgcaagtcatcgtcacccttctttcggatcgtcatattaggtaaatagatcaaactagaagcataactacaaccgtgtgggcgtttgtcttcaaagaatttcagatggagattagcggctactacaagagacgacttcccaagataatttttaggttgaggcaacgagaagaatttccactccccttcttgttcgacagcgattaagagatgtggacgagatgaagacctggtgaggaacaactcggtgaagtatgactgtcgacacgcaacgaaaccttgccactgactttgaaggcaatctcgacaatatctcctcgatgagatcattcgttaaggaagatgaatgcctgattcttttttttgaactgaaagatgaatacatgactgcggatcgaacgaagaaagatctgttaaaacttatatattatgtaataagccctagaaaaaacaagtaacaaaagacgtagagaaacctagaaatacgagacctagctaccattatatattttccgattgtagtcggttaagtaaaacaaaaatgggctaattttaaccttcaagtgggccactagcaataagagatcttcttgttggagatcaaacctgcaacaagaaaagaaagaatcagtgtgatgaagatgagaagcaaagcaacagaataacaagcgaagaagaagatgggtcggagatgactcgtcaacagaggactgcagctttggttgaggcctaaacaagagaaagtgtttttttttggttagcttgaggttgaagtttagttaaagcaaagtagtgtgcaagtgttgctgttagaattccaatgtagtaattatgtgtttaagagcatgactgtgtgtaagtgcgtgtgtgttgacagtgttgtgtaagattgtttccaagtttttttatcaatgtagtcttataatttcttaaacgtgtacactacaaactggaacaaaaacagagtgtgagagatagagagaagagcgaactaacgtttgtgagtcctttcaacacttctttctaaccacccccattattcttttgaaccacccccattcttcaaaatagctgctctaatatcagaaccaatctcattatcactaacttgcctcctccaacatagtaactgaagcattcatgtgattttccacttcataaccttttaggcttccaaaagtctcacagaaacagagcaaagccggagcataagccgaagctagagaaaagactgagaaagctgctgtagaagctagagaaagggtaaatgctgaagcaagggttagggcagaacgagccactgctgaggcacgtggaagtgcagctgcccaagctaaagctacgcagcagcaagaaaataacaatgatcttgaatccttctttagctcagtttctagaccaagcagtgtgctccggtggtctagatgaggaatatggtgaagcgacaaagttcagaagcattgtttgtgggctcgtgtgaccagatttaatgattgcatgctcttatctatcacgggtcatgtctgtgccactcatcaagcactaccaagaagccaagagagtttgaagatatgtcaaagctacatctaacttttgagttcaatttacaaggtgtagaaa

SEQ ID NO: 400 - DNA, 4072 bp, Arabidopsis thaliana landsberg
aaaagctttattcgactttattttgtcatatgacagacataagacacaaatgaaaaacaaaatgaaaaaaaataacaatcacaaaaataaatactcagtatatatgaacacttaccaataccaaacaaaaagtatatataacacacctacaaattaggctcggaatgaagacgatcggttaattatggattaaatgcaatgcggttcaaatactaacaaaatatatatacatacacatatatatgtaatttcttttgttactattcaaacagcacttcaccatgcggtttcatcaccacctaaattacccatcattaaaaaagattagagttatcaaaacaatactaatcaataaccattacatattaaacatcattacaatttaatcccctgtatataaagaatgtgaacccaacattcaccacactcaaagtttctacataagagtaaaaattaacaaacaatagtgtttattaaataatatatagttttcatccttcataatacaatctcacatatcaaagaacatttctaaaaaaggataataaaataaatatataacaaatattttaaaaaatcaacaacaaaattccgcgcatagtgcgggcactcacctagtcatatagcttgacacatcagcatccaatagcttgccacctaaacatcataaaacaggcactacataattagtaattaattagtcataaaaatttcataattaaaaagtaaagaagataaatataaaaaagctatatgtttctaataatttaaaaataaagttaaaaaggattgaaaagtaaagaagataaatataaagaaactattagtatcttataaataaataaataaactaaaaattgaaatacaattatttttgttttgaattaagaaaagatgaaatataaaagaagttaaacataaagaaactatatatatcttgaaattaaaaattaaaaacatttaaatgaaaaaagaaattagaaactcttcatcatataattaatgaaaatataaaatttaaaaaacttattgcttctaattttttatacaataacgaagaaaatttagaaatcaataattaattttaaaagaaaaaggattgtaaatatccacccacaacagtttcctttactttattttggaaaaatgaaaatttatttttaaaaagtaaagaaaatgattataagagaactggatttgtcttattaaactaaaatagcaattaaaaatagggcaacttattttaaaaatgtcaagatgataattataagaaaattatatgtagttaaagctactaattgtaacaaaaacaaaaaagtggaaaatgctttttacttaaatattaaaaaatatttacaaattatacaactttatataataaaattaagcaattcaattaattattaattctagaagaaaaaaaaatttaaacatgtacctctatataaacaaacatgtaatcttttattgtttcaacaaacaaaaaaaaatattcacaatcactatcttggcttcagctacattttcttggtacctaaagcttgttttctctaaggctaaatatgtagtatatgttgaagaaacagagtgtctgaagttctacaggcatgtctgaagttcaacaggcatgtctgaagcaatacagagcagaacagagaaagcgagaaagtaatagttgcttttgccagcatagcatgttggttggagtgaagaaaagacatatcactttagacaaaagagacaaatttgtcaggcataggacatggtcctagtgtctagataatgatgaggagctacacttggacctgttggataaagtgaagcatcctccgttttccaagacaagatataagagaagcgttggtctcttattagggttagccattttacttgagaaaagtggaagagaagaaaagttaagtagaacttgttcttgtgggtttcattggtgagtgaacaaagagagcacacggctgttgctgtgtttgtgagctaggtagttttaggttttgacaggagcaaatcaggttgttgatgttgcataacactgtccaaacttatctgtgattgatcagtttgaaagttgttctaataaagtgtgtttattggagttgtggtctttatcttgtcaaagtacttagggttcttttacttcaattggtatcagagtgggtaaccaatctgagattagtatatcctagtactcgtacaagcaaggtattcttgctgaatactaagcggtatggatactggaaagtttgtatgacacaactcattagaggtcaaggtaaagatgcatgtactgcagtagaggaaggatgggaacctccgtttgatctaacttaagatgggttcaaaatcaccaaaccaaaggcgatttggactgtagaagagaagaatctgtcaaagtttaatgcaagggctatgagcgctatcttcaatggtgttgataaagatgagtttaagctcattcaagggttcaagtcagcgaaacaagcatgggatactctacaaaaatctcatgagggattttcgagtgtaaagagaacaagactggatcacattgctaatcagtttgagtatctcaagatggaaccagatgaaacaatatgaagttcagttcaaagataagtgctcttgctaatgaggctgaggtcatgggaacgacctataaagatcaaaaattggttaagaagcttttatgttgtctgccatcaaagtttgctgcccacaaagcaattatgagggttgtagggaacaatgataaaatattatttgttgatctaatgggaatgctcaagtcagaagaaatggaagctgatcaagacaaagttaaaccttcgaacaatattgcatttaatgcagatcaaggctctaagcagtttcaggagattaaggatggattggcacttttagcaaagaattttgggaaagccctaaaacgtgtggaaagaggtcagaatcgtgacagtacatcttggagtaataaagatggagagagatcacgtggaagattctccaaatcagagaatgatgactcatgaaagaagacggaaattcaatactatgagtgtggtggttttggtcacattaaaccggagtgtctagtcaccaagagaaaagaaatgaaatgtcttgaatgcaaaggtgtgggtcacactaagtttgaatgtcccaacaagagaaaattgaaagagaaatcacttataagctttagtgattgagaatctgatgatgaaggtgaagagctgttaaactttgtggcattcatggcgagttctgactctagtaagtttatgagtgacacggattctgactgcgatgaggagctgaatcccaaggatgaatatagagtgttgtatgacagctgggtgcaactaagtaaggacaaactacaattggtaaaggaaaagctaactctagaagcaaaacttgctaatgtgagcatagaggataagcagaaactgagtggaatcactgttgatgaaaattcacaggactactatcaaaagaaacttgactgtcttcagaaagagtgtcacagggaaagagatagagctaaacttctggaaagagagttgaatgacaaatacaagcagatcaggatgctcaacaaagggttagaaactctagacaagatcttggcaatgggcagaactgattctcaacaaaggggtttgggttatcaaggttatacaggaaagatcaacaaggaagaaggaagagtcatcaactttgtcagtggtggttcaacaagtgaaactgtggtgagacaaagctatattgaaccgaagaaacaagtaaagtcacatgttgaaataaaaagagaatctgttgtgagaacaaggatggtgggtgtgatttgctgcgatcattgtggtaagagatttcatatgagagaacagtgttacaaattcaaagagaaagtcagaacgctgtggaatttagcaaagtgcttcattgagccatcgagattctgcactgtgtggattaagaagaaagatctatatggtgatatggaagctgaaatgtacaatcacaagttagaaagaatgtatgaagaagaggaaat

SEQ ID NO: 401 - DNA, 596 bp, Arabidopsis thaliana landsberg
  unsure (1)..(596): unsure at all n locations
tttttgtatgtgttgtcgtgagtgtaagtttggtattcggtttttaccaacaaaccgaagtaaaaaaccgaaaccgaacttctcggtttttcattttcaagaaaaccgatcggtttctaatgtctagaaaaccgaagttttttaaaaccgaaaaaccgaaccgaagtttcaannnnnnnnnnnnnnnnnnnnnacttggccgggccgggccgaagcgggggcgggatggggcgaagggcgcgggccacgacatgcgcgtgaatggtccgccgaaatccggcctctcgccttgctcgtgatcttctgacctcgtcgaccctgcttctgattttgtcatgatttatattcggaatttgatctggaatttgtctaattatttaacaatccaaaaaccttattgtagacaatttcctattttttctatggctgcttttgccgacgcgctgaagtcaaaaaagttcaatggtatgcaatttaagagaagacaagtcaaggccacgctctggcttactgctatgaatgtctttcatgttagtaaaggcagacctgagggccactgactcctgaacaggagaaagtacgaccatgcgaataat

SEQ ID NO: 402 - DNA, 2511 bp, Arabidopsis thaliana landsberg
cttgcatacttatttcctaatttttgttctgttttattcgatttaatagagtgttgattgcgatgaagaagaaagccattgtgtttgatgatggatatattccaattatctgtcttgacgaagatgatgatgatgatcttatgattgataaggactacaacgtctttttggatcatcttcgaagaggaagtgtaagccctcgtcttgaagttgacaatggagaatctgacattcgtagattaaagatcttttcttgtgattcgaagatatcaaagcttgagaatgagaatccagtgaagaacagagttcatcaacagggccagaggaaaactgttgggttaaaggctgaaagagataaaatccgagacatcattcaacgagacaacagagttgctgaacgaagaaagcggaggattgcgatgttagatgctgcaaaggcttcaagagacgttccttcactcgaaacccaacaagaagacattcaacaacgagttaggaaactttctgattcaaaggctgagactgagactttaagaagagatgatgttccattggttggaactcaagaagacattcaacgagacaacagagttgctgaacgaagaaagaggaaatgtgacgatgctttaataaaagatgttccattggttagaactgaagaagacaagagggttgctgcggagattgatcacgtagagcgagtacatagagttacagaggttaatgatgtagatgagacttcttcaaggagcaaagaagtttttgtagggagaaggaagaagaatgaggggagtgaagcggttgtggataaggattacatgaggtacctcacatggcttgtagattctcttagggattcgacaactgagccaatggaaaatcttcagaaagatgatatggatactgtaaaagaatcgacaatggtacctgaaatggatccactagtcgaagtgaaagttgaaccagatcatgattggtctgattatataattgcgatgggtgattcgccgtttttggatggagaagagtgtacaccgtttgtggcgtccaagaaagtagttgatcttgatgaaggaagcaaaaagaatgaaagtagtatcacttggtttagaaaggagctaatggatgttctgaaacaaccatatgatgaagaagagatgaagcagctccatcgtgacgtatcaatccatagaaaaatgactcgatgcagagaactacgaaagggaagaggatctgtttatgagactggcgaactgggacaatcttatctagaaagtttccctgatttcgaaaaagaatacaagcttgtggttggtgttgatgataaggcaagagctttgaagttgctgcgtggctttttcttttacttgaaatatgtttctcatgatggtgttttcaagccttgggagaagactcaaagttggcaaccttaggatatggtaaagctttggcttcatgtagtttcttgtaactcaagaatctgattttattgagtaggtttttcctgaaaactgatgcaatgtctctgacttttttaaacgttgtatcaaaagatctgaaacagcctttgaaggtgataacaatcagacattgtcaagttgtcaaaactaacagagaacaagatgtggaaccaaaatcctttatatgtacatggctaatatatgttcgacaagtacatgtatacgtaagtatataataatgataagcaattcataatccaatttaaccaaacatacataaccggaaacaatttctcagctccatttcttgtgatctaagactctacgatatattatcaatcaacaacacaagataagaaaaactaattgaaactggaaacttaacaaaaagggacaacattttcctaaggctcttcatagttgtctcctcaaggcctctttcgtttgttcttcatagcagcaagtttggactttattttcaacatcacttctgttatttcctccatagtcgcctttcggttctcctcatagttccagagctattcagtctcatagctgccactagcgttatgttcctccatctctagctttgctcttaccacttcactataatcttcttcaccgtactggttcttcagcatacaaagcttctcatcattttgatccacgactgtttgcatttcacatttggaatgttgagatatatgtaatttttgctacaaacccatcttttgagatttatgaaagtgtagactcctaagttaaagtcctaacctttggtgttccatcagactcatcgaccctaaatggagtccattgcacatctcctatctatgctgcccacactgaacacagcatcatagccttatgtttgttcatcactgcaggcaagaagggtgcagggttcaactcccccattatcttcactttaatcttctcttgcttcatcaactcttcattcgccttccatacctgctaatcatcaaaagtaattccacaagttaaaaggacaagccaaagagtttgggacagatatatttaaaacgttttc

SEQ ID NO: 403 - DNA, 2109 bp, Arabidopsis thaliana landsberg
atgatctcgtcttgtggttgaatcagttctttctttttttttttttttaattcttctgaagaaactttttttcgttttagctactactcacttgtacattttttatatcgttggtggatcttatattttttaaatgttgtccatcttgtccgttaattaggtgcagtatgatttaaagtgacggtatagcgttatggatcttattacttctgcagagatgctaaaattgatgaacaatatgcttttagaataagtggtaatagcttagtgatttaaacatattaccctgaattaagggatggatatgggtattggaatcttattcaactaataaggtaatgatgtgaaagtttagctctgagtttttatgcagctggaagcatctcattggtgttggaactaagcttttcattgcaagttgcagatatatttagcttacacaatggcaaaaaaacaaaattaatgtaattaaaaacaaaattttctctttaagaattgctatacaatttacaactcctctcttctgacagttttctcttcttatagtgcctttcaagaactcgtttggcctcagaactgggaaagttagcaagcttatagtaatgtggtgcaacatctacaagccattcaccgcgaatatgtgtgacggttcggatgaaatttcggctagtggaaacgtattcgttgtaaactacccactctggtttgtgatccaagcaattggaaggatgcaagtgcaccacttggtcatccttatctctgaaagtcaagtagtggccagtgcgttctaggtgagccacttgcatgaaataacctgcaagcaaggcctttcttatgttgacgtagtagtccctgctgttgaaatcagggctacacaacttaatctgaaacctcaacatgatccggaccaactgctctctaacactaactgcagacttcattgctctgtagttgatgaactttgtacagcaccaatttgggtcttggttgttttgcaagaaagcatggaacaaattcaaaagtgtgagatgatctccatcaatgtgtgcaaagctagatttggcttcatctgctgctttttgagcttctcctcttggcctgatgaaacaatttggtactgataacatcgcagaaatcgaaagaatctcgtttgagcagttgaattgaggactgactatgagcatctttgccatctgtgggtctaaaggaaactcactcatcatctcacctgtctttgtcaagttacagtcatcatcaagtgctcccaaatgatacaaatcgtccaaggcccgagcgagggtatcaggagcaggagaatctataagatcgaagcgtaccaagtttttcacactaagtcctttcaaggtcagaactgtgtttgcaaggtttgtcattgtcattagctaaaattatcctttttgatggtcaaaaattatattactccatgaatttatgaaccttctgacagaaagagagctttcctcaagggtatttatgtctttttacaggcttgcttcgagtggataatgtgagaaaagagcaaaacacaaaaatgaaaaaaccttcttctcttgtaactcgcacaaccttatcgagtgaaagaagattgggtcagtagtgaaaaatggcgtcgattgcagcttcttctacctttcactcgttttgcagaaccaaaagccctaatctttcttcgacccaccttcttcctttgtcgaaaaacctcaactttcggaccagagctatcggaaatagccgcaattgcagttttgctgggtttataaaacaaaatcgccttggattgaggaagctttcgtctattggagaaggaggagaaggtgtcgctgtcgcagaggagcaaccgcaagagactgtctctgttcctgtctctccttcagacatgctcaccatgtttttccaggtacatcactctctgtccagtgaatttgtgtgattatcatcctcattctccacttatggctttttaatagatatagtaggattgattcatggttgtattataaggtcttagaaatgaggtttgaaaaattgaattgatactgttttgaagatactatgagcattactctgttgcaatttcatgtggcctca

SEQ ID NO: 404 - DNA, 1519 bp, Arabidopsis thaliana landsberg
gggttctgattagctataccctgcggtttttcaatctcaaacccatgtccattgacttttcttgaagaatctttatgtctgaacttatagaaccaatctcttcctgaaagaaagaagcaaagtgcacatttagattaccaggaaaaaatatatgtatttcaaagtaaaaaaagtcctcccattaagcaaaagtcagaataaggagaaagaagcacatacatacacacaaattatataaatgtctaattttcaaatacctgaaatccactgagaagagtttccatttgtgacaggatgatgtcacagtcacgaatctgatcgtgaagtgagactaggttgtcactttcctttatgtaatcctgagtattcatggagtgtaaagcatgtacgtaagttacttacgatatcacagaatgtcctgtgcttatagcggtaagtacataaaaagtagaacccaacaagtgccgcaatgtagcacaggtagagaataacaacctcaattgaatccaattcatccttgcgtagattgttttcaaccccttttgcatattctctaagtttgtcaccactagacagtatattggcaacaacctgacatttcactcaaacaagataaaaaggacatcatatccatggatctaacattctatgatcaatccatgtactccaaagtaactcaaatgagagtagaaacaatacttcgaaaaagaagaaccgaggtgctagctttaaaagtttgatctcagttaagtgaataacttacctcatcgctttcacattcttcaagttcttgttgaagcccttccaatgaaatatcctcactgccaaacaaatcaaaggagagcattctaatcagaagaacaaagagaagcagaaacatatgttatagtcgaattaagatacaaaacatgagaacgttacctgcctgaatcttcttcaaaagccaagtctccaacaaatgctcctaaatcaaatccaagtttctcatgattactaaagtcccccatagtttggccctatgaatttcagatagaagagcaaagagaattagacaagaaatcataaaggatccatgattaaggctagaagatcacgaatgcaaaaaaaatgaagtaccaatgcgtcaatggaaatgtcgggcatcttcctaatgaaactcgatctctcaacctatctgaacaaacattcgaaggagattaagatttgaaagatcttcaactagaaaacgaaatcagtttgagtccgccattagagagtcttcttcttcttcttcttcttcttcttcttcttcttcttcagcttcacctttctcagattcgttcgtcttctctaatctgatttttaatttcccaaacaacaataaaggccgttgggccggtaaaagactttatttattacacacgggttaaaaatatgggtcgcccgaaaacacgctgtgtgattattcataacacctcagaagtcggacgatctcaggtgatgctttttactcgagacagaagaagatgatgaagcaagc

SEQ ID NO: 405 - DNA, 4705 bp, Arabidopsis thaliana landsberg
gagcattatagtcgccggagcaagattctcatcagtccactcaaacaaatccctttgaatatctgtctcagtaagtaaaggaaactaacgtttaatctaaaccctaattaacaaaaaaagagatgaaagaagatttttaactaaccgtgggcatgtttaagagcgattccagtggaagaaagcgttcgcagggattcgtcaccaccagggatctgcgttaggttgccaacggcagtgataaagagaggaccccggcggcagcgccactggcctgacttttccaacgccgattctatcctcggacccaccagacgaggagcatgaccatcgggaagcggacaggtggtcatgttccacaacaccaacgttttctcgaaatgtttgttcattattcttcgacctaaaagacaccttgaatcctatacgcacagagaagaccaaaaggaaagaacgatggtaactttcgatcagtttttttagggttcatataaatgttgtggagggagagagatacttgcggttggtttctatgggccgatgcgcgtggcccatataataataattacttgtgaattcctttaaacccaagtttaatttgttgcgcgattatcaccccatcacttttagtcatcagatttacgccccactatcgaaaacgcaagtctacaaaacttctttagctgttctctcactcctttcaagtcatcatcgtctatctctactcgcttttcgcgcttcccctctctacgtgacttttgatttcttcatcagatccgccgagtcttctttttctgaaatctattcacgaaccttcacattcaaattacacttgtctattgatcgatctcgcaaaccctaggttctgcgatcgtaaatcaatggcgtcttcacctggtaacactaaccctcacaatcctccgccgttcgatctcggtactatcttcaaaccctcatccaacccttatcctccccctacaggtccgtttcttaacaaccagtacaatcagcaactatacgcgccgcctggtatcgccgcccaaccatctccggtgaatcaaacgcaacaggatgtgtcttcctcttcctccgctactaacttgcaaccacagagaacgctatcttatcccacgccacctctcaatccccaatctccccgtgtcaatcacaatccgggaacgcacatcctcgctctcctcaacaacggaggtgccgtggcgaaccaagagccgtcgcatcacaacgagatcgctcgagcttttcccggcggttcgggtcctattcgtgttccaagcggtaaaatgcccaagggaaggcgattggtttttgaacatgcggtgtatgatgttgatgtgagattacagggagagattcaaccgcagctggaggtgactccgattaccaagtacggctcggatcctcagcttgtactcggtaggcatattgctgtgaataaggtctacatttgctatggattgaaaggaggaagcattcgtgttctcaatatcaacacagcattgaggtctctgttccgtggccattctcaggttcgttgtttctcagttacttattcgagtatccatcaggtatcatcgtcattctaactacatgtttgtctccagagagtaacggacatggctttctttgccgaagatgttcatctcttagctaggtaatggttctggaactataagcttcttctactttgtcgttttacattttatttcataccgtctacttgtctatttcttcaaaacagtgttagtctagatggaaaagtttttgtgtggaaaatttccgaaggatctgagggagatgaacaatcccagataactggaaagatagttgttgctcttcagatacttggagaggaagacaccaaacatccacgtgtctgttggcactgccacaaacaggtatttcaacatatttcttttgctacgggaagttgcatatttttctgttgtgaacatgagctcgctctgttgtgtctatacttctgattgtgtaaagtccattctttcaggaaattttggtagtttcaattggtaaacatgtgctgcgaatcgatactacaaaagttggcagaggtgaagtgttctctgccgaggcacctctccagtgtcatcttgataaactaattgatggtgttcagattgtgggtaagcatgatggagaagtgacagatttgtcaatgtgccaatggatgaccacgcgcctggtttcttcttcagttgatggcacggtttgtgtttgttcttataatttccttcactatactcttggaatatacgtctactccttttcataacatttctgaagttgaatttacctgacgaactaattttaactgttttcgctgctaactgggtgtaacgttgaagtttaattgattgagactcgttagctttagtttggttatgctagctcatccaaaattgaagagattttctaaattccgtctcactgtagattctcttcacaaccaggaataatttccagcagctagtatttttgtgtgtgaggcttactttttcttaataccaacaggttaagatatggcaagatcgtaagacacaaccacttgtagtattgagacctcatgatggacttccagtcaattctgccatatttgtgacatccccggaaagacctgatcacatcatacttatcacgggggttagtttgctcaaattattacttacttttctcattgctatataatgttatttggccctgctttgttgaattcacattttagaattgttgcttttgtttctgctaagttgctaacgcatacactgttggcaatgttcttctcgtagggtcctctaaatcgagaaatcaagatttgggtctccgctggggaagaagggtggcttctacccgctgatactgaatcgtggagatgtacccagacacttgatttgaaaagttcaactgagccacaagctgaaaaggcatttttcaaccaagtcatagcattgtctgaagcaggcctgcttttgcttgcaaatgcgagaaggaacgccatatattccgtgcatttggactatggctcatctccagtggaaacgctgatggattacttgtccgagtttacagtcactatgcctatattgagttttattgggacaaatgatcacccagaagaaccatttgttaaagtgtattgtgttcagactctagcaatccagcagtatacattagacttattcttgtgcatgccaccgccaagagagaatgtgggttttgagaagtcagattctactgtgtcacgggaggcaaaccttgttgaaagcacgttagaaacatctggaatgaagcctaccgaattaccttcagttagttcagtgcctaaaccatctattttagtgaatagatcgcaaaatgctaatatgttgagttttccagtggaccctgcatcagcggggatcacaccaccagcaattgttccacccaacggtgagcctaaaacttctgggatgccttctgagaccagtgatgtaggttctgcgtatgctccttcacctcaacttcctctaagccccagactatcaagtaaactttctggctatcacactcctgtagaagcgtttgagcaagtgctaccacatcataagcttggtggcaaaacaagttctgctgattatttttatgtgaggcaaactgatgatgttggaggaagaaatttggatgtgtcttctgtcgaggaaaactgtagaagcaaggacacgaatgttacacctgatgatgatgtgtctgggattcgaagcccgtcagcttttttcaaacagcccactcatctcgtaactccttcagagatattgatgggcgtttcttccactgaagcctccattactactgaagacaagagggatagagatgcaaatattgaggaagtgaataatgatgcaagaggcttagaagttgagttgaaagaagtaggcgaagcacagacttcgcagaatggtgaaattaactatcacgaaacagctgagaatcacacttcagaaagtagagaaaatatcttctgctcacaggcttcaaatctcagcactgagatggcaagagaccgtcatcctattacagagggaagtgccattcctggggattctatggcttatggacaacctttacaagctggagatgaaaggggtcttgactccagagatgtctctgcaaagcttcctgagtcgggttcatctagtgggttagtagctacaaatagcaaaggaaagaagcagaaggcgaaaaattcacagggtcctgggttgtcatctacatcctcaaatgttgctaatctggctgactccttcaatgagcaaagtcagagtttaaatcatcccatggcagatttacttcctcagttgttagcattgcaagaaacaatgactcaggtgacatatttatcttgaatctagttaaaacttatttctcttaacaatatttgtttttatactcttgcatcgttcactgagatacactattaagcttggtgttaccttgatttggcacatgagatcctttgttacattcgttttgaaacgaaaatcagatttggtatataactggcatttatcgatgatcagtttttgcttttcataccttggtaattttgttggatttttatttgttgacctgaaacgttattacccttccaggtaatggcttcgcagaagagatgcagagacaactatcaaatgct

SEQ ID NO: 406 - DNA, 7164 bp, Arabidopsis thaliana landsberg
  unsure (1)..(7164): unsure at all n locations
aagaaattcgcataggttagtttgctggtcacagaattcgaactattttcctttctaagattgaaaatgctttagtgtactaataaaacatttttctccattttgttttttgtagtttcgggttcagtagcaggagttgttttgttcctggtcttattaaccttgtttctccgttttctccggaagagaaaaatacggctgagacaacagaagctgaaggctcttattccactagaacactatacttatgcacaagtgaagagaattacaaagtcatttgcggaagttgttgggagaggaggatttggaattgtttataaaggaacacttagtgatggccgggtggttgcggtgaaggtcttgaaagacacaaaaggtaatggtgaagacttcatcaatgaagttgcgaccatgagcagaacttctcatctcaacattgtttccttgcttggtttctgctctgagggctctaaaagggcaattatatatgagtttttgggaaatggttcacttgataagttcatttcaggcaagagctcggtgaatatggattggacggctctatataaaattgcgctaggagttgctcgtggtctagagtacttgcaccatggatgcaaaacaaggattgtacattttgacattaaaccacaaaatgtactcttggatgacaattttttccccaaagtttcggactttggtcttgctaagctctgtgagaagaaagagagcgtcttgtcgttgctcgacacaagaggtacagtagggtacattgcaccagagatgatctccagagtttacgggaatgtgtctcataagtcagatgtatatagctatggcatgttggttcttgatatgattggtgcaaggaacaaagaaaacgctaatctagcctcttcttctaacacaagttcgatgtactttccggaatgggtgtatagggatcttgaactagccaattccggaaggcatattgaaaatagaatcaacagtgaagatgatgatctagcaaagaaaatgacattggtgggtttgtggtgtattcagccttctccggtagatcgcccagcgatgaatagagttgtagagatgatggaaggaagcttggaagctcttgaagtccctcctaggcctgttttgcagcaaattcccacatcaaatcttcaagaatcttctattctttcagaggatgtctctgtctacacagaaggatgatctaagaagctaccattgaacatatatatttttaatgactgtaaaaaattgtattcatccaaaatcatttttacaataaatgcatacttgtttgaagttcttaatagaaaacagagcaagaaaatcaaatctattaagaatgtggcctaatttctcccaaaaggtagctcaaaagttaaggatggccatattctttatataatgtccaaagatcttaatcaaaatcgatgtgagacattctaataaaatcatgttgtgccaaaccagatccttagaccgttgcttgagtgtgttgaatctagcgatgataagcggtgatgatcaatatgcttggtcaacgaagttggctgtgtcatgatttctccatgtcgttgacggtttctttctctccaaattgtgtgaagagtgaattgtctacattccgaattaaccagaagacttttctcttgaactagtttattttactatgttaaactttttaataaagatttccatcgcgataaaacatttgaggcgtttcatccaaagatgagatcatgactttaagttttatctacaaataactcccagactagactttttttgttttttttaaaaccataagagaaattacttcatcatctgtgcaagtctcttaaacgctctttggtcagctttaaaggatgaagataaaatgatttaggagataagagatagtatggtattggttgaccgtttaatttagttggagagaaactggaccgttagatatataagtgaatgactgtagcggtaaagagctgataaaattattgacttttcaagtttcctaaagcctcttcggtcagctataaaggatgaagataaaaagatgtaggagatagtatggtgttggtttaccggcaagtcacctatctcagtcccacaaatgcccaaggcccactaaagattcttttccatgttttaactcattttcggagaatagacgtttaggtgaaaactgcacattcttgataatttctactataaacaaaggttttacaaaacagtgataaaaaaatgaaggacaagattatatatcatagttgatctagcaaatgaccattactattactgtgttctttttcttcaccaccttttcttcattctctatctctattttgtgtgttttggcatataattaaataacttaatgaagagactagtctttctgagtcaactaataaatttctttgaagaaaaaaggctgataaatccttggaaagaggctggtttatctctttgtattggtccactatgattattgttcttgactctctctccatttgttcactatgagtctatgagtcaactaataaagccagttgatagctctcgagtctctctgttcttctcctctacgtgttcaatgcttatgcattcaaaaataaaacagaaaacataccgatgaattccaggccaagtaatccgacaaagctcgtaatacgatcttcaacgcttttattctgtggtgttgttctcattcatctttttgctgctcaaattgatgctcaaagatcaacaagtcgatggcagacgctcaatggtgagagttgctctcactttatctctttcttttgtgcattgtttccaagaaaacaagagaacttatgtatcagtagtactcaagtagtactttctttctttatccataggtgtagtagaagttggcataattaattaacttcgcattgatttcaggagaacagttattaaactccaataattactttgattatgtaagcatatatacttacacaagtattaaaacaacttccaattacttaatttatttatttactaggtgatgctccactggtgattgctcgtggtgggttctctggattgtttccagattcgagtatcgctgcttatcaacttgcaaccctgacaagtgtagccgatgttcttctatggtgtgatttgcagctaacaaaagatgggcttgggatttgcttccctgatttaaatctggccaatgcttcaactattgatcgtgtttacccaaatcgtgaaaaatcttactcggttaatggagtcactactaagggttggttccccaatgatttctccttgacagagctgcagaaagtttcttgtaagtgtttacgattcagttagtgcctttgtagtgtgttacaacttacagaaataagttttgtttttcttgtaacttctcacatatactttttctttttaccatagtgatccgaggaatactttcacgaaccgatagattcgatggaaatggatatctgatttcgacgattgaaaatgtagtaaccacagtaaatccagaaggtttttggttaaatgttcagcacgatgcgttctatgaggaacagaatctgagcatgagcagttttctgttatcagtttcaagaactgtttccattgacttcatatcttcccctgaagtgaacttctttaggaaaattactggcagttttgggcgtaacggaccgacttttgtcttccagtttcttgggaaagaagatttcgagccgacaacaaaccgaacctacggttctatcttgagtaacctaacctttgtcaagacgtttgcttcagggattcttgttcccaagtcttacatattgccactcgatgacgaacagtacttggttcctcatacatccttagttcaagatgctcacaaagcaggattacaagtatatgtttcaggtttcgcaaatgacgttgatattgcatataactacagttccgatccagtgtccgagtatctatcttttgtggacaatggcgatttctctgtcgatggtgtgctctctgattttcctatcactgcatctgcatccgttggtaagcaaaatctcttctacaaacacttttttaatttgtctctaaaacataaaaatcaaatatcttcttttcatattttcctcagactgcttctcccacattggcagaaacgctacaaaacaaggtaatgagagtattaatacttcacattttgtttctgctcttactaacaaaaaagaagaaacttataataaacattatcatctaccaaatggttcattgctcagtggattttcttgttatatcaaaacatggtgcgagtggggactatcctggatgtacagatttggcatatgagaaggcaatcaaagatggtgctgatgttattgattgctcagtccaaatgtctagcgacggtgtacccttttgcttaagatcgattgatctccggaatagcacagcggtccttcaaaatacttttagtaaccgctcaacttctgttcctgagattagctcagttcctggaatatacacttttagtctcacttggcctgagatccagagcttgactcgtaagtttcccttcaaattttccaaactgcttcagacaaatgcacactcttgttgcctgtaactaatgagagagctttgtttcttgtcctacttaacttaaagaggttacatatctgtaacaagtttatattctcctacgttgtatattatgtggacaaaattactggccacttttgagattacataacttggagttataataactactctcttattttttttgtgcagctgctatttcaaaccccttcagggtttatagtatttttaggaatccgagagagaaaaattcagtgactctcatttccctttctcaattcctagacttggcaaaaaattacacttctctctccggtgttatgatcagtgtagaggtgagttcttagtgtacctcttagtcttaagattttatcaatccgaccgttatatcttctatgtttttttttggtttcccccagaatgcagcatacttgagagagaagcaagggcttgacgtggttaaagcggttctcgatacactcaccgaagctggttacggcaatggaacaaccactacaaaggtcatgattcagtcaacgaacagctcagttctagttgacttcaagaatcagagcaagtacgaaactgtctacaaaattaaagaaaccgttagtgatattcgtgactcggccatccaagacataaagaaattcgctaatgctgttgtaatcaacaaagattcagtctttcctaactctgatgcctttctcactgggaaaaccaatgttgtggagaggttgcagaagggtcagctcccggtttatgtacaactgtttaggaatgagtttgtctctcaagcatatgacttcttcgctgatgcaaccgtcgagataaacgcatatatctatggagctggtatcaatggaaccatcacagagttccctttcacagctgcaagatacaaaagtaagttgccaaacttttgcagcaaaaggtctcacaacacaaaatgattaatattaatgcttaactttgtttatcaatacctaactttgtttatcttttgcaggaaatcgatgtttcgggagagaagaaataccaccttacatgttacctgttcaacctggtagcctcttaaccgctatgagtcctctgtccttacctccagcacaagctccaaacccggatttcatagatgctgatgtcactgagccaccactacctccagttatagcaaaatccccaacctcaactcctggaacaccatcatacattgcaaaacctttaagtttgttcattacttttcttttgcttctagatcgagtttggttccattctgacaatttctttttgttgaatggttgtacaggaaatttgctcaaagtaattcgcataggtgagttatgctggccagaaaaattttgaactgatttttttccaagataaaaaacgaaggtacttaatgaaacatttctcaatttgtttttgtagtttcgtggtcagtagccggagttgtattgttcctggtcttattaacattagttttctgttttcaccgaaagagagaaacgcggctgagacaacagaagctgaaggctcttattccactagaacactatacttatgcacaagtgaagagaattacaaagtcatttgcggaagttgttgggagaggaggatttggaattgtttataaaggaacacttagtgatggccgggtggttgcggtgaaggtcttgaaagacacaaaaggtaatggtgaagacttcatcaatgaagttgcgaccatgagcagaacttctcatctaaacattgtttccttgcttggtttttgctatgaagggtccaaaagagctattgtgtatgagtttctagagaattnnnnnnnnnnnnnnnnntctctaaaaagaagtcaccgaatctagatgtaagtacattatacagaatcgctctaggtgttgctcgaggacttgattacttacaccatggctgcaaaacaaggattgtgcattttgacatcaaacctcaaaatatactattagatgaaaatctatgccctaaagtctcggactttggcctcgctaagctctgcgaaaaaagagaaagcattttgtccttgctagacgcaagaggaacaataggttacattgcacctgaggtgttttcaggaatgtatggaagagtctctcacaagtcagatgtttacagctatggaatgttagtcctcgagatgatcggagcaaagaacaaagaaatagaggaaactgctgcttctaactctagttcagcttactttccagattggatctacaaaaatcttgaaaatggagaggatacatggaaattttgtgatgagataagtagagaggataaagaggttgcaaagaagatgaccctggtgggtctctggtgtatacaaccatctccattaaatcgtacaccgatgaacacaattgttgagatgatggaaggaagtttgcaggtattaaagtccctgctaagcatgatatgcattattctcgcaagacccatgcgtaacagactatactctcagaagagaatacatactactctgccgcatggataggatccacaagtcgaaaacttctttggacactc

SEQ ID NO: 407 - DNA, 2236 bp, Arabidopsis thaliana landsberg
attttttctattaaaataatcaaatcttataggattgaaatgtatttttattcataaaagatgaaaaaccaatccaaacattttatcaagtatttcaaaatgtacgtaaaacattgaactttaaaatcaaacccacatattatcaagccaattcaagtccattaaaaacctcaatctaataacaactccttaatctctctttacgtacatttaagagaaaagtagtactagatctgttacttaactggcatgcatcatcaacattaatcttatgtttgttttgttgttgaatgagatatttcccatccaccaagggtttgttgtatacttgtatgtgcaagagatatgttgactagactatcagaagaattcatacgaaatgtttttgtagatagagtaaagcagatataaatgtgagtgtcaaacaaaacttaacttgtgaaggtatgttattccaaatttcccaattcaacctttacatttgtgtccttacgtctccaaaaaattattaccgtctttggtaacttgataacgtgacgagcatggactatagggtacgtggaaaaagaagagaaagtgtaacaaacttaaaaattgtcggctatgataaagtcttaattattaaagtttgttacttaatacaggattacttggaaatatggtggcgggagagcgcgtcaccatggggaatgagataaaaagcacgaaatcataatcatattttttctttctagttttttttgttaatttaattttagtaaagtgtgtgttaatgtatttctgacgaacataattcactaggctaacctctaacttgaagttattgtttagttcttctataaaacatggattctcttcattcgatcttcccacacaacactcatttattatatttatcaaacgaaatttctctcttcaaacaaaaatcaatcactaaaagaggactgctcgatctcttcaaaatgtatgtatctaaaccaactaccctcttccattctttttctatcatagtttgtgttatcactgtgattcctctcacaatgttaattatattctcgctatcatttcactaactcatttcttgcaaggattttctttttaaaaatgtagctagcaacaaaaaaaacaatcttccatttttttatttgttaattcttttaatttatgctgtcatctcacttgtctcaaatttgtttctcttgcagggatccattgggaaatttgcctgcagatctcatcagaaaatgtacagatttgatggacttgaactttgccgaaggtcagagactaagaaccctcaacaagaattggaagctagcgttaccttctttccgtaagggagcttacagagaggaaaggccttggttgctttaccgtgaaaggggttccggagagacccgtttctttgaccctgtgagagagagggtacatcgtgggaacgacccacgtcttgcagatgcaagattcttgggatcaacattgggttggcttgttatgtccgagtccttggacttaaacccacgcaaaacccaccaaactttcctgtacaacccgttcatttcagaactgcagcaactacccgaactcacccttgatagcccatatcccacgggtgtactccgttacggtgtactcaccggaaatccaagtgacaacaacacttatgcttgcctcataacagattacttgcacgaaattggtaatcggagggatacttatacgctactaatttactatgtagccaagacgagcggacgatgggagcagaattggtccgtggcttctatgctagtcgttggcattttcgatacttggtatatagagtccatctccccatctccggacaaaatatcaattgaaatatggcccaaacgttatgacttcaccttccaaacccaagagtggaatgtctcaaactttattccagtggatcctatccaatgggatcctttccacgaccaatctttatatcatgtgaaacatcgacttcagttaccagaaaatccctctactctagccataattatcggcacttcaactgatcgcacgagagtgcgcaacaagattataggtgatcaatctgatgatgatgatcctagggcttctgatcacattattgacggagtttgggttgaggttcgcccttagcctgatgttaatctcttaaaaagtatatatatctacctcatgactagttaattatttctctgtttttttcgtttaagtatcgttttct

SEQ ID NO: 408 - DNA, 1410 bp, Arabidopsis thaliana landsberg
  unsure (1)..(1410): unsure at all n locations
aaaatagaactctatctaagcaaggctgaaagctcaaatgtaacaaacaaacacccaattggcaacggcgccaaattgataattaagatcaattaatcctaaagcactatcatgtcgttgtnnnnnnnnnnnnnnnnnnnnnnnnnnnnnnnnnnnnnaacaatcaagatgtgatctgaaatcactaagtcaagccaagcaataacaggttttggtgtgttctagcagtcctaagtgaacatgcagaaaatagaaattcaagcagaaacaataaaacactcgaccaacacagctccttgcagagcactgggtgaggtcgagtgacaggtcgagtaaaagacagaaaataaaacacagatactcgactgcacagtctgttgcgagacaactgagtggtcgagtatgaggtcgagtaacaagaaagaactgcagaaattaagcgacagataacaagatgcagttaacaacagtagagtaaataaagaattcaatcagataaagaattcccgaggatagggtaattgagtaaacaattgtagagtttacaaagaattcaatcagataaagaatcccctcctgggatcgatcgatcccttcctggcgggtctgaacttcatttggcacagtgagacacagaccaattaggtggtacatagcttcccttaagttcggatcaaaccaaccaacacactatcccaatctattcaatgagttcctatgatgcttaacaatataaccaatataatctcgacgtttccggttccttgatctcctttcccgctttttctctcttttttttttagtatcattttttttttgtttttttttttttttgaatagcgggggagtggaaccggtgtctcacaaaaatctgcatcaggaaaactcaaccaatgtagcatcacatacccatgaatataacaaatgtacaacctcaaaaccatagtggctaaatattatcacatatgaacaaccagtaaacaacaactcactatcctaacagaaggaaagctatgtcggtccgtatactccgtagttttcgcacatggatgcatatcataatgataatataagaatgtttgaggtttcaaacaatgggtgggggaacaggtgtggtactagactaaaaatgagtctagccattcagagttagcaaagagtgctaaaatgatgcaaagaaaactctgaatgtatgatccattacatgattctcaagcccctaagtgagataaattaagtccagattaagttcaaatagataagagaaagctcaattcatccaaatttcaaggagatagggattattattaagcgatctagtgatagattttcctgaccttccaagttatcaaatagtgctaaaatggtcccaaggcaatcaaatcaagcatggtgcagttctcttcggaa

SEQ ID NO: 409 - DNA, 3511 bp, Arabidopsis thaliana landsberg
ctgtaagttagtgtttaaatttatagatatctgttctgttttactctgctttgttctgttgtgctctgttttgctctgtttttgttttgtcctaaacatctctatttggcagaaatatatcttttagtgaattaagaggccagatagatccagccttctccaaccttacatctataagaaaattgtcggtattttttttcatgtaataatcactgacactctgtgatacacagagttccttactaacacaatcatttttcattacagagatttatccggtaatagtttaacaggagaaatacctgctttcctcgctaacttaccaaacttgaccgaattgtgagtcatatcaactagagcaaatatttcacttgatcagtgaagcaaaagatatctttgaatttacgagttgatgtggattcgtatatgcagaaacgttgaaggaaacaagttaacgggcatagttccacaaagattgcttgaaagatcaaagaatggatctctttccttaaggtttgcgactcgtaaaagctaccttttattaattttagtttagttcttcctctttgaatgtgatttagaaccgataattccgcaatgcgctttgacaagattcattcctaacatgtctacattgtaactttatagatttggtagaaatccggacctttgtctctctgattcctgttcaaacacaaagaagaagaacaagaatggatacatcattccattagtagtcgtaggaatcatcgtcgttcttttgacggctttagctttgttccggcgtttcaagaaaaaacaacaaagaggtatgatactaaaaacaaatttctgccaataagaaagtaactaaacgaggttcttataggtacacttggtgagaggaatgggccgttggaaactgccaagcgatactttaagtactcagaagttgtgaatatcacaaataactttgagagagttattggcaaaggaggttttggtaaagtataccatggtgtcataaatggagaacaagttgctgtcaaggtactctctgaagaatcagctcaaggctacaaagagtttcgagcagaggttttttttgcgtacctttcaaggacttaatcttaatttatctcaaactttttcacctaactaatctagttgagaatcgcaggttgaccttctcatgagagttcatcacacgaacctgacttctcttgttggatattgcaacgaaataaaccacatggcgcttatctatgagtatatggctaatgagaacttagagatttacttgtcaggtcagtctctctggtagttagttttcatcattggtcttttgctgctgttgcaagaggaaactaaacttaccttctggtttctttcaaaatcaaggggaaaaatcttatgtcttgagctgggaagagaggttacaaatatcactagacgcggcacaaggttggtaacgaatacacaaagaggtaggtgaaaaaatcaatgaaataaaactctgttgtttgtttgaatctcagggcttgagtatcttcacaatggctgcaagcctcccattgtacaaagagatgtgaagccggctaatattctaatcaacgagaagctccaggccaagattgctgactttggattatctagaagtgtcgcactagacggtaataaccaggatacaaccgctgttgctggaaccatcggttatctcgatcccgagtaagtaaaaagcttcttccattgtcatttggtataagctgttacagtttctaaggcattgttttaaaaaatgaaggtaccatttgacgcaaaaattaagcgagaagagtgatatttacagcttcggggtggttcttttagaggttgtctcaggccaaccggtgattgcacgttcaagaacaacagcagagaacatacacataactgaccgggtcgacttaatgctgtcgacaggagatatcagaggcattgtggatccaaagctaggagagaggtttgatgctggttcggcatggaagatcactgaagtagcaatggcttgtgcatcttctagttctaagaatagaccgacgatgagtcatgtagttgctgagctaaaggagagtgtaagcagagcaagagctcaacaagtgatataaaattgggacagtagttagtagtaaccacaacatgtaaaaattcaattggtatgatagctaacaatctcccacattctgttgtgtgtttctttgttttgtaataactctggttacgagtagagagacattcatataagaagcacatttacaaagtcttaaaagttcattataaccatagaccaaaaggctagttagacaacttagctaattcattacaaccatcgaccaaaaggcttgttagacaaagctaattctcacacgagaatccaaagtcctaaaagttcattagagtagatagaaagatgaagcctaagatagataacaaaataaggcattacatcttcattaaacccgagattaaacggataaacatatacaatccaatagcttcctcttcttcttcttagttggtttgagtaagcactgaagtcacctccttcaaaacatccatgttcgccaacaacaactcacatttcttagcatccacaagcttcatcttctcttgaatcctcttcttagtctccacggacaccttgctccacttcttcttcacagaatactcatccaaaccgagactagcgataaccggaacaagaaaagactcctcaaaccactccgaatcttctccaagaatcacgacttgctcatcttctttaaccaaaggtttcacgttcttctccttgctattagccttaacaagaacagattcatctttcactttcttcttcacaggagtttcaaggctcacaccatcagatccccaaaaagaaacagccaaacccaaacacttcttatcatgatccgattcaacacttctcaccttccggtcaccaaaatactttctcttaaagcttctaatcttgtcaaagaactggactttactaacatcaaagcttatagatttcttggcgatatcaaaaaacctatccttatgatcccaaggacttgtacctgtctcagctttgaaatcgatcattgcttgcaggagagagatctcgtcttcttcactccatactctctgagcatgcccctttttgttatcgccctctttcttaattcttttgacatgcatgtcccttgacgtggttccttcgctagctcgcttcttccctgacttcaccgccggtgattcagtagcaccttcgttattccctgacttcactgccggtgattcagcagcaccttctttcttccctgacttcactgccggtgattcagcagcaccttctttcttcttccgcctggttaagacgaatgactgcttctctgactctgagtcatcagaaactgccacggcggcggaaggagagtttagggtttttgttgacggaacagtgacgggagcttcaatgggtttgctttctttagaagaagagatctcttca

SEQ ID NO: 410 - DNA, 7320 bp, Arabidopsis thaliana landsberg
  unsure (1)..(7320): unsure at all n locations
taagattctggttgttcttcttttagatgactaagtgggggataggtttacctcgttttgtagatgtcgtctaccaaaggaagcaacaccgttagtctgttgcatagtgttaatgtgcccaatcttgagaactccgttctgccaagcagtatagatgatgaaagtttgtctatggccatgaataattagtttatggccaaagatagtgaatccactgagtctgatattcgattgaatcggatccgtcggaatgtccggaagatgttgataatcatgatggtctgttatctagtgaagaggcaaaccatgttgagtggatgatcaccgaggatggtgagttatacgcggtgccaactgagaatgccaccgaagaacaagcatgtgacagtctgaacaatatactgtcacgtttctatgtgccatcgacggatgaggagggaagtttcagtgttccaaatatgggaaccattggcgagcatgggctagaactggaagaagtgaatggagacatgttcgatgtaccattgatccaggcgaatggtgcgtttggagcgatgaataagtatggagacgatgatgagtatgacatgctaatgcttatgggaaatgacgaggaagatgagagtggagtcatagagaatgagatagagaacgagttagagcaggcgatcgataagttaatagcctagtgtgcccaagactttggtccgaacggagaagaaagaggaggaaatgggaacgatgggggtaattcctcattggactcatttgaatctttaacgccataacctaagagtccgagtgtgatcaacatctcatcggatagttcggaggctatcctgatgatgctgaatcccagcaagccggaatcatgttgggagattgagatgtttaagggagatgagccaagtgaagaagaaggaagaggaaggtgggatccgatgctgcttgaacaggaactaaaccacgagtatttaatgaatcatttaaaacttgatgaagaaaggtcgaaagaaaagatggttgataaggagggagaagacgagaggcgaaagggaaagagaacgaccgaagtaggaatagagtcggagaagtctaaggcccaaaggatcgttggagtaaatctgcatccacttcggatcggatatgggattaattccaaggttaagcccagaatacgggcaacggcgaggaagtcagttagaaggaagttacccactccggctaagcgtccgtgggagatatgtggctatactgatcattcgactgagcagtgcttgcatccaccacaggctatgccttatatggttgattgcgccaagtgttactcttgtggaggagtgggacatgtgtccatgtattgcccgtaccttgcgccgaatgcgggcgaaggatcctcgaggtgagccgggccattaatgactgcggcggcggaggagaagtgtttgaatgaagggatgtcctcgtttttatgggtaaggtgtgagtgtcccaagtgtaggaacccttgactgatggtccatgagatcttctaggaaagaatatagttaacgtttttagactaagtataaaatcgactaagtcatagtgaatttgtgtgtaaatatgctaaggcctagaacttgttgaatagtacatgtaagactaagtctaaaatccgatagttataacttgtataaacttttgaatgcataataagttaagtatttgcttgtttgtgtggtggcctaccattatatgagtgagaaatcacttgtgtaagaatcggatgtttgtgtttgagttagaaaccccatcggaagtacaccagcaacgaccgaccgtttgaagaatcggagaaaagaaatcaaattgagttgggatcgagacaagtctaaaacaggcatacttcagggaaacaggcaaaagaagggaagttcgatctaaagtacagacaattatataatcagacaagaggataaaagagaaacagaaggaaaaggggcgagagacttccttaaaagagtaaggccgaagattttagtttgtgattaaaaaaacgaaggaactaagagtaagggagaaacaagccatgaacgtagacatgaaggagattcaaaaacgtttgtaaaaatgtcaaaagaattcatgggggtcagaaatgaccgagttagaattcgaggacgaattctattaaggaggggagaatgtagtcacccgcataagggcatcgggtctaccaaaggaccgaatgagaaaaagttgccttaatgcatggccaattgaccgcatgtgcccaaaaagtgctaaaccgtcaaaaggcaaagatgggcaagaatgggcacaaatgggcaaagatgggaaaagttgggcatgctgcgagagaagtttgccctgccgggtggagaaccgacatgtgtggacacctcacttgcggtgccttgcggctcaagtcaccaatcttggagccaaagtcggcttagttttggagccgaagttggctgagtcttggagctgaagctgatggggcaatggaatgacacccgtagacacctgtcgccacgccatcgcccgagacacctgtcgcatgtgggtgcggcaactgtctagacatgtggcagcgggcggtgctacatggccgaccttgggcggactataaaatgatgctattctcagcccattttcatttttgaaggcgagagagactgtaaggttgtctgaccgataactcgtccgaaaccaagaaaacttgcccgaattcagtaaatcttgcccgtggtctaggaaagtgtttccgtgtttggggaatcatcgcttgtggtcgagagaactcgtccgagtaagaagtcatcgatcgtgatcaagagattatgcctgcgactaagaaacttaccgaaactgtgcgttgtggtcgaattgtgtgtttgtttgcatgttttctagagctagtctttagattatatgcatgcttactcacttaaacttaagtaatcggaattcggcttatgaacttgaatcttaaaataatatgggcatttgacgaacttgatagttaatatcattaaggaatggaatgaactagtgcatggctaggctacgtaaatatgaacttaactaagtttacttgatgatttatgatttgattcgggagcgttacagaccccttgtttcaacattcttgctttcccgcttatagagtggtggtgctcgtccctataggtctacactttccatttccctgtacgcttttgtgcagagcagtatatcttccagttgcagttctcgttactgcatatagctgcaaattagtcgcatcccatctacacacctggacatcataattcatcttcaaaacatgtctcagaagttgatcttttaactcttcaccgctattaaagatctggagcatccaaatgtaaggaggtttatccttggagaactgcttttctgcttgatgctctctcggtttgctcatacatatcccattcatcatttgtctccattacgtgatcaggccgctcagcatcatagtattgtctctcaaattcatcatcatcatcatagcattgtctctcaaaatattatttatatttacatttgtaataatctaagcatcaaaatatgcagattttcagatatttttaagtaattttaggtatttaatctacttttaagtaaatttgagtaaaaaatgttccaaagtttttagatattttgtgtattttcgagtagtttggatatatttgattataaaaatttgatttttggaaactttgggtaatccgaatctcatctgaaatatccgactagaatccgatctaaacccaaaatcttaaaatacccgaacaaatgggtatccaaacgcccacttctaatcccgagtgacttatttttggaatgtctctagctaaagtgttacacccctatataatgaattattatacaattaatgaaaatcgggaaatgtgataaagttttatatttttacgtatacattgttaggcctaggcgttcgagtactagttcaggcgttcgggtactagttcaggttcgattctagttttttgggttttatagtttaggcctggtggctccatacatgtatatatgcgtgccacgtttggttttggctacttcggttcgggtacccgagataatgaaaaaattggttagatttgataaaattttgtttaatttttccattgttggttatttttggtattttagtaattttgatctatttatagtacttgatatttttgaatttataaaaataattttgggctacatcaagtcaatataattataatatatttcgggtttggttcggttattcaaatatttattagtgtttcgattttgcatattgtcaaaattatcttatcgtaaattttatatatattcaaaattaatcttttatacccaatgaaagaagcatagaactaaatagaaggaaataaattaattaacaatgaggtgagtaaacaaaaaataaaagaagccaagtaagcatgtaagaaaacaacgacagaagaaaagaaacaaaccaaagaaggaaacatgtaaaagagccaagcaaatgaatgaattagttgagtaagcgaatgccaaataataaaagaaataaagaagctggcaaaaataagtaaacaagttaattgcatgtatggtctgagcaaacaatgaagggagtaagaaggaagcaaacacacaaattaagaaatgaaatgaagcaataaggagtgaacaacgaccaaataatcaaagaaacaaacaagaagtaaacaagttaaagatgtaataaacagagagaaaaaaacaagcaagctagtagttaagaaatcaaataagtaaaagaagcaaagaagaaagcaagtaaacaatgtaagtaaataagcaatcaatgtatcaagaaagcaaatatgcatagattcatacagaaatgtaagcatgcctgtatttatgaatgtatggatgtatgtatttatgaatgtatggatgtatgtatttatgaatgcatggatgtatgaatgtatggatgtatgaatgtatgaatgcatgaatgtatgcacatatgaatgtaagcatgcacacatatcacgctatcaaagaggtcgatgcagattttcagagttctggaagctgggtgtggaagaggctgatcaagcttcgacgttaagaagactagtcatcttattgatcaaactggctcaaatgggtaatgtctctcaggttgttcctaatggcagttggacattgccgctagccgttatgctccaagcatgcttacctattcagccgcgagacactagtcttcccaatctaatcaatttctttggaggaaatcatttgatgctccaacaagtatgttctctacgtctcttacgtgccaaatctacaacatgtggcaaaataaattgtctgttttaggacagtaaggttctcacaaaaacttctgaaacatgctaatctctgttttaggacagttaccttccaggagaccatcttcgtcgatggggtttggtggttcttaccgcttgtctcctttgtgacattgatttagaatgccaaacacacccatttttaagctatatgagaaaattcaaaatattaaatctctacagacgaagatacgatacctgtatagattctttgaattatcttttccagaaatcggtttcttactctggttcttgcattctttctgtaactacatatgttcaacgaatgaaggaatttattgatgtatatgtggatatgcaagaagctgataacaatcatagctcaagcttaacagtttcattaacctaccttgagctcattgtaagttgtgtgaagagagtggaccagtggattgtcaaacaatgtcaagcagcgatctacaatgagaagaattccatgctcccccgaataaagacacgtctgcatatttcacatcaatattttggcatttatcaaatagagtttatagtattcatttattcaatcacgatgcaaacggatttatcaatattcaatcaaataacactatctgttaccttcttgtctttgcatatttcaatatttagtttcatgttacttcaaaatcctgaaatgttttgaaaaaaattagttatagcaatgaagctttgaagttggaatcaaacaaatgaaactaagttatagtaaaaacatgactgaaaagcatatccatcaatctactcttgctactacaatggaaaagtgtactctagtgtttcccttactaattcccaaaccaggaacatgattaaagaaatccatctaaaacagaagttcatcttcatatattagcacagagaaacaaagaaaatttctaagaaatatctgaaagaccagattagatagggaacaagaacattagatttacaaaacatttgtataaactctcttctcttgttctattttttcaagcttcttccctgtggaaaacacacatttgttaataactgaattcgagacaaaaaaaatcccattaaatttacattaccttgatgcatatatgaatctcttaccaaataatgctgaagattgttgtattaatccaaatgaacatattaacgaaatccatctgaaacagcagaacttcataaccatatattagtacaaagacaaatatctgataaaaatcacaatgaaacctggaaagggaagcagagtctctgttcttcaccgtgcagggatgaaagaagacctgcaaaaaaaaaattcccaattcaagaaaacacaaaacttcaagtaaattctcaataacaaaattaaacaattacttcttttcaaaatgtgtattttgattgctctaaatagatcttgactttggactcgaatggctgcatcaaagtaaaatgaaatgtgaaaagtgaagcaaaccaatgggtgtttgatcagtacagtactcaaataaaatatttgtttttgagagactaatataatcttctacgtctgaagaagagaagagaaagtaagtcgaaagactaagcataaaagaaataagaaagattgaagaaataagcagaatggtgtatccatatatgagaggcacgccgagacattatttacgtccgatttgagaagacaacaaaaactagtagaacatactatataagttccaaaccatagaaagaaaccaagacctgaatatgattttattgaattatcatgcaaaagctttacttgcacaaatctgaattttgcttagcttttggttnttctctagacntggatctctcacgttttttctcagctacggattgcggtgctgtaagctaacaaaatgcataacggtttacatataacagtgttccatcagtgcaaatgtataca

SEQ ID NO: 411 - DNA, 1324 bp, Arabidopsis thaliana landsberg
  unsure (1)..(1324): unsure at all n locations
aggcatttcagtacttatccgaacaaaggataaaagtggtcccaggggccaatttcaaaaagcaataaacgaaaggatgaaagccttcccaggcactaagtctgaaacaaaaacataaaagcctaaaacaaacgaggagcataagtgatcactccctcagttccccggctggcgtggcaaagacagtactggaaccctccgtgagacctcccggaaacgcatctttgatgctcccgaactcatccaagccaattggcgtcccttgctcatcgacgtccatcagacgtaccaccgaaatctctgaaacatgcgggagatccaacttgcttagagtaaagattgatacctccttcgatttgcactgcgcctctaggtcatccagctctgcttgcagccgaggtctctccacggtcaaatcgatagcagcctttgtgatctggtcgttcaaaaccaagttcgactccacctcgaccgcttgaccctccagcatcgtgtactcctttttggcgacccacttttccttgatcccagccagcaacttcgaatacgcagcagccagctcaacctaagcattgtgaaccaccttcttcgctccttgcgcagtcaaagtgaggtccatcacccttttggagagctcttccctcctctgctccaagcgatgaatctgcctccgaaatagcagccgcaggttccatcctctcctctctaggggaggcgaccccctggttctctcatgaccaactcagccgccagatgcactccggctgggtccgagctctcttcggagaggacggtgcaccatcagaacgaacaactgcagatggcccagacacctgagcgacctgattgttatccgcttgacctgctgcagtagaggtctcggtattgatcttaagaaacgacggatgagacactgaggcagatgtgctggagatagctagactgttccgagccgcagtcaccggggccaacagatcaccagcacgagcaggagccccggtgtgtgctcgttgaacacgaagacttggtcgcctcattcttcctctggaaatgagcgggaggtccgaagtagagctggagtcaggaggaactgaacaaacaaagcaccacatttgttattttatagctcgatcgcgcaatgactcgtacacaaaaaaaaaatgatgaaactcgtacttataggcaggtctgcctcggggatcctgctgtgttgctggaaggacaattgcgggannnnnnnnnnnnnnnnnnnnnncagctacaatgctatctctgctaaaagtggcccagtcggtctgaccaagtcggagaaggttaacagctc

SEQ ID NO: 412 - DNA, 3591 bp, Arabidopsis thaliana landsberg
agaaaataattctcatatctaacgtccttgccttctttaacacaaaccctaatatatagaaatggaaacaaatcaaatgactttagaaagtagaaattatcaaaaagtaaaaacctatcatccacagtttcataaaggcataaagttaggtttttacttttgcatctttcaataagaaaaagttagggtttatcttgtttttcttcctcatcttcttctctcgtgcagcccaaggaacgcacacagagacacacaaacaaaaaaacaaacaaagaagaagtaaaatggcagctacgactctttccatcgcaaccacaatccgttcctcatctttttcttccggtcttgcttccgcacatcacttcccttctcgacccctctcgatagaattcccctttagctttggtgtttcttcttcttctacgctcagccaccgtgcaatctacctccatcctatatccgctgtcaaaactcctaagaaaattaagaagattggatccgagatctcgtctctaaccctcgaagaatcccgcatcctcgtcgactatgtccaggacaagttcggtgtttcaatactcttttcagcacctgctgcagcggctttacctcctccccttgacaatggtggtgcgacggcttctgtggagaggcagaccacattcgatgtggttatcaatgacgttccacgtggtaatcgtattgccgtgatcacagccattagggctatgactagcttgtcgttgagtgaatcgaaagagctaatagaaggggttccgaagaagtttaaagaaggcgtgaccaaagatgaagcagaagaagacaagacacagctcgaagaacctggtgccaaggtttccattgtctaagttttaacaatcggagtttttaaaatatgatgtgttctcttttcttttctagactttcatagatccatttatttgtttcaagagacacatataaggtgcttttttcatttctagtgtttgtcttattataaagtttgttgtaaatctcaccacaaactctctgtttttctcgcaacctctgtttttgttcttgttaaaacagaaaatacaagaacacgtttaaacactttaatcttctacattgttaataacttggttactcttacacaacacaaggacacacatacatatactacttctacttgagacacacacacacacacacttgcacacttgcacttagacctaatgatggctcttacacaagacaagtagccaccctacatacattggaattctcactccttgattcactcttcttagactctaacttagacttactacacaacactatttaactagatagaagaactcaactaatacttagacaactaaacatacttgggcctaaactaattccaacccattacaaccttattacaaaacacaaagcccatatgtttgttgactttcttctcttcctttaactcttcttttcacgacatcatctccttctcccatgcgtattcttcttcttcttttgcagattcaatcaaggatacaattccaacaatcaaccatccatcatatcactaacatgaaccgctaataacagtgaatcgtttgttactttgtttaatagagttattaaactgattaaattatacaacctctgaaaaccagagaggtctagtaatgcaaatgagtacgtaagcaaatactttttggaaaaaaagagtaacactaacaacatctgtgtaggaatagtaaacaaagaaaatcagttccaaattaatagaaaaacctagaaaatagaaagaatattttccaagtgttaacagttggaaccacgaagatgcaataacgaaacaaaacgataccaaattataaagcatgaattagattgtcattatttttagacgcatacttgcacttcggatatattcacatacctgccggtattggattcgatttggattcatttccgtgttttcgggtagagaaatttaggatccattcggatattttaaaaagtcgatacgggttttgttcgtgtatttttttgggtttgggtattcggtttcaggttttttttttcccattgcaacttcaaaccttaggtattgacatctaccagtcggaaacatttttgtccatatactttttaccatagttctgttcaagcgacacgtaacaacatgtgtatgcctaacacctctccaggataaaggatttcataccatgagtgtcgtaggtttaatggtttgcccttagtctacgtaagggatgctggtgggtcatgaggacatgtgattgaagtctatataggtgttctttaattaaactagttgagtgaagatggggtggtaaagtatatcgaaaaactcgaaagacgtagacttttcttctcgctatccttaggtgagtacatgtagtttttataataaaggtcaaatttatttattgaagtttttgtaagaaagctgagaaagcaacaagtacaggggaaaaaacgtaacaaccctatttttgtgtagcttattcagtcacctcttttacgtttgcgtcgaggttgttcgatttgaaccaaacttggaacataaccaaacacatatggatccattttaggacagaaagattgttcaaaacgcagttgtgtgactttattatcctccccaacagtatatactttgttttcgaagacctcatcattggtgtggatgtggaacacacgacatttctcaaaacacaagacttgtttcttctcctcgtcgacaaaaaaacagtccagggcaataaccaaaatcagaattatccagcgttaacaccttgctccacgacaagacttgagtggtctcattaatcttatttgttacccatatttctttccttgatgtacctctgagctgtaataatacggatagtttctcttctcgaacaacggatagagccacagtttcataactacatctaggaaactgatagggaagaggcatacgatttccaaaactctctgttgcataatcaaaactaaacatatcgagctcccggtcttttttatcgaaagcgagccagtaagtcttacccttcaaagacacgcaggaattatgataaagatcgaagtccatagtgatatcaagaaccctccaagaactagactaaagctcacaaatttcgaatcctagtttgctgccacataacgcgtatctgtatctcagtattttatagctagttatgcgggatttaatgtcttggtaggatccaagaacatatttatgggtctgttcacgagctattggttggacccacctcgtttgtaccataaatgggttccaaacaaccattatagtgtatactccgttgatgtataacaaattaacaataagccatcacagtgaaagacttgagatacagtgactcgcctaagttcattcctaacctttacggatggtgtttcgttgagattaaggctcaatgaacaaacccttaatttatttgtcaccatgagaatcagagactgttttgctgctttatcaaagtggtttcttgcgaccctcttgtcaatgaatacactgctccatagcttgcaagtagatcgtacatatttaaggatatggcaggaacg

SEQ ID NO: 413 - DNA, 1670 bp, Arabidopsis thaliana landsberg
atacactgacttgtggaagcagacaagaggggcgtttcagaagaataagaaaatggatatacacacgagaatcatgaagaaaaactacagggaagttccattgtggtggtttttggtaatccttttactgaatatcgcgcttatcatgttcatctccgtgcactacaacgctactgtgcagcttccttggtggggagtgttacttgcttgtgccattgccatcagtttcactcctttgatcggtgtcatagctgccaccactaatcaggcaccgggattgaatatcataacagagtatgttatcgggtatatctacccggaacgtcctgttgcaaacatgtgtttcaaggtctatggatacattagtatgactcaagcgctaactttcatttccgacttcaagcttggtcattacatgaagatcccgcctagatccatgttcatggctcaggtatgcatgttatcaattggtcttgagacagatgtcaataaaactaaaacatagctaatcaaactgtaacaagtgcaggtggctgggacacttgtggcggtggttgtgtacacaggaacagcctggtggttaatggaagagattcctcatctttgtgatacatccttgcttccttcagacagccaatggacttgtcccatggaccgcgttttctttgacgcctctgtgatttggggactagtgggaccacgcagggtgtttggagaccttggagaatactcaaatgtcaactggttcttcctcgttggagccatagctccactcttagtttggctagccacaaagatgtttccggctcagacatggatcgccaagattcatatccctgtccttgtgggagccaccgcaatgatgccaccagcaacagcagttaacttcactagttggctcatcgtcgcattcatctttggccacttcatcttcaagtacagaagagtgtggtggaccaagtataactatgtgttgtctggtggtttagatgctggctctgcttttatgaccatacttctgtttctagcactcggacgaaaaggaattgaagtgcagtggtggggaaattccggcgaccgagatacatgtcccttagcttcttgtccaactgctaaaggtgttgtcgtcaaaggctgtcccgtcttctagctcatgagtcatgagacaaaagcatataccaagtgctttgtacagaacacacagcaaactgataattgtaattctcggaaatgtctttactctccaagaactatatcttttgtgatagctttaaaactaggtactatcctgttctttgactgaacacaaatgctagtgattctatatgtggttccttaaaatgattttaatgcatgcttcagaaagatgttttgcctcttaaaagctggctaattatggtgaggatggtagaggttgcatagaaagaaagaataacacattgattgcataaaacttatacttgtctttgaatttaacatattcaaaaatatagccaagaaaaattaaacaatcgaactactgcatcgagtcttacaacgctatgatctctttgtatgcattgttgcgttctatataccatataccttaaagtcctcttcttctatctgtctccattactgaatccaaaatgtgcatatgtatagttaattcatcataggttgaggggatt

SEQ ID NO: 414 - DNA, 1789 bp, Arabidopsis thaliana landsberg
tatagtaacttggaacgaacttaatgccagtcagagatagagattgaacattgattgcctggattctcaattaattcaatcatattaaatgattgtctaacattctcaacataattcagtcatattaaatgatttgtctaatgaatgcttttaatgttcactaatgtgcccaacccaaacattacagaatttaataatagcttggattttcccactaaatcaaactaaatcttcgtcagacattttccctcgcaatatgtgtccaaccataaaaaaaaaaaaaaaaccactaattacgattcgtagttactttattttgttttattcaaatcagccatttgaaagtttgaagcatcagcgcaaacattaagaacaagaggtttctctaaatagtttttcgtctttatcctttttacagtaacaacatggaagcaacaagaatgggttttggtggtcttagcgttcctctctctctcacgcccaacctctctctcattcctcagcgtttgcttgacaagcacaatctttccctgaaaccggtaaagatacaccacttggtatgtgtaaggtctactaagagtagtgatgatcttgagactagtcgtccttcgacgtacttttctccttctctttggggagatcactttctctctgtttccctcgaccacgctgtaagtgcattcatatgagccttttttcaagaatcatgtcgcagaaaacatggttactgactagccaatttgtattcattttctaggaatttgttgaactagaaagagagattgaaactatgaagccgctggtgaaagacatgctcatgtcttctcaaagcagcgacaaggagaagattcgtctaatccatttgctcgttagcctcgggagctcttatcattttgataaggagattcaagatatccttaaacacagtttcacaaagttggatgacataatagttggggaagatgatttggaaacaatctccatcatgtttgaggtctttagattttacggtcacaagatgtcttgtggtaagagtatatcattttccttgaatcgcatacatgcatgcaacatattaattcgtatattatgtatatgtttacttatatatatgattggctatatatacggttttattgtagacgcctttgatagattcagaggtgatgatgggaggttcaaggagcatctagccagagatgttaaaggaatgctacaaaactcattatacgcacctcgatactgtaacatagaagtactagtggcaagagaatatatatcttactacgaacaagaagatggtcacgaccagatcctgctcaagtttgcaaagcttaacttcaacttttgccagtttcattacatccaagaactcaaaactctcaccaagtgacatactcttcttccatcttgttaataacatcggtctcggtttcaatttttccaattcatttactttcatgcatggtttcagatggtggaagaacttagatcttgcatctaagttaccttacattagggatagacttgtggagtgtcacttggcgtctgtggcagcgtatttcgagccacagtattcactcgcgagaatcatcgtgactaaaatcatgatgatggtgggttgttgttgatgatacatatgatgcatcatctgcaactcttcccgaagttacagctcttacggaatgtttgcagatgtactctctctctctctctcaatgtatatgctctttctttctcttttaattaatgccagcgtggaaaaaaatattggtttgaccaggtggaa

SEQ ID NO: 415 - DNA, 502 bp, Arabidopsis thaliana landsberg
  unsure (1)..(502): unsure at all n locations
tatttcgtcgcccagttaaaataatttacacctcaagtgtctatactagcataagtacaccacatacgtacaccaacattagtacaccacatatgtacaccaacattagtacactacatacgtacaccaacattagtacactatatacgtacactagaataagggaaacaacatgcatacaccagagttagtacacctcaaatgtctacactagcataagtacaccacatacgtacaccaacattagtacaccacatacgtacgccaacattagtacaccatatacgtacattagaataaggaaaatattttgatttagcttttaatcaaaattattttcaatattttgatttagtttttaatcaaaattttgctaagaacccttatggatgatggtccaattgatttaaaaattgaaaatgttatgggcttggttttagtgaaggcccaattaatatcaacaacacaacaaaagagtanaaagtgtctattactaaaagct

SEQ ID NO: 416 - DNA, 3656 bp, Arabidopsis thaliana landsberg
aaaaacaagaagtaggtgccaataactttaacattcatttttttttcacttcagggcaacaagacaaagaatttggatgagcttagtaaaagtgtacagagaattggaggagtggggctcactatacacgacgaactcgttgcacaggttagtaatatgggaagatgatttaacagtaggacgtatcagtagagatcagaaacatcaagtttttgttattgtgtgtgttcaggagagaataatagatgaattggatacggagatggacagcacaaagaaccgtcttgaatttgttcaggtaaaccccttaaaggtcttgttgctggtttgattgcagaaagtaaaaactgaaagaatgaaaatggtattgtgacagaaaaaagtgggaatggtaatgaagaaagctggagcaaaaggtcaaatgatgatgatatgtttcctgctcgtcttgttcatcatcctattcgttcttgtcttcttgacctaaagaacagagccgcgggatcttatagatgggagtttaatgtcttacattatcatgtttgtggtgaaacaaatggaatatttacataaggttgtctgttttttcttctcctatccaatcccacatataattttgaactttggctgtgtgatctctagagaacctgaaattaaatactttcatagcttgatcccatggctaagttccttaaacaatacaaatcagtctcatcaaaagtaagccgtcaaaaacttccctatagaatacacctttattatgccttctttaagtttccgcaatgtctcctttgcttcttcagttctgtaacgaaaaaaaaattccgaaagcagactccataagaaacatctaaagacaacaaaatgactccaaaaataaagaaccggcaaaaatctaacaatttgtggcaacaaacccggctactgctcaaaagaccacccttaatagttcataattgaaggcaaatgcttcaactgatcgatcatcaacgaatccaaaggactcactcactataagcatgatctccggaagaatcattgccggatataattagttgaataactgatttattgttgaatctttctgatactatcgttaaactcttatgacaacgctttttttttttttgtgtgtgcaaaatgacaacgctttagattgtaaaatgaataatgagtcattgtatcattaataagaagagatttgggctgataaggcccaacgtaagcccataaaagaatccgtcggctgggatataagggctggatcgatttcaatcgatttcaaaaaagaaaaaaacgcacaggtcagatacacacacaaggaggcgcaggagaatatgtcgacggaggatgctgtgtgttttacgggggaggaatatgcccgtcatgtgagggagtactggcgtggagtggcggaatccgatgtaattcttttatcttcttcttcttgtttagagaatttccatgattgtgatacatgttgaactgacataattattaaaccctaaccctgatcctagttcttatttcttaatagcttgtagaaactcgataggttctagtgttgtttatgggattgctaactgaatattttattgcattagggtttctctcgcttttagagattgctaactgattttttacattgctgatgtatcttaattagggttttgattccgaggatattcgaagtccagtagtgcttactggactgtttcactacgactgtcaatctggtcgtcgttatcctgaccctctcttggtcaagcgatatgctttgttggggcttcatcgtttcaatattttgcaggtaattatattttaaaactatatatatagtctcccctctctctctctctctctctctctctctctctcttggtgcttcataaacatgtcatgtaccacatccaattaattttctcttttcatctgtcaggggacaagtttcgagctcgctgccctactgaaattcaacaagacaatgaaccttacgtcttcgtactacattactcttcttgcacatgatccatcattgcagaaaacctttcaggttcgagttgatgaacgagaatatggcagtttggatttgacagtcgctattgctagacctaaaaaagatcaaaatgaaggtgacttgtgctgcattgttcttttttattttaatacaagtcaagagtataaaatcaaatctcacttgctgattaaaaatgttgcatgcatagcggcggagaccaccaaggagcccttcgtacctcacttttgttgtagtgcagtgtcagatggtgtcttccaaggtccattgcctgattggccctcagatgatgctttgcgtcatgatagaaaccgattttacgaggtaagattattattactaagacacatcatccgttttgttttgctcgtcatcatttaagtagtgataagtttttcttgcttttgcagctagagaaatcagagtggcaagccactgattggatttctctttatttggaacttttgattttagcaactgatagaggaatgtttggtgtaagtttattttttgtcttttttcttttgcataatgacataccatgacttttggtaataactattaacaccaaaactgctgttggtgcaggtagcgcagactggtctgcctcaggttcagattctgaaagtggtgattgaaactgaggaagaaaatgagaagcccctggataagagactcaatgccagaagggcacatgtctatataacttttacgggcttgcccaagtccccacgtcttgttgagattggtgagcatgttgaacgcaaagctatcattagaagagtcatcgatgattcaggatacttgactctccttggtaagttttggagtggtaaagataccgagcagcgttctaacactcgccagagtgaagaaaaagtcgagagttctcaaaaacgatctcgcttatgctaggtgtttagccatgtctgtgtcagcgtaatgacaagatccatttgaagatgttgatcagataataagcttaagctatcttgtgcgtttgaactgtttaggcgaatttgttagaggaattaacaatagtaaaatatcagtagagatcagaaacatcaagaacagagccgcgagatcttatagatgggagtttaatgtcttacattatcatgtttgtgttagaatacaaaaggaatatttacataaggttgtctgttttttcttctcatatccaatcccacatctaattttgaactgtgcatgtgtgatctcaaaacaagataaactcataaaaactctttcaaccttttgagttttgactcacaaagtgaagttaatttgaatagcataaagttcgtcaaatcggtgatacattataaacttgtgctagatcctagtatgattagttcatttattaatttactagatgagtacccgcactacgtacgggtttatgtattattatttacaaattattttatataatctctgttcatataaagtaaagttgaatgcatctgttttaaaacataaatatgatttgtaattgtttttgaaaagtccaactatattagttcatctgaaaaacgaatgtgcttgagttgttttttattgttatctagattctcagtttttttttaatttatatattcctggttttttggttata

SEQ ID NO: 417 - DNA, 1009 bp, Arabidopsis thaliana landsberg
ttcgtttcattcatttgtaagttacaaaggaaagagaagagaaagagaaagcaataagaaaacttttgttttgagttttactctctctagtcctcattcttctttcttattttaatcttttataacaaccataaattttcatcataaaataaaaatcacaactaatccaatcaattcaaaaccttcaaataaaggaaaatcctcaaaaaatcttgcagcttattactcccccatacacgatattaacccattttccataccactatataaagaaccaacgagatttctttcatcaccactcacattaccattagctttaaagacgtccgcccctacaccaaaacatgaagagttcaagtcaaagttcttcattcctggaaataatacacacaaaagactagtgaaacacttgaactcattttctctgatgaacatgtaatctatatttaatttttattggctctttatatcgtttccttcatttgttgataatgattgaaagttaatctatgttgtagaacaaaaaaatccacgccacagttaggacagacttggtatcaagacatgttaataagctaactgttggcagtgggtgtttgttgagatgtttactctcaactatgctggcggtcaattaaggccaactaatcaactgtacaagatgacattaaccaacggaaccactgtaatgggatttgaacctgtatttgattctatgtttctatcattggcaaagtttcagaaaatccagaatggagagtttaatccatatatattagttggtaaatctctattaaaaaagttataattctcttcgaaatttttgttcttatttcatttaaactaacactttttttttgttatagatgtcactggtctgattgtttttctaggagagctgcagaacttagaagcaaataacaaacacacaaccaaactcgaatttgaaattcgtgatgaaacgtttgttttcagcgtttatattttctgcattaaccataactctaag

SEQ ID NO: 418 - DNA, 1836 bp, Arabidopsis thaliana landsberg
  unsure (1)..(1836): unsure at all n locations
tctccttactcntgtgttgtgttttacattcaaactacaacatgatggatgctcatatttgttgtcttacagtaacaatgttgtgaggacagttccatcaaagaagaggaaacatcctgaatatgagagcaaggttagtagtatggtttaaactatgactctgtgatcacatttttaaaaattgtacgtaaaattctaataaaacttatagggatctcagatccgagagcttatctcagggattaagagtgacaatctcagagaagctgtgagactacctcaaggtgtagacattaacgagtggttcgccatgaacagttaagacacaatcattatgatccctagttactttttccaaactcgggtgtttcttctaaatttgttctcgtgtcttgtcttttagctgtagatttcttcaaccaaataagccttttgtatgctactcttgaagagttctgcacacagaccacttgtccagttatgaatgctggaaggtaactttctcacttttgatattctcatcgcatcaattcaaatccaaagcttcttgatcgtaaaacaatagttgtagcatagtatcgatctttctcggtcttattgtttgcagatatgagtataaatgggcagatggaactactataactaagccaaaaacggtttcagcccctaaatatgttgagtatctcattgattgggttgaaactgagatcgataacgaagccatcttcccgaaaaaccctggtatatgtgaagctgattcgtagtaataaacatcattaggttggttttaatttgtaacacttgtttctttctttcttattcaggagaaccattccctccaaactttgaggatttcgtgaagcggattttgagaaagttgtttcgtgtctatgcacacatctattattctcactttcatcagattgtggctctcaacgaacaagctcatctcaacacttgtttcaagcattttcttctattcgtatctgtgagttgatgaatcttccatggaatcattttgtgttcttaggaatgttctcatatatatagctgatggtaaaagtttgtatatttaacgacgatttttcggaacatgcaggagttccagttggttgataaagaaaaagagatggctcctattaaaagtctagtggaaactatgttggaccaatagaaaactcttcatgttttcaggggggaaaagggattttcatatatcccaccaataacatcctgaagaagtttatgatttatgtaataatgactttgccttttacaaagcgatttgatgtaatgcaaactattattgatcttgtgaggtttcattcattaaataggatcagaccatagccaaattatgtctttcatgatgccaaaaggctgtgtattggaaccagcagcctaatcaacatcagaactagtggcctaatcaacatatatctactaacttttgatagtgaatatttaaaaggatgatctcataagttaaaaacacaaacctttagagcttccacctctgatgttaatgaattgaatttttcagtatcctcagaattctccttaatgacttgaggagcttcttcaatagctttccttgcagtctcctgttctctaatcacatcagcttttgcttcttcagctagcaaccacattgcgtgcaaagcctcctgtagttttgcatattcaaaagcaacaacttttgcacatgtacgatccatggtctcttaatgtataagttgggtacaagaatgacagacactaatgaagagggttctatgataatgacctgaagaatcctagtaacagcctcagtaaaaggattcatgtcctgtgaca

SEQ ID NO: 419 - DNA, 1406 bp, Arabidopsis thaliana landsberg
gaaaagaaaatgcaaaccagtgggttgcctccactaagcgcttgtttagagtcattagctttactttggtggagtttggggatcaggtggatcagatggaggaagtaaatacttcctagtagaacctcgcttcatccaaggtggtgtataaacagtcggtgtgtgcggtctaccaaggaagtgaggaatgtcagcagagcaggacagaggtatgggtggtctactccggtttcctgaacaatcatcaaaagaaagaataagtgctcgacgagaaactcgtggcttgcttaaccgtaaaacagtttttggaaattttaaactcttattgatgaaatcaggaggtttaggaggaaatgagtaccttagccgtttaggaggtggatcaaggagtagaggtgcagtgggtgacgtgaccgtagtgactggagtatcagtagtgaactcaacacgaaaaccagctctaataaataactctggctcagcctgtgtggtgtgtcgatcgatacaggtggtggtgtcgatcgacaccatcgcttgagatcgattctcatcaactaattcgtcagcatcgtcttgtggctgcctgctcgttccatgaacctcatctatctaaacatcagtccattaagcatcgtcactatcatctgttgttgacacttcagtatcgagcccactcgattttgctccgtcaaacgctgaagcattgtgtcttccaaaagagtgtcaatcgacatcgaggtcgtgtcggtcgacactgtgacttagtgtcgatttgttctgcaaatcagtgtggcaagcagtcgtgagtggttactctaaggtctggtgctgaattctactctctgactgaactacactaacatcctctatgttgatccgagcattcaagtcctgaacatcatcgtacagactatcaatccgttgattcgtaatcacttggcccttaagaatttgttctagcatgtattccatcctaatcgtagaagtgggtggaggtgtcaatcgacacaaaccccaaattcctgcagctattcatcaagctttggaaccacgttgtactctcggggatttcaataggctagacatgttctatgctaatcgttcagcgattgtacccccaccctttcagaggaacgactatgagcttaagcctggcttatctcatgagcagccaatggaccatatcgagcgttttgaggacctcgttctaagcatcaaagctaatggagtctcagaggactacctattgtgcaagctcttcccttatccacttgatggggaagccgcttctttgttgaaacaactaaaggcaggttccctcaagacttggagaagaatcaagatagctttcttgaaccatttctatgatgatggtaagtttgagcagcaaagaaacaagctgtcta

SEQ ID NO: 420 - DNA, 1065 bp, Arabidopsis thaliana landsberg
ttttctttctttttttgtcaatcgaaaattagactattaaatgacaattttccgtttaaaatggcaagttctagatttgaaaaggtcttttgaaatctttttaagagaattaagggtgaattaaatatattcagaaattaaagggtcgaattgcaaactttcttggttcatacttggtctgcctttgtccctttcttatcttcttcgcgcgcttttggaaacaatagaaacccgccactgaacgtcagtcttccacgtgtcctctcctgtgctctgtttccgatcgtcggagacatcaatttgcctgcttgtagggtgattcgtcaaatctattatcaggttttaaatatactcgaattgacttccaaattcttagggttctctagtgtaatgattttgagaatcacttaactccaaaaatataatccacgatcccgtgttaattattgaagaatcaatcgtttttaatttctcaccaatagatgttgctcttattacttaaaacaaattgtttagacaaatgtagcaagtgtgatacttagtgggatcttaaagacgatttctcctataacagaggacaaacaggtcggtcaattacaatgtcatccctctttgccctgtctttttttttcttcttaaaacctaaccatttgattgtttctaaaggtatttcaagaatatatgatcaatctagatgaatactataccgacgatgactacacacacaaggaaatatatatatatcagctttcttttcacctaaaagtggtcccggtttagaatctaattcctttatctctcattttcttctgcttcacattcccgctagtcaaatgttaataagtgcacacaacgttttctcgaagcattagaatgtcctcctcttaattaatctccttctgattagattctcaatagagtttaaatttgttaatggagagatatattgggaccctcaaggcttctaattataccacgtttggcataattctctatcgtttggggccacatctttcacacttcattaccttatcaccaaaacataaaatcaatcaactttttttt

SEQ ID NO: 421 - DNA, 707 bp, Arabidopsis thaliana landsberg
acaaaaaaaaagatcgggcttttttctttatatcacacaaacacaaacacaaacaacaatttcaagtttttttcaaaattgatttgcctccatgagtgaaaccaaaacatttaaacttaacaaacaaaagctaacaatttaacaaacaatcgaagcaaaactcaaaaatccccaattagatccaggggaaattagtgagagtttagggtttcgcgaagaatacctgcgagggagaaattgaagctctgcgttgtgaagtaaagaaaacggaaggaaatctccggtcggatgcggtggtgacggaggaatcgagccgatctccggcgagtagattcagagaggaagagaaagagagaaagagagagagatttgggcttaagaggctaattggacctttggatgaaaaagcagacaaggcaaagagataagttttgttattatcttttatcgaataaagatgcgtctaaataagggtttaggtcgaaatattactgagaatgtttgggccggttattgggctttgaaagacggctcaggattttgtaagcaaaaccctttcgcttgattacgtgatgattacgcgctttctcttgacacgtggccaagtgatttacatttgggaaatttgcataaataacatataaaaatattatattatgtaactaaccaaaaaaatggtttaatgatataatgtgtatattcggtat

SEQ ID NO: 422 - DNA, 594 bp, Arabidopsis thaliana landsberg
  unsure (1)..(594): unsure at all n locations
gttttctcaacatttcttgttgcccattaaatatacttcaatttttataattggctcaattcataattttaaactttccataccctttttcttattttcttgaatttagctcatggggctcacttagggtctttaattagggttgcacattcttatcttttaaaagtctcaattgttttgatcatgacacttttaagtatatacttggtgaattctttattacttaagctattttgatgctcatgcttactttgattcacatgaaataatgattcttggtttggcatttgagagaaaccctaggtgacagtggggtgtccagttaccagctgagaattaggagccttgagggtacccctaattatggtcccgacatgtctaagtgttgctatctctaccgcaatgtctaagtttcaatcataaaaaatataggtcagaatacaagattgaaacttaaatgcttaatgtaaatgcggaactaaagagcaaggtagagatgcaaactctcgtgaatgacgccagtatttttaacgnnnnnnnnnnnnnnnnncaaggtcccgactaatcctcgttggtgccctacgcaaagggaag

SEQ ID NO: 423 - DNA, 2175 bp, Arabidopsis thaliana landsberg
  unsure (1)..(2175): unsure at all n locations
caattaaccatgtaggttaaagaatgctcgagtttttatatcatatataagtaataactaaaccgaaaaatacaaggtgtaactttaaaaccaggacgaaatctctccagattaacaagggtcccaaaaataaaaattaccaagggaaccaaagcctcaagaaaacagttcccctatctctgttccgatacttcaccattgatcatagccatagagttcatgctgcatcaagctgattcaaccaggggttattcacagattcttgttctgtgtttgaaacgctgttgaaagctgttgttaatgatgttgcccatagacatgttttgatcacacccataaagttcatgctgcatcaacccaaaattagtcacagattcttgaaccgcttctttgtttgagacttgaaaattgttgttggtaaagcacatgttctgctcataaccacaaagctcctgctgcattaactcagattgtcgttggttattgacagatccttctaccgccgagtaatgttgtgcctttgagacgcaaggatgttgaaagcnnnnnnnnnnnnnnnnnnnnntacacatgttttgatcacaaccatataactccttcagcatcaactgattcatcccaaagtagttcacagattcttgtaccgcttctttctttgagaagtaaggaagttgaaaattgttgttggtgatgtcacccatcctcatgttctgattctgatcataaccatcctgcttcattaactgattcttcaactcagattgttcaagtaacgctgagaaataattctgattgaaatttgatgcagagactgggatctgagacagagtattgtctccatggttatacataaacagcgaaaactgtctagggttcaaagaggatggtgttaaactctgatgatccggttttgtctgtttctgcgactcaagaaatcgaagcctttcttggaatttagagacatggagtttaaaggactgagtcagttgagaaacttggtcgggagggtaatgatcagcgagtggatactttaaaacattcacgttcttcttaagacaagtcttcctcttattgttcggattcttcaaacccttcttcttcttcttcttcttcttcttcttcttgttgaggaacccatgaagattaacgcttttcttgcgtctcaatgcttcgttcaattgactatacctaagagcaatgtctctcactttcactttctccttaggccatgtcttaagttctccgtctggtccgtaatagataacgcaggcttcgatatcacaaagagtgcaaagctctgaagctttcttgaagatggtctcaagcctattgctcaaacttgtgaaagcgagtgaataagaagaagaggacgaaggtgaagatgatcgcatagtcatcttcttgttgatttcaaagacaaactctgttttttttcacgctcaaagttaagagaaagcacgaagacaaactttggctttgtgaaaaagatgatgaaagtgagaaggaaactgtgtgaattagagatatattttgatcactagggtttgaaaaaatatttatcactctcgctgatcggtgaaaaaacgcgtaaagatatgtgtgtgtgcgcttttttagattcgatttccatatatttgcatagattttgcgtttagagccgttaagggttgttgataaaatggaaatataagagaagctttcctaactggcaatatcagtcgtcttacattaattaaaaatccttaacttgaaatagtacaagagagaaaaacatacaaaattaccatatgtacaatgtagtgtagctatacgtaaacatcaatggggaccatctcttaacagattccacttgcatcagtcacagcttaatgaggcttcttcttctatggtgtgtgaaggcaacaaaggggactgctcagtaccagccacagttttgattgaattctctcttgcttttccccaaatcacagtgtagaatcctaagctcaaaatcaatgatccaatgacactacacacaatatatatgccggttaattagtactgtctcgaaagaaatatttagaaactatatatggcggctaagtgtgacttgtgacgaattaaaaccagaaaccatataactctcaatgtaattccatggatagatacatggcactaaagctgaatgttatgtct

SEQ ID NO: 424 - DNA, 1423 bp, Arabidopsis thaliana landsberg
ggctgaggtttagctgctccgacatctcagtgtagcttaatctctctgctttgttgaagagctttaacttatcagcctggtacgtggaaacgactaactgcattgtttttttctcgaattctccaagaatgtgacaagttccaagagaataaatccatgaaagtctcctggaattggtttttgttccataaaagaccttaaaagcttcaacacagttgacctaaaaaaaaaaaaaaaaattggaagctgagaaatatttcttcttaaattctgtttaaagacctaaatatgaaaagttttacttaccatttcagtgggtagattaaggtctgttgttttgtaacttggccaaaaaccagtagtaagaacagtgacagtaaaatcaatccccagctttgttgccatgtttgctgataaataatccacgaagttggttcggagttctcttgccaatgttatatccgtcacctatataacaaatgtacaaaacaaagcattagtaaaaaccttattcattactaaggaaataaaactcatgtgactgaccatgccctccatcttagaagttaactgtccaccaagtagttcttttaactttgtaagtatacttctttcatgatcgtcatttccgctgcgatcaaataagagccgacgagcttgtttcttcctaaaaacaaccaatatttagaaaagttaacaaagcattggtgtaaggaacaaagttgaaagagaaacaaatattggaagcaagagatatgtacctataaaactcggcgaaaagatccttgtcatttatataaacaagcaaattaactactttctcaagcgtaatttcagtagcttcatcactaagcttctcacttccacctctggtcttgaggatattatcacaataggttgcaagtatttctgcactggacgctccagccactgttttgttacagaagacttcaaacgtctcttttaataccttatggaagaggctgtgtttctgaaaacactcatctacatagaccatgtatttatcgtgtagttcaatctcttttctgacaagcacctgactagcacttgcatcttgattagtagctgcgtcggcggcttgtttgataagggcatttccttctgcagtaacatgctgcttgaataagtctgcaataggttccaacccttgcgggattagacgataaagcctgtacatcctcgagagatcacccatctgaaagcataacacaatgttcagtcaaagagagagtcttagatgagaattgtttaaggcggacaaatccgcttatggaatggaccgcttttacatacaaatagagttggtccacaacagtttgttatctgccctaaaaatagagcggactaaaccactaacggatttgtccaccccgaccaccgtcaccattcaaaccctaagaat

SEQ ID NO: 425 - DNA, 4910 bp, Arabidopsis thaliana landsberg
tgctctcagttacattcctccgcatctgttttacaatactatcatccgcaaaaagcaaatgtggaatagaaggatttcgtttagctagtttaatgccggttagcatcttctctcgctccgctttcttaatattagagatcagaacctccatacataaaataaacaaataaagggaaagagaatcatcttatcgtaaacctctgttggaaattatatttcctcttgctttcccgttagaacttgatacgagaccaaactaacactccaaatgatccaagagatccaattagaactgattcccaacgagtcataactacctttaaaattcccattctatcctatcatacgctttgctcatattcgtttttactgccaaaaagttcgttttacacaatatattcctccgtagtctatgaaatatttcttgtgctagcataatgttatctataataagtctacctgaaacaaatgtcgactgtgtttcagagactagccgaagtaaatgtttttaagcctccaacaaagaatttcgaaataaacttataactcacattacaaagacttattggcctaaactctgtcatcctctgtggcttttccgtctttagaattaaaaaaatatttgtttcatttattctcttatcaaaagatcttgttcgaaaaaaatctctgaccaaaccaaccaaatcttcttttaaagagtgccaaaacctttgataaaacaaagccgtcagaccatatgggccttgtgtattttttacgtgcatacaaaataaagctttactaatgataataggttttttagatcaattaatcctaaagcactatcatgtcgttgtagtattttaggttgtcaatccaaatgggtgtgatgctaacaatcaagatgtgatcagaagtcattaagtcaagccaagcattaacaggttttggtgtgttctagcagtcctaagtgaacatgcagaaaacagaaaatcaagcagaaacaataaaacactcgaccaacacagctcgttgcagagcactgggtgtggtcgagtaacagacagtaaatgaaacaaagatactcgactgcacaatctgttgctagacaactggatggtcgagtatcaggtcgagtaacaagaaagagttgcagaaactagacaacagatgacaagatgcagtaaacaacagtaaagtaaacaaagaaatcaatcagataaagaaatccagaggatgggataattgaatagtttcgtttcctcagtttacaggtgattgacatgctcaataaattatccctagacaacaagttcggtaaccaaatctaagtgccacctcaacagagaccctgaagttaaactagtcccagactcaatcaccattgacgagagctacctaacaggcattacgaatcaacaagttaaagccaaaacgctccctacaaccaataccttggtacagggccacgaatctctggaattagtggttcagacatttcatcgaacaccttttgggcgcgaaaatgtatgggctcaaaatcaagttgatcagaaagcaataggcattaagaacaactaatccagaagggatttataaatcaaactcaaccacctcgcatactgagaattctaaactactcttacccatcctcagaaacttattcactactcagacatcattgcagaaagcataaacgttgaatagaatgaaaacatgataacaaaagagtaatagcaggatgataacaggatgaacaacagtaaacgaaatcaagaataaaatgctgaatactgaatagattagagaaatccagattacaaaatgtcaagaacacaatgtctccaaaataaaacttagataaaacttgttctcgaaaatgtaaagtacatgctacatatagcaaaatattccaaaccctaatactcaaaacgacgtagtattgggacggattaagaactgtactcgacacaggtggtcgagtgagaggtcgagtgataagctggagtcttcttttcttccttgtgctcgagtgtctggttgagtgcggaatgaagaagactctgaagctggcagtagtatgtagtcgagtgatagagatggcggtactcgaccaaggggtcgagtggtgacgtgaagtgctgatgtcttctactcgaccaaggggtcgagtggtctgttgaagtcgtgaagcatctactcgaccagggggtcgagtggtttgacatgattaggtccgcttcttccagttagctcgtcaacagctccaaatcacctgaaatcaacacaaatatgcaacatgcatgcaaaactatcctaaacatgcaaagtgatgacaaatgatgagaaatggtataaaacagtgatgatctgatgctaaagtgatgacaaatggatgctcaaaacatgcaaaatacacacttatcactttctcccaattcaaaaccagatttttctcctcgcttctcgctaatactaagcaaaaattctctaagcaatcctcaaacgatgatctataaactgaaaaatcatccatgaagacctccatgatatcctcaatcatgtctatgaagatagacatcattcctctctgaaatgttgtaggagcattacaaagcccgaaaggcattctccgataagcaaatgtattataggggcaggtgaaattcgttttctcctagtcatctgggtgaatcgggatttgaaagaatcttgattatccatcaaaaagcaatagtacttatgatttgctaaccactccagcatctaatcgataaatggtaaagggaagtggtctttccttgtggcagcattcagctttctataatcaatgcacatcttatggcttgtgatagtccgagtaggaatcagctcgtctttctcgtttttgaccacagaaactcctcctttcttaggaactacatgaactcgactaacccaactgctatctgaaatcagatagatgttccctgcttccaacagcttcataatctctttcttaaccacttctttcagattcggattcagtctcctctgatgttcaactgaagacttagactcatcctcaaggtggatcctatgcatgcatacatccgaagatatacctttaatgtcatcaagagaatagctaagagctttacgatgaatgcgcagcttgcttagcaataaggtgagctctgcgggattaagggaagcattcagtataacaggataagtagaattttcaccaagaaaagcgtaccttagctctgctggaagtggtttcaaatcgattttaggagcctttgctggatcccaatctcgattagtagtcggcgttggagtcaaagatggaagagcttctttaactgtaagttgcatcatatgttcggtatatgtagaagattcactgtccaaatctgcactatcttctatggaagataccaaaactcgctctagtgggtcttctaattccactatcaagaaagttttcccttctatgatcggtttcttgaccaaagtgttcatatcgaactgcatagtaagatcgccaacattcagccctatcctcccttgtcgaacatctatcattgctccaactatgtgaacgaaggatctcccaaagattaatggatccttaggttccttctcataaggcaagactacaaagtctgtaggaatcatgctctttccaatcatcacgggaacatcaataagaattgcatatggaattcgagtagaacgatctaccaacacaagagtgataaaagtaggctcaagactggaatacccaagacgcatagcaactgaacgaggcatcagattcacattagaaacgagatcgcataaagctctggaagggaatcgtggttgatggtgacactcagtacaaaggttccaggatctggtagctttcttggaattcgttcctgaatgatatcgctgccttgctatgaaatcatcataataatgcattctttcgtcaaatccttagtgaccattgtcttaacataccttcttattgtgggagaaagatgaatagcttcaactagaggcatctcaacaatcagcttatcaatcatagccttgcatctgacatcatctaaggcttgccttgactttttaggactcttggggaaaggaattcgccgatttgctgacttggtttcagttggaatttgcacattatctgaacgatctgggtgtcgatcgacaggggttgggtgacgatcgacaccatcaggaataatttcctcctcctccgcgaagttgtagattccactcgacaaaggcaaaacaaagtcgtcaagaataattggtgtcgataaacaccctggtgtatcgatcgacattgagtctttttctgcgattggaaaagatgaagtctgagctgaacattcgcgctgaagtattgggttgagcagctttccgctgcgtagtgtgagtgcattgatagaggttgatgtaggtgaaagctcggatatatgagagcgtacattgtcaatcgtgctatttagatctgtgtagagacaatcatatttgctatcagacctatcctcgagagcttcgtttggcccgtaagaatctgcgctagcatggagtcgagtctgctatctaataagggtgaaggggggggggcttggataggatcgatagagcctgatgcaggtgaaagctcggatatatgagagcgtagaataattgaaaacaggaaaatactaaaattcaatagcaagtgaatgaagcaggtaagtaaatagaaaaatcaaatggatgagaaactcctaaggatggggtaatcgaatagcgtggtctccctaatcaattcacttggttaacaaatctcaattaagttatccctagacaacaggttcaacaacagattaattcactcccgtgatagaaatcctcacagcatagctagacactgacctaattcccattaacga

SEQ ID NO: 426 - DNA, 2717 bp, Arabidopsis thaliana landsberg
aaagatccgctttattgcacagaccaaagacatgtttgtaaacctgaccaagctttcccgtgctatgatccctagcaagttaggagaagattggcttctttgcatagtttgtgccttctattaactttgtatagatagagagactacaatgtgttgttgttgtttctggattcttcgacttgtaaatttgtgtttttaatgtgttctttcttacacgtttatgtgttctttgttatacactttgctttatatatgtattttttatgttcatacaaatgttgtaactaaatgttttaagaaccaaaacacttcaaaacacttcaaatctttcttttcaaaacttcaaaacaacaaacaccaaaattttaagtttttattttttctaagaactccacaaaagagactaaccattgaactaacaaaaattagaaaaaaaagcacaagttctcatctaaaaatttgacaaaatttatattaaataattggtgagagcccatgggtccactcaccattggagatgctcttattagcttattcttcatgtgtctctcatgagctaataatggatagttttgttcattctatttcccttgttgataatccaaaaggcaagagaaggctccgcgtgaacaaagaagaaccattgtttagagctggtcggagtccgagaatctctgcaacgacattgtagacctgaacattctcaaatgatggcactttctttcccctcctaaatcttggaccatatccaataaagatagatctcatggagaaaaacatgttgtcgtatccatgatttccgaaacattcttgaacgttagttctgttttgtttaaccattacaccttctccaaccattcctatgatcggcggaatcctggaactctcacaataatgcagccttttcggtaacgtctccttcaagtaaacctgcaaaaactctccgttctccacttttcctgagctcaaagcttcgttcatcttcgccacgagttccctgttcttctcgtctggattcgcaacatctttgccccaacgcggattgattgccagaactggaaaataagcttggatccaatctgcgggtaccttgatccaatccgctaaatcatcaatgtaaatcaccttcttgtcacaattagtaatcattccgtgatcaccaagcagtatcacatgaacatcacgaaacaccttcctttccttcaatccctggatgaccctaccgatcattttatcaaccttcgcgactgcttctgtgacccgaggatcatcaaggccatatatatgaccctgtttatctggttcgccaagatagagagtcatgaaatccgggatttcgctctcgggaagatctaaataactcaagaccgtatcgactctttcttcgagaggaaatgaagcattgaaaggcgttttacaaaatccttttgggcaggtccaagagcctttggtaacatcagagcctgaccaatagacagtagcagccttgagcccttggttcactgcagttacccacaacggctcacctaaccaccacttaggatcgaggtttttgttgtagaattctccagttgccgcatcggtaaatttgttcatgattataccgtggtaagccgggtagagtccgtagcgattgagtaatggtttgggaacgtcatggtgggaaaaaccggtattaaaccggtctgagcttcggttcctctcgaaatgagcaaatcaatgtttggtgtctccgtcttgaattggtaaccaaaccggaaaccatcgcaggagattaatagaaccaccggtttgttgagattctttgaggggtgaggtggccaggaataggatgatgtagagtctgaaccaccggccgtgactgcttccacaaggacgatgagataaataacgattagagataacttgtacaaggggtaaccggagaaagaggactggctaggtttacttttagccatggaagaagaaagttttgatggtggttgaactcaacaatgctaatgccacttttatagaatattatttcatactataatatattaataatctctcgtttctcacgttagttattcagttgtataaacctatgcaattagataatgtttatttctgtcggcagatcttgttttgattgttattttttgttttttgaataactcttcttgaactctggaccttatacattatctcagaccagggactagagtacatatattatatggttttcttccaaatatcactcaaaccaactgaattattgatacttgatacacggatcttctctcagactgttaattacaataacagttgttcaattagtgactaaatcatgaaaagtcgttgatatttttcccacgttacttagaatccttcacggatccagaggcttgtttttaatacatagggattaaggcagactcgagattaagtattttctaaacaatacggagactattgaaatgataaaaaaaaaaaaaaagtacttagattgttaatacttttgtgatactctactgtaataagttaaattcgcggatatggtgaataagctaagagagctttttccgaggttaacttaacatgttgatttacgaaagagaaatgcgagagaagataatacaatccagtaatgtaatttttatagtataaatttgacaccccagtaatgtgtatatcttacataagcgagatatttagttggaagagacactaaacaa

SEQ ID NO: 427 - DNA, 2285 bp, Arabidopsis thaliana landsberg
ggacgtctatagtcgaatttcacattagctagcaaaaatcgcataggggccaacgaatccagaagggatctaacctaatcttaacaacctgactaacgtaaagattaccctaatctgatccatcctcaagtaccctaatcactactcaagcaacataactaagaacacaaacccagatattactgaaatcataccaaaatgtagatctaaacaaactaaacaattttactcaaagaactaaatgcaaaaacaaaatagattaagagtaattaagttttgaagattcaagaacacaaagaaaaactaaagggtaaaagctagattctttggaaaaattccaaagtgatctatttatagtaaaatgttgaaaaccctagattcactagaagacaagagacttgaggcggtttgggcgagtgctcgatcttggggatcaagtaaagggtgctgcaaagtctgcgcctttgtgtccatgctccgagtgatcaattggtcgagtagatgcttcttcctctcctatctgtatgctcagatgtctggttgagtggggaatgaggaggatccgaagacgctttgatagctcaacaagtcttgtatagttggtcacccttggtcgagtaaatggatcgagtaggaggggcgagtagatcaatctgcttcttcatctgaggttgccttgatcgagtaagagggtcgagtaaactgcagccttctttgtagcatcctggatcgagtaaagaggtcgagtagaatgatgcctcttctgaagctgcctagatcaagtgaatggatcgagttgagtcctttttacctccttctgcacctgaaagcacaccaaaacatgcaatatgtatccaagatgatcctagatgcctaagtatgcaaaataagctaaaatggtgcaaaatgatatgatacaatgagcaaatgcacagataaatgatgataaacatacacctaaaatgagtaaaatacagtgttatcaatgattgagtatacgaacttgaactacaaccggatcttaaaagcccaagtagtgtttccatgttaaaataaacaaagccaaattctgattggacttcggttacaccatcaaagctttgagaagcaagaagaaccttggttagtgttgtggagtcaaatattacttgatggcatgtgtattgttaagtctttgatctagagctggaaacgacacccaaaagcaaaagtagtgtttccaagctaaaagatacaaagcaaaagaatcatacggacttcgacatcaccatcgacgccttaggaagcatgaagtagcttggttcatgttttggagtcaaatataactagatggcatgtgtatgattaagtataagaacttgaaccgtaaccgggtcttgagagcccaaatagtagacccttctcagaagctacaaagccaaagactcacacggactttggctacaccattaaaactttgcgaagcaagaagaagcttggttagtgtttcggagtcaaatatgacttgattacatgtgtatgatggagtagaagaactagaaccgcaaccggatattaaaagccgaagtagtgtttccttgttagaagatacaaagccaatgagtcatacgtactacagctacaccatcaaagctttgagccgcaagaagaagcttagttagtattttggagtcaaatattgttggtgtcggatcccgcataatgggctcgggaccggtcaaagattgccacgtaagtaggagaggccctgataataggtttttaagtcaattatcctaaaacaccaatcatatcgttgtagtattttaggttgtcaatccaaatgggtgtgatgctaacaatcaagatctgattagaagtcactaagtcaagccaagcaataacaggttttggtgtgttctagcagttctaagtgaacatgcagaaaacagaaaatcaaacagaatcagtaaaacacttgaccaacacagctctttgcagagcactgagtgaggtcgagtgacaggtcgagtaacagacagaaaatgaaataaggatactcgactgcacagtctgttgccagacaaatgggtggtcgagtatcaggtcgagtattagaaagaaatgcagaaactaaacaacagatgacaagatgcagtaaacaacagtagagtaaacaaagaattcaatcagataaggaattcccgaggatggggtaattgagtagtttcgtttcatcaaattacaggtgattgacatgctcaataaattaaccccagacaacaagttcataaccaaatctaagt

SEQ ID NO: 428 - DNA, 1343 bp, Arabidopsis thaliana landsberg
atcaaaaacagagacttcaaacgttgacactaattcaatcaattaagaagctcatgatagtctcatacttgtcttttagaaatctatcttctaggatgacataactaggattataacaaactaacaaaaaaagaaaaagattgtcacaagcaattctgtaaaatttggggccacggagacgcagtgattaggtacaaagaataagaatggtcatcctaaattatgtcttacatcccttaatctatgacaattacagatatcccgcaatcaaaatatttcaattaaaatttgaacgaaaggggagaaagttttgggttcaaactctcaacataaagagaaatagaaagaactgaacataaagaaaaatagaaagaactgacggactgatgaactgacaaactgacgaacgtacaagtttatggctttttcaaactcgaattgacaccaaagccaacatgaatgtttccttgtttaagaaaacctccacaatcgatgctaaatagagttgcgaatctactatccagattggtttgtatttaggtgagatgatgatcaaaaaagggattggtagattgtattttgatctacagcctttgagttattaaaatgaggagagcaatcaacggattcaaggaaatctgcagtgaatcgcaatcggcttagtcgagaagattttggcgaggcagagagagagacagaacattgtgtcttttttttttgttaaaattcaatagctaatcataacttgccacgttatcgcctctctcaaggcatactgattcaagaaatcgatcctcttcatattaatctgttttcatttatcttattttaccaaaaaatgagaaagcccatatttttagtttcctgtggaaaatccgtttttcttttagccgaacccaataactcttcctcttagatagaagtgaataaatatttaatttttaatcaaaaaatttagatattaattactatcatatccccatccaaacctaacaactacacccaaaacaatggttcgtatctgagcctcttcatctgaacaatcttttattctttttttgaagaaaaaaataatcaaatccctgacatttcgagatatttccaattcgaattcttcttcttgtaaccgttaagcttttcgatatctctcccttctcctttaattcgaataaccgcagaattcgtaaccgcattgcctctttaattgttcaattgatcgatctgtgttcttctttctttgtcattgtctttaaattgttcaatcgatcgaagagaagtcggagaaagataatacctaagacaacgaaaggtttgggtcaaagaaaaagaaagagagagaagtg

SEQ ID NO: 429 - DNA, 4042 bp, Arabidopsis thaliana landsberg
  unsure (1)..(4042): unsure at all n locations
tttccaattgttaaacaattgcaaagttatcaaaggtgatttcaagcattcgttttgggtttttgttaattggttcatattagatcaaattctccgattgaatatacaaatttggttttttcttattcgattgatgtggcttctccaatttgatggaaagaaaggaggaagaagatgaatattgacaattcgtttggttttcctattgggttccctatgtactagttcccttagggtttagtttttgtgaatattagagatgatgaaagtatgaacgtgatggaaacaaaagagaaagaggatgaattcttacaattcgtttgatattctccttgggttccctatgtacaacttagggtttagtttttgaacattgtcggagcaaaaaaattcggtggagtagatatcagagatgacggaaacttaatgacagagatggatctgaaaaatgtcttctcaactccgacctaacgctccgaagggtattatcgtcaaatttcatctctcaaagttccctttttcgatgcccacacgcaatgtgcttaaaatcaaagtttttttttaaaaatgtgcctattttaacaataaacccttttaagaaagaaaaaaagacaaaccaaggcacttctacggtttgcaagatatgatcaataaccctaaggattgtttgaacacttgaagtaaaaaaaaagatggttcccacaataaactaaaaaacaactattaaactaaaaactaaaaaccactaattgaatgaaaaaaatcagaaaatcagaggtcaacgtggcacttggtgggatgaaactgaaatctttcatctgaactagaggtgctcaaggggactttgagatgacacttaatcttgggcctaacggcccatgagttcaaaaacccaaacttaaaccttaacttaaatctgagcttcacgtcgatcctgtaaaccccagacctccgatcctccctaaaatctcttcgtccaccggcaccgagcaaaaccagtttctgtccgtttaactccgttccaaccaccgtcgtgttcttatgtccctgatataacgacgtcatattcgcagcagaaaaacgctgatcaccgtagtaacctctcacctctaactgatcatagtgtatccaagacgttgattaggattacgtatcgaaaagttcaacgagatattgtaatgaaggttatggcttattggatcgaactcaaatcgcgttaaatcagcttccgtaacttggatttcacgacgtttggtcggaggataaaccagaggattaaagcaacgactccaaggcaaacgagtacaccgatgaggatgttgcagatgatgtttacgagacaacctccgcaacaaaggagacagctggagaaacaaccacagataccgcaacctacgtcggagccgcgtcggccatgactgtagtaagttttcaccggtggcttgattggtggaccgtaactggcgccgtttaatccgttcgccatggcttcgagaatgtcgtagagagaaggaggagagatgtagattggcacggcaacgaattatgtgaagaggtagagtccgatatatagagtagatatatacaaataatatgtgtgataatgcaataggattttaacagtgtaaacaattttggaaaacaaaaaaagcttaatgcaataggattttaacagtgtaaacaattttggaagatttttatatatagttgtttgttatacaaaatcgaattgtttacaaatgtagaaattattcgattggaactttatgatattggactattgggccgaacatgaatacatgtatagcccaagcatatttttatcgttttaccaaaaaacccattaaatgatatttacgtgattggtggtattgtcggggggatatggctgtgactctgagattaacgaattctttagcattttccagtcatcctctaacgtcgtccgtactgttccgaggaagcaaatcgatcggtactattactaagatagcatcaacaatcaggacggtaaaaatggcggcttttgctgggtctgactcagaaacaacgtcgtctacctcgagagttatcgattctcatctccacatttgggcttctcctcaagaggtcgcactcttacactttgttaattcgattgtggaattttttggatcactaagttaagcagtcaagcaattaaggcaaatgcacttaagattgatcctagttagatgataaggactgattaagtgatctaatgaatctccaaatatacgtgtttttcaggccgagacatatccttattttcctggccaagaacctactttgactggtgatgtcaatttcttgcttaaggtttaaacttagctctgacactattatgggttgttgagaaaaaatggaaaaaagtttcttctttgatacttgttgtgttattcctctgttttgatgttgtttgttcgtcttattttagaacatggaagaggcaagagtagatggagctctcattgtgcaacccatcaatcacaagtttgaccattctttagtaacaaggtctcgtcctttttaatacttcaatctgcatttttctaaaaagatgtttttgtatttcttaacagaagatactatagttctttcacaatttatgctcctctcattttattttagtcatggtaaatctgtttcgctgcctttttgttagtatatgactatgggatgcattactggggcataggttggtcttggttctgcgagaaattcaaagttttcaagtgattctccaatcaagtctgcaatatcagcgatttaattcaagttacttttgaagatgatttttgagtttcttattgacagtgttctgaagagatacccatcaaagtttgtcggttgttgccttgctaatcctgcagaagatggcagtggaattacgcaccttgagaatcttgttttagaggtcttccctttcactgttactcaaagcatctccaaatattatatatgcatctcatttctgagagtacttaaatctttttttgtagagtaattatcgtgctgttcggtttaatccctacttgtggccatcgggtcagaaggtaacagtttaaccattccaatgaccttagatcaagtttccaccgtattctgttgattgtcaatgactcaacacagatgacaaatgctgttggtaaagccttgttctctaaagcaggggagctttgtgtgcctgttggcttcatgtgcatgaaggtctggtagtattttcacctttgtggtctccaaagttgtgtggtttacgcgaagttctttcgttaagaatcttgttttctttattcagggtctagatcttcacattgcagaaattgaggaactttgcgcagaatttccaaagacaactgttttactagatcacgctggattctgcaaagtaccagagtgagctgttctttgctttttgtgaaaaataatcccgtcccctgaaattcctatagaatgtagtactaatattcatggtttcaacaacctgcagaaatggtgaggcaaagcttgcttattctcaactcatgaagctgtctagatttccacaggtgaaaaagaaaaaaaaattacttttagaatctgaattctcatagattatagattatacgagtctgagggaagaatattgtaacaagcaggtatatgtgaaattcagtgctctattcaggatctcaagaaccggcttcccgtatcaggacctatcgcctctcctatctcaacttgtgtcccattttggggcaaatcgtgtcatgtggggcaggtaaacatacttatttacctcgctttcccgactaaaaaccacaaaaaaccttctatatctactaacaatacatgatcatatacggattnnnnnnnnnnnnnnnnnnnnnnnnncttcccatttgttgttcttgaatgtggatataaagaagctaaagaagctgtgactatcattgcaaaagaagcatccttgtcaagttctgagatggactggattctgggaaagactctgatgcagctcttccctggacaatgggttcttcct

SEQ ID NO: 430 - DNA, 2167 bp, Arabidopsis thaliana landsberg
  unsure (1)..(2167): unsure at all n locations
taaaattcagaaaaaaccatgaaaatttaagaagtgacatgaattaaataaaaataaggaaacaataattaggcatttgatcatggtcactgtgatattattacagagtcagtagtggtagagaatatccatacaggaaagagaagtggacgacatagatccggcgagggagagaatatggcaaaacagagatagagaaaaagaaaaacagagagaagacgagaaaaaaaaattatttcagtaattttatttgcctctccgataaagtattattacctatagtcatttactcaattcttttcggtttcatggttattttgtacatattcccttctttttactttttaatatttcacaccacttacttttgtctagagtaaaaagtaaaacttatgtatgaatgggtatgaatagaaggaaaaaaatgatccgctctttataacgtccaatacacaacatacattcaagacataaaaaatgagtttatgttgcaaaagtcaaagaaacacttgcgtatcaaatattatatatagccccaattcatttattacttacagtaatatttgtctattctcttcgattaagtagtaaaaacactcatctaaatgcaaaaaaaaattaatataaaggttttctattattacttttttcatgattgttctctttctcatatttttttttcttatagtatatctatcattattcttttttttttctaatgtcttcatcaataaaacagagtaataaaaacaagagttggaaaacaaagtacatcaactaagaaacagaacgaaagatataaaaagaataaaccttattcgtgagaccttaacggtgcgtaaggctctctgctgctattgagttgagagcgatattttggccactcctctggtgacgctagcgcctgtaaagccgatgcacaatctgaccaaacttcacacgattcaatatgaagatcatgtaagctttgaagactccattggatgcatcttaactccgcttcaattctattgatcattggcagaaaagaatcacgagcgtgaaacagaacatcacctaaatgatttcgcaaaatccaggctcccccacaagagttgaatcgctaatctatgaagaatggacattacatttaagacaacccaattctaacttactccaacgacgggacaacctgctaatccttttacctagcgaacaattttcttgagaagccacagagttttgtgtactccattcctctgcttcttccaatgtagtggctatcacgatattgtggtcgttgactctatctgcatagactgaagaatttcgtgctttcaaaagcccccatacaatccatggaattgaatttcgtaactccactggtaattctactctcttcatgaagttcataacatgctctatattctcaaattgagtacgttcttcatgtgacttcacaacagcaaacaccgaaagcaatagccaatagccttcataacttcttgtggcttgtgaggcatcaaatgaacaaaataagagctataagcatatgaaactttagagttaaaaaatgtaagaaaacaagaaatgttttaaaaattaccttgtaccaaactagcaaagtgatttagacatccaatggtggtggattgtctaactcagagaaagcttacaaacaagaatttttttttgttaagtttaagcatcaatagaagagaggaaataacatgtaattagcaaagatacaaacttttttgaagtttatcttcatacttgacatcagcaagtatttgtaaatttgtaaggacttttgcttcatctttcaggtcatgtttcatccactgctcagtacacatcaaaatttcaaccatatagtgtgttagacaacttccactagtgctaaaagcactttcagatgcaacactggaaacttgcgnnnnnnnnnnnnnnnnnnnnnnnnnnnnnnnnnnnnnnnnnnngccacaattgtccttccaccatgagagaggagtccacttagttcctaaaaacaccactggattctcaacatgttccttcagatatgaatacaactcattctttgtttgtttcactcctatcacattcagtaaagcattgtaccttttatccatagaaggataactaggatcttaatcaacaaacaattctgtctctgcttgctttt

SEQ ID NO: 431 - DNA, 665 bp, Arabidopsis thaliana landsberg
  unsure (1)..(665): unsure at all n locations
tttgatcgctcgagcgaatggacaagacggaaattatcatagccatttacctgtttttgatagcgtctcttgttaacagttacatgtcaaaaagatgtaacataaacagagttcatagtccaagaatttaagagtactagtaagataagagatggtaagacataccttcaaagctactccaaatgtttgaagtacttctacaatgcagtcacaagtttcttggcctgcccatgaataaaccgaggttaaaacttaaaatacaaaactgaaggaagtcatgagcacatgctaacgtgttgaagaggttagccggatgcttacttggaatattaataagaaagtggacttcttcaatgcttagaccttggtcaccagccttgtgaagggcattggaaaccgcttcgaaaacctcgggactgaataaactctgttgctcctctgcagaaccggacataatacaactagcaacactagccactgcttgccaaggagaatcaactaaactacctggtatcacagtagcatccttagagtccaaaagttctttcatatcatcagaaccacagnnattatttggttctcccgacatgaaatgaagttcaccggaccaagagtcatcatccttaaacaactctattgcgttagctattggtatagttacacga

SEQ ID NO: 432 - DNA, 1587 bp, Arabidopsis thaliana landsberg
ggaaccaccctttgacgatagagtaattttaattggctgcctaattatcaccacactatttacgggccgagaaaaggtaagttatacaatacaatctaatttgcgtcataacatacgtatccatatggattagcttaattatacaaaataatttaaaacccacattcgtaaaaccatcatagttaaaggtttggatcaagtctgtactgattgatacataacaaataccattatgtaaccgaattaaaaacatcattatagtcttaagtactacatgcaaataactcaaaaaacttcccctccctacactcctttatcttcactccacaacctatgaaattgatttaagtgtagaggcatttcgctatatgttaacataactaaaagtattaatgttgtagaaattcacttaccattttaatctcattcacttcttcaatggatggttccgggtaaaccgttgaaacgcctccataactcacaatcttaacatttgtttggttagctgataacttaaccaccctccaccaacccaatgcaacaatgatgttaggttttccttactgtcggtaacatttctcgaatgtaataactgttttccccacagcctcacaatttagagtttctttgctgattatgttcagattgatttcattactacagtatttattgtaattaaaagggagtgtaagggctaagataaaacgtactacttatccatgatcttgaaagggagtatcacctcctcaccaccttcatctagatttctagtgtaagtcagcacacctacttcaacaatggctccaactagatctgttgataaaaatttaaaacaataatgagtatgattgttaaaatcagatagtcaatatcatgttcaggacgacatttaccaactaaaagttcagtatcaaaagtcccctccaagatgtagtcgaatcgagttaaattattgaattgatcagtaggtcttgcatcggttgacgtcactaccgtctcgtccattaaatagataccaaacgcggatgctgttgaccttacttggtccgagtttggtataactttgaatgtagtcattgcaaaccacttgttctcttcaagtttctcgtagtagtaagctgaaaacctatggtgaatcacaacttccattcgcattccctattcaaatttactccatattagatcctacgttgatgtttttaataacttttatgttggaaaaaattcacttaccgtttcatctgcaacaattacccttagttcaaatgaattgtccctttcgtacttcttgtattttctcatgactgtaactctgactgtccacccagtgagttgaggcgtgaggtcgcgtaaaagatggtagggcaacatttttttttctttttcaaggtttctcataaatattgggacttcgttagtttatatactaaacatggatatatatatatatatatatataaatagatacaatatatgtattaccgatgttgtatctacagtttttttccggtttgccgtataatgtaccaaccaaaattaatatttatttgtccgattatatttagtcacttgattagatattacata

SEQ ID NO: 433 - DNA, 1492 bp, Arabidopsis thaliana landsberg
tctagaaaagctagatgatcttacgggagcaatagaacaaggtgattttttttttttttgttctattagctgttcgttatggtatgcttacccttgataaattttttgaatttcaatagatcttgaaacgggagaaatcactgctgatatagtcatgattgaccaagagaagggtagtacacctgtttcagaacttgtagatgggcagattacatcacaagatgatgagagaggtgagggaagaagattggctccaagtgctctcgataattttcaaactgctgaagtggtgactaacgcgggtaaggagttggaagctagcagtggtatgacaactggtccagctacagagaagaagagaaagcgaacgaagggctcaaaagatcacatcaaacaatctactgctgctgctactacaaattcaagaaaaattgtgaatgagataaatgaattacctggaaatggagattgtgttgatgctacttctaaatctcttccaatcccagaaagagaaactcttcaaaatcctcttgtagaagcaatacaaaaaggtaatctcaattctttattgaatttagttattctctacaattatgtttcagggaattttgttaactctgtgtagaaactgagttgggtgtgaaaactgtcgaagatgtgggaacaaataatatggaaactgatactctagtgagccacccggaaaatcatttggtggccaacagtgagttgacatctactccagttactgagaagaagaaaaggcaaaagaagagctcaaaagatcaaatcaatctatctgctactgccgctactgctaccacagcttcaagagaaattgtgaacgagataaacggagcacctggaaatgtagatcgtgttgatgctacttctgaatcttgtctaatatcacaaagagaaaatcttggcaaaggtaatttcagttccttactgaatttagttatcctctacctttacagtgagacttcagggtttttttcgttcgtgtagaaaatgagattggtgagaagattaaggaagatgtgggaagcggaaaagctataccaagttctgcagataatatccagaccgataaacgggtgagctacccagataatcagttggaggttagcagtggtttgacaaccgggccaactacagagaagaagaaaaggcaaaagacgtcctcaaagaatgacatcaataaatctactgctgctactacaacatcaaagataattgtgaatgagagggagaaggtatctggaagtatagattgtgttgatgctacttctgaatctattcctaactcgaaaggagagaagctttccgatactgttgtagatgcaagacaaaatggtaaattggattcttggtcgaatagagttcttcttttcagtcatacgttaatgtcacagggagttattatcaactcataacttgtgattttttttttggaggaaatgagatgggtgacatattggttgacaag

SEQ ID NO: 434 - DNA, 2418 bp, Arabidopsis thaliana landsberg
agtttaaatacttgacttgttgatataatcctgattaggtgactgggcatattggttcaaacctccaactatatataatagccagcttcgaaaatccagtgagttttggaaagcaaaaacagctcataatttcgccctcgagaaaaaacaccagctttggatttcgaaggttaagagcttgtctagaaaatcactgccccgggttatttgtgattttaggtgttatttgtgattgaaagacagcatcatccagcaatgggaaccccatttgggagaagcaagtagaggatacacaacatattcagccactaaagagaaagatctaacatggtggcatttttgaaagcaaacatcataagtttattcagaagcataaatgaaacaaagggcaactaaagagaaacagaaagaaaatattaattggcatggagaaaccatcgagcatccataagagacatgtcgtcaagagcaggaaagcgtttgagggtctttgttacaagattgaacacacagatgtcaaggtcacgaggtctgcattggcagggacggtagtgacgggtgaaatagatggagtctggttcgataccaagggtttcgttagcaggtatagtgaaacccaagtcaagaagcagggcctcaccaccaagagaatcaacctcaagaacagtgtggcaggcgtaatctgggagttctacattaggatcatacttgtagacgcggaagcagtccctctgccatggattactctcaaccaacaaaacctctccagaggttgtaacagcaatgctagaatcccacgactgataacgagaaagcattgagaatggtttattaccctcggtgatgtccttgaagaaaccttgcggtccagacagatctaggactttaacaaaacgacgacttgtcgagatataaagagagtaacgccccagtaccatataagataagccatccaaaaagtgggcgtctcggaaaaacagaggaatgtcagtgtaatgagtgtcccctttcttgcaaaagcttatataagagtggccagggaggtcgaagaaccacaccacaacgtaatctgttccactctcgtctacccacaaaaggcccctcacagtatcacaagtcagatcagtggcaacacgggcactatattccgggccattatattccctttcaaatactctatctcccacacgcctgaccttactagtatctgacgcaatcgactctagagacggaagagggatcgttttatcgctaaagacatctatgataactaaattggatccagaatctaacaacaataaccagtaacccgagtttgccaggattcgagaccctggaaagtctcgcagttccctatggatcttctttccttctttcgggttgtacagcacacaaccaccgtctttcggtaaaagcatcagccatggagatccgcctttctggggtagtttccgacgagctacagggtcgtttgactgaagaagaagatacattcattatcaggcgcaagggttctcgcgtttgtggcctgagattgagggaggcgtgtcaccttctgtctgtagaagatactaaaactgggaagaaagattgtttcttttgatattgatccgttctcttcttaacgattacatgaggcatagctccttatttatactaaagttaagcccttgtaaaaccctagttaacattacacatgtcatcatctagttaccataaatctattctttgttcattgtacctcttttgcttgtgacaatcttcctcttttgcttgtgtaataggctaagggtattaaatttaatgtttatttttgtataagagaataattaaagcgttttttaatcaaaaaaattaaacacctaaagccgcatcaccagctttgaccaacgttccggtcaatcgaattcggtattagggtttaaacccaaccgtcccccatttctccaccgcgcttagctaatgttgacgactcttcgatctcgttgttcgtctcttcttctagatcaatcatggaagctagctcccaatcgaatcttcgcttcctctccctctttttcttcaaccgccgggatctctgatgtctcagagattctcacacttcccgaagtggagaagattctcgccgacgtgaaagctgataacgtgactgtgattcctacacagaatcattgtttctgggctgatttcactgtcatcgccaccggtagatccgattggcacttaagaaacatcgctcaagctttagtctatagggtacatacacatttcaccttccactttttctattcattcgttgatattgttcaattgttgatataaggatggataatgactcggtgttttgtgttaagagtgaatttgaagacaaagatgataagagtgatcattcctttcttatattctctgtgctgtgtt

SEQ ID NO: 435 - DNA, 1611 bp, Arabidopsis thaliana landsberg
ttgaaaaatgtaagattgactacattgatttctatatgcaccttctcaacatgttaaaaataatagcaattaacttaattcatagaaataattattatatttccatgtggtcatgtgtaatacatagatacaaataattattaacgttatcccatggttttctatccattttttatactttaaaaagtgaattcaaagttcaaataaataattatgagattaacattatcccatgcgttgattctctatccataaactcttttttttttttttgtcaaacgatctatccatatacatactttaaaagttatattcaaaggccaacaaataattattccattaacattgtcccatgaactataaattagtaaatatatatcactattcactataaatttaaaaaaacattatcgtcgcaatattatttatttatagagtttatactggatttgtataccaatcatgattatataatcaatttattgctacaaaaacaaaataatgaaaaaaaaatgaatggatttattgccaaaaaggtaaatagtttttttttttttttttacctttactttaaataaaatatatataagcatacaaactaataatatatgatgcttattgttttttatttaaaatgtagaactttgactatatcaattattttggtcaaagtcttcataattttgtatatatgtttcctataaagatttattatagatcatgtaccatttttcacagtctataaaaaggttatttctctctaccattttcaatatcaaaaagtttcttcaaacaaacaagtattagattaacattatcctcttcattttcagcaattcatggctaaactaatatattcgtatctattcatctccatgtttgttctctcaggtacaaatttttatgtcttgtatgtcattaaacatgttattaaactcaaatcgatgcatctagctcattaagcagaatcggatcgttcttcggtctttttaggaaaaactactgaaacatatatataagataaagatgagtgtgacttgacggattagatatagatgactagttatgcgataatcacttggcgtctaaatactataccaattacccatcacatttatttagagttatatgtatatatcattttcaaataatatatgctcgttcgtttaattagtatacttattcatttgttaatattttggtatattttatttgtttttagttcttttggcgttgccaaatgcagaaggagcggatattaaaagatgtgttgtggacgtgaagcttagcaagccatgcacttttcaagaatgcataccactttgttttcaaaggtacaatgggaatggcgtttgtaccggaaagaaaaacgaaatttgcacttgcgcctacaattgttaagctataatatgttgttagctagaccaaaaatctttaatgttatggtgccttagtaatccttgactccatgtatttggaggatatgatcatatgaataaagatcttttaaattttctattttattgccaattaaaacagggattaatgtgagtgaacgagttcattcttaaaccgatgcaattccaagattttaattctgctgaggacagc

SEQ ID NO: 436 - DNA, 1335 bp, Arabidopsis thaliana landsberg
attacacattaacatattttcgatagttcctggcatatcactttgtttacactgcctgaaagggctgctactacgtgtctggatctgtctcagacaccccagcatcagtggaataccaaccagctgtcatttgttccatcaaaagaacatgtcacttcggtaacttgggtatcgtctacgagttctagagatctgacaatagaaagttgatcaccattattcttggtttcgcttaggtcatgtctagcaaaatgtcctctgaattttaacttcttccgagtataaactagaaagccattaactcgaacaccaattgatttccctctcatcttcctccggctatatgtaagcaagacatcagatctatctccattgctcttggttttcccgacatgacttttcttgatttctccagcttatcatgtttcctgtcttgtttttcctaggttaaggtccgcagttcccccaggttttaagctccttttccttagacaatacacaagagaagtcagggctttttacgataccttgagaataacagattctctggataacttacttattgttttgattcatcagtgactagaacagcttcaagaaagcttacttgagacttgtcgggatcatctgataagtttcatgccaaaaaagtagctgaaagcacattacttttctaaagtaccgatgaatcttttggtcaacttctccatgtagacgtagtccctctggagtgatagagttcatatgcttctgatctcctaaacgtcggaaataaaacatggaacagagtcaatatgcaagaaaaccaaatccagtgactaccataccaaagaaacaataacttctcttctgattactagttttgatcaatttcacagtacgtaattttagtccaagacattgttttatactcattccagtgacttctcagttatcaggcacacaaaagggttctctcctaatgctcattttaatagttttgtgctgctgcattctactcactcgagactgcactgcttggacattgtatggatgcccatttccataagtaagacgttcaggagccaaactactattaggttgtactacggaacttgaaataatgaaagccctttattacaggagcaaataaagggccaaaaaagtgtcataatctgcaagatgcaacaaagcagatggattttagcaaagaaacaaaacaacaaaacttatggagagaagtgaaagggttgattgatatatcctggtcagataacaaggctaacaaaacttatggagagaactaaatctaaccctgaaaaaggtggacattaagacgaaagaagaagtggtgct

SEQ ID NO: 437 - DNA, 2366 bp, Arabidopsis thaliana landsberg
tgacctccgcgcagtttctgatattatgcgcattcatctaatgattggaaataatttgaaaccgggaaggcgtgttcttgatatcagcttgtgttcttgaagtaacaatgaatcaagtaagctcacatggctttgtaaattagtttaggaacttgagactttaaaatctcaaacttctctttggtagcaacattttcaaatgagtaaacatgtttattgtagacataacataatagtaagcatacatgcatgatgaatggtgatgacaacatttttttggaaatgaaatcatggggaaaaaaccaaaaagaacaattactgaagggtttgatcgtaattaaaatgaaatccaattaagattgcgttggatctttatttatagagatagtgttgaatcaaattatgtcgaatcacaactttaaacagaaccaaagcaaatcgagaaaatttcggttctactgaccgcataaacttatttattcttgaactagggtttgtttaatactttcttaatcaaatctaaatctcttgcagcctttgcatttcgttaacaacatgttttacgcatgtatctgcttctcaaccaacccttgaagctactatgctttcggaggaaacctgtgttggtgagatcatctcctcttctctctaatgatggcttatcatcttctttgctgcaaactcctccttgtttcatcgtcagcgctaaacgttgtggaagacttgcgaaagagggaaaactcgtgattttgaatccttatgaagatgaatgcacttctttggataagaaggtgcctatggcgtcgctgtatgataatgaacttgtaaccatcggttcatcacatggctggatagctactttgagtcatgacgacagactactgcgtatccaagacgaactaaacccggttgcatcggatactaacccttaacgcattcccttgcctcctcttgtatactctgcctcattgccaaactcaaatggtcaccaatgtgtcaatgtcctcatcttctcccgaggatgaaaactgtgttgtggctgtcaagttcttgggacctcaaatcagcttttgcagaccggctcaacgtaactctgagtggatcaatgtcagaatcgcaaacccttgtttctactcctctcgtgtcatgttttcggagaaacatgacttgtttcgcattcccggatcaggaggccatatcattgcttcatgggatctccacaaagacaagcacaaaaatcccaagtttcagaggttgcggttccaaaaccttccaaagctgacaaagaccaaacgagaggttatggattcgtgctacaaaagcgaacacttggtggagtcaagaaccaccggtgaaactttcttggttaagtggtacaggaaggccgtctggagaggtatgtcgaaattgagcacaaaagctttaatggtgtttaggctagacgacgaaggaaatgctgtttacactaaagacattggagatctatgcattttcctctcaaaatctgaacctttttgtgtctctcttagctccttaccacgcatgtttttccctaacaatgttgaatacatggatgctgacgaagacggatattatgatctggaagattcttcaatcgttggtgatcttacaagaatggggaccggtgtctatattccacctcaaaatatagacaactagtttggaactgagtttgagtctagaatctgtcttttctttttaaatcttgaaacatcaaaatctattttatcttctttatagtctatgtgagattaataagcatatcctccatccctttgagttgatattcaatatatatttatgtcattgctcactatttaatgtctgtctatgtgcctctagacgtgttcaatgatcatactgggaaacaatgtgcttattggtggtgttgatgttatacgcaaagagccgacataatatttctagagaaacagagtttaataatgcatttcataggaatggcagagatgttgttctggatgatcattagtatagtgataaagatttttgggtgaataaagtgggtactggaggagttgtgggcctagttcccgatcatctcacttctctacatactcttatcgaagctatcgagtttgtttttaaactggacgaagctttgggaatatccaatcttctcaacttattatagaaaaatatcaagtatataataaacaaattcataagaagatataagctttggactgattctagaatcttaagtatacatgcatgatgaatggtgatgacaacatttttttggaaatgaaatccaattaagattgcgttggatctttatttatagagatagtgttgaatcaaatcacaactttgaacagaacgaa

SEQ ID NO: 438 - DNA, 1809 bp, Arabidopsis thaliana landsberg
aagattatctaaataaggtactgaagctttataaaatggagcaatgcatgtccggtgatgactcgtcttggtgttcaccttaagatgcaggctgcttcagagcagcaactcctggatgatgaagagtacatgaagtcagtaccttattctaatgcggtgggaagtataatgtactctatgatcggaacaagacccgatctagcttatccggttggtatcatcagtcgtttcatgaatttaccaattaaggaacattggttgggagttaagtgggtgctgagatacataagaggaacactcaagatgaagttgtgttacaaaaggggattagacttcattcttagaggatactgtgactcagatcaagctgctaatgttgacaacagaaggtcaataagtggaatggtgtttacacttggtagcagcaccattagttggaggtcgtgtctacagaaggtagtagctatgtcctctacagaagctgaatatatgtctctcacagaagctgttaaaggggcaatatcgcttagagggctgctcaaggactttggctatgagcaagagactgtggagattttctgtgactcccaaagcgccatagcattgtcaaagaacaatgtgcattatgatcgaacgaagcacattgacatcaagtaccacaagatccaggaagtcattgcggataaagttgtggaggttgtgaagatatctacactgagtaatcctgcagatattttcaccaagattgttccagttagcaagtttcaggcagcattgaacttgctaagggtcaagacttagtaatcaagctcaagtccgggaacggaatcataaagctatatcatgatcaacctatctcaaggaaggtatcactgcttcagtcgttattgttgtttgttcttacttactaggtggagatgtgttaggatttagtaaagaagaacacatcaattaaagcgagaaaaggagaacaatgccagctcagcttgatatgcgtggagatgttatgcttgtccgctaaagcaatggtgtatggaggaaacaactcttgtcttgtgtgtgaaggcagaagagccgttaagcctgaaccaaagcaggctacaagacaagcttggaggctactgtagaggagcgtattgaggagaggaaccgagaaggatccagaaggagaagagggacattgtagagagataaaggttaagaaacatagaggcacttaatcaagagtaaacttgtattgggtgttcttggggaaacagtgagtgaaagagagtgaatcttagttagctttgtaaggggctgagagggtaagaaatctctttgtaaatttctaaaggttgatatagtggattccgggagagagttcccggcccagacgtagcaccattggtgtgaactgggttaccattgtgtgtgtgttctgttctgcatttctcattaccaaggttctgtttttggttcaaagtcgaagttggttctcaaagtgctaaacgttcttggtttgtggtgtgttaatcttcacaaagtggtatcagagcgaaggttctttgtattggtggttcagtaaagtccttacaaaacaaagaagccatgtcgtcagcaagggttgaaatggagaagtttgacgaacgaggagactacacgatgtggaaggagaagctaatggctcacatggatctgttgggcctaaccgtagctctcaaagaatcacatatggtctcagattcaaagacgttagaaaaaggaaaagaacctgagaaagaagccataatggaggagaaaaggcagaaagcaaggagcacaatagct

SEQ ID NO: 439 - DNA, 752 bp, Arabidopsis thaliana landsberg
aggtaaagtactgtttccctattatacgattcaaaacaaaaaactcataagaacttcggcttcaccatcaaagctttgagaatcaagaagcttggttagcgtatttgtagtcaattatgactagatgctttgtgtatcaaagagtataagaactagaaccgcaactggattccggaagctaaagtagggtttaggttttaaagtttggggtatatggtttagggtttagggtataggatcaaatatactataatacttagagaagcaagaacaatctgggttagcgtttcggagttaaatatgactagatgtcatgtgtatgattgaatataaaactagaacctcaactagatcgcgaaaagtaaagtagtgcttccttgttaaacgattcaaaaccaataactcataagaacttcggcttcaccatcaaagctttgagaatcaagaagaagcttggttagcggatttgtagtcaaatatgacaaagatggtttgtgtatcatttgcaaccggattccggaagcttaaaagtataatttaggttttaaagtttggcatctatagttcagggcttaggtataaaggtagacggataacggatccgtaaaacgataaccgtaaaatgtaaggggtatacttaaaccctaaacacctaactctaaaaccggacacccttaaattttataacctaaaaccctaaacgcattaaccttagaccttaaaccttaaacccctgaattgctacctttaac

SEQ ID NO: 440 - DNA, 620 bp, Arabidopsis thaliana landsberg
  unsure (1)..(620): unsure at all n locations
gggatagggaaaggagaaacttacaaaaagacttggtgtaagataataaataaagaattaagaggaaatttcttctgcacctttgatggggaattgttttttgtacttttttggaaagaagttggtcatattaatattaaattgtattatacacctatgtatatattacaattaaggttttgattggtgaccccttacattgttaagaaaactaaggaaatgttaaaatatgtatgtgtgtcttagatatcatacattgattgatacggtcggggatactccttcattgtcaaaatataagatgttaactagattttaacccgcggtataccgcggaacaatttattttttaaagttagtatacataaaagtttggaaattgtatctatctataaattaatgttcatcttatttatgatatgtttatgaattattgtctaaatatattgtaattttgtagtaattaaatgctatcaaatatctctgcggtttgatgattataatcgaattgttatagtcatggagaaaagcaatattaaaaatgataattttgtagtaattaaatgatattaaatatctngaaagttttaattttagtaactaatntgtgtaggttatat

SEQ ID NO: 441 - DNA, 4857 bp, Arabidopsis thaliana landsberg
cttacgtgtattaacttggcctgtttattcatttccatatgatcaggacaacattgtaatgctagtttatgagtttgacttatggttttgtattattgtttttcaatctgtaatagggtgcttcagtctcatggaagataccaatctcttttatcagtgtcatcttacttcctatagttgggaatgcggccgagcatgcaggtgccatcatgtttgccatgaaagacaagctggtacacagacaagtctcttgcgttttgatgtctttgattctcttctttaggttctaactttattattctcctctacaggatctgtctttgggagtggctattggatcctccattcagatttctatgttcgcggtatgtatatgaaatgtgaacttgggtctagtactgaacattctctaaaagattttgtctgatagtttgattggatttaggttcctttttgcgtggttatcggatggatgatgggtgcccaaatggacctaaatttccagctatttgagacggctactctgttcataactgttattgttgtagctttctttctccaggtaaatcttgaagctaattacgaaaccaatctcgagtatatctctctcttcaaagttgttaaatgtctttgtgtgtggtgtttttatgcaggaaggaacatcgaattacttcaaaggattgatgctcattctttgctatttgatagtcgccgctagtttctttgtacacgaagatcctcatcaaggttagtgttgaatttgctatatatattcctttctctgtgtcaactctctgttgaaacctgtttttgtcttcttattttttgacagatgatatataaatcaacccaaaagaacataaaaagtttgtatcctaaaactaaagcctgaagatctcaggaacacatcatcttacatgtacatttgagattctagagtttgtttcataacatttgaaagtagctccattttacggttttaccttcccttaggggcttatagggttacaaatttgtaaaattaccttgataactatgatgggaaggttcaagattggagtgtctcttcttttctaagtgtgcttgtttatcctctaatatatagaggattttctttgaacagtttatggacggttgtattcatacatttaatggtaaaaaacaagatgacactagttatagttaagtcttactcaaaacaatattgtgagccatatttggcataagattgcagaatttcttctgcaaatatttatcatagttcgtaagaagatgagttccagatggatttgttgaaaatgtggatcaacaaaagcagcattgagtcgacattcggcaaccttaagctgcaaaacaagtttgagcttcaaggtatggaatcgtgcttcagtgtcatacctttaaggaacaaagaaactaaagaaatggaaaccttttaatacttcaatactggagttccataaacaattcaaagaccatctgttgtaacttctcccccaagcaacgagtgagtggatgcttattgtgcttgtaatcatgtgtcacaggccatacactcttaaggaatagttaaggttaacaaggactagactttctaagaactcgatatacagatcaatgagatcacaaatctcatgtatatggagctatatttgatgttcagcaacttcttcaagtctataaggtggtgtaaggtgccagcttttatgcaggcgaaggtagaagtaagttagtccacgttcacgtcttgtctcagttatttggctcctcattatcagcttaagaactaaattattatcgtaaacagatggggcttgttaatgaagttgagcttaaaagccttttggaacaagaaacagattccccacaaacaaatgcagcttctttgatggagcaaggatcacttcgagaacgcagagctaaagcgcctaggaacagtgtggtccagagcttcaagatcgtcattttatcgaataaactaaatcttttgttgcccttcggtcctctagcaatactagtccactacttgacagataataaggtgagagcagttgtagtctcaagtacttatcataattagttttgtttcttcttgtttagtctcaagaaacgattcttgttgtggctcaggggtggttcttcttactcagcttagtaggtatcacaccattagctgaacgtctcggatatgccacagagtaagttgttcctcacacttgtgactctttaattaccatatcatcaaacactaaccgtttagttttgtaacaggcaattgtcttgctacacaggcgcaactggtatgacttggtttcttccgttactctctttttttttctcctaatatatttgtgacgcgctagacaattttgacagttggaggtctcctcaatgctacatttggaaacgtgattgagctgatcatatcgattatcgctcttaaaaatggaatgatacgcgttgtacagttgacgctgcttggctcgattctttctaacatgttgcttgtacttggctgcgcttttttctgtggcggccttgtgtttcccgggaaagatcaagtctttgacaaagtttgcatatcattctttcttttctttttttctgtttaattcaattcttcttgtttcttatcttatttcttctaccatacagaggaatgcagttgtgagttcgggcatgcttttaatggcagtcatgggactactcttccccacatttcttcattacacgcacagcgaggttcatgctggatcatcagagcttgctctgtcgagatttatcagttgtataatgctcgttgcctatgcagcttatctctttttccagttaaagagccagccaagtttttataccgaggttccttgtcttttaagttaactacatatataaaattgtttcttacaagttacaaccactttcatcatctaaatgattcttgccagttctacttaaaacttatctctgctgtaaattatagaaaactaaccagaacgaagaaacttcaaacgatgatgaagatcctgagatctccaagtgggaagctatcatctggctttcaatctttacggcttgggtctctcttctttcgggctatcttgtcgatgccatagaggtaactaaagaccctgtatttcattcttaagaagatcttatattattacgttgtcatcttgtgttatgttgtttttgaatctgtaatagggtacttcggtctcatggaagataccaatctcttttatcagtgtcatcttgcttcctatagttgggaatgcggctgagcatgcaggtgcgattatgtttgccatgaaagacaagctggtacgtaaacaagtctctttcattttgatgtctttgcttcttttctttagttataaatttattattctcctctacaggatctgtctttgggagtggctattggatcctccattcagatttctatgttcgcggtatgtatatgatatgtgaacttgggtctagtactcaacattctctaaaagatttggtctgatagtttaattggatttaggttcctttttgtgtggtgatcggatggatgatgggtgcacaaatggatctaaatctccagctatttgagacggctactctgctcataactgttattgttgtagctttctttctccagttagttaatcttgaagctaattatgaaaccaatgttgattttatcttcatgatcgctaatcacgaaaccatgcattcttgagtttttcttgcatgaagctgtgtttgttgtaatgcaggaagggacatcgaattacttcaaaggattgatgctcattctttgctatttgatagtcgctgctagtttctttgtacacgaagatcctcatcaaggttagtgttgaatttgctatatacacctttctctgtgtcaacaagaaaacctaatatctctgctgaaacgtgttttttttttgtgttcttatttcttgacagatgatataaaaattaaccaaccctaaagaacacaatctggtgtgtgagacagtttgtgtcataaaactaatcccttatatgatctcaggaacagaccatcagcagatatgcacatgcaggacaccatcctatacatatgagattctatagtttgtctcataaaaattgaaagtaataatcccattttacatttacctccccttaaattctctagttcccttactggcttagggctaccaatttgtaaaattgtattcataactagtttataggaatatatttttttatcttcatttctttcaacagatcttaattaacataaaatggtttgggaagtcaaactagtagtagcactacgtacttgattattcatgagaatttaaagtaagtggaatatattgtataaaatagcataaattcttccgtaaagttttcgtatcttggatggttttgatcaatagctcttcagatgagttccaagtggcaatgctgagaaacaacagtggatcgagatttacaaaccctaatctgcttgaggcttagagccgagtgacatgttaagatgcgttctaatatacacatattttgacaccaaacttgcctcggtgtcacacctttgaacatgatagaatttgcaatattaggttatggtttttttatccaggcctgagagagtcccaagttgctttagaggagaaattgagtctcaaaattttcatacatgtttgaaaacgtgaaagaaaaaaatataacctaagcccaagtgctttatttaattttatttgccttaattctgcatctaaattattaaaagttagatattactttcttgtcaatatcaattagtttaaaaataatagttagattacttttttacttaatataaatttaaat

SEQ ID NO: 442 - DNA, 1327 bp, Arabidopsis thaliana landsberg
ccttagtatgctaataattattcacatgccagtttccattatatttgtgacttcgaagttgacgttggttggatgggaattaagaaacaaccaacgtatatataagacattcaagatatgaagacaaaaacaaggaagcacaaattgacaaaaacattagggacgagtttgattccgttggcttgtgaagtctttatcaacttactttgtccaagcaaaagctccatcggaatgtcatcttttgcagctgcatccccatactttgcaatgattgcgtcctttctctgagaattcagtttttcctttgcaatcttaaccctcttataacacaactcagcttgagatggagccgcttgcatatgtatgtcctgtcctttgtcaaacgcttcacatgaatacatgttttgctgtttgaactctatagcttgaccactgtttctatattgattatctcccaaacaaaatttctcatttggatctgtatatgggagcggatcttcacgcatgtatatgggagcggatcttccttacagttcctgtgcttccaccatcagttgttcgaacacgttttttaacctttgcaaaatccacctgcatgctctcatcaatcttggcttcatcaacccttaagtcttcttcctctccatcaatgttcttctcctctagtttcgcaattagttgttgctccttcaggtacttctctcgtgcattctcttttgcttcatgacgatctctcacatgacaataagacgaaggatcataaccattccatcggtcccttttgccatcatagtcaaattcaagactctcgattttctcatcaggtgcaatgtttttgtctgtgtattttgcaccaaccttacgaggtctttccatacatgttttcacatcatgcgtcattgcaccacagttttgacacgctcctttccgatacttttcggcttgataagtctttgcacctcggtcataatatgatgttgtggaaacgggtttagttttccaattcttttgatgcttcaaactcggtttttcagacttggcatataatggaggaattgtcaaatacttaggtatgtgaagattgatttcctttccaccctcgtctacctcagccggagcaagcccggctttacgagcttcctctaattccttttgcttcctatgatctttcctagacttaaaagcacctgaagccgtcgccattgttatcgttaaacttcgttactctctgcaggcaacaactaaaaaagaaaagagttaggagaatgaagcttgctgacattttgtggtaaaccagggaccatctatgcttttctgtccttatgcg

SEQ ID NO: 443 - DNA, 2933 bp, Arabidopsis thaliana landsberg
attgtgattgcttccccaacataaccacaactcaccagaagctcaccatattccctattgataaaatcaaaatggaacgataaataagaccgcagagaaacccgaaaatgatatctatacatgcacataaacagaatatcctactttctcaaagcaggaatagtaggaagatacactgcatagcataaagggatccgatttgatactccaggatcgctcttgctaatagctccaacctgataaaggaaaactatcagagctacaataaaggacggaatgaaataatgctacaaaatgagtgtttgagccaggaggatatacaatccaaaaagaaaaccaaattgataagtataagggctgttcacacataccagcttatccatcatatcccgggcgcgttcccttgtacgatatcgagatgattcccatcgaacacgcaataagtcacaaaaacaccgtagctattcaatgttggaaggacaaaaagtcaatcagtttgttttagttggataggttgtgacacaaaatgaaaaacgaacagctccatacatcaacatttaaattcagtcactttaattaaccgaaagactgaagacttacaacaaaataggttgacttttgagaatcaattgcctcaatatatggagccatatcccaacctcagaaagaaaaaaagggtattagattcaacacaagtgagtgaaactagtcgacacagaaacaagagtagacaattgcatcttctctattcaaggttcttgaattgcagtcacaactaatgcctagtgacttaattgtaggcagaattgttaatgttcttctctatctttccacctaagctcggttttgagaaataaacattgcaaatacttttgaattcgagttcacttactttgcattgcatcgtgccgactacccctttcaattagaaggcactgggccaaaatcaatgcctgttcaactggttttaagggcaccgaatctgtgccagcttcactctcgttgttcactagtttgggagtcataaacacttgaggtgtttcaccttcccaagctccataaggtccaacatcagctttctcagaggccaacctcacagccccattggatgagctagtattggctaccaataccatctgtgcctttggcactacctatatagcaagatcagaggagattagaataacatagctgaatctatataacagacaaaatatatctcatagcttacttggtgaatagtacgaaatcccagagccccggtaacagagaactctagccctgctgctgctttagcagattcaagctgcaacctgacaaatttactccgaatcaagaccaatatactaaagcaggagagtaggaaatggtatgtaataggtatcataaatgagaaaagcaacaactatatacacatgtgccatacaagctcaatttcgtaactacatgagccgcaaaaggaaccataaggcgaaagcaaagtaatcttgtcacaaaaagctataaaacatgtaagatgtaggcaaagacaaaaccattaacttaccgaaaagggtcaatccttcgatatatatattgcagtacacatgcttccagatggatgattgacgtgatggatgaagcttcgtcttgtagcaacttggcaccccagtagctttcgactttttccaatgctccaaaatggtctagagcttcggccatgtaaacttgcaacatctcaaacaaagatgaagatggctcgtgaagaactctttgatgaataagtaagactctgacaagccaccatgaaatactcctaagttgaaaagtttcagaggcacttgtctcaaacaacaaatctttcaactttaacagcagcaatctagcaaaaactaaatgctgcaaggagaaaaaagtagtttgggttacacaagagttcactacaaacaaatacagaaatgaatgcctaggatacacagcttagacccttgcaggatataatcatcacacagactatggagaaaaaactaggcaacgaacttgaaaagacacagaagggagatagtacctggagattagaaaacttcccgagcaagtcagaacctgcagacatgagatgaatcttagcccagttctcccattcaaccaattccttactttctggtactctaaacggtaacgaacattttgttgatccttgcgtcgacctaagagttcaaaagcaaacaaacgactcaatgcaaataaccagaatccaattcgagtccaaaatttctcaatattggaaattcaaagttaaaataggcaacttacccggtcaaattgcaacaagtgaaccaaaaagcagccgcgattgctaagcacatcacaagaaaagaacgccgagccttatcgatttcatccgaagaatcgttcaacacgaacgattcgactttgttgagaagctcggagtaaactcgctcggcggaatcaaccgggtcgaactcgtactctccgagtattagattagtagcttcggaggctaaagcttcaagatagttcccagcctcgattgaagacaaaagggactttataagagagtcgtgtggatgggttccgggttgggattcatcgacaggaggatctgatagtggcaaagagacggtgcaccggatgagacggagttcgtacccgcgaaggattttaacttccccgtcgaccatggtggtacgaataatctactgagaacacagatcaaaagtgcaaggtaaatttcttagctagtgtctcctttttctttgaggtttccatgatggcctcttatcctcctatttataaaaaggcccacttcgtaacccctcattttatgtgagatatatatggttagagctgggaaaaaaaaggggaaaatatcgtttaatacccaaacttttaaaaagtagccatttaatacgggaacttcatatatgggtatt

SEQ ID NO: 444 - DNA, 266 bp, Arabidopsis thaliana landsberg
tctaaaataattaatattatgagtttatttctacagctatttttattaattttggatatgggctaagtttctggatatttttgttaaccgctatggactgtcatgtcattgatacacaaaaaggctatattggagaagacttttcagattatggttcgatctgtatttatttgacatggaggtttatcttacaaaaaaaaaagttacattaagttttgtttggcacataacccttatgttttcaaaaaaaaaatattcgagtgcca

SEQ ID NO: 445 - DNA, 859 bp, Arabidopsis thaliana landsberg
atagttttgcaaaacgtgtcgatatacacttgcacaatacgtttaaagacgtggagggatcaaaaagtattcataagaggatggttacctcggagaaaaatggagcacaagaggatgcttacctcggagaaaaatggagcataagtcggttgaagagtaaaccgaagtcgacgtgtaagtatagattcacgcatcaaaacgtcatggagacgttatggtgatcaaaagaagacaccgaagaagacgtggaggagttcacgcacagatttggtgatcaagaggacaccaaaaggaaatcagaagaaatctcatttaaaagaaagtgagtggaaaaaagggttgtgagaacaaccggagatgacgtgacaaagctcacgtgaaaaaaaaaaaattgaaggtgacaaaggagaagcgttgtgggaaagagaaatctcaaaagtgtgcaacgtcaaatacgagtagcaacaagaaggtgctttgtgtgtaacaagccaaggcacgtggtgaagaactggaagttgaagaaaatcatcatcatgaatgatgagacatggaaaagggaaatatccaaatgatgacaagccaaggagaaaagatcattaaagaggtgtttctagtgtcaggtgtctcatcaactatcctcaaggaagaagtatactggatattaagatcaagcataagagtttttccattgagatggagaaaacacaagtgatttacttgcaagggaagaagaagtaaacaagggcaagttgtgacaaactgagaaggaagggaagtgcaagaccgaaactcaattaagggggagtgttggtcggtaattgagttttcagttaaaggttgtaagtttgtgttgttt

SEQ ID NO: 446 - DNA, 4055 bp, Arabidopsis thaliana landsberg
cgatccgcacatactcaacccgatccacatcggtccggtccaatacttggctcgccgatccatgcccaaatatatcgaaatcaatggctagaagagccatcatctcgagggggcgtattagggaccaattggttttaggttggaagcccacactctaatacaaaattcatatctatttgacaccaactccaccgaaattatttatttttattttgtcgtagttactttggtgggcaaaaacatattagctgagaggtcaatttctttttcccctaaaccaaattacgttgagatgcatggtctctctctactcaattaaccaaataaggaaaagaatcatatggtcatcaattcgtaaatcaaaattttaatttgtgtggtatttaatccatctacatgtttcgtaagcaacaaaagagcttggtctgaaaaccaaacaagaccatatgggcactcgaatactccattttgttatcggctacttccactagcctcctccttcgctgcgtctcctgtttctctacttcacgattactcgctaggtaaaagataagatactaaacaactactatagcccctttaattcaagtccgtttttttttgttcttcttcttttcaattatgtgttaaagatacaaacttttgtctgatttgcttccaccggtttcacctaagatactcaattttcttactttttgtgtgttttgtaattctaattcttttatagcttcaatttttagattcattgaagcagttgtgagttaagttggagaaaatggttgtgtttgggaatgtttctgcggcgaatttgccttatcaaaacgggtttttggaggcactttcatctggaggttgtgaactaatgggacatagctttagggttcccacttctcaagcgcttaagacaagaacaaggaggaggagtactgctggtcctttgcaggtatctacctttctggtttttaacttggagttctcgaaatttcatctagtgtataagtgtaattttgattaaagagaggaaattgcaggtagtttgtgtggatattccaaggccagagctagagcccactctcaatttcttggaagctgctagttaatctgcatccttccgtagtgctcctcgtcctgctaagcctttgaaagttgtaattgctggtgctggtatgtctacaacttcatttcttactgctttgtttgggatctgatggaattaatgttcatgtgatgaagctcttttggctctcaaataattgcaggattggctggattgtcaactgcaaagtacctggctgatgcaggccacaaacctctgttgcttgaagcaagagatgttcttggtggaaaggtactttgattggtctcactttccgaattacttattgttgtttgcatttctcattcttatatgatttgctgattcccaaaggctgtaccaattatgtttgtgagactacaaggtataactagtgtttagagtgttacagctcctaggtacccaatgtatctgtcctgtttgttgtattagtcttgtactgcccaatttgttttttattatgttctaatgtcttcagtcttgtgctacacaccgcacaaccctttccagtttctaggcttaatgtgaatcaaatatagagtagtttactggaagatatcttttggatatatattttgttaagttgttattgtgttctctggttcttaggttaggttcttgtttgttccgttttaacaatttacctatcttattggagagcgatatttatgatgtgatatttgtcttcctccagatagctgcatggaaggatgaagatggggactggtatgagactggtttacatattttctgtaagtccaaaactcataccctctctgttgctcccccaatatatttgttacatatatcttatcagctctaccatcaatttgaagaaagttgcaaaacactggttaaattatattgtatcttgttttccctgttattacttttcgttactgatactctcttcatgttcttgttggaagtcggtgcttatccgaatgtgcagaatttatttggagaacttgggatcaatgatcggttgcagtggaaggaacactccatgatttttgctatgccaagtaaacctggagaatttagtagatttgacttcccagatgtcctaccagcacccttaaatggtgagagaataaacttatcgcatatttcttatttgctagtcagctgttataatattactgcttcaagtaattaactttttaaactatctgatgaaaaacagtggttgaactattagttagtggcgccatgtatttggtttgataaaattggattaatgtgcacacacttgttgaatgtaaaacaaagtatgatgtaattgagtaaaaaagtgaggttagtaactatgatgcatgtatttatttgtattgatcaattcaagctaattatagattttgacatttaatagtaatcaaagaactgatgaatgtttgaggatatgaagtatctccatctaatttagacgtcaggaagaacatggtcatttgtctttccaaagtaagaaattctagattttgagcttccccatactttaggatgggtaatcaaactgtaaaatattgttactggtcaaggcaagacgatataactgaactccgttgtagcattagcgctgaaatgttctgtggttgaattaatttgtttctggcaaataattaaagttgttgctgttggatttacgttgtaggtatttgggctattttgcggaacaacgagatgctgacatggccagagaaaataaagtttgctattggacttttgccagccatggtcggcggtcaggcttatgttgaggcccaagatggtttatcagtcaaagaatggatggaaaagcaggcaagtaggctattgagttcacagtttctgtgagattctcgtaagcatgttgatgagcttaacttggtagagtagttagcatgctgaatcatgtagtgttgatttgtcagctttcttatggatagctctgacttttctagtccatgtggttgttgcggtttcattgtcgtgcatgtgctttcactcagcagataataatacattctgattaattgtatacttgtccagggagtacctgagcgcgtgaccgacgaggtgtttattgccatgtcaaaggcgctaaactttataaaccctgatgaactgtcaatgcaatgcattttgatagctttgaaccggtttcttcaggtttgacactctagccctttatttctctttgttcttccttttgcctgtctttttgtgaatctttatctcactggcaatcatagttaccattcacatggtcgacatgaaaactataatagaatttttttacccaaacaatacttgagtttgatgttgattaacttgtactacctcatcccaataatcagatgtttctcattttgaaacttattgtgtgtcataagctgcaacagatggttaggatattgtgaatttgcaaatgcaaactaatatgaactacattgacaggaaaaacatggttccaagatggcattcttggatggtaatcctccggaaaggctttgtatgccagtagtggatcatattcgatcactaggtggggaagtgcaacttaattctaggataaagaaaattgagctcaatgacgatggcacggttaagagtttcttactcactaatggaagcactgtcgaaggagacgcttatgtgtttgccgctccaggtttactaccatgctgtcttgtgggtttaacaattcatctggtatcctgcttattaatatgttgtttatgtttttcttgtagtcgatatcctgaagctccttttaccagatccctggaaagaaataccgtacttcaagaaattggataaattagttggagtaccagttattaatgttcatatatggttagtgaaaccgttatctcccttgttttcttttggccattatgtgagaaccgagatcacatgcaggtcttaactgctgtgaactaataaagcaggtttgatcgaaaactgaagaacacatatg

SEQ ID NO: 447 - DNA, 921 bp, Arabidopsis thaliana landsberg
aatttaaataaatagcgatctcatactcaacttcacaaagatgttggaagctatatatattagaatgtcttgtcctaatttcttcataaatccatactatacttttttctcaaaatccatacacaattgcatcttttgaagaatacaatgatcaggtgcttgaatatgttttcaaaacatctccagttcaaggtatcgagtttgaacttattcaataattgggagcttgtgaaaaatgctagtagtggtgaaacatagatcttgcggccttgtgcttcaataactttaacaactttctcaaggctacaaacagaaacaaaagaatcactctcaaggtcatcattgccaatattgagaagagaatgctaagatagaaatatgtttagttgtacgggtttccatctttctttctcatctcctaaactcaggtttaagaaaagtatatatatggttatttttattaaaaatcatagatacttacagcgcatagcaaataaatgtaaaaaaatgtttcacatacatcatttttcattctagagtcaaacgtattagcaagtttttgttaaaatcgcaacatattttgttatactcgttggccaccagcaacttatttctctttaaaaccataactttatcaatacgtcatatgcttttatagtaacttcagtatctccagcacaacccttaggaaagtggcaaggccttcaatatgtggttcttgtggttggttattggtagttgtatccgagctctgcaccgtcatttccaagggaaagaccaaactcattagtcttcgttggagttatgacaatgcctttaatctcttcttcattgagttggtttctttcagccaccgtaatatttggcttcggaataggaaccttaattctgatgataggaaatgagaatgagatggaaacg

SEQ ID NO: 448 - DNA, 2220 bp, Arabidopsis thaliana landsberg
atggaatttctgctcatttactaacttctagcatctttttacaattgtatacacacattcattacatttatataacaaaaccacatcgacctcaatataatttcactggtcaacactcctggaacactctaaaaaagcactgattaccaatatatttccaacggattttaaaatattacaaacgatataatatatgtatatatatatataatacgtgatgtacatgaatgaatcttaatctatttaattttacctaaagttttattaataataaaaaaatttacatttattttaatttattaaaaatactcactatgtttcaatctatttttgggggcaaaaggcttccattcacttgaatgttcaaaaagcgagaagtttgtaaaagttaaaactaaaacaatacaaagagttttttcaaaaagatgctcaactttgaaaagctcgcaatttttaaagaatctcttgaaacttcggatgattcatagtattaatgtttggttcacacacaagtatttatataatttgtggatcaaaagtcttaagatcaaaagtacaagatggaatatgtatacagaaagtatagaaatgtttttataatcgtgtaagtaaacatagaagcgtataggaaaagtagacaaattgtattaaaaaaagatagtagtattgtattgataatatgtaaagatttggtcccaagataagaaatgatatttagcgtgattatttgaaatatgacaatggttatgtctaaaattgtggtgaaaaactgagtatgacgttcacacaaaaaaaaaataattgagaagacgagatcctttttttttaagtcttcacctctcttttatactttatttctatctctcaatgtgccttacttattatttctagtataactcagtgaataactctcatggtatatatgatgacaaaaaaaaaaaactctcatggtaattaatttataaagttttattcctttgatcatgagaagtaattcatgaacggaatcacaaattaatgtcaagattttaccacctcttttatgcactgtagacatttttggattttgtaaattgatggtcctatcatgctcaagatggatccaaagcatctacaaaagtttttctcctcaaggaattctcactagctcaaaatttttgtgaacctcttagctagacttttcaatagtatgaggtatgcttccattcttgcatcctttacttcgtaagcgcatttgaatttattacaatcttttactttgcaattatttattcactactgatcccgagtgaaaggcaaattctggctattcgggtttcgtattcagcttagttgtcgaggttgacatggtgtagttttaacttcaatcttttacatgaaagactacacctaaactacaagtgcacaataaatcagtaatcgtatttgaagatagatcccattgagagtgtagctatagaagatcaggcgaagacaaaactaaacttaggggttttggttctcggtttcctaataactaatgcaatgaaagcaaatgaaagcaatgaatgaaagcaagtaaatgaacgaaagcaatgtaagaatcggttaatagtggttgtaagtatgcgatttaaggctttcggcattctaggatttctactggtatcttggttctcgataaatagggatgtcaaccagaccttatgtccacgggcctggtccgtttagtaacatagtggggtgggtacaggcctatgtagtgaagtccaaaaaatagcgggcctagcaggtatgatccgtttggattgcggattaaacaagacatgcccattaaatgtagcgggtttgcgggcgacccgaaaaagacctttgcatcttcgtcgttcaatccttcgcgcttcaattcttcttgaatccttgatttattgaaataattttgtagtgaattggaagtaatctttcatttgttgcttcaattctaatcgaatcctcgtttgttcttttatcttttgtagtgttcttgtttgttcaatcgaaacaaaaaagctaagatcttactatgaatctgtgatcgcttctaggccagcggtcgaggttgtgaaattgagaacgaataagcagagagattgagaaatttgggtttgttatagttaacccaacaacttcttccttttcaatttcataccatgagccctgctgtgagaagattaatcatgttttctggtctcgcctagcttt

SEQ ID NO: 449 - DNA, 5694 bp, Arabidopsis thaliana landsberg
  unsure (1)..(5694): unsure at all n locations
caagaagttggaagaactgtttggtttccctagtggaaagggaatcaaaaccaggtttgacagggaagagcttaaggatttgtgggctactattgggaacaatgtaccgctaaactctacgcggtccaagagcaaccaaatccggagtcctgtgattcgctactttcagcgctcggttgccaatgttttttactccagggagtctacaggcaccgtgtctaacacggacatggagatgatagatttcgcccttacagggattctcggtcgtacaaagggaaagaatgttctgagaggcgatctcaacgacgcgccaccagtaattcctctgttgatccacctgtgtggatacaggaagtgggcattgacaaacggcaagaaaaaagtgagaggagcactatgcgtaggtggcgttgtgacaccaattctggaagcttgtggagtactgctcaaggaaccagggttagcaccgagaatgatggacttatatcatttgcgctgatgtgagttcttggagtatgacatggttggcgacttccaccgctacaggttcgagcattcatcgattagaatcgccaacattcttctcccctgcattgatgctactaggattctcgagggaaggaacattgatttcaagcctgcgcttgaagatatctatttcgagggcagcccaccaactgaggagattagtcacaccgaaggagctacaacagaagatgttgatgagacggatgatatagatgaggcggagtttgacacgagcatgtatcatttcagtgagcatatacctcttgcgagggaaagcaagagtttgagcgaagctcacaggaacaacagcaagctgcagaaatggtgcaagaaacatgataagttactcgctaagtgcctcagggctatcaagtttctgaaggacaagatcagctgctcctcttccactacaacaattccgcagggacagctccctcaggacatgccttcgaggtgatatgacgcgcccgagccaagtcagcgcaggcctgagcctagagagcaggagattccgcatgtccctgcgaggcattcatcattcgagcctcgtgaatctgggaggaaaaggaggaccacactcactcgatctagcagcaggagcagatgacttctgcagtctcgtagtttacgcgatcgcggtgctggccgcagcaaaaggagagaggtcgagtatcctcagagcggtgctggccgccatagagctgatgaggtcgagtacccacctgctggagctgatacagaacaaggtggttcgtctatggtctgggagcaatcacaggcagccattgacgagcaactacgttcacttcagaaaatgatttcacaaaaaaaagagtgttcatgtagttgcattaaatttaggatcgagtctagagtgtttcatttaggattgttgcatatgcataggggatgatgatgagatagtcttgtaagcattttgattcaccgtataaactcagtgccctcgttgctagttgtctgttgcgtagtcaatgaatttaaaataaaactgaaccatgcctagattgctatactcgaccacactgtcatgacctgataccattccctatcaatttgaacctgaatctgatctttaattatcatatctgcatcaaatttgaactcatggatatcctaaaatacttgcattttcttattcattttgatcactcttgttaatccaagtagctggctctccttattcgagcagttaacccaaacccaaacctagactttctttcaagccctatatcacttgtgagtgtttgtgaggtcttatttcgattaagcttggcagaaagtgttaggttagtaacgatagagatagtgtctcatgtagttctagttcgcatttttcggactagataggactaggtgggcgcttatactttgggttgggatgtttttaaaagaaaaaaaaaaggggttgattcattgatgagaaaaggtaaaagactctaggtgaagtaagctaaagaagcagaaaaagtctagtaaaggtcttgggatttgtaaagaaaagaaagagttcttgttatctattgaagatcggcaaaagccctcagttttagaatgttaaaaaacaggaaccttagttgttaaagaaatctaaatccgctagatgtatcaaagtgttgagaaagcttctccttgagttaagagaaaagaaaagaatgattagaaaagaggcttaaaagattcatgaatgcaaagggtagagttaagttcttatattgggattggagatggggttaccattagagcttcgtttgatatactctgggtagatgggatcttatctctgtatgcatagcttgggacttacctttagcattctactaaagcttaatcattttttgagagatcccctgttactgaagcctattctgtaagggaccatctttgtctcttgaccttttaccttagccaaatgagttcattgatgatgcattgcttgattcccgttccagaactaaggaatgtccaagggattggtagatttgaaaacttgtgtaggtcgagcatatgggtcggattgattgataatgaggcatggctaacgtttttaagtagaatataatcatattgcagcttagaactttcaacttggacattgatttcatctggtctatctggtgctttggctctgagtccccgctttcaaacctcacctccagcttgttcttgattgtttgcttgagggcaagcaaagactaagtttgggggagttgataagtgtgtattttgcatgttttgagcatccatttgtcatcattttagcatcatatcatcactgttttataccatttctcatcatttgtcatcactttccatgtttaggatagttttgcatgcatgttgcatatttgtgttgttttgaggtgattcggagctgttgacgagctaattggaagaagcggacctgatcatgcaaaaccactcgacnnnnnnnnnnnnnnnnnnnnnnnnnnnctcagcagaccactcgaccccctggtcgactagaggacatcaccacttcacctcaccactcgaccgcgaggtcgagtgtcttcatccccatcacctgaccatcactcgatcacatcactcgaccccgaggtcgagtgtctacatccccaccacctgaccatcactcgatcacatcactcgaccccgaggtcgagtgtcttcacctccattacctgaccatcactcgaccacatcactccacctagaagtcgtgtatctccatcaccaccactcgactacatactggatggtaagctccagagccttcttcattccgcactcaactataccctcgagcacaaggaagaaaagaagactccagctattcactcgacctctcactcgaccaccttggtcgagtactgttcttaatccgtctcaatactgcgtcgttttaagtattagggtttctgaatattttgctataagtagcatgcactttacattttcgaggacaagtttttatctaggttttatttccgcagacactgtgttctagaccttttgtaatccgaatttctctttatctattcagtattcagtatttgttcttgatttcttttattgttgttcattctgttatcatcctgctgttacactgttgttatcatgttttcaacttgttcaacgtttatgctttctgctatgatgtctgagtagtgaataggtttctgaggatgggttagagtagtgtagaattctcagtatgctaggtgattgagtattgattgatagatcccttctggattagttgttctaaataaaattgcttctgatcaactagaatttgagcccagacattttcgcgcccaaaagatgttcgatgaaatgtttgaaccactaatttcagagattcatgaccctgtaccaaggtattggttgcagggagcgttttggcttaaacttgttgattcgtaatgcctgttaggttagctctcgtcaatggtgattgagtctgcgactaggttaacttgagggtctctgttgcggtggcacttagatttggttaatgtacttgttgtctagggttaatttattgagcatgtcaatcacctgttaactgagaaaacgaaactactcaattaccccatcctttggaattctttgtctgattgaattctttgtttactctactgttatttactgcatcttgttatctgtcgcttcatttctgcagttctttcttgtactcgaccacctagttgtctagcaacagactgtgcagtcgagtatctgtgtttcattttatgtctgttactcgacctgtcactcgacctcacccagtgctctgcaaagggctgtgttggtcgagtgttttactgtttctgtttgattttctgttttttgcatgttcacttaggactgctagaactaaccaaaacctgttattgcttggcttgacttagtgacttctgatcacatcttgattgttagcatcacacccatttggattgacaacctaaaatactacaacgatatgattggtgttttaggataattgactaaaaacctattatcagttgatatatgttatgaccagtcagaatcctacctcttcttccatgctcagctttactatcaaaccacgctttctttcgcctataaacatgtgtgggtgacagagacttccgatgagacatatacacgtgctttctgcagttactcaaccacaaactatctgtttgcttcccgcatactggacaacccattttgcctttgactttgcagcctgctagatttccatatgtaggaaaatcctgtatggtctagagaagcattgcttttaacgtgaatgttgtgtcactgaatgctagattttaaccatagttaactctcccttttcccagagatggttgagatcatctattagcggttctagatacacatctatattgttttcaggttggttggaccaagaatcagcaatgacaacatgatgttctcttccttcatacacttgtcaggtgacatgttgtagttgactagcaaaacaggccaagcactataatgaacattcttcatgttaaacggattaaactcatctgacgagagtcccaacctaatgttcctctcttcagaggcaaaagacgggtatttatcattcatttgatcccacgtcacagaagttttcgtcagtgctcttattactaaagtgccaccttaagttcttctccatgtctaatgacctgaacatcctcttgagacgtggaattatcggaaaatacctacgtactttctgtggaatacctttcttaacttcactaatgcgggtgttaatcttccaccgtgaagcattgcatttcggacaattgttgagcttctcaaactgctttctggataaacaacagtcatccacacaagcgtgtatcttctcataacccatctcaaaatatctcaaaaacctcttcacctcgtataacgatgtgtgcaatacattatcgcatctatgaaaaagtttgaagcagcagaccgaagcttttgtcagaccaaccactttgtgtctttatcctgaagggtaaaactattgatgatagctcgttgtggattgcaaaactagggtataggggtgtttctgcatcggctagctttgcatgaaactcatcttctagcttattctaagcctcaacaccctcacttaaatctacctaccta

SEQ ID NO: 450 - DNA, 944 bp, Arabidopsis thaliana landsberg
taaggatacaaaaggtgggagatggtaattcagatcatagttgttgggagaggccagaagatatggacacatcaagaactctctacagtatctcttcctcttcccctggttctgaagccgcgggtgaagccgcagccgctcttgcagcggcctcacttgttttcaaatcggtcgattctacttattcatccacactattaaaccatgcaaaaaccgtgagtatatttacacatcaagtccaaagaaaccattacattagttcaatcgtgatgtaacgtagctttatctattttatgcagctatttgaatttgctgataagtacagaggttcttatcaagcatcttgccctttctactgctcctactccggctaccaggtaataaaatcaaatcaaaccggtatacatagattaaaccgataaactacagatatatttatgttacgtacgtaaataagttactaacaagacacttttaattttaaattaggatgaattattatgggctgcggcttggctatataaagcaacaagagataaaatttacataaattatgttataagcaataaagattggagccaagccgttaatgaattcagttgggacaacaaattcgtcggcgctcaagctttactcgtatcggttagtatatatataactaaaccgacttagctaaattctataaacgttaattaagtggatctaaattaatatttttcttgttgatttctaatttaaaggagttttacaacggggcaaatgacttggcaaaatttaagtccgatgttgaatccttcgtctgtgcaatgatgccaggaagtagctctcaacaaattaaaccaactcctggtaattttcactagttagctaaataaatggttaattggttttgagtttttttcttttggtgttggctttcttattacatttctttttctttttgt

SEQ ID NO: 451 - DNA, 1123 bp, Arabidopsis thaliana landsberg
taatgaaaagagaatcacatgaaatgtaaaagataacatgaacatttatgtttcattatcagctcatttctattttattatcatggaaaaatagaaatgatatcaagttacaaatgtacctttggcttgaaagaaggaaaaagtacaagcatgacgcaaaagcaaatgccaagtcagcgtgaacagtacgggagcactgttcatctatttataggcacgtgacacaacccatgtaaaattacactcatgccctttacatttgctaatgactctatagtaacccatcgaggtctaaatagccttttcccttttaagtcggttcccctttctgctatcatgccgaagcttccctgcgcacagcttcggctctgcgcgaaccttcgtattctttgtacttcttcacattgtggttctgatccgagtccaaaggtacctgttcatgtattatactccaaaaacattgttaaatcatgtttttgaggacctttggaagacgaaggccccaacaactgcaatgatgaaggtatgtcctcatgaccttcgtctgaagatcattatgtcctaaaggaaataatgtttcgaaggacgaagggatttaacctttaacattttgtgttgcctttttcttaactaatagcatttgagaacaagtccccaacagtgttgtcattaatttttgcaagaactttataaggcacaacagcacgtggcatgagtttagactttctcaaatggcgaccacagtccgccttgtggggccgaacccaatgtattgcttcactaccggactcgcgttctttgctgagtgtctcaaacactcggcaaagaccattttacactcacttggcaaagaatactcggcaaacattttatcggcaaaggtttgtatgtcgaatacttttttcaaacactcggtaaagactttgccaagtgtcgaaaagcactcggcaaagaaaagcactcggcaaattaagaatcgcaaaagaaacctccaaaaaacatcaaaacattttttaaattatgggaacaactctccagcagccactacccattacagattaccgtctacttatcattttcactattattctgaatcagatttacatgttttgtgaatggtgag

SEQ ID NO: 452 - DNA, 988 bp, Arabidopsis thaliana landsberg
attttagtatattggtttcttaatcacagaacaagttaaatttataaagtaaaataaaaactacacatgattttttttttaagatatggaagttttgaagttcacaaggaagagaaaaattaaaacctttcttacaaaaaaaaatcatggttatttaaacctatttttaacatgatatatgaatgataaatatatagatgcatgcattatgcataacataactatgcaaaacatgagcaaaacatatgcatatgaaaaaacttttatatgcaaatcacatcacctaaaacatgtttagcattgtgaacatcatgaaattcattcattatgtagagaaataaagaaaaaaacttattagagattatacatattttaaggatatcaactagtccattagaacataatattactgccatgaatggatggaagtaaggcatattcactccaaattgctgcagaatcaaccatatggaaaacttttccacaccttttggtttttttacttctttcgattagcatttgttttaacaagcgtgtcaaatgagattatcaactaaaacaaagactgattattcaaactcaccacaaaggtaaagagatgatgtgcttagattgtgattgtaacgaggcagcacaaaattcacacgaacaaggttctcatggccaatgaatgattgaacaaaagttaatgttgtgaaggcgattgccgtcataaccaaaaccttaactacatacacaacaacaattataaaaggatcttttgagctattggtcatactcatgttctttgattaaagaaaccattatataattttccagctgttttaaattacaaatttagtttgttttttcatccgactcatagaaataattttagttattggtttcttaatcacagaacaagttaaacttgtaaattaaaataaaaactacacaagatttctttttaaaaaaaaaaagatatggaagttttgaagttcacaaggaa

SEQ ID NO: 453 - DNA, 959 bp, Arabidopsis thaliana landsberg
aagaagaattatttaacattttgttaattaaagagaaaacttcttctttacaattttgatattcttgtcctgctttcttgaataaaaaaaaaaaatacacataatatatttacaagaagtgggacacaagaatcaaaattcaatcacggactcatttaatggagttgcctttatgtcccagaaatcattcatgtgaccataacatataagttgcattataaccagacgacaaaagaaagaaaggacagagctaaattatctaatgaatcaaatcaactgtttgggaaaatactagtgaggactgaggcgtgtaagtcaaacaatggtaacacttaaatgggatttacaagatacgctcgagctctctggtgtaactgagagtctggttgatgagttgaagtgacggtatctccttgcacggtgcggtttctctggttttttggaagacaactaacccgtctttaacttcccactccgggtgctcctcgttcacatatgttaacagttgttgatcagacgagaagagtaacatcttacaaccttcactgattgagagatgatcgtatgctttctcactgcatccagctatttcatctctacagataaacaatgatgttttaagtcacggcaatgagctaaagaagagaaagggtcaaatgacaaatgaagcctatttacctaatggtttttgccaagagatccatgaaatagacgtaagtctcatcaggtgcggtttgtctagcactcaacacacggttataagcaccttccatgaaggattgctcgagctccaccgcatgcttgatgcaaggattctccaaggttgcaaatgaaagtaatcccagttctgtgtggaattcagctattctgttctgaacaagcagtctcagtaggttcaaccccatgattagattctcttgcggagatggcggaataccattcctggtacatagaaaaac

SEQ ID NO: 454 - DNA, 1165 bp, Arabidopsis thaliana landsberg
gatgaaaggctctttcttgtgttcaccatctttgagctcgatatgaacgaattcaaagtcgagattctttttttgaagagcgatgagaactcttctagtggctgtggaagctgggtgaccgaaaactttgattcctgccatttgttaagactttgttcttaaagcaaggtggagatttattgaagtagagagatctttgtggttgatgaaaagaaatacacaaatgggagagtgtatttatacaactaaattagagtaacttagtgaataaacaaaaaacaaacggcgccaccaagcttgaatactctttgttatttcatagtcaagctgagtaacgtatgattcgtcgtttctattggttcaagattttcatatactgttcatataacttataaaacaatataatcggagaaaatatcaaccatggctggataagacaacaagaatagtcttttaatgtatactagtcaaagttgaccgacgttgttgaaaacatatggatcgttggatgttcaaattggatcattgaatcaaggagatgaggcaatgtgaagttattattagtcaagaagctattctttttgaatcgttcttcgtaataaatctatctagaaccttctctagcttcgccttgcttgcattcacaaccttatagtccgtctttagatttaatggattatacccatgtaagtattgatgcgagtggatcgaactcataagtttcaatatccattcacaatgtttgtgttcccattgttttgtagctttcgtaattcacaagttatgagccttttgatctatggacagacgagatgtattcagatatagctcgagactctgagcaagactagacatatcaaaattttcccgaaatcaaactcaaaaatgtttatcagatcaatagttgcatgagtaaggtcaagaggctaaaaaccctaatacgatataacaaatataagcaactgatcgctacgtaataatataccctcgttataacaagtttactaggtcgtcgatgactaatcgctaaattagtaaacaaaaatagttcaaaataggtctacttcagtaaagagtttagagattaaaagacgatcgttcgagcagaaaagaccagttaaatggaaaccctagttaagacttacattccgtgaatacaagtaat

SEQ ID NO: 455 - DNA, 569 bp, Arabidopsis thaliana landsberg
  unsure (1)..(569): unsure at all n locations
ggatctttttttttatttcttgaatgtgcgttaaagaatcttcgagttttcttaattcttgtgatctgttgattatctgtctgagggcatttgtgatattatctgaaatcttgaaagtggatagacttttgttgactctctatagtgttacttagaataaatccatttttttgttggtgtgattgtagatgagaccagaaactcgcgagattattgagaagatgctgctcccggctatgaagttggttaaggaaaggctcgacagggaagtagaaaaacaaagcatggatgagtttatgttctgcttcgaaaactgctacactgagaaggaaactgagatgcacgtgacccgcaagtttccttctttaaaacaatcggatgtgggaattggctttcagacgtttataggcttgatcgataaagagtcctcaagagaggcgtatctcaaggatgctgaagattgtgctaatgtaagaaggatagaggcgcgtcatggtgaggccagtacatctcacaaatgtgaacctaactgcaacanacattatgattaatactatgatcaaatgata

SEQ ID NO: 456 - DNA, 1324 bp, Arabidopsis thaliana landsberg
ctaagttaggcattatggagttttttttgctagtactttttccttctattgttataagaagggagggacctcttattgtagaacttgtccttctattgttacatcatattcatgaatctggttgtgttggtctacttaatactgcattgtacctatcgatttcttgtattatctcaaagtataattttgtgtggcaagtatactgcgttgtctagtaagaccatcatgactcttattattccttaagcacggatctttaatataatgctgcaacagatatcacctgagcactgtccaaagttttactggccacctgaagtatttattctcaaagggctttctctatccttattactcaagcttgcatcatccaaatcctcgagaactccagagaatttaggtctagttccttgtgaccgaaacaacattacccgagaggcagattctactatgcattgtttaaacatgtccaaagcaaaaatactttgccatttccaagacagcaagttgagatgctaaccaagacaagacttgaatcaacaagactggacactgtcaaatgttatattttgcaactactcatactcaccaacggcattagcatcagacagactctataaatccacaagcttctttcacagccgattgtagacacaacccgaaagagtgattgtcgtccctgtggagaagagaagagtggtctaaagctagattttggaatctaagttcgttctttgacattcagacaacaaggattgtaaagaagatagtgtaccggagatggagtaggtgttaggattttgaagaggaggtcgttggattagtggtggaagaagttcggatttgggttttcatattaacggcgacgattagtgctaggttaaacaaaattgtgctaaaccgagtaaaattcgttaataaacctagaaactataatgtgcatttacattgataagtgaattatatataagacgaaataactataattacagccactaatgtcagacactaatcgaaaaagcaagcataatctcctttcacacattccataagttgggatatatatacacagcagaccacatattccacatgctcctatcctacgtgacaccatcataaaacgaatttctatgtattttatacgtgaacatcattgaattttatatgtattttacacgcgttatcatgataaaacgaatttgaacatctttggatcttttatttttctcgtgcgttatacatgcctggaaattgatatgtatgaaatgtcaattcaaatgtgaaacttgcgatttttaaggacggccacacatataaggtcaca

SEQ ID NO: 457 - DNA, 1666 bp, Arabidopsis thaliana landsberg
cataggggcaagtaaaagtagtcttttcctgatcattagggtgaatagcaatttgaaagaaaccactataaccatcaagaaaacagtaataaacatgattagctagcctctctaacatttgatcaatgaatggcaaaggaaaatgatcttttctagttgcagcattcaatttcctatagtcaatgcacattctatgtcctgttatcgtcctagtaggaatgagctcatcatgatcatttttaattacagtcatcccccctttcttaggaacacaatgaactggcgagacccaagtgctatcagaaataggatagataatatcagcatcaagcaatttcaggatttcctttttcaccacatcttttaaatttggattcagccttctttgtggttcaacactagaatatgattcattttcaagatgaattctatgagtacataaactaggtgaaattcctttaatgtctgccaatgaatatccaattgctctcctatacttcctaagtttggtcaataattgatgcacttgttcatcactcaattcatcatttatgataacaggataagtgtcattaggaccaagaaatgcgtaccttagaccttttgggagaggcttaaggtcaacctttggagctttgagttctgaccaatcatcagagatgctgctcgatcgagtgtcctcggttgttccaaccgagtttggttcctctgttatcttgttcgattgactgctagagtacacaggtcgagtagaactttcttcactttctgtgactgaactgacctcctctgaacagatattcaactcctcaaatgtctcccatgcttctaccggtctatgggagtctaataaaactgtgtaaccctgagtttctaggtataggtatccctcttctccatccttggtaagagcactctgtaaatgatctttctcattaagttcctcaagcaactcatctgccaatctatccatctcttcaatatagaaaacttgacctggaatggttggcttcctcatggttttcttaatatcaaaggtcatattgaggtttcctccaaggtttagatcaattttaccttttctgacatctaagaagggtcttcccaatatgagaggatccttaggttcttcatccatttctagaaccacgaaatcagttgggatttctattgatccgatcctcaccggcaaatcttccaacatgccatgaggtattctcactgacctatcagcaagaactagctgaatgtagcatgctttgtacttggagaatcctagcctttttgactttggacgagctgctgaaatagagttgtaaagtctagatcaggtggggttggtattggtggagttgggatagggtgtgaaccggggttgaaactattggggaatggaacgtaaggcggaggttgatgctgatacggaggataaaccggagggtgtgggtgaaccacagtgttgttgcggtaggggttgttggaaggaggtggcttgtagttgttgtatcctttgttgtagccaccttgattctgtatgtagctcacttcctcatatgagtaggactgcccttcttgaatctgctgttgctcctcgtcggtgatgtagtgaataggtctctcaacaattggtcttggtagagcaatgaccaacttatcgatcttggca

SEQ ID NO: 458 - DNA, 1660 bp, Arabidopsis thaliana landsberg
attttggtttcaatgtcagctaataatatgtaccgtaagattctctttaatacatttcgtcaaaggtcaaaagtaaacatcccacgtagggtgagaacattagatatttccatttgtagcctccccatccatgcccatagagttccagaagccactaaatgcaaaaaccctaaagcactgagaaagcttgtacctttgttgaatcatggcaatggccgttcctgttagtgctcgtcctcagtctcccggtatgatacctctatcacctcgttcagattttcactgattcgagtttcatttctctgatttttctctctgaaagcagaaggtttttacgcaatcaacaaccagtttcagacgaatgggccaaaagggttctctgagatcaagattctagcgaacgaagacatgttcttgaggatggatttgcctggagttcctgatgaaggcggcttgagtgtttatcataaccggtcgcaggaaactgtggttgttttcgccaaagcacccaaggttcacacacacgactccaccgaacgtcgttaccaaacgatgactggaattggctgcagctgctgtgcgatctcaagcatcaccacccacatgtccgacggtgtttttagagttatcctctccaagactcgcatcgatccacaccgctctccttgcaccggtcagtactattacccatctaatgtattaccggtcagtgtttatagatcatttttctgatataaaaagtttatgcttttgtcaacagttcttggttgctcaggtttccgtgaaggtatttccatttccatttccagaaactttcaatatctaaaagtttggctttttcctacacaaactttcgaaaattgtttactcatctttaaatgtttgtcttttctctttgtttgtggtcggtagatctccgtggcaccgatccaaatggtatacaactttctggtcctagctagtaattatatttagtattgagagattgggtgtttaaaatgagagtaattgtatttgtggatcagacccggcgttaaccggtccggtattgcagccacatccacttgcgttcccacaaccgactatggcctatgagtcgaagcagctcccaaacggcaaactattcgtgcgtgcagacatgccgggtgttcccaaagaaaacttcactgtctctgtcacgaatgggcgagtcaaggtgactggtgaagctcctgctctgagccatgactcaagtggccgtttctactctggtgacgtcgctatgctctccactcctgttgacattcccagccgtaggatcaagaccatcgccaaggacggtgtcattcgtctccttatccctccattttgatgatgatttcatgatgaaactttgtctttctagtatggtggaccctttctctgggatggtgtcgtttgttctgtggatcgtgtcgttttatgttttatcagtacttattttgggattatgtctctacgacgcaacttattttggtaatgtttcaaagacgcaatttattttgatatgtttcaacttttcggctagtttgatatcattttccgaagtctgacgaattgcaaacaggtttacaaaacctttgccaagaagtatcaagtttaggccacataacatccttgagcatgacgcaatgacaaatga

SEQ ID NO: 459 - DNA, 854 bp, Arabidopsis thaliana landsberg
tcaatgagtctggtttgattggccagaatttgggctaggtctagtggtagttctggaggtgcggggaggtgggtctcacccccctctccgccagcctctccctcagctcctagaggaagtcttgctccaatcccggaggtggtaggcgtggttctatccgaagccatctgccatgggaagagagttgctattatgcacatgccattttttttctcctttttttactagttattttattcattacatcaagccattacattacatagcacatcactaccacgagcttattacacacgagtgctacctagggtacccccgaactctttctctaaggtgtccccaaactccttgagaaggtcatcaaggctggccagggacatgtcctcggggtcggactggttcctgggagggttttcttcctgctgctcagtctgacatccttggcttttggtcttcttgcggattttccttgcgggggcgagcttcttcagtttcttgtcgtagtccaatttgagggtgcggtaagcttcacgggtattggcctcttcgcctttagctaacgagaggctctcttggagggacactttttcttctgaaagttccctgactttctgctccaggctttccacccgggaggttagggaggtgcagtggagggcgaggtcatcatattggttatcaaaggtatgaaggtaccagccatgtagacaatggtgggatcattctcaataggatctcctcctgatagggcctgaagtcttttctccaggtgggggaatcatgttgctgggtggaaagtacgaaggggggtttcaatgattacgtagttgtagttctgacacagttgtcggagg

SEQ ID NO: 460 - DNA, 2030 bp, Arabidopsis thaliana landsberg
  unsure (1)..(2030): unsure at all n locations
ggagcaatccacacggctagtgaaatccatgagcattaggtcttgtggcttaagcaggagactcgcgttagtcactggcttgaggaggtcttcgtcgtaggtcttgtccatgtcgatgctcagaacaactttctgtcttcccacgaaatgaaactgtggcgcattgttgtagaaaccagtcactcttaaaacgtcccctaaacggtacctatacaaacctgtataaagaattttgatacacattaagaaaattattaacatgtcatttagttttgaaattgagagagtaaacaagaaaaaacacttaccagcaaacgttgtgacaacaggttcataatcatgaccgattttaacatcgacaagatcgactacaacaggattctctgcgggatcatgaccactttcatagtctttctcaacctctaagaactcgaaataagccatacatggaatgatggtgtacgacacctcattaggcttagacagaggattgagattgagaccgaagaaacattcagagctgccataaaacgttgaaatcacaggaagaccaccgctatagannnnnnnnnnnnnnnnnnnnnnngccatggttcctgtaacaatggcttcgatgcattttgcttttggccatagtctcttcactattgcttcccatgatgtttgactgcattcttgctcgataaggctcgctagttccggattaggagcagtgaggaacttaccgatccctgaaacacattgggggtctgtaatccagtcactgagacaaccagtccttatgtttgagcaaaactcaggccagtgatcctccaagaacttgattattttgagaaaggatgaagcaaatggtgcaccaaggcgacctacattatctcgttgtagaagcccacaaagcagttggcagtacatgctctgagtagtgtctgaacaagtcgtaatcgcatgcgggcttatctgtgattgatccctgtaagtcatataacaaacacaataaagaaatagtagcagaaagaatgaattgtgtaatgtaacgtgggagcaaaggtttttatagatttaccagataaaagagttagctggcgtcacgcttttcaaaacacaagttatcatagtcctgaccagtatcccagaagcagtctcgctttctcgagtcacgaaatataacatgaaagattttcnnnnnnnnnnnnnnnnnnnnnnnnnnnnnnnnnnngatacaatgagtttggggttttacctactctttttcttttggtatcatcaataaaacagagacaagttggagtttggaaaactctttacttgtagagtagaggtctatagagagaagcaaacgaaatcctctgttccaactcctctgttgtcaaaggaatcagcttcggaactcctcctgaagtacctgagctgcagatacaatcccttccttaatgtactttttttaaaagattgacaaactcatgtatcaataattttttaaccacaattcttcaggcaaaacagaggaattaagaaaatccaaagtgggtagatcttatttgggttatgtgagcctagatttaaagtctcttctcatattctagtctggtctaaattctttcaaatcttgcattaaacttataaatacaaatctatgaaattgtttggaagatacctattcaagagtacactgatgggtcgatcacagatgagatcagacggcttttccttggcgatacgatcgatataaggcttaatatcttcgtaggttacaacgggtacattcttcttgaagcttttcttatcagcttgaccgttgaggaaaccactaagatacttggtatgagcatttacgtgaaagtattgttttcaagacagaatcttgaatcttgctttacgttggtagtcacattctcaagaagagacagaccagctttttggtctgttggatcgaactttggcaacatgaattgcttgggctgccttttgactggcgggaaacaataaaccaaaaagaaaatcctggattttaaagcccttccaatgaaaat

SEQ ID NO: 461 - DNA, 6700 bp, Arabidopsis thaliana landsberg
  unsure (1)..(6700): unsure at all n locations
aaagagttagtgatggagtaggagtatttagacaacatttataccaattttctcccaaaagaggataaacccaacaaaacattgaatagaagcagtcaatagctttgttagtgtttctatggttaacatatgtgagaatccaatgcatttgacaaattagaagaatgatggattaggagtgtttagacaacgcttatacccattttgttccaaaagaggctcaaactaacaaaaaaattgcttagaaacagttaatacctttattaatgtttctatggtcaaaatgtgacggaaatccaatgcatttgactaattatatgattaaaagatggattaagagtatgggaatgtgacacgtttaggcactattagagaattttattctttttgaggcacttttaagggatgaggcacttttccaactttttcattaaacttttgactaatttgaccctgaaaattaaggaattataataataaaaaagtttcctttttttccttcttcttcgtcgcgtcttcttttcactttctatctatctctctctctcttctttttattactttttctttccttgcaaaattaaacatttgagagtttgtcaagatcgtgtagcttctgtatttttctctacggagaagcctctcaagatttttgtgacgattgcttgttcgattgaaattcagaggttttggagcagtagcgcatgtaaccaacggcgaaagctcgggtgttacagccagtaacatgtagaggtgaaaaataagatgatttgttccctcaatcttacaaccaatcgatcaaggtattgttttcgccccgacgattcctcaatctttgtgaatagaattttaagttttgctagattgtatagtatttgattcatattagcgaaattgtgtttgtgtaggcataaccaaaatctaaccgtaaccgtattttggaccgtaaccggaccgtttattaaccgtaaccccaccgtaaccgtagaaaacgattaataaccgtaagcgttaaccgtgaaaatagatccgttacggttaaaaagatatactaaccgtaactgttaattaaccgtaaccgtatcaaaaccgtcggttaaccatatagttaaaaccttaaaaatatagttgtaactgtatataattctaaataaataattatttcactaaaatagtaatttaaatcgtttaatgtgcccactagtacgatcgaagttattccactactctttttaccataaatcaaatcataagtagttcatattattattatttatacttttaaaaatgtttcttaactcacaagtcacaacatcttctctttagtattgttgttgtttggaaaatgtaataaattcaatcattataattatgaccattaatttgtttgtttaagaaaaatagataactgattcactatataaatatttgaaacacataatcatataaaataaatattatttgatatatcaccatttatttatttattttattataaagattaaaaatataatattttgtctcatatatcaactatatcataattatcaaataaccgtaaccgtatttaaccgtaatcgtatttaaccgtaaccgtatttaactataaccgtatttaaccgtaattgtatttaaacgtaaccgtatttaaccgtaaccgttttaaccgtacatgtaacggttaaagttaaggttaacaaaaatttataaccgtaaccggtggttaataaaccgtaaacgtaataaccgtaaccgtagtcatgcctcaaggggacgtcttctaatcattaatatataaagaacatgcgcactaaactttgttaagttttatgacacattggaatggcttgtatggttgattggttttgtattcattgtttcaggctactatgtactccttaagagacattatcatacatttattctaagggacgatacgtttacatttttgtgaaagtgcatactcctaaagtggaaatttttagtgcttgtataaactttgatgtttcaaagcttcttcttctgtgcaggatacttcaggagatcgagtcggataatgtacgaatgcaagatatttccacaatagagatagttcccaatcttgataccggtggtaatgtgagagagtctctgatcatggtagtaagcgatgggattcccatccaaatccacctgcagaacacctgcattcttcatgaacataagttccacgccatacttagccgctatggctgtgattttcctcaagaaagggtatttcatcgagagcctccacaacgttgatgctccctgttttcacaacactatgagcaaaactatacaaaagctcatcatcataaaccttaaagaaaatatttcaactggtttacataccgaaaccatagcaatccagtaatggccatctccgtcgtaccgaatgttatctggataacctggtaagccttgaataaacacctctacacgctcttcattaatgtaatacttgctgcatcgtctcctagatatagtatatcgatgaattaacacattgctaactggtatgagtcggatattagtaaaatccaacagagtcaggggacttacatgggagtttcacagaagatgagatgcgtttgatcaggagacatggagacgccattagcgaagtaaaggtctttgagaagtacacgtgtaacacgtgtggtgggatcaaagctcatgagacggccatgtggtttaccttccaaaatgtcaaacttgacttgatgcagagtgtacttgtaagaagcatcagtgaaatacaaaacgccgttatctgcaacggcgactacatcagtcagcttaaatttaacgccttccgcttgatccgtcaataattccgtcttcttcccgtcaccacttatgttcaacagtccctaccgacacacacactaatcaacctaagatcgagattttcaaaattcgatttctaaaaagttcacgaatccaaaccttgtatgcgtctgccacaatgacttcgccgtggactccgaaagcgattccgagcggtctaccaccggtattgacccaatcctcaacgactgagtcattagctgagtcgtggacactgactcgtttcacccatccatctatgcagccagtatatatgagattagagtcttgatgataggcgatatcttcgggtttatcgagaagaccgacgccaataaactcagctccggtgagatatttgtcgctgataagcggcgggattgaagtagtagaggaggcgtatgcctcggaaggaaccggagctgggtcaaatgtgtcgagttggtagagagcgatagagacgagtaaggggacgatggtgaagaagaagagaaaacgagaggagtagaacataggcattggatacaagagaattggctttgtggaaaaatggtgagcagacaaaatttggagtgattgttgttgatgatcaaatcgcagatcaaatcgcagatcaaatcgctgttgagtgttgactcgtataaatttggtcttctttgttccgtagtgcgctaaattacgtaaccaacaacaactctcgctagtcgaatctcgtgggctttaattatattcccaataggcccaattatgttttctggagttgaaaacagagtaatattcactgtacacgactttacatttttttttttgggtaaaagatgaagttttataccatttttatttttgacaaagaagaatagaaggagagagaagcaatctacagaaaattaaagaacaacactataactctaagtacaaatgatcgcggctgagtgatcaagaccaagttaggaggagaaacaccgaatccgcgaagctcggaaaagtacgctgttgccgcaataccgaagtactggaatcctcatctgagttgtcacaagcattactctccgtctgttgggttttgaataagtcgttaagttgttctcatgtttgaataaactcatggtctttaagagtcgagtagtagttgttatagtggtcctagtctttagcttacttccgcaagtttctcattgtttagttgtgaacgacgtagtctttgtagtcatggctatttaaaggcatgcaattcatatcaataaaccatcgaagtattttgcaatcttctgctatactttagttttccgagaacaacaccgtccacaaaacctccagatagaagcttatagcttctccgaaaactaacgcaaaacgaacgagcaaacatggactaatacactagctcaacgaaaagtgaaaccactaaaacctattcgccacctctattcacctcacctaaccttgcaatgcaccaagaagctaaccatattcacaaagattataaactaacaacaccttaacaccaaaactcgaccttacaacaaccgtacatgatgtgccagggacgaagacaaaaggacatgatgatgtgccagggacgaagactttacattttgtgacagtgaatactcctaaacttgatgtttaaagcttcttttgtgcgggatactttaaaagatcgagtctagtaatgtaggaatgcaagaggctcccaaaatagagatggttcccaatcttgactccgcttgttatgtgagagaatggatgatcatggtacattgcgataggattcccatccaaatccacttgcaaaacggctgcattctttatagatagtagttccacgccatacttagccgccatgtatatgagtttcctcaagaaaaggtatttcatcgagagtttccatgacgttgttacttcctgttttcacaacacaatgatcaaataaaagattaaagatgatataataatctcatcataaactttaatgaaaagatttcaattatagtataaataccgaaatcaatgcaatccagtaatgtccatctccgtcgtaccgaatgttatctggataacctggtaagccctgaataaatacctcaacacgctcctcactaatataatacttactgcatcttctcctaaagtaatatacaaaatctataaataaaaactaattaccaattggttttgagttagaaacataacaaatgtaatgcacatacatgatggtttcgcagaagacgaaatgtgtttgatcaggggacattgatatgccattagcgaagtagaggtctttgagaagaacacgtgtggcacgtgtggtaggatcaaagctcatgacacgaccgtgtggtttgccttccaagaaatcaaagataaattgatagaaatcgtatttcgaagaagcatctgtgaaatacaaaacgccgttatcagcaacggtaactgcatccgtcagcttaaatctaacaccgtctgcttcatccgtcaacaattccgtcttcttcccgccatcgcttatactcaacaatccctacacacaccaacaatatcaaacctaagataagattttcaaaattcgatttcaaaaaataaagaatcgtctaaaccttgtttgcgtcggcgacaatgacttcgccgtgaagtccaaaagcgataccgagaggtctaccaccggtattgacccaatcctctacgattgagtcattagctgagtcgtgaacactaactcgtttcacccatccatcaacacaaccagtatagatgagattagagtccttatggtaggcgatatcctcggggttattgagaagaccgacgccgataaactcagctccggtgagaaatctgtcgttgagaagtggcgggattgaagtgggagaggtgatgagtgagtccgcgggaagtgaagctggctcgaatgagtcgagttggtagagagtgatagagatgaggcaagggaagaagatggagaagaagagaaaacgagtggagaagaagagaaccattgtagaaagattgggtttgtggagaaaaataaaaaatggtgaacactgaattttaaatttttggagtgattcaaacttgtagataaatcttcgtacgttacgtaactaatagggaccaccattcgataatctagtatcgtgggcttttatatttcattaggcccaattatttatagactcgttttccttcagtatatgggcctaaattgtcaggcccagtgtttaacttatggactttttgtgttttgtttctgttactattgaaggcgtagttgtagattgacgttgagatgnnnnnnnnnnnnnnnnnnnnnnnnnnnnncttttgtctgtaacgtaccacttctctaagattccccgtacatgatctttttttctttctaaataaacttatcatatagtttaaaccatttttaaacggggacaagccatgatcttgattcataatcttgtctctctaattcaacaatgcgtccaattgataatgatcaatatgaatccaatggcagtcttgaatcactcaatcaaattaaagaaaaacttatactaaaatggatatggtgaatcaggggacaacccattgaacagctactagccatagctcctacattttaatcaacattaaagtagcttatagttttggaaaatttctacatagtttaagtttgataatgttgcgacgtcttctagtttccgaccaaattatgtggttattattgatagtcgaagtttgttgcctattaactatattttgagaatacatttcgactgagttttaaatatgggttctgacagataaagatgagttgattaacactttgagaagaggtgcaatgtatcaaataccatgaaga

SEQ ID NO: 462 - DNA, 1103 bp, Arabidopsis thaliana landsberg
tgttcaacccaagtggaatcttatcaaacttacgtttcttggaccagcaagccttgccattttcatctctctgcatttttatgtccatgtcagaatgataatatgatacagaagcttgcatgatgaaatgatgatgaactgatgatgaaaaacaaagagaaagagtacgcatgcaactctaggtgccgcttatgagcaggtgagaatttgtacctctaaatcggaacaaacttgcatgtattttctgacagttgcatctgatatgttagaaaatgagaaagacagctcatcggcagcaatacggtcgcgatgcttaaactctcgatacacataggccatcattctgttcaccaaataagcatgaagattctttgatgcaggagacattatttccattcgaggttcctacggaaaatacatactcagtatgccggcagtgtgacagttaaaaatgaaagaaaaataagatgtggatgcattactaaatcacaagcatggacatatagactcattcttcaattttttttgttgagcaaaagactcattcttcaatactgtatatataagcagtaatactttctctgaacagaaattctaagagagaaatcttgcaaaacacaaacctgttgtccaacagcaactatcttgttaatacgccttagagagagctttcctttagcagaccggaccaacaaataatctgttgattgcaacctatgaggaaaaacaggtgctttgtacatgtttgtttcaacagatgactgactgcaaccaccgtgtacttccccaaggaaaggggatttgttcccatgttctagaataatcacactccctaaggtatcactttgattgcgcagcaagttcccatgttgatcctctggggatgacttctgataatacgtgcacaaatttgcacccattcctgcattgctgagcatcaacggcctctcttcacaatacctactcagattaatgaaaagtaacggtgacttatagacaaagatcaagataactacaagagccataaagtaacaaaacaaaagttccaaatttgacaggtaagtcttatatagaaaatcttcttactccatcaagaaaacatg

SEQ ID NO: 463 - DNA, 1758 bp, Arabidopsis thaliana landsberg
ctatatatatatatatatatatatatatatatatatatatgcttaacaaataaaaaatcaggaaaatgaaaatctgatgtagatgttcgattacaagtttatttcaatggaacttatttattacttttacaaaaataatactttgtcttttctgttatgtctaggacctccgtaatatacaatattattgacatgtatatctgaatatatatttattttcttttgttaataaatattttattgcatcatttcaaacatataataattttatgaagtaatagtgaaataacatatccaacaaaatcctaaaagttaaaatttattatatatacaagaaaaaattatataaaattaaacagtttggattctctttcgattttaatctttgatccaattatctttttttatttaattatagaaaaccttaacatacagcctaaatcaaaagatttcaaaaaaattaaatcacttttttcagtttcaaatattttataggtggaacgtctttttatacgaaataaacgtaaatttaaataaaacgaaaactttagttacatattttcttgtatacaaacatatatgatatctcatataataattttacacataataatttatttcaatcattttatcccgcacattatacattatacagattcttatctagtctattatatataaatgaaaacaatttaataaacatataggatgatggtgatggtggttgtgatgatggtggtggttgtgatattgattaagctttaaggacgtggtcctccatatcaataaccatactcttgaggagttgcatgtagctgcttggttcggggaaatcatcgttgcgcttctcccatatcatagtgattttgcagacgcaatcttcttcagacttgggaataaattggaagtcaatctcatacaccttgaactgctccatcacgtgaccttccaatcctacaaccttcactatcttattgtcatcgtctatctctctcctctccttgaatacctcctcctttccatctttacatacatgtaaatcattatttttttcttttttttgttaaagcgtgtaaattaaattattgtcatatttatataagaccatctacaatggcttattgaaaaaattaattcaatagttgaatgcttacagtggaatattaaataaagaaatgaatcttatgtggattcaacggtgttgaacggattcaacaattttgaattgttaaaaataaaccctttactgctacttgtcattaaataattggagacagaaattgtgagagaagagttaaaatatagataggacatgtgttattcttttatttgttactgaaatttctgatatttacttttcctctgagttattatagatcaattatcttataaaatatatatttgttttaattttttttacattaaaattcatcatacttcaaactctataaataaagacttgttttatttgatttggatacaaaaaaatacatctatttttacttattatccatttaaaacataaaaaatgaaaaatgaaataaaaatagtggggtagaagtgttgaattttattaaacaaaccataatagagtataaaatttaagtgggtattgaattattatgtggaagagagaataaatgatgtggaaaaaaaaaaagaatacgtggagggtgttgaatgaaaaaaccattgttgatagcctcatgactgattagaaatcaacatgtcttttatttaagaattaataaaaattag

SEQ ID NO: 464 - DNA, 810 bp, Arabidopsis thaliana landsberg
caaaagtttcagaacttaaaatttttccaattttaacaaatcacatttccataaggctctgcaggccattgaaggtgtgagagtatcattttacaactctcttccctattgattgatcataatgatgtggccttgtccaacttgtaagaaactttcaatgctcagataatgatcttatctttgagctcatacacaaacactgcataggatacaatcatacaacaagactcagcttgacttccaaatgtgtctggccctggatcagttggaccaatttatgggccttgtatgccattctgaaggtggcaactggatccagtgtaagcatatttgctgcttgccgaggcatagtctgattgttcatacttcatagccatacaagagaatcatttgatacataactatttataataagtaaggttgacatttttttgtttgtttgtgtggattattatatcttgagagttgagaattacatcaatcaaaaatgaagatttttattgtaaactcgaattgatggacaataatgaaacaaagaaaaaattagcaatacatttgacaaattgtgagatgaggacacctttttcgttattttgttgttaagacaccacctacatttattttcatgaattgacccctaaagaatacttttggacgacatttgtctatttagaaaaacaaaagggaccaaaaagtaagaaaaacgaaattgggtgaaattcaaattgaaaagctgcaataaaaacagagcaccattaatggctttaaacgataccaacaacaagacacgacacaactatctcctccctc

SEQ ID NO: 465 - DNA, 1680 bp, Arabidopsis thaliana landsberg
aaaaacaacatcaaaatcttaaaaagtatttttaaaaatccgaatgaaaaactttttttctagatctacctaatactgggaaagcacggtgaatgttaggaatcgctaacggctaatgctggatccaaaatccggttaatttttctatcattataaaaagttagcatccaaataacatgacaaacaaatatgaaagactaaaatccgaataaacaaaatcaaaattttaaaaacaatttgtaaaaatctcaattaataatttgaatactaaatctatataataatagaaaaacaggtcgaatgtttggaatcgctaatgacgaatgctggatccaaaatccagttagtttttttttatcattatataaagttagcatccaaataaataaataaataaacaaacaaaagagaaaaaaaaaattaaaaatccgaaaagaaacaaaatcaaagttttaaaatactatttttaaaaatctgaattgaaaacttgaatgctaaatctacataataatatgaaaacaagttgaatatttggaatcgctaacggctaatgctggatccaaaatccggttagtttcgtatcactatataaatttaacatctaaaaaataaaattaaaattaaaattaaaaacaaacacaaaatatatcaaaatctttattagaaaaaaaaaaaaggaaattaagaatcaacgaacctgactcatggtggactaaatggattatgactctctcggcatgactcatggattgttgtttactaaagcccattcgttgtaatctgaagcccatcgattcttccttgacttgggccgaaactgcaatttttgatgatgaagaagatctcgcttttcaggtctgaaactctgaaccaccaaaaccccagatcttgtcgtcactttcactcgcgattctctttgtgacgattatattttgccgaaagtttagatgcatccagtttttgcgtcacgtcagactcgtttctagaactcaaagtaatcttcctgtataattagcccgtgatcgtcaaaaattgatcatacacgagagacctctctcgacatggcgttggaccaacgcggcaacgccgttggtaccgttcagcgatgtatccggatcatcaatttcacggtcacgagatatcagcgatcgtatttgtaaaacagtcgcagagaaagaaaatatttttttagggtttagaagaaggagtaatgatttcttaaggaaagaagaaaagatgaatactatttataagagagaggttcacgcaacaaaaaaaaggaaacatcagattattattttccttttttcaaatttggacttataataaaaaaggaaattgatcatgattacaacggtcttatttttctaactgcaaaaggttaagtgttggaatttttttatacaacggtctatccttcacgcgcctacgcgcgcatcatcctcgccgtatcttcttctcccgagaattctctccggtcagtcatgcctccaattcaccttttctcgaagcttcccttccaagttcaacttcttccgccgccagttccactttgatgaagaattcgcctttggtaagttccaaattcctctttctatctgatcaaatctatcacgaatcaagaatatatagcttgttagggactaattggtgaattcaacttgagttttacaatcagtc

SEQ ID NO: 466 - DNA, 1079 bp, Arabidopsis thaliana landsberg
cattgcgtgacggctttcaggtattgtaaactgtcatttcatcggttagtactaaaatgcaattgattaaagcgtgcacaaaaaaacaaattgcttcccacacataaaaagtacctgaagaagtgcaaaagctgcacaagctctgagtacaagacaagggtttcgcaacattgtaacaaatcttccaatttcggaaccactgcatctcaagtggccagcttctgggattcgagctctctccgagacttgtgctaacatagatggagcagatgataaagcaccagttgagaagatttggtgttccatgaaagttttaatgaaggctttaatttgatcaagagccattgttctagcaccatttaaggtaacacttttagatgtactttccaatgaagtccctatcatcgcgtattcatccatcctgttataatagatagataagatcaaagtcagatctgcaaattaccttaaatgtggatatgattacagtaattaagttttacgtaccttccatcaaacatgtatgccaatgctaatgcagccataaaacgagccattttggaaacagaagacgaacagagctgaacaagtgctacaactcccccttcctccacaatccgcagagcgttaccaggattaaaagaaagattccacagagctcctgcagcagtttcatgtacatcctggaaaaaagcaaaagctgcatcagattaacccaaaagagtgggatgtgagaacttataacgaaacaaattgtttacctcagcttcagatcgtacaagagcaattagaggcggaataccaccttcatggccaattgcaatgctgatagaaaaatatcaagaaaaaaaacaaaaatggaaagattgtcattaaggttttacgtataatcatgttagcattgatatatatgcacgcatgcagtaacaaataaataaataaattcaacgggttgcacctgtttgcttctgagacagatagtccccacagagcaccagctactctctcttgtagacccgttaatgcatttgaagaggacttcgcaagtgccacctaattttataagcagaaacgtgtga

SEQ ID NO: 467 - DNA, 2799 bp, Arabidopsis thaliana landsberg
agcgtggcttgttgttacataccatttggttatgatataaatcttgggatttggtgaagacttgaagaggcaaaatattgtttctttgataaagacttggactttttgcttagatttgtcagtttagttagatgattttggtaggtgttgcagtagaaattgttttgaagagcatgaattgttatgatgcaagttgcttcacttttgcagatgcaagtaaccacgggggatagattcacaatggtaaccaaggactcaaaagtatactcttgtggtacaactgcgtgggctcttggtcatgggaaggaaactagacgatgtcatgaattgaagcatatagatttaccgtttcttctttctttagccataatagaagctctgttcaagcggagggataaaatttaggaaatagaaatgatccagatttaggatggtatatcgattgagcgggagtgcattctctgcgcaagtgattcaagtatcagcctgtgactatataataatgaattacgtctctttaaataaaagaaaagaaattttcacataagtggatgaaaaaagaattgctctcatagtttgataaagtgagatatggttttcaccgtttgtcttttcgatggtttttggtccaggccattgttaatgggagcaaccaaaccgcacagcagttggtttcggtttagattatgcagttcagttttgaaaaaaaaaaaactgaaatgaagaaaccgaagaaggaaaagagaaagagatggagagatttgagagagaagtagaaagaagatcaaacttcattatccacttcttcatatttcgacacctctccattgtactccaaaattgaggaagaaatttcttgttttcagagatgaacaaaaattgaaaaaataaatctcagagattcaaacaatttagctttttaaactaaagatattctaagtttacaagatttatatataaatagtaattaaaacgtataaaaaatgagattttgagaaaactgctaaagatggccgcaaaattaggtttgcagaaaaggatacacaggttgaagatgactggaaaattacaattatacactttattaaatttcttctgtgtacgtatattcaatttacagtgtacgtacacaaaattatttagtgggatgtatatggtacgatttgtaataactatctaacctcctccgtcaacgaatttaacatttaaataatttgactctaaacttaagctattttattacgtattcttatatctccataatctccatacatacataataattaaataaaaatatatggtgaaataatatttgttcatcatattgaaaagttatgtatgtatttgtgtaataatgtacgtacatttttgttagtaaattaaagtatgtacatgtgtaataatatacgtacatctttgcttgtgaattaaattattaaaaaaatttattcatacaataataaaccaatatttgcaatggctgagatgtattctaagacgttcatacgatgtgattttgaaacattctaaattcttgacgacttgagcagtcaaatgtcatggacaagtatcatcaacgcaaatcatcttcaatcttgtaggacatgacctaggttgcttgtagcaaaagcattgtttgattgcgagataagacattctttgttgtatgacttttctgtttttaaaaacactccctacatacaaagtctcacatgtcgtactgagtttaacttgtgtctcatcggatcgaaaattggctaaatcatcgaataccggagcaacatcattatcgagaatctcttactcgccaccatgtaatgaagaaaatacattatacacttcgtaaacctcaactacagtaactagccgattatcattcagtgtcccacttgcggaagctccaataccacggtcaataacatcatccccagtggcttggtctataccattaatattggtatccgtgttaccttcgcagtttgtatcttctacacattctgtagtgtacgtacgttggtacaaaccatgttgacacgtactgtttggagtcacggggtgtgtacggtcacccgagtgagaaatattatctccgccaagtacacgctgacttgtgtatgtacactctgccaatagaaaactgaattttcctggatgttgaacaatctattgagtgagaatgacgtcctcctcaacattccctattctatattcttctacaattacatcgttccacttgttgtaatcgtaatcttcgccactaccgtctatagtaggatcgagggtattttcccccatagatccatcgtcaccttgataatcatcatatccatcacaatttttgttgttctcctcctcttcatcaatgtagacatgagggcgtttactatctatcatcactaacatctttcccggcaactaattatgggattgatctcagtggacttcaaactgaaagtctcgcttagtggacgtacaaattccgtgtacgtcatgttttttttaacacgtacacagcaaccaaacatgccttcctcaaattttcattcttcttctttgcttctccactcactgaccatagtaaatacgaaaatatccattacctacctgcatcataaattcaggagaaacccattaaatgtaactaaaaacatgattatatctctaaaaaaaaacaaaaagaatttcgatatacatacctataaacataaatatctactcatttagcattttcaacaaacaaaattggaaataatttttttgggggttttctataaaaaaacaattttgatttcgaacaca

SEQ ID NO: 468 - DNA, 867 bp, Arabidopsis thaliana landsberg
aaacaattaataactaaatgtaattcggtgcatttagttatatttagctataattttataacaaataacatattttaaataacatatcttaaataatttgatatcaagaaaaatttaattatatttattaaaattatatataatttgttttttgcaaattttagacaaaatttagtaaggttaaactaatttttatttatgactatttttttttgttttttttttctttgaaaaccgaaggaaaatgatcaaaattcgtcacctttcctaaccaaaaacaaatagaataatcataaaatccgaaaattctccaacccgaattattctaattcaaataaatccaaatgtttatacctagatagtgatatgtcttttctgcacattctcatgtttcaaatcattagttaacatttagttcatatatataaataaccatacgttaagttgatgtataaaacatctttaaagttaagttatgaaatgacatatattgacaaaaaaaattaatgacatgtttcccgaaatcaaatggtcattttcaccatattatcactgtctaatgacgtcaggataatacttgaaaacgttgtagcaaagccgggagatggcgaagaagagagacagtccgaagctcatcaaaatcaaagacgccattaaactcatcaaccaagaagtcagtctcattggtatcgtccttgaacaaagagaaccaaaacaatgtcgcaacaatggtacttatcctaaaccccctaaatttgactcaaatacatataatttgttttgtgaaaggtctaacattttacccaaaatctggaagttggatttttttcttagattggatttggactctccggataattgatgata

SEQ ID NO: 469 - DNA, 4759 bp, Arabidopsis thaliana landsberg
tttttttttttcttgttaaacatattgttgaatttttccaacatacataatgttgtatgattctgctaatgtgagctatgcatttatataatatttatgaaataatattctatccaaaaatcaaacatatgttaaaatgaactcattatttgtatatccgaaatcctgaattcgtatttgaatcaaagcaaaaattataaaattatctatagctaaaacctccatttatttgaaaactaaagatatatttgatttaaaatggaatacaaatggcaactgttatagaaaagagtggtgtgcttcaaacaattatgtgtggttgtactaaaggaacgtgcgtccatgaaatagacacgaatactattaagaagaagagtctcacactctataatggtcagagagacgacgtgtgctccttaacgctcccaccccggcaccaccctctctcgctctattaatcagcaacatacaatcaaaccaaaatcaaattacgttacaaaattgtcccgaaataattaaagaaaagaattcagttcatatgttatataaaatacattaattgataccaaaaggagcttgtaataatgtgatatattactattgttggtatggtgtaactcgagcttcattaaatccgtaagtgtgtgtgtgtgtgagttatagacgtacaaaaagaaaataatttatgaaagtaaatttctataattagtagttatatacatagctaatgtaatataatgattacatgcagtccatgttatctagtcggtatactcttccctcatcattgggattaagcaataactagtcacgctcttttccgctagccaattatttagctactaaccaaacctcccaacagagagagagtagactttctattatatatgtagatttgtaggcgtcaatttaaactatgtatacaacacaaaaagaatcacattttccatcataaattttcaaatacatttagagtttttgtagaattcttatgttgttcaaagtgaatgaaaatctacggaaatggaggacaatagttgaggatcatttaaattttgatataatcggataatatatatatactcgaaataaataaataaataaataggtaatataactcttgaagatacgatgagctgctcttgttgattgcttggtacttagtaatattcttgacgtggaatgggtgctcttcacatcatgcatccattaacggaatctgttataatgtatatagttccatctgcacattacacacgccaacgagtgtttatttataacataactttgtattaatctgtctattttaatattttataacttcatattccataactaaatgtgtttattttcaatgttatggtgaaagattctcttaatgaaattaggaatatgattagataagtaataaatttttactagttatatatactactttgccacttcttgtattattgtctcaagtcttgcttgaagtcttatcgtcgtagcgttaagacaaattagttggacttgagttttttagagtcaattttacacaattctagataactagaagcaatatgtttctcttcttcttctttcaatatatacatatttacgtatacgtatacgtagagatatggtaaacaaataaataaaatatagaaaaaatgaagatggagtggagtaatggtagagagagaggagaagggagagccgtacattccgtgagagacaggcttgcattagcacttatcattactgcaaagtccaaacctttctcttaacctctagttccagttttcacctttctttttcttcattcataaaataagcatcacttaacagtctaaagcaatcaaaataatcgatgattaacaaaattcgaatacaaaataatgtatataactagaaaaatactaatatgtgattagagatcattttcgtttggtttagtttttgtaggaatttatagtagatgcgaacatgtttagattttttttaaaaaattagaaaagtttaatcaactaaattacaaaactaataatattagaactaaaaatatagtgttgaatcatataattagaaatacgtttgtgtttgaacaaaaaaaaaatctatcttttaatttctattttgaagtggtcaatatatgcctagaattggttacaatttactcatcaatctaaaaactaaattgaacaagaaaaactaaagacactattttacatgtgatcacaccccgaagaaatagttatacagagtaaaaaaacgggataatgagtggaacaaacaaatatttgtatagaaattgtctaaaattgtacattttttgttggaaattgttacacacactctttctctctctttatctgattgtaatgtgattagtttgccaagttgggcaaatggtagaagagagacaataacagaagtactaaaatttaagaggctacaaaaggacaagtccaaacatattcacacactctctcatatatttttgttctatatgtgtggtgtatctctttgactcctctcttcctaaatcactcactatttatgtatctatctctccacacatctctctccatcccacacacatcttcctcttaacacattactatatatgcgcatctctcatccttaacttattcataatcaacaacacaaatcctcttctcctgatccgatcttcatctttgatcttgaatctcttgctaatggaagcgttcgaagaggccacaaaggagcaatctttgatccttaaagggaagcggacgaagcgacaacgtccacaatctcctattcctttctctatctcccctcctatagtttctaccccggaacgcaacatggaagaagaatacactgatcttgattccaaggacaatgctttaggaaatgatgagggcaaccacaaaaaggatggtgtgatcacatcttcatcttcatcagcctcttggtcctcccaaaacaatccaacattgaaggcagcagaagacgaggaagatcaagacatagccaattgtttgatactccttgcccaaggacactctcttccccacaacaatcaccacttaacaaacagcaacaacaacaacaacaacacgtatagatttaccagcaggaggtttctagaaacttcttcttctaacagtggtggaaaagccggttactacgtttatcagtgcaagacatgtgaccggaccttcccttcttttcaggctttaggtggccatagagctagccacaagaaacctaaagccgcctctttttactccaaccttgacctcaagaagaacacgtatgcaaacgacgccgtttcacttgtacacacaaccacaactgttttcaagaacaataacagtagatcacttgtcgtgtacggtaaggcaagtaacaataaggttcatgaatgtggaatctgtggagccgagtttacgtccggacaagccttaggtggccacatgagacggcatagaggagctgtggttgttccggcggtgatagcccccaccgtgacggtggccacggctgcggccaacacggagctatcactgtcttcgatgtcgttcgatcaaatatcggacggtcatcaggatcatctggcgatgccagcgaaaaagaaagctaggacggtcgtgtcactggatttggatctgaatctaccagcaccggaagatgagaatcgggtcaacggattcagctttgcttcaaagcaaaatcacgaacaagaacatcaacagaagaagcaaagagaagaaccaaagtctcttgtcttgtctgctcctactttggtggattgccactactgaatttattattacatcgtattatttaacccaaaaaaaacattttttaatttttggtttgctctcagattgatcattcattgtttctctatcagattaaacgtgtttttttttgtctaaccaattctttgcttgttcaagacttgcgagattgtttctttttttttgtgtcatttttacagaaatataaaaagttaagctctttgctagtttcgatttgttgttatacaaagaaaattgtatataaatttacgtcacgttattttattcttgacaaaaattttttttcctccccaaagaaaaagtaaagttcatgaaaagggcgtgacgatcttttaaagaaaaagttctcttttctgttgacaataaggtttacattgaggggaaaaaatattaaattgagagtgagagaactggggaaaatcaagatttctattactatatctatatatgtgtttgattatatgcgcttttttttcctcactaatgattttttcccccaataatgttgtcatatatattcacatactgtttacttgcaatgaatgtttttccttgattccaggatctccactgaaagacaaatttattttatttttaaatcctttgaatttatataattttccttgtaagaatagactcacggtcacaagacaaaactatatcagttgattttcaatctatatggaaccaacactttcaattcttgagaaaaatatgtaaaagaatatacagacacttcaaatctgaatctagcttatttttttcacttcaacgtcaagaccgtatttgcttttctagatcaaaagtgattgttgtttggtattcctgaatactattcagagtgaagactgcacgctgttttgcgtttttactagtctaaatggttcgggttgaatttgataatcggaaactaagaaaaagtaatcgttttaaaaacgggactattacaaaagatcccacga

SEQ ID NO: 470 - DNA, 3628 bp, Arabidopsis thaliana landsberg
ggtcccgtcaaccgtagacccagatgcacctggatcagagaaaggcactaaggctctgaaaagacctgttaaacttaatgcatggaagcttgcaaagttggatccaaatgaagctgcaagggcagctgccagagccagagcgtcatcatctgtcctaagaccgatagataatcgccatttacctgataatgatcttagttccattggcacagttagtatcatcagtagtgtaagcacagatgcaaatgtggctgcaagtaaagagataaggaacaatgatctaaggtcatctctttctagaaactcgtttgctccaagccaaggtagccgggatgagtatgacacagggagccatggtatgagcaatcttagcagtccaagccatgttcacgagtctgtcacacttgctccactccctcaaaatcctacaatagttggcaatcgcttcactgcaacaagccatcacatgcactcgacctttgatgataaggttctgcacagaggaaacgacgcggatccgctatttctctttgctcctgcaacttctcatctgagggatgtgagaaagacatcagttgtttgggatccagaagctgggagatatgtatcagctcctgtaacaacaacatctgaagtccgcaacagattgctaaatcctagctcacaaacagccagcactcagaatccaagacccattcttccagctcatgattcttcttctggatcatcagcactaagggatcctcttcctctgcaccaagccgagagaagactgacatatacaggtgactctatcttttatggaggccctttgattaatattccgactagagataccccgagaagcggaaggggcttggtaagagatgtacaagacagattggcatcaacagttcatcgagatgcaagaattagaagggattcaacctcaaaccagcttccggtgtttgcccctggaggtcttggggcaaactcccaaaccggttctaaacatcaagtagatacactgattgtatttcttgaaaggctctgatcttctacaaaacgtcttcccaattcctggagaggctcattatccatgggttctttgctgtgttgccggaactctatgaggattaaagtttgagtttctgagtcactggaatttgtgcgaagttcccagtcatttttcagtgttagagtaggactaattttcttccaatggatttgagcttcttgtaaacctgaaatgtcatcaatattgattcttccagaaaaccattcatgtaaattcttctttcacttatctctgcattttcatttctagaaaatcgatcactcaaagtattacattatggagaaaatattatcactcttttgaaattaaaaacgtatacaagacaacgtactatataatcacatatgagaacatggtccattttcccagcaaaaactgaaaaggtttgacaaatgtacacctcgagagagttcatataacttaaataataacactacttaccgatacatataagaatccaactccagagagtcatggacaaaaaaaggatggctaacataaataacaacaacaatgaaggcagagagagacgccaatatggcttcattctcttcttgattgatcgatgaaccaagcaactcttttatctgaaaaccactttgtgttctgtttctcccatgatcttatctctttcctctcatcaaaagctgtgtatgtacagaacgatgggagagtgacttgggctgacaattctcaagttacacacttaaacagggctatgcaagcctctgttttattgggtcggagttgcgccttctctggttttgggcagatttttcctccactactttttgagatgctggcgtgagttttcctgctcggttggctttagttgcctgagatcctaaggattttcctgctcaagaatattcacgaaatagacttaaaggacaatagggaagaacagattgatttaaggcttggtcaatctctacactggaacttggaagattagataagatttgggtcttgtgggttatacatacttatactaaaacttagccatccaagtatctacattgtggtttgtatctatatgactactgcaaactgattctcttatcgctaccagcatgttgataagactatcgtctcaattataaaactggaaatggaaacatatttcctaggcatagagaaagagagaaagaaagagagaaagaaattgtaccgctgtttggcagagataatcgttcttttgaagatcgatttggttctcttgatctttctttcggattgctgtgtgatcttggaccagcaccaggtcttgagttaacttctacagcaagatcgtctttagctggctttgacttagccttggataccactggaatgcttgaagatattccaggagaagacgaatcaccatccgactgacacgggccagtcatctgacttgaaacaccggatacaagatttgaagtgtttggcatcttactcacacttttgatctgcgttttaggcacattctcagactgctccatgccgttttcacctaattttgcatcatccctgaggttactgtcaagaaaccggttctcccatgaaacgcaaagccatccatctttccaaccagttccatccccaattgtttttgtcaggttgaaagccactgtgagcataataacagccgagttcctgcctgccactacaagagagcaattctctatgtgagagcaagtatcattatatcctgcatataaaacaacagaaccagtcactattaatggggctaggattaggctaggtggccatcgtaaaaagatacacttaaagagaaataaaatagactgctgcagaagagagttaagaaaaggaaccagacaaaaacaacactttaagtagagagcttcagttttgcaagtcatagtgcgttagttaaaaattggtcctaataaagagaactcatgatttatcagattcactattcagggatgttatttttcgaacaaattgaacaaatacaagcaattacttcttaggcagagtagtaacctggtgagtcaaagcatatgccatcgctctctcacgcttagctgcagcttcctgcctctttagcagcttggcttgaatttgttcaacagatccaatgctatcgcaccaaccttcctgaaagatgataacacatagtcaacatgactgttattaaaggccaaccagaagataaacaaatacaaagtttgtaaacaacttagacaagtgacaggcacctctatttctcgaactcgggcttcatctgctaactgttgttgaagtgtctgctgactcgtctcactttccaattccaaggcgagacgaacacgtcttgcgcgtacacgagcctgaactcttaccaacgcttgcatgcatcgaagcgttacagcagcttgttttctcacagcatgtcctctaacaagggcttgaagtctaaccaatcccttcaacgctcgtaaagccctcctagcctaataaatatatcatcttccttatcaatccactcttttttttaaaaccaatgaactagcatcactaaaccataagtaaagcaacttaataaggcaaattgataccagaaatccccgataagccgtt

SEQ ID NO: 471 - DNA, 3033 bp, Arabidopsis thaliana landsberg
aaactggaaaaagaacttacttcctgctgtggtgatccgaacatacactacggtgttgccctgaagaaaatggccaacttactagacaagtaaaacaagtcccgattttaatacttattttagattccccaaaatgttaaaattctaaaatttcgattatgataaggtcggagcagaggataaggaggctagtcagattacgtggctcatccatgcgttcttaccaggactttaagatcccagtcgagtggatgcttgactcgggaatgatatgcaaggtattgctttctttcgatgagatttgttttctctctaagtaactaatcggttacactctgtttgtcctctgtttaacattgctgtaattctgtaaatagatcaaaagagcatcgatcaaatttgcgaaaacctacatgaatagagtagcgaatgagctgcaatcagctcgtaacttggatagagagtccactcaagaagcattgcttcttgaaggcgtccgatttgcttacagaacgcaccaggtaatcttaatagttactagcatttactcggatcgaacacggtgcaatcgatgcttgatatgttgatcttttacatgtttattcagtttgcgggagggctcgatccagagactttgtgtgcattagaagagattaagcaacgtgttccgagtcatctccggctggcacggggaaatatggctggaactctgtcgtagaaaagtaatcaaagaaatgtgaggcatatgggctttggttttggctacaaaattcgttatttgtgttaatagtgtttggtgagtcaggttgtgtcccacgtaataataatgttataatgtatctaaaatgttcctccagtgaattactcaattaaattttgcgctacatgacataaatcataaacattctagaagttactaggtcgacaccaaagcaatatagttacaaaaaaagaaagaggatttaaaaacaaaaagtatctgtttacaacaaactaaaaaaaaagaaaaggtgtttatagtagacagtataattataattttgtttatttgtttaagaactttgtaggaccgtcctgatttgcaataaatcaaagatttttataaaatgattaggaaagacggttttcgaaaacgagtgaaggcgagatttgatctctttccgtaatccaaactagctcctgcagtgtggcggttttatgagcagcggatcgcaggatacaatcactataagaccggtatcgcaacactcgatagcggaatctgcgaacttgaaataaacgatatactcttgacttactttgagaagaaagggagagaaggagagaatttcgtttagcttgtagcgaaaaacgagtgaagagaatgagaggaagaggtgttccttttataggagagaggtgagatatgcgatccgcaaatcgagggagaggtgagatatgcgatccgcaaatcaaggcggagatcgcgtgattcagagtgatgcgcaagtccaagacgttggcgtgattagcgtagccattatcacaaccacttaaattcgaattaattcgaataaggaatattcggatatgcatttaatattcaaatatactttaattatgcaaacgatatgggctttcatttctgggccaaaaactatgttgcaaatattacaaataatgcaacaaaatctcataagtatttttcccaaaaataatttggccaagcccggcccggcccggcacggcggcagcggcgtgcgtgtgttgttgcataaaggacttgcatctcctacaccatagtgtctctttccaatagctagtgaacaatgttaaatgggtaacactatatatattagaggagaaattttcaaacttcatatatggggcaaatttcaatatttgttattgtaagctttcaagctacccactttagtcctcaattactcattcataataacttcaatttttacatataactacactatgttataatgctcattacaaggaatccaaagactccataatccggtcattccagtgacggacattaccgaaaaagtcgccggaaagttggccgagccacatatgtaaaattgagttccaacagacttaactattgtatatccttcatcattgttttgccatgagaaatacaaacaaagtttatccacataaattcaagatataagataacataaagttaaaagatggaccatgctttgttaaaggtttaaaatgaataggctaaacaattcataaacattggttaatataacttggttcatgacttagttcgaaaattaaattattttaaagttaaaaaatcttcatgctattcagattttaacgaacaaacttacacaagaaaaaacttctacgtacctaattattgtgatctaatggtaacaattattttcaaaaaaagaaaagacatattaactatttttactatgatttctaattatgcttgtctagcacaaataattttaacagaagtaatctaaggtttttgaaatataataatggatggaaaatatttacatatatcacaatataaaaacaaattcaacatttgtagaaagttaaacatatacaaacacatcaaacaaaaagattaactatacggtatattgttttgtaaaaataagatattaaattatttgttagtgtctgcatatataaaataacaaaataaaaataattaaacacgagcaaaagtaaaatgcaaaatccgaaaaaccttttaaattcttaccataaacatatatattaaaacaaaattaatttacaaaaactacttgcagtgtaaactacttgttaaattcaactcttacatgttaaattcagctcatttatattgttttctaaaaaccacttaatttcatccaacttttttttaaaaaaaaatatgtaattttttttctttctgaaatttgttatcattatcaaaacaattgtgtatatcatttgttttaattaaatttcttgtattttttaatgattttttttgctaaaaatgaaaattgaaaaaaaactgatgtggcatgctga

SEQ ID NO: 472 - DNA, 584 bp, Arabidopsis thaliana landsberg
aaacggtacttatataaaaagatataatatctttttagaatatattagcatctagtttttacacataaaaaaaaatatgtcattttgcaaatcaaaacttataaagaggacattttccaaatttactcttgataacttttctaatattttttagtttataaatatctttttcatttttctttcctttttttcctcaaagtttatagatatttttcttctttgattgttttcataattaatccgtaatctacttagatagtatgtacatattcatttggaattaatcctttttttttttcttttttttgaacattatatggagttaatacaaaacacctctataatataaaaattgaaacatggaatcaataatcacatataacttctggttatcaatcgatcaaatcaacattggtcgcatcgatgacgtgatcatcatctcaatctcgctctatcaagaattttaaagagggtaaccgcagagggaggaaactcaatctcttcgcgtttaataactacgaaagtcttgaagttgttctgtctgatatgtttgatacaacagttatacactacaagaaaacatg

SEQ ID NO: 473 - DNA, 719 bp, Arabidopsis thaliana landsberg
tgaataatcttggcttcacacaaaacattcgatgtttttgttaactttttgatacagaggcgactgtcagatacagtgtcagaccaaaaatacataatgttacgtgctctcaagtctaaaccatatactcacttttcctgaatggtatgatgatcctgcatctcatagtcagtcatgagccagactcactcggcaacaacgattaaccatactaccaatctgcctcggtcatctcattggcctaatgaccaagctaactcgtatgctaagttggggttggtccaagcggtccaaaatcttgaaatggccaaacctacacattattatacataccgaagattagccaaatagatttaccaaaacaaatgcaaataacacatttgaagttccgaaatcagataatctaactatatttgtaagttaatgacaaaaagtttataccctccaaagcactctgccttgaataagaccgtaaggtacagtaccaaagtttcttgagtctcgtgagttatgagtatagtcaccttgaacaaagacatgtcctttaggaacctaaaaccaaaaaaacatcgaaagatcaattcgccattaatccaacaaactaaacaatccaaaggaaattgtaatatacaccaataacactaacgttgctaaaagataaaaaattttccatgaattgcaatcagctaaatcgagctcaatactaattaacaacttgt

SEQ ID NO: 474 - DNA, 1305 bp, Arabidopsis thaliana landsberg
tttgttttatctagacatctctgcaaatcacattgaaggccaagtaccacaatggttgtggagtctaccggagttgcagtatgttaacatttctcaagtaccggagtggttgtggagactgccaacgttgtcgtttgtaaacattgctcagaattctttcagtggagaactacctatgttaccaaactctatctatagctttatagcctctgataatcagttttcgggagagattcctagaacagtatgcgaattggttagtcttaatacacttgttttatctaacaacaaattcagcggttctattccccggtgttttgagaatttcaaaactatttcaatcttgcatcttcggaataacagcctctcgggtgtttttccaaaggaaattatcagtgaaaccttgacatcacttgatgttggtcacaattggctatcaggacaacttcccaagcatctgatcaaatgcactgacctcgagtttctgaacgtggaagataacagaatcaatgacaaatttccattttggttgagatcgttgtccaatctacagattcttgtccttcgttctaacgagttctatgggccaatattttctcttgaagattatttgagtttccccaagttgcgaatctttgatatttcggaaaatcgcttcactggagtcttgccatcagattactttgcgggttggagtgcaatgtcatcagtcgtagacatttttgatactacgcctcaggttcacattttaggagttttccagggatactatcataactctgtggttctgacgaacaaaggattaaatatggagctggttgggagtggtttcacaatctacaaaaccattgatgtctccggaaacagactcgaaggagatattccagaatcgattggtatactcaaggaactgattgtgctcaacatgtcaaacaacgctttcacaggccatattccaccatctctatcaaacttgagcaatctccaatcattggatctatctcaaaacagattatccggcagtatcccgccagagctcgggaaacttacgtttctggagtggatgaacttctcgtacaacaggcttgaaggtccaataccacaagccactcagattcaaagccagaatagttcttctttcgcagagaatcccgggctttgcggtgctcctttcctaaacaaatgtggtggagaagaagaagaagaagaagcaacaaagcaagaagaagatgaagatgaagaaaaggaagagaaagatcaagtatttagctggatagcagctgcaataggatatgtacccgggtg

SEQ ID NO: 475 - DNA, 500 bp, Arabidopsis thaliana landsberg
  unsure (1)..(500): unsure at all n locations
tcaggattttattccctgttgtttttcaggttctaactttgtgctgttgttgatggtgttaagtgccggtggctccgcttcttataagtctaagtaacccttctatacttcttattgaggatgatcccttgagctagcatatatttcaaacttatacttttgtaatcactccgataaactaatgtaaaatttttgtaacctgtaaaatttggtagtaagatttccgctgcaacaatatctatgtgtgtgatttgtgttacttaatcccgcggttctggttgtaagtggtttatccgatgtctttggggcaatcggacggatcctgttaagttatttggtgcatatgcatagccgtccgaggtctttgagacaaggacaggtgcatgtgggcccaataacttgggaggttctgccacagttgtgccccaagtcgcgaatgtntccatgtcgatctagggggcacgacgaagcaacctactcggtatgccgaagatgacgat

SEQ ID NO: 476 - DNA, 3752 bp, Arabidopsis thaliana landsberg
gaaaccaaatttgctgaccttggagcagattctctcgacacggtatccattcactcaagtggcaattaacacaacttcttaattttcttgatactgatcaactgagtgtttttcttcaggttgagatagtaatgggtttagaggaagagtttaacatccaaatggccgaagagaaagcacagaagattgccacagttgagcaagctgctgaactcattgaagagctcatcaacgagaagaagtaattttagttttcttttatagaatgcccttaaataaactaaaaaagaaaacgacaaaaaaaaacagggcgttgagtttgttttcattatgtttgatttctctgtcattttctttaatgtgtctagcgagtctgcctttgtcccaatggtttagtatctgcatgtatccacggatctctatttgtcgacgaatgttatttacaataagtgtttcttattttctttccaagatcgaaatgccaaatgtatacgagagacacaagtatgttacatcataatatacaaggtgtctccatagttttggtattagcacacaagtcaagagtatgccctacaaggaaaagattttttagatatcctattcaccttgtatctacagactgacaagacactaggactcctgttattcccaatcagcgtcgaagaatccagcatctttcatttctgaatagtagacattctccaaattcagatcttcctcctgaagcaaacacaagtgaattttagcaccaaatcatgtggtgatgaagatggtactatggtaatggtgatggtactatggtaatagtgatggcgatggtgatggtactatagttataaagaaggtgatggtgatgctgctatagtgatgaaggtggtgatttattgcatgtttgtgggtacatagatattatgtatagagactagagagagagagagagggagagacaaatgttaatttgagggatttacctggaaaaagtctgcaagaaaagtaacatacaaaagaggaacatagaaggcgtggtaacaaacacttgtgatcccatacaacctgcaagaattttcaatttgtatttcctaatgttagaagcaagaatctgacttagacgatgttactcttttgattgtaaggcttttatctaaagggcttaccataatccaaaatgagcaccgtttgccgtaagagcacatgcaaatagggagagcccatttaaggcgagcatgacagttatatacttgtagaatgcaggtcttgctgtcaaaccggaaaataaaaacatatgggatgagtaatagaagccagtgaacagctattggcttatgcaaccataaggaggatatgagtggtcgatgtattcacctggtaatctctctctccatttggagttgtacatgaagaatatcatcccataaatgccagttagtaagagcttgtggatgacccataagccccatttgaacttatgtatatgttcattgttgtcgataaacaatggtactccaaagccaaacagataaattgcctgaaaggaagaatgaaaaccgtgaagaaattaaactgactgtagttgagtaaccagacaatacaagtttgcatatatcaactgtagtggacacatgatctaatgcagaactaagatcatgtcaatatacctcaaggaagtatatctatctatatatcagaaagtgtatctaacagttatgaacacaaatctaccttgagaagcaaatcgagaccaatgacaagccccgagatgaggaaagttcgtgttaatgcttcagcaccgcttgcatagtttccttggaagagaaaggctaccaagcttacttccagaaacaacattccagatgttgtgaacaaagttaacaaattccaaataacttctttccccggagtgcattcccatgcctaaactcatgaaaagtaaattcaaaacgaaatctggagtaagactaaatcaggtaaaacatttcctgttaagcagcatctaaccaagaaatcaacactaatagcttacacaaaatacaaaagctttctaatcaccagtgtagaataaaaacaatgttgataagatcgcaaagtttctacatttacagagcctaaaacactctaaaaagcattcttcttcaatctaagttctgatctctttacacgcaacataggtatgagttacttgtgaaatgaatcgaagtaaagaagagaactttaacaaacctgaaggcaacaccaagcaagattgagcaagctaacaagccaaagaaaaccataataggcaatcataatgtaagatctccgattagacaacttggacaagctcttcttcgcctcgtacgctaagtaagcgacgaatagaatagatgctaaaaccaaaaccgtgttatgaagaaacccatgacacttcccgacccatccgccgataaaccctccggtggccgtcgaatcagggcttagccgagaaatcacgaacggtgactccgcaatctcgctgagcactcgcatttcatcaaattgtacgaatcagaaaccaagtagacttagcgcaaggagtggaaagcaatccctagttccagaaaaggagctcaatttcgagatttgatgtttttgcgatacagaattcgtatgaatcgtatatttcttcttctctctggcgaccaaatccatacacttgacgcaaacatgagtaattacacaaaagttaaagggtattataggtaattatcatcgcttctcccacttccactctaaaacaaaaaaaaaaaactatcatttttctcatcctttttatttttaactgattttacatgtgatgtttaaagagttaattattggacatgtgatgtttaaagaatttaaatattattcttttcaattctgtatcttaaatttgaaagacttattacaagctgatctaatttcaaaatcaatcttatgaaatgtaaatttttgaagtgctatttaataatcaataatgtgttattctttttaattaaattagaaaacgtgggagacaattgtctctcttttgcccaccaaaaagataaaattaaaaaagtcctattcaataatcatgatttatttatttatatttatatctcatattgtacaagtaaaattgatttttaaccataaatgatcagcattcagcacaccaaaagtaatttccattcacttgaaataattgtataaatcgggtatttgaaggaaaattgaaccaagacgatccggtttaaatgtcagagattaaggttatcatgactctttaaaaaatgaagtcacagatcagaaataatagaaaactattaaggacttaaatgtaaatactctacaagttaatagatcggagcttcgttgcataagccccaaaccggtggagagaagacggaaagagtctgagagagagagaagaaatggggagagaagtggcggagagctgtgtagacactatgttaatggagatggtggcgatgtacagtggccgattctatgctaacaagccggaactcgccgctcggaggatcgaggccattggttatcaggtcggccaccagctctccgagaggtttgttttacacttgatcatcgtcttctttcgatctggttgatcattgtatctctaggttgctagtattagttgtagatctgaagatgatggcgaatgtatatcgttagcaatgattctctatgatattggatttatcgtttctcgagtgtaattggctgagaatgtgatagatgggaagagatat

SEQ ID NO: 477 - DNA, 3804 bp, Arabidopsis thaliana landsberg
  unsure (1)..(3804): unsure at all n locations
ttcattcaaataaagggaataacaaaataatggtgcttcatttttttttacaatctaaagtcactgaagattctaggggtttgattagtttttacacttatcaacagccaatttatatctcctctttccagataattaggaaaagcaaacgaagctnnnnnnnnnnnnnnnnnnnnnnnnnntgcccccgatcataataatattgtagtcctatatggaattagaatgtgagtgttagttttgattttttgagacattaatgcaatgaatgtagaaacgctttttgaattaaaccacagaaaacaagacaataatgcaatgaatgtaggaacgctttttgaattaaaccacaaaaaacacttgttaactttttttcctcttaaaattttaaacgtgtataacaaaacgtggttatagataaaaaaaaatgtacctagcaacttttcttagaaccttatagagttatgaacatttagagaagtgcattgcgtgagtttcttttaaaagcttctgttaacctgttggagttggagatttggtttaaaggtaaaccgggtttggtttagctacaaagttgcgtgaagaggaagttgccgttaaatcagcaatgtgtatcagattcattccataaaatctgcatcgttaatattgtttctatattttctgtaaatatacgatattgtgatagcatagagatcgtgttctctaaagactatatatgtacatgtaatcgttcataataaagatcagagaaactctgtttatttcatggtatcagagcttgagaaatcaattttgattttcttttgaaacgaagagtgacaatggctggagctcctgcgaacgtgaacacgaacccgatcccgaacccgacagtggaggtgagaagaacaatttcaccctacgatctgacctccgctaataatccttgtgcagtaatctcacatccattgttgactggaagtaaatatgatgaatgggcttgtagcatgaagacggcgatgtgttctcgcaagaaatttggattcctcgacgggacaatctcaaaacccgtagaaggatctctagatttggaggattcgtggacaattcaagcacttatcttggattaagatgagtatcgatccggtggtgaaaaagaatgtttctcatcgtgatgtggcgaaggatctctgggatcatttgaagaaaaggttctctgtgatgaatgggccaaagcttcaacaactgaaatctgagttagcgtgttgtaagcaaagagggcttacaattgagacatattatgggaagctaacgaagatttgggatagtatggctagctttcaaaccggtgcgcatctgcaagtgtggtggttgtgtgtgcgatcttggtgctcttcaagagaaagatgctttgtttttgtctggtcttgatgatgctttgtttcgaacggtcagatcgagtcttgtgtcacgtattcctgtgcaacctttagaagaggtatacaacatagtgcgacaagaggaggatttgctcaggaatggggcaaatgttttggatgatcaacatgaagtcaatgcatttgcagctcaaatgagaccgaagctttatcaaggaagaggtgatgaaaaagataagagtatggtgtgtaaacattgtaatcgcagtggtcatgcatccgaaagctgttatgccgtcattggctatccggagtggtggggagataggccacggagcagatcattgcaaactcgaggtcgtggaggaaccaattcgagcggagggcgtggacgtggtgcagctgcctatgccaatcgtgtgacggttccaaaccacgacacatatgagcaagctaactatgctctcactgacgaagaccgtgatggtgtgaatggtctcaccgacagtcagtggagaaccatcaaaagcattctcaactccgggaaagatgctgcaactgaaaagctaaccggtaagtttacttcaccctcttggataatggacactggagcctctcttcatttgacgggaaaatttgatatattgatgaatgttagagatatggacccaattttgatagttctagctgatggtagggaacgaatttcggttaaagaaggaacagttcgacttgggtcaaatttggttatgatatctgtattttatgttgaagaatttcagtccgatttaatctcaattggacaattgatggatgagaatcgatgtgttttgcaaatgtctgatcgcttccttgtcgtgcaggaccgcacttcgaggatggtgatgggagctggtaggcgtgttgggggaacgtttcactttcgcagtacggagatcgcagcatctgtcacggttaaagaggagaagaattatgagctgtggcataatcggatgggtcacccagctgcgagagttgttagtttgatacccgagagttctatttctgtttcttctacacatttgaataaggcatgtgatgtttgtcatcgtgctaagcaaacaagaaattcttttcctttgagtatcaataaaactttgcgaatttttgagttaattcactgtgatttgtgggggccttatcgcacaccgtcacataccagtgctcgttattttctaactatagttgatgattactcaagaggggtttggttgtacttgttgaacgataagagtgaggcgccatgtcacttgaagaatttctttgcaatgacagacagacagttcaatgtcaagataaagacggtgagaagcgacaacggaacagaatttctgtgtttgactaaatttttccaggaacaaggagttattcatgagcgatcttgtgtggctactccagagtgaaatggcagagttgagagaaaacatagacatttacttaatgttgcaagggcgttgaggtttcaagccaatctaccaattcagttttggggagagtgtgtgttgactgcagcatatcttattaatcgtactccaagctcggtgttaaataacagcacaccatatgaacgtttgcataagaaacagcctcgatttgatcatttgcgtgtttttggaagcttgtgctatgcacactatcgtaatcgtggtggtgataaatttgcagaaaggagtcgacgttgtgtctttgttgggtaccctcatggtcaaaaaggatggagattgtttaatcttgaacaaaatgaattttttgtgtcgagagacgtggttttctcagaactagaatttctatttcgaatttctcacgaacagaacgtaattgaagaagaagaagctttatgggctccaatagctgatgggcttattgaagaagaagttcacttgggccaaaacgcaggcccaacacctccaatttgtgtttcttctccgattagcccttctgcaactagttcacgatctgaacactcgacgtcttctccgttagacactgaagttgttccgacgcctgcaacttcaacgatattggcttcgtcaccctcctcgccgacgaacctgcaatttttgcccctgtctcgagctaagccaacgaccgctcaagcggtcgcaccaccggcggtccctcctccacgacgtcaaagtacaagaaacaaagcaccgcgctgtgactcgttaaggattttgttgtcaacacaacagtctgtcaagagtcgccatctaaacttaattcgattctctatccattgcaaaaacgggatgatactcgacgtttctctgcctctcatactgcttatgttgctgcaattacatctgcgattgaaccacgatcgtataaacaagcaatgatggataaaagatggatttaagcaatgggtttgagattgatgctc

SEQ ID NO: 478 - DNA, 1619 bp, Arabidopsis thaliana landsberg
aggatccctgaacatgacagaccagatgctcaacatcgattcctattgacatacaataatcattaaaggcttgtgaaaaaaattcaccaacgttatcaagcctaactttctttattgcataatcagggaattgtgcttgcaacctgattatttgggaaatgaattttgcaaaagccgtgtttcgtgttgtcaacatacacacatgtgaccatctagtagatgcgtcaattaataccataaaatatcgaaacggcccgcacggtgggtgaattggcccacatatatcaccatgacttctcgacaagaattcagatctttcattcctaattttgtttggcgatggccttattatgagttttccttgagaacatgctttacatgaaaactcaccagatttatatattttctggtttttcaatggatggccattagaattttgcacaatttttcgcatcatgactgaaccaggatgtccaagtctttcatgccaaatcttaaatgtactagtaaacttttagtttactgtaatatatgatgtgaacatatttatttttgtgctatataatccagaggataacattggcaattcttccaaaatatgtttcccctcggatgtaatgcaaatgtattcaacatcattcttattcatagtctctatatgatatccattacttcagatatttttgaaacttatcaagtttctctgagacttagggggatataatacattatttacttttaaatgagttctctttagcattgtaaaattggcttcaccaaagccaataataatttttgcatggcgagatatagtactcacgcttcaagcaaagtcttttattttgagaaaggagaaatatttttgatctttaagtatcatgtgcatcgtaacactttataccagacatatatctctatcctcaaaataacacaaaacttactaaaaaacattattatatattacaatgaaaccattattcaaaaatcttttaaaaccagaaaatatgtttaaatcaaagtacatataatactactacaactatatcatgttatatcgatcttatttgcatgattttccgtttttgtgatcaacgagaaaatcagcgatatcaagatgggtttcatcagttaagcatggaaggaaagtccagcttcattagagatgagattggtctcaacatccctttcttttgcattttgagatggttatacagatcggctaaatattttgggatatgacatgtctggtaccaatgtcctttcatgtcacatctgtaacaagtactttcatcttatttctttgaaacacgactaaaatcattgacttgaagatttttgttggttttcttggcattgaattttttgggagggaaaccccttccttttccacgtccacaacctcctctacgaccgtgaccacttcttgaccgcgtccgcatcctcgtccttgtccttgctaattattatagctggatgaagcaaccagagctgtgccaatgtgagaggaaaagaaacattggcctagggcctctgattttggaaaaaaattaaggggcataaatttattaatgctatatagtttatatgtagttaaattattatataaatgttagtgttat

SEQ ID NO: 479 - DNA, 899 bp, Arabidopsis thaliana landsberg
ggactgtacatatttttaccactgaaacgctaacaaagctattttctggttctaagcaattttttgttggtgttcgcctcttttgggagaaaattggtataagtgttgtctaaacactcctaatctatctttatatcttatgattagtcaatttcattggattgtgacacattttgaccatagaaacactaacaaagatatttactacttctaagcaatgttatgttggttttagcctcttttgaaaaaaaatgggtataagtgttgtctaaaatctcctaattcatctttaactcttataattagtcaatgcattggattgtgacacattttgaccatagaaacactaataaagctatttactgcttctaagcaattgtttgttggttttagcctctttttggacaaaatgggtataagtgttgtctaaacactcctaatatatcttcatatcttatgattagtcaaatgcattggattgtgatatattttgaccatagaaacactaacaaagatatttactccttctaagcaatgttttgttggttttagcctcttttgaaagaaaatgggtataactgttgtctaaacactcctaatccatctttaactcgtatatttagtaaaaagtattgaattgtgacacattttgactatagaaacactaacaaagctattaactgcttctaagcaattttttgttggttttaacctcttttggaagaaaatgggtataagtgttgtctaaacactcataacccatctctaactaatatacttagtcataatccatcttttactcttataattactcaaatacattggattgtaacatatttttaccactgaaacgctaacaaagctattttctggttctaagcaaatttttgttggtgttc

SEQ ID NO: 480 - DNA, 2492 bp, Arabidopsis thaliana landsberg
cgctcttttctgaccttttagatagtagagcacccttttacaatcttcagaatgccatcctgagacttgaaccagcatcctctatcttctagtgtaccaagagaaatgagattcctagtcatattgggcatgtatctcacatcagtaagaatcacttgacatccatcagagtttctaatcttgatactgccaattcccttaaccggagagtaagtatcgtttcccatcttgacataacctgaactccactctttaaaatctttaaaccggtctttccttggagtcatgtggaacgagcatcttgtatcaagaacccactcatttgcaatgctatctgtcaccaccaacgtttcatccgtagccattagaaccatagcaggattaaaaactttagtggacttagccaaactagactctctattatttgaaccctgctgttttgacttgttcctttctatccacttatagcattgcttcttgaagtgtccttctttgccacatatccaacatactctcttaccatctgctgacttagaccttgacctattcttgcctttattcccttggttattgttcttaccatatggtcttcctctagcaaaatgaccttctgcaactggtctattgttctgagacaattctctctctttatctcttgctgcaaccatcacatcatcgagtctaagcttttctctgctattactgtacttcattgtttcaaccaaaccatcatatcttgcaggcaaagaactcaacaacaatatcgcttgaacctcatcagttacatcaatctgaagatggttaagatctgcaacgatcttgagaaaatcatcaatattctcatcgatcttcttattttcttgcatcttgaatgtatagaaactcaattgagtatatactctatgcggtaaagatcgaatcatgaatagtcgatccaacgtttcccaagcttctgctgcggttttacatagctcaatctttctcaagaccttatctgcaacattcagaaaaatcacattcttcgccttgtcacagcgctcgagccttgctacttcatccgcatctcgcttcttacgtttctctggatcttcttcttcttcctcggttagaggtttcggagtggtcccaagcacaacgtctttcaaaccaatgacgctgagatgagccatgatccttgtcttccagagtgagaaatcaccggatccatcaaagatcgcgattggattaccagccatactccgattcgaactggctcaagaaccttgagctctgataccaatttgtaaggttttgatcaacacttagctcacaaaactctcgaatcaaacgacttaaactttgagaatgaatcgaaactttgaagagaacttaaagaaacaaagacacacacgatttaacgagttcgcgttcctcaaccggaatcgctacgtctcgccggagaatctctccggaaatccactagaacctttctttacaatgtatctttacaagctttctctctctagttctctctagaacttgattacaattctctctctttctctatctccgatctaacagaattacagagaagaagaaaaagatatagttacagagctcatgcgaaaaagaccaaaacgccctcaagcttgttatgacctcagctcgcctcacgtgttatgactttagtcagctcgcctcacgtgttatgaccttagtcagctcgcctcacgtgttatgaccttagtcagctcgcctcacgtgttatgaccttagtcagctcgcctcacatgttatgactttagtcagctcgcctcacgtgttatgacttagacccgaagactaaaatctgagtcacttcttacagggataaatgtatgtaaaattcgaggacaactagtatatttttttaactgttttttatctccggattttaattcattgtcccttgattttaatgtttccaaattctaactatggtcttgtcatattgttgatgtttaattgtctatatttcgtttgatttggtcctcaaataggatttattaaaatcatttactggttttttcattcggtctttttgttttggtccagatatttgttttgtctccggatgttgtactttaactgacataaacctgttacaacagctgagggcaaaactgttttttatatatggcatgaatgaaaaaaatttatgagatgtagaaataaaaagtttttggaggaaagtgatagagttgaccaaaatcccttaaagacatgtacatggagtattgtttagtttctctgcgtatttcttatctgaactgaatgatacattctgatgtttaaggaaattattaacaatatgatctgtatttttaatttatccactaaattttgttaaacagctaagtcgaattccaatagaaaaaagagtcgtataagtggatcgtggatcacttcactcgagtaaaagcattaatcacgtaaacacctatagttaacggaggaaaacagcttttcatgtt

SEQ ID NO: 481 - DNA, 812 bp, Arabidopsis thaliana landsberg
  unsure (1)..(812): unsure at all n locations
ctgcaaaaaaaaaatttagttaaaccctagtattacgcggtattaccaattatggtacagtatatccggtatcacctatatttaccttatctttcatctcattcataaaagcttcgaacgttgcatgttttttctccatatctgcaagcgccaaaaaagcttcattcttcttgtcattgatgctatcaagcttctccattacatcaactaactgcgggtgtcccgttctaacagctgcagaaagttcctcttctgttggggcttccattcgggcctgcacatcctcgttgtacatctgttgtacccagtacattgttaatttgctcaagggtaaaccctttcatctcggtccttttgaaattcaccctgcacatccttggacagccggcatctacaccctctttttcttctatgaatcttttcctaagtgagggaatgacctcaaatgctaaaaactagacaaaatacatgcaaatttaattgttagcttcaattagtacgaaaatgtaacaatgataaaacattatatttacctcaagcggcatacagaaatcgggaacaggacatggtgactgagtgttcgacacgacaccattaaaatgttttaatgtgtgtgagatcgattttaacatgaactcaaaggaatgtctcccccaaggaaacgtcttacaaaacgtacgatcacttgcaaccctgagatagaaatcatcaattggactagccctttccccgattttaggaagcacgacattgatgcttgtttaaaaatagagaaccgcatgtgcaacctattnctagatctagccggttca

SEQ ID NO: 482 - DNA, 1761 bp, Arabidopsis thaliana landsberg
gaatccgatagccaaattaatcatctcctccgttgcatctttgtttgaatccctagccgaagatcccgtcgccaccaccggaataatcccacggtaaatcaaaccacgtctcgccgcatgagccaccgagtctgagcacgacatctccatatcattcccttgagcaatctctggcacaatcactgacaaaatcggaacgctcggcctgtatttagccacaagctccgccgtgtaaccgcctttggtgagaacgacgatcgccgacgcaaaaacactctgtgccgtcgaaacaactgaagcagctaagctctcgatcggagataacggtaacgaaaccattcctagggttttcttgtggagaatgtcgtaatcgatgaaatcctctgcttctttacagatccttgacattgttagcacggcagcctcagggtgagctccagcagcggtttctccactaagcataacgcagtctgtcccgtcaagaacagcgtttgcaacgtcagtggcttcagctctagtcggacgaggagatactgtcatggattcaagcatctgtgtggctgtgacaactggtttcccaagagcattagccatcttgatcattgttttctgagcaaggaacatcttttcgatcggaatctccattccaagatctcctctagccaccatgaaagcatcagaattctccagaatcttttcacaattcatgaccccttcttgattctccacctttgacatgagcatgatgttctttgagtgttctccaagtaacttcctaacttcagttaggtcagatcctttacgaacaaaagaaagagcgatgatgtcgattttgttttgaactccccattggatgatatcttctttatctttctcagtaagtgttgggagatcaactacaattccaggaagattaacgttttttctttctcctagaattgcagagttctcgcaacggcaacgaacaagaccgaaagacttgtcacaggacaagacagttaaagagattgtgccgtctgaacagagaatcacatcaccaggtttgacgtcttctgcaagtttcttgtagctcatggagataacgtttgaatctccttctatcatgtaatcaattgagatggtgatctcttgaccttggtttagctgtatcggtttgccttctttgagaaacccggttcgtatctcaggaccctttgtgtcgagcatgacggcggagagaataccagtgttgtccatggcggttcggagattatcgagagtttcttgatggtaagagtgagaaccatgagagaaattgaaccgggctacattcataccagccttgagaagcttctcaatcatctccaccgatcttgaaaccggtccaagagtacaaattatcttcgtctttgaacgaagagctccattggttgcttgtccaccaagtaacatctccattgtggaaactttcgaaagatcgcaaagaaaaattaagagattgaactttgaaagacagaggaaattaagagttgcttgatgaaaattatgatgagcagggaaacgtatatatagaaggagcgatttgagaatttccattttacgttgtgttgtttacattatcgaatttcccattttcatgttctaatttctatttgccaaaaaaaaaattgttcgaatttccatttaactttttttcgttcgacggtttagtttccttttctatggttctggcaataatgtttttttctatttctaatttagcaaatattttgaggagaatgt

SEQ ID NO: 483 - DNA, 1296 bp, Arabidopsis thaliana landsberg
tttatattcatgtttgagtcttatgtgtgaaagtttgagagattcttgccagggaaagccatgaagaagcagcgatgatcatcgatcatgtttttaagcgtcaagacttcgaagagtataaaacatcgcgtgcgctttacgacatctgcgtttcttgtaacccaggttgcttaaccctaaagcttcttaaagtctatcaatcttcttccaatggcattctcagactccgatcaatctctcaactctctgagaccctcacctatctgaaaaatcaaatcgtctcgactctctctatgaaatcaaaccccttttgattttatgccttacaatgcaagaaaccaaagaatctgacatcaagatcctcaggaaaatcgtgtcttttgtaacttacaatgtcgtggagttgcataaagacaaatgggacgagctcggtgattgtatattatccctagcgagtagcaaagaacctgtcaaggcttttcacgtcttcatcgatctgccaccagtctacaagagtttcatcgacaagtttttggacaaaagctagtaatgtctttctttatccttatagagtcgaagattggagcttggctttacaaacttttgttaaaatgtggattcagcttgagaaaacagggatgaaagtagagttactaatggcgttgatggagattcggatttcgagaggttcttctcaggagacatgaatctgtatcattacactaaagatcaatgccattttgtgttggcttccatgaacgagatcgaaggagtagtcggaacagagaccaaggagattgtgaggaatgccaaaatgttgattacgaaccacatgatgatcttaagaatggtagagaagagtttgaacgagctacgagattatattgcatcgagtaaaacagagtttcatagagcggtttatatcttccagtgcttaagaatggcgcttattgatgacgattttgtgattcctgtgatggagaatcttttcctagagataaccacaaggctagacccaccaagagataacagtagctgggtcttggcgtttatgggtggcttttgtttagcaattcacaattgatagagaagtcaagtaaagctgaatccgttgcacataagatgatagattctataagagagcttgtggaaagagaaatggaagttggtcttgtgaggagaggtttcagagatgtggaaacaactggaatgatacagtactagccaatacaaattcattgctttggagactgtatgcaatcaaaggcaatgtaattgttgagagaggagtgaaac

SEQ ID NO: 484 - DNA, 1152 bp, Arabidopsis thaliana landsberg
tattgttcagagtaatgactaggaaactcacactaacacatttcatagggctacaggaaggagcactcaatagatgagacattcagacttcatattgcactgaagtaaaatccacataggaaaatacgattgacccatcttgttacatgtaacaagatggagtcaagtatatcaacacacaagtgtgcaaagttaacacgaaacgaggaacataaaatcgtgctataaaattgatattacagatttaatgaacagaagacagcccttcaaaatatgacatctcagagtatcgatacatgaattttgctttaacatcctccaggaattacaataaaggaatctaagggaaatctgataaagcaatagaaaagaacctcggaaactttcattctaatcagaatttccatacatacttgtatctgctgtctatacacttataaaatccactggaaaaagaacaatatatgacagttgattccacatttcaggaaagtatatccaagacaggtagatcagacttgaccatagaaatcaaaaagaaaaatttgaattctgattgatactaacaaaattgactgcgggtaccagtagatatcaaatttcttacctccatcaaatgttcatcatctgatatattaagagaaagacgaagatcagttaatgatgcttcttgctcccaacttaggggaccagaagaaaataattcccccagagtactgcggtaagaatatagttccgacctacaagaatttcttgctccatcaccaactgatgaatgtttccaccttggttcttcccccaggccacaagaagattcagcatcgctgctacatgagtctgcctgttgagtagagccatctagcatacaaggtggcatgttactctcatcataactagtagcactacaactaccaactgagcatacatcgctatcagaacaatcatcagcacgaacactctcactaaacccttttgatcttaccctgacaatttgacagtaaccagttttgtgattgtttaaggaagcttgcacgtgagatttaccacccctgttttctggtcggcaagaaatggcatctaccttttgctgctgtccttctttttccaatgaacgcatcttcttagggtttctgtacatgattcagcacattc

SEQ ID NO: 485 - DNA, 3793 bp, Arabidopsis thaliana landsberg
gctgatcaagcaattctaatggaccaagtgtgaatcaagcggttcaaaataaatgttaaatagtgaaagcggatcacacgatacatataaaatatttataatgtaaaaaaggaattaattttaataaaatactataaatcaaattcattatatcaaagtaaatttcgttataagtttattatttcttgaacataaaaaaattgcaaatagcaaaaaaaaaaactaaaagtgttccacatacaaaataaagtgaaacctgcaattaaaatttggaatttacattatataattttttatcactatttaaattattatttatactcttattgtaatatttgtatgaataaataaatataacgaagaagaaacgcacctagaaatcctaattgcacctaatatgtagtggtcaaggttcatccacttttgattcacaaaaaataaaagcatgcggttcattgaatttttttatcatggttaatttggtgaattcattacagttactaaaaatgatgaacaaaagacataggtgcggacaaaactgatccgttgatgaaccgtctttattccattccccattcatagcctttattatccacatgaccaaccaaaaatacccaaaacccaaaactccgagttacgaaaaagaaaacaaagaaatcctgaagagatctaggtaagggcgacgactagtttccaaatgtaaccaaatagattttgttttgtcatacccatgaccaaaaataccagatttgagttcaaattaaagattctacaaagcctattatcgctgaaatcaaggatttttaaaatctgaaaagaaaatagagaaattggaaaatgaatttacatcacaaaagcagataaaatcggtaagaagtagagaacacagagtctgaggtagttacttacggcttagggtttagacaagattcctttgagctacttcttacttcttatccttttttttctttttttttttttgctttttccaaactctttgtcaatctgtatcttttactcgtatattatacgttattgtttttgggatacacacctccaaattatttgtattaaaaaattattgaagacaagtgtgactgttgacacagtttttgtggttgccataatttcacgtgttattttgcatacacttaatttttttttatttttttttaacttgatcgttttgaagcaaaatatatatatatatatatatatataggggaatagcagaatctatacacagaagactcaataattaaataagactttttgtcactatttacaaaatacaaaaaacacataaaagttataatattatcctcatctctattttttctttattacttaatatttcttttatctctcttctctttcatctactctttcatctcttttttctgtctttgtttttcttcatacataaaacaaaatttgttatttttcattgctaattattttcattattatcacattaacgtagttattatcggtagttattatgtattaattatgaaaaattctctctaatacccttttcaactctacctttttttagccactttcatttctaccatctttaaatttttaatgaccattttacccctatttggaaattgttttatgttaacaaattttgggggaaggggtttctcgccaaaaatattcggaaaaaaaattccagccaaaatggttcacaagagttttaaaatggtttataagggttttaaaaactcttataaatttttttaaaacctttcgtaagggttcacaagagttttaaaatggttcaaaaagagttacgaatgttttaaaatacttacaaaattttttctaagagttaaaaaaacgatagtaaagactttataagattttaaaaggatttacaaaagtttaaaaattcttgtaaatccttttaaaactccttacaaactcttgtaaatgattttaaaaccttttacaatggtttttaaagatttacaaggatttaaaatatttacaaaggtttttaagtggttttaaactatttacatgtgtatttgaagactttataaggattttaggaggttttaaaatgatttgcaattgtttttaacaactttacaaatgttttaaaaggctttaaaatttttacaagattttttaaataattaacaagggtttttaaagggttctacaaaaatttacaagcattttaaaatacaaattttggcgggaatatttttgacggatgattgttaggaaatagttttgtccggaaaaatacattttaggaaaaaataaaatttggcgccaaaaatatgattttagtccggtttagttagtttcatccgtaacattcattcaaaacctaatgtagttacattttgtttcattttgatttgagttttttgcaaaaaaaacgtataagtaattttttttgcaacttaacctccatgtcaagtaaatacatgtcaataccacgatcttaaaagtcacccacaatattatctttagacgtgtatagattttgcaaaccgcataagtctgtatatagattatcaaaacgaagtggttttatcatattttaaaaagaaaataataacctttcgaacccataaggtcttctccaatgggagtttctcaacaagtatctgaagattaaaaaaaataaaaagtaatgaaaaaggtggagagagaatgagatacgtttctcatatgagaaacaatgagaaactcagttcaatattttgttctttatgattggtcagattttatctttataatttaaaattcaaataaataatatattcattattaactaattaaaaaaatataattgacaaactgacacatctgtgcgttggagatgccctaacctttagaacattctaagcatacataaccaaatgggctacaatagattcagaaatttaactatatatataggcaacaattagtttgtgacgggtgagcattaatcgggaacgactgagtttggtctgccattaaaactgcggctactgaaacacgagaatcttgccgctctctctgctaaacccagatcgccggagaattcatcctacgacgtcgtcgttttcgtaaccatcatatatctaagcggtggagagctcattcggagttgggtaacacgagccaggagtcgttctccatctccacctcttcctttatagactctgcttcgtcctcgtcatgattttcgtcagtgttagaatgtgcttgtttttatgtaaaccaaaaataatatatatatattattatctgctttttgttactttgtattttttataaaaatagataaaagattttttccgatttttggtgacgggtttatttcagatttgggtaggactaggcttttttaaccatcgtaacagttcaaaccaaacaacagtttatataattaaatctaaactcagcatctgagtctcctcttgcatttactcaccgtctaacatctgattttaatgccgcatagagaattaagaaataaaagggaacagataaagcgaaaaacattagtacaactagtggaagtgatcaaatctatggagttcagtggcttaaaaataaaaggtaactcccacgtcgtgagctagaagcgtaaccagaagcaaaaaccagcagatctgggggaaagtgacagcgtatccggcaaggttacttccgttgtgaaagatgaatcggagggtcccggtgcatggaagaataagaaactgaaaaagtcagttgttttgctcgaagctgctgtgaagatcgatccttcacatcttgtagattttttgcccaaccg

SEQ ID NO: 486 - DNA, 728 bp, Arabidopsis thaliana landsberg
  unsure (1)..(728): unsure at all n locations
tacttgcactcttgccctttgttccataacttcttctgagggtggaccgtgatcggagagataatcttatgcaggtttgtcaggaggatatatgttcttagttcctttgatagctagcactaacttcatgtatatatgatngttgatattacgtttataattttcaggcatttactattaccttcaacaattgcaaaccagagtcttcacttaaattagcgtgcatttcagttgttaaagatttgattatccctgtaagtaatgtttttacatgatatgtttaaaccgagtctaactttccgtgcgcattgaaatctaaatctgtttcttgtaatcttcgcagaatggagatatcctttatcccaatgatccaaccgtaaataactaccagcgcgcttgggtcaacaaacttccatcactgcttaaccagttgggtgataagcatcatgtatctaccaaggtgctaacacataactcatacaattctttgtcaatccagtaacctctcattttaccgtttttgtaatttatttacaggttgttttgcaactcttactcaaccttgcgctagttggatgtctgaatgcttcttcaacatttgaagaagagataagaaccttcttcatcccttttatttagaaaattcaattcttgttacaaaaaaaaacatcgttttagaatcttatgtcacttaacaaaataggccttggccttttttttcttttaaa

SEQ ID NO: 487 - DNA, 534 bp, Arabidopsis thaliana landsberg
aaactacaaggatgttattcataataaccatttttatatataagatattttgaagcttaaggtagttctttgggggttgggagattgcttgtcgctgttgccatgtgatcagagcgacaatgaatcaaagaaaaaggtatctaatcattttcactccagatgacttcaaagttcttgcttcacacatgccacgaagtagcatagcaatgtatattgttctgttctgtttccctattgtcactgtttgtttttacattttgtgccctttttgatattttgtagggacttttacagtatgaaacgctactcgcctgtgagcaagatgctgcgaaagaatgtgttcgtatgttccatctgtcttcttttctcatcaataatttatgatttttcatgatgaagtttacagtagtctgactatttttctactggttcttataggttttgcccatgtctctgggatactgaaggagattgttgcagtcttaatcaattgtttccaagatttccttccattaattcatgcttcgcaaagaa

SEQ ID NO: 488 - DNA, 1006 bp, Arabidopsis thaliana landsberg
ccggaaggtgctcgaggaaggatcttcacaattttaggagattcagctttctttctatcaaaaaacaacggcgtcaatcaaagcttatcaaaggaaggccgacacaaatcgtaactggacgtggccatttaacggatcagatgacaaagtaacatttcacgagagcgatactaacgactttgaacgtccgcacaacgatcctttggtcatcacactaaccatcgatgatttcaacgtcgaacgagttttagtggacacgtggagtacactggatatcatttttcttacgaccctacgagaaatgaagatggacatgacacaaattgtactaactccgcgacctgtgctcggattctccgagggaaccaccatgactctcgggaccatcaagttaccagtacgagccaaaggggtaacgaaaatcatcgatttctctcttacagaccagccgaccgtttacaacgcaattatcggcacaccatggttgaatcaattccgaactgtcgcttcgacatatcatctctacctgaaattccccacgagcaacaaccgacgcgaatcataagaaatctaagctgggccgagccaaagagaaagcagcaaaagatcgtggaggctcgggaatccacaagaccaatccccgatccggtaatctccatctgccttgatgacgaaaaacccgagcggtgcgtggaaatcggcggagacctaggaaaagaattaacagctgaactcaccttttcctcagagagaacgtcaatacattcgtctggtccccagaggatctccctggagtaagcgtcgatatcgtagcacacgagctcaacgtcgacctgacgtttaaacctatcaagcagaagaggagaaaattgggtcgggagcgagcagaagccgtgaaagccgaagtagagaaattactaaggatcggctccatcaccgaggcgaaatatcccgattggctcgtaaatctggtcgtagtaaaaaagataaacggcaaatggagagt

SEQ ID NO: 489 - DNA, 1248 bp, Arabidopsis thaliana landsberg
gaaaatgaggagcagcaacttcactgtctcatcaatgcatggggacatgcctcagaaggagagagacgagatcatgaatcagtttcggacaggtgaaagtcgcgttttgatcacaacagatatgtttgcacgtggaattgatgtggatcaagtttctcttgtcatcaattatgatctccctaacaaccgtgagctctacattcatcgtattggacggtctggtcgtttcggacgtaagggtgttgcaatcaactttgttaaaaacgacgagatcaagattctccgggacattgagcagtactacagtactcagattgacgagttgccaaagaatatagctgatttgatctaaaacacttttgtcaatgtgaaactatcttatgatttgtaaattacctacccgtttgaataatgacatcataaagtctatttagaaaaaaattcaaagcagagtgatattatttacatcggtgaacgaatgattcaatgttcaaataatcaaagacgcatatcaatcaaataatcaagaacatgcaccaatttctatgtcccactactgaagatctttacttttgttatggaaataaaaacctagctcaattatgaggtgtaaattattctttggactaaatacatctaacatctctaacattaacccaaaaataaaaatataaccaatgaaacaacattcagcgtgtaatcatctagtcactgtttagcctaggagttgagaatctccatcaatcaacatatctttctcagatgatttggtttcatcatcagctttctcttcctctgtagatataaactcaagctgtcttgatttgaaaactgctgtccttttcgatcttatccgatatggaggagatagattgtaagcatttgatccattatcttgaatctctgaactatccttaccatcattcaccttttgatcaacctctttagcttcatctgttttcttggcgttgttgttatcctgaacaacaaccctgggtcgtcttttcctgaatatggatggtgtgtttgggtaagttctaccagcttctctcaggtaagattcaggacttcttggagtcgaaccgttactgtgcacattccgacacggcggtggagtgaagaagctaactggtgatgcgcttggactgcaaccacattcattcccatacatacgctgcatatccacttctgacgccctgtaatagtctatttgaggcgtgtagtacagatgataaccattatttgcag

SEQ ID NO: 490 - DNA, 693 bp, Arabidopsis thaliana landsberg
cgccatcaataaacaaaaactctaaactcttactcgtggatgtttgacaaacagatcatatatcactcatggcaactacggatcttactggctacattactgagggtcagatatatatcgataggcaacttcacaacagacaggtaataaataactaccgctgaggccctgatcttactggttacagtaatattatgatccggctctgaatgaatgtatctttgtttcttccctgaaaaacagatatatgcacccatcaacgtgcttccatccctttctcgtttaatgaaggttagaattcaactccattttgattaatacccattgcattctatctccagatcttattaacgtattgtttctcattctgttagagtgctatcggcgagggcatgactcgtaaagaccattctgatgtgtcgaaccagctgtatgcaaattatgcaatcgggaaagatgttcaagcgatgaaagctgttgttggagaagaagcactttcttcagaggatttgctttatctagagtttttggataagtttgagaggaagtttgtgatgcaaggagcttatgatacacgcaacatcttccagtcgctggacttagcttggacattgctccgtatcttcccacgggagcttcttcatcgtatccctgcaaagacacgtgaccaattctacagccgcgactcaaccc

SEQ ID NO: 491 - DNA, 932 bp, Arabidopsis thaliana landsberg
tttaaacttttttttgaaactaaggggtgaagatgatatagtggagctcttatgtaagattggccagacacagataccctcctccgatcctcttcccattctccgtggcagcggaagtggcggacgagaagaaaatactccgcttccgcctcctctgcctcatcagaatctcttcatccaggaagacgaaatgtcttcttggccccatcatccactccgtcaagattatttgtgctctgaactttatgcttccactccggctcctcatccgcagagttcagtctctctggcaccaccaccaccaaaaccaccatccagtgctccgtacgatcagattatcgctccaagaagtgctccgagaatccaggtgagttaccgctccgagaagtgcgcactcatgtcagcgcgtgttagttacttgacgcgtgcagtttaacccttttcttgtttcttggcgtacagggaactgaagaagctcgaggttcaacgtctaggaagaggtcacgagctgcagaaatgcataacctcgccgaaagggttgttatatttccattgcattttcaagattctttgatttcaacaatggactctctgtttcatcctccattgaaacgtaccttgtgttttaacagagacggagagaaaaaatcaacgagagaatgaagactctgcaacaactcattcctcgctgcaacaaggtctctcacagtttcacataacttgttgtcattaaacttgattctcattctggttctggttctactctgatcagtctactaaagtttcaatgctggaagatgttatcgagtacgtgaaatctctagagatgcaaataaatgtatgcccctgaagattcctctttttagatttgatgtctgaagatttatcttcgtttagatggttggcctaataagatgattcctcttatatgt

SEQ ID NO: 492 - DNA, 671 bp, Arabidopsis thaliana landsberg
attatgctttccttacaaattaggagaaaaatatcacaaggcaataaaatatttcttgttgttgttgttgtagattcaaaaggctatgtgtgagcagaatgaagcgaatgaggaagctatgaaacttgcagaaaagcaccaggcaagtacttctttagtgtttctttagttatgaacaagtaataactaacaacttttgcagaaagagaaggagaagcttcataaaaggataatggaaatggaagctaagctaaatgaaacgcaagagcttgagttggagatagagaagctgaaaggtactacaaatgtgatgaagcatatggtgggttgtgatggagataaagatattgtggagaagatagccaaaactcaaatagagcttgacgctcgagaaacagctctccatgaaaaaatgatgactctcgcacgaaaagaacgtgcgaccaacgatgagtatcaagacgctcgtaaagagatgattaaggttcgaaaacgttctaaatatatctgttccaaactctttggcttgtccttttaacttgtggaattacttttgatgatgagcaggtatggaaggcgaatgaagagttgatgaagcaagagaagattagagtgaagataatgggggagttgaaccctgcacccttcttcctgcagtgatgaacaaacat

SEQ ID NO: 493 - DNA, 2646 bp, Arabidopsis thaliana landsberg
tgacaataacaccggtgctccccacggcgaactgctcggttgtatgaaccttttctccaacaggtcatccaattgtttctttagctcgaccatttcttgcgcagccatccgatatggagccttggacagaggtgcggttaccggctcgagttctatcgtgaacggatctgaccggtctaggggtaccccggacaaggattggaacacgtccgcgaagtcttttaccaccggtatgtcctccaattccgaactagttcctccatccatggtaggtatcatggccaaataggcctcgcatccgttatggtgcattctctcggctcggactgtagacactactagctttcccgaggcgggtcggattccttggaactccaacttccctccttctcgttcgaactgcacctttcctcggtgacagtccaacattgccttatacttgcccaaccaatccatacccaagattagttcacgtttctcaagcggtatgatgatcaggtcaaccaacatttctatgccactcaccggtatcccacagacttgtccctacgggatcatatcctgtccgcccaccgcattcactacggtcgggtccattcttgggtcctcctggaactttccttttccgatcatccgcggactcacgaaactatgcatagccctagagtcgaataggatcgtggtctcaataccaccaatttgtaaggtcctggagatcgcattgaagttactggcctcgctagtttccttcgtcagttcatacacacggggcgccacggcggctctcttggtctgttcggatggctcaccaccaccgcggttgactttctcaccaactagcccttccgcccgtagttgcgggcactcccttatgtaatgccccgtcttaccacagcggtagcaaaacctttggtcatcacgcgtccctctcgtctgcctttgtcctgtccccgagcaatgctgggtgtcgtgactcatactgccacacctctcacatgccccctttgctttccagcattcgcccaagtgcctctttccgcactgagagcatttgtcccgacttccctacgatttcttcttatcgtcgagttggtcgaacttcatcttcttttcattattcggattaccaccctttgagcggatcctttcctcctcatcgagattcgcctcgatcaatgccgccctttcaaccagttccgagactgggttgaaggtacagatcgagcaaagagtcctcaactcaacccgaaggcctctgaggaatcgacggacttgcaccgcttcgtcctcgagttctctccccacgtagcgcctgagtttgttgaactcctcctcgtactcacggacggtacgacgaccctggacaagatccaggaagttactctcaagtcggtcccatgcctcggacggaaagtacatcctgttgaactcgtcctcaaagtccttgaaggtctcgacacgctcacccttgcgtttatcaaccgcaagccaccagttatgcgcatcgccctccaacaggtggatcgctatgtccttcttgtagtcctccgggaaacttgacgtcacatcaactcacacaactcttaaggtaacttctctcctcctttattatttactgcgctttgttttgtagaagtagaaaaatcacgtttttgttttttttgctatctccttcgtttctctgttattccctctttctcgatctgccttctttgctttttttcttcacctctctcgtccttctccgtcgaaacccaaagatgagcgacttcgaagattctcagaacaaaagcaaccacagttacggcgacgattcaagttcgtccgagacgaggtcggcggcgtcaccgccgcgagtacaaagacgcggcataaccctaggcggaatgggtccaattcgtctgccgtcaatcagagccgacaaaccgaagaagaaaaaggctgccaagcaagggagaggcacgtagatgacgaatgacgacctggtcgacctccggaggagatgccaggtttcggtggaggtacatatgatactcccaaggccgccgctgcatcctgagaacgtgccggtcgggtggtgctgcgcttatgccaatttcttcgagaaatgcggcctattttttccaattccggcgtgtatcctcaagatgctctactgtcttggcctcgcctttcccagatgtgtccgaacttcgtccgccgtgtgctggcgttattcacccaggctcgaaaataaatagagaattcagctgccaagacctgcttcagctctgccaggtcaagaccaatgctaggagtgaccaagggacgtactacatcagtgcacgtcccggatctctggtccttggcggtttgaaagcctgtcgagaaaccaatgggcgatccaagtacttcttcttcagagtagatcgtcattcagtcggtagttttgatcccacaaggatgacgaggacctggtctaccaacttgggtcagatggagacctgagtctcttgattttttttgttgtttctgtcgaattcttgactgcttttgctgaactgttagtatcgatactaatgttatttttctttcgatggtttgcagcaagaaccaaggaggttactctctcggagacggaactcgagctgttaacccttctccgat

SEQ ID NO: 494 - DNA, 1150 bp, Arabidopsis thaliana landsberg
caagtgggtttttaggttttatcttattgggctgatgaagttgtttaggcccaaagtggtgaagtatgttttgttgtgacccattcgtagaagtagcttattctagctaagtacttgaggtagagtagttggggttgttagtggctaaggtaaggttgtgtaaggttgcttgtatccctaagtctaatgtctagaagtaaggttaaatagtgactaagtttaaggtctaagagagtgggtatggtgagtagaagaaatctcctatatgtatgtgtaatgtgtgtaaacttatggatgtgtgaaagtatgaaagtttaagagagaaacaaaacaaaattgtgacctaaggagaaaaacaacagaatggcaaggtacgaacatggaaaagttctttattctctttgactcgtcgatttacatccaaaagttgtttactcatccatgattcagtcgaaggttcactaaattgaagaaacagcaagagacgcagaagaaagatagaaaaagtataggctcaagcacatgcttgcaagaaagttacaacagaagaattgccggttagaagcttataaccttttggtaattgagtcaaatagacattgttttaagattgatctttctctggttttgttacagagacaaattcttagtacatttacagaagaacaatatagaagcttgttatgattcttcacgtaatgtttgaagatccaaggaatgtaagaaatcttttttttagaggtgctcaattcggtttttggttcagctttagttttagttcaaaagatttagtttatgtttcagtattagtttggatttggtttatgtttcagattttcagttttggatttatttttcagtttcagttctctttttggtttagttcatctcttttggtgatgtgttctcttttgctagaagtaatatcggaatactgtgtaaagattttatttaaaccattttaaaaacaatgaatgtcattctaaagtcctttcggagtttagtaataaaagacgtttcaagtaaacataagtagaaactctcttgagacaatcatgtcaacatctctaaactaatggtcaggatcatctttgcctaaagaataagataagaagcttagagatgaaaccatctagtctccttcaaaacc

SEQ ID NO: 495 - DNA, 346 bp, Arabidopsis thaliana landsberg
atgttggaaagcgaggaagaagatgtggatatggatatggcggatttagagacacttaactatgatgatctcgatagtgtttctaagcttcagaagactcagagatatgatgatattatgcacaaagtagaggaggctcttgggaaagattctgatgatcatgagtataagcttattgtggattgtaataagctttcggttgatattgaggatgaaatcgttattgtccacaactttatcaaagaaaagtacaagcttaggtttcaagagcttgagtcgttggttcatcaccctattgactatgcatgtgttgtcaagaagattggcaatgagacggatttgactc

SEQ ID NO: 496 - DNA, 2083 bp, Arabidopsis thaliana landsberg
  unsure (1)..(2083): unsure at all n locations
aaaaaaaaaacaagaccaaagagagggggctagagaggagtcgcatctgaaaagcttaggaacaggtaggccttaagtaagtcatatagaagaagtttgaagtgaaaatttgaaggtagagatgctttaatggtaattgttttgctgtatattctctctcggatctcttattcgacaatgaagcttacttttgagtaatctcttttctttatcccttttgccatattgttaagttgatgtcatattaccacctcccacattgattcacagtctttgcttcaatatcactaccacacatggctgcatcttctgatacaggaaaccttgaaggagttagtgacttggaaaaccaaagcaaagcagcagccaacggaaatatcaaacgctgcctttgctcttcagtgacagtaattccgctctagctaatcgattcacagacaaagaatcctttagagacatagttttttcttataaaatctaactaaaaaaccaaggatactgaaggcatgcgaatattcttaactaaagnnnnnnnnnnnnnnnnnnnctcgatcttctggaagtaatcgacaggcaagacaccaacaatgccttgagtcaaaatcactttgttgtctgaaatgtagaacgcaatcccatcttcaagagctttcttgatgtcgaggaagattataacatttacatttcttctcacgccactaatcacttcaccatctgtaggtaatccacaagagaagtgaacatgcattctattcatacgctttaagcccgatgctaagatggattctaaattcttcctataagttccatgtacacacactggagcttcttctggtgacaatattggtttaagtaacttgtctgactcaaccgtcgtgatcgagtggccttgattagcgcgaatcaagagctctccatcctcatcgatgaggctaaaccgttttttattgtcccttgtcacagcctctctaatttcatcaatcgtgtgtgaatttaactgaatatttgcacaagttttcaaattcaggttgagtaaatcttcaactttaacaaaaccatcacctctcatgttcaatctcagctcagtagccatatgtcgcaatattctcgtcaagattcgtccaagggcatcgattctatccacaaagatcattgcatattaaggaaaagcagctagattcacccgtttcactgcacgtatcgtcctcaagtgctcctgaatttgccagaagagagctttcccagaggaaggcgtgtagcttttttcatcattcaaaacctgagagagaagtttgttgattgttagattctagaaaccgcgttgctagggtttcgaatcacccaaattgaaatgaaaaaaaaaaaattgtgttcttgcttgtctgtttattttggtttatttacaattcattccggttcaatgttaggctttcattaaccggtttaattattcttccggtttaatcaaaaacaattattcttcttctttcacaatctctcctgtgttatttacgccgactcaaagaacccaaagctcttggaggaggtgatcttctcttctcagatcatcttctactcttgagtatacccttcctttgaagataattcctagtttgggacttatccttacttctccgggatttcactttaatccaccgaagagttttgacatctgaattgtattgttttgggtgtgatcccgatagaattcgagggtaggaatctgaaaggtacgttatgaaatttgataattgtgatttctgtgactcgttattgatttttaagtaaaagaacgaagctttgtatatgatattcggagttctaggtttaattgaattgttgtcgttgatgttttgatggggtttaactttttgaactaattgctctgaaattgcttaaccaaatcaagggttcctatcaactgtgtcaaaagttttctctttgtgaattccctgtttgatggctagggttaatagcaagtgagaccatgaattgctttttatggttactatgttcattctgttattctgaagccgatattatatgttgccaagtttgtgtgtcacttgaattatctgttatt

SEQ ID NO: 497 - DNA, 1060 bp, Arabidopsis thaliana landsberg
ttgcatgcctgcaggtcgactctagaggatccccgggaaaagtttggcggcgtacgactataattcagcggactgtacggtggtgcaccggactgtccggtgagccaacggtcgccagcgcaatggtcggccgcgcaatccgcgggcgacgcgtggcccgcaccaacggtcggtagtgggcaccggactgtccggtgtgccaactggcctggagctgcaacgctcgtctgtgccagaaaaggaaggaagtttggccttccttgattgatctccaatggctcctagctgccttggggctataaaagggccccctaggcgcatggaggagacacacaagcattcagtaagcatcctaaagcatccagactctattcccgcgcattcgtttcattgtgttagagatttgagctctattcgagtcaaggactccctgtgtgtcatttgagctcaagtcttctcttgtgtgcgtgggtgtgctacgatttgtgtcttgtgtgcattgctcatcccaactgttgggggccttcgtcttccgaagtcctcaaaaacatgatttaacaatgtttctggagtataatacatgaacaggtaccttcggacttggaccttcgaaggctcaaaaatgaaccacagtgtgaagaagcacaaagaatacgaaggttggcgcagaccgaagctatgcacagggaagcttcggcaagacagcagaaaaggaaaccgacttaaaagggaaaaggctatttagaccttgatggattactatagaatcattagcaaatgtaaagggcatgggtgtaatttcacatgggctgcgtcccgtgcctataaatagatgaacagtgctcccgtactgttcacactgacttggcatttgcttttgcgtcatgcttgtacttttacctccttcaagtcgaaggtacatttgtaatttgatatcatttctatttttccataataataaaatagaaatgagctgataataatacatgattgtttatgttatcttttatatctcatatgattccatcttcattattatatgttatgctgatgaaggtat

SEQ ID NO: 498 - DNA, 813 bp, Arabidopsis thaliana landsberg
aattgactgctcgcgtcgtgaaggattctgaaagttttaaaatttcttcgtatgctacgacacatacgtgtgacatggactctcggaagaactacaataaacatgctaattataagctcctcggagaagttgtgaggagcagatacagttctacgcagggtgggccgcgagctgtcgacttaccacagctgctcctaaatgatctgaatgtgcgtatttcatattctaccgcttggagagcaaaagaggttgcagtggaaaatgtacggggggatgagatagcaaattacaggtttttgcggacctatctgtatcttctccaattagctaatccgggtacaataacacacctacactatacaccagtagatgatggtaagcatcgcttcaagtatgtctttgtctctcttggcgcttctatcaaatgtcttatatatatgaggaaggtagttgtggtagatggaacgcagctagtcgcaccttacaaaggatgtctccttattgcatgtatccaagatgggaacttccaaatattcccaataggttttggtgttgttgatagtgagaccgatgcttcttgggcatggtccgaaggcttgtgtcggatggtggtatggccttcaaacgttttctgattctttccgagaaccaattctacctatcgcggatccgaaagatgttgtcatcccacaacatatagtggatttgatactcattcctccatccagtagacgaccaccaggaagaccactgtcgaaaaggatcccatctagaggtgaaaaccgggtatgtattaacatcgtcgattcatct

SEQ ID NO: 499 - DNA, 1149 bp, Arabidopsis thaliana landsberg
tttttgaacactcctcccgacttttatgagttgctttttcctagaatagttaatatattatgatgaaaatctttttaacaaacggagagatctttctgcgagcgaaaagatcaatcctcattatatccatccaaggcagaacagaaatactaagtaagagcaattggctaggagcacatgtattagtataagaggcagattatatttcaccttattgttcgccatagcatcaaactcctctactacatcagaatgtagcaaccggcgacaaacctgttgttatcccacaagaagaagttaaattggtaaagtgttgaaagtctgtttttcaaaagtaagaagacataaaaaaaaaaatattacacttctccaagctctatgccttatatctgatcccgtataaccaaggtcttgcttaatgtctgagataactaaaacctgcactacaagaatataagtatacattatacaacttagcaagatccatcttgataaacaagaaaacttcgagtttactaactttgtcgttagctttttcgagcttatcacaaacttcctgcattgctggtagaaaatcgttaatgagcgtgtcctctccggccgcagtagtctcatgctctgacacagagtcttctttgcaaatctcaaacctctgttgtgaacccataggcttggcgtaacgagttaagtatatcatgttggtagtaatacatgaagttgtcttggaatcaacttctttagttctcacaattgctggttgcctaacaatcaaacctcgagattcaagctgctttacactatagaagaagttccttccatcgataccaaactctttcgcaagcagattttgtgcatcaccattgtctctacatgaacatatactgttaattatcacaactctgtaactaactatgaagtgaaaacatgaatttttacttacctagcaatagccaaacgttcaagaacacgacgttgaatcgcgggaatagtcgtgttattcgattgagtatcgtacaagccaacgaagtaagcttgtaagttctcattagcgacgattctcaaatcgagtctcaatgcatcttcaagctgttgaatcgaagtatctgatgatccgtacacagtgttcttcttcgtctttgaatggagctg

SEQ ID NO: 500 - DNA, 1859 bp, Arabidopsis thaliana landsberg
  unsure (1)..(1859): unsure at all n locations
tcactaatgcttttattgatctgactgtggagagacctcggcttcaagcagagctggatgacctagaggcgcggtccaagtcgaaggaggtatcaaactttactctaagcaagttggatctcccgcaggtttcagagatttcggtggtacgtccgatggacgtcgacgagcaagggacgccaattggcttggatgagtttgggannnnnnnnnnnnnnnnnnnnnnnggtctcgcggagggttctggtactggcttcgctacgccagctggagaatcgagggagtgatcacttttgctccttgtttgttttaggatttcatgttttgtttcagacttaatgcttgggaaggcttttatcctttcgtttattgccttttgaacttggtgcctgggaaagcttttatcctttgttcgtttaagtactcgaatgactgggaaggcttttactctttttaacaagtattttttgtctttcgttcgagtgttgacacttcgttgattttggtgcgagaccacctcgctttgtccatgttccggataatgattggacttgtttcgcgtccaaatcattttggacgtgatatggtatgttcctcgaaggttaaaactttgaatgagtttgagttgttttatcttgggaacctgttgaagtgaggtcacacaagggacctgccaaattttgggagctaggcttgtggtatcgccaggtcgcgaatgaaaccttcgtttcttccttgtttactatgttatgtgttgatagcgaaagagttagatttggttgtagtaggtgagctctgatgaagccgaagtgatgtgttcttataagtttagttcactatcgactttttggaagcgagatcacaaaaatgtatccgccaacgtttaggcgttgggctttaggtatcgtaagattacgaatgagtttcaatcatagtgtaaatgactgtatttgcgaagtatgataatgagtatcaaaattttcttttattcttatctccaaattgttaagtacaaaaggaggtgaagcaagcgacgatctggcgttcggtcattaagcagggacctgctcgataccgaaggcaggttgaactgtcaagtgagcggctgatcttcgttgacgggggatgcgatgtctgtttcccttattgaagtttcgtcctccagatggaagggttgaggtggtaattgcgtttgcggaggtgactgcctgcattcctggttaagggattaagcccttttgtgatttgattgaagtggtggctgcgctcttggggggannnnnnnnnnnnnnnnnnnnnnnnnnnnnnnnnnnnnnnnnnnngattgtttttgagtacctattcgtggtatttgttaagatgcatggcattccaaggccgtaactcaggtactctgttgataacttttacgagcttatagacgccgtcacgtaccacctcggtgattcgatagggaccttccgagttagttcccagttgctgaacacttttcttaaaacgagctctcccacttcgagtctccgaattttgatattggagttatagtagcgggcggcagcttgttgataattttgaactcgaatcattgcctgatctctacgttcatcgatgaagtccatgttgtcccgtaacatttgcgtgttcaggtccgagttagcaggactggcggtccttctcacgcttggtactatggtttcgatagggattactacttctaaaccataggcgagagagaacggtgtttcttgcgttgatttgcgaggtgtagttcggtaggcctagagaactccatggagtacgtcggaccacattgatttgtttgaatcaagtcttttcttgatgttgctaagtatagcttt

SEQ ID NO: 501 - DNA, 1727 bp, Arabidopsis thaliana landsberg
ttcactccttcacggaacacggaaagaagcttctatcagacctggagttctcaatggtgatgacatcagcatccatgtcgatgatggagtgtatgatgtcattgaagtgggagtagcacatgtgagtgtggatctgggtgctgtcttggactccacagttggtgattctgaaggagtggacggcccagtccaagtagaaagcatgctcggatttcctgagtggtagtccttctctaagtgcagcctcatcaatctgaatgacaccgattccacctttctcaagatcctcgacttcgtccttgatggccaaagcaatctggtaacaggtttcgtgcctacaatgattccaagattgttttagtgttttgttctttatttagtagtcatgtttgtttttagattatagtaacattatgtacctgggctggtcgttcctgacaaaggaccagttgagaatggtgacgggaccggtaagcatacccttcattgggcgagaggtcatgctctgagccattgcggaccagaagacggtcattgccttgggacggctcacatcaccatagataactggtggcttcacacagcgagatccataagattggacccatccgtttgcagtgaaggcaaaaccagacaactgctcaccgaagtactcaaccatgtcgtttctctacaaaattgtgaaaacatctctcatcagaaagagtaacaaggattaccagacatatcttttgtacaattcctccacttcaagggatcaggcaaaaacatagaataataaaaaaaaatcacctctggctctccgtggacaagaacatcgatgtcaagttcctcttggaggtcaacaactttcttgatctcttccttgatggccttaacgtagtcctcctcagagaccctagtaaaagagagattaaagaaaccattagcatcacaacaatttaaggaaatgtgtgacgcataagcccaaggattaaatttaggagactaactttttggccttgtactcacgacgaactctcctgagctctacagtctgtgggaaggatccgatggttgtggttggtaggattgggagattgagcttcttctgctgagcatctagcctagcactaacattggttgcacgacggtggtcagatcccttcaaagcagcagcctgagataacaagaatgagaaactatctcaatcaatacaagattaggaaaataaaccattgggtgagcacagtgcatcagtttgaaatcaaacttacagccttctggacaccctcgttggtgactcttggggaagatctccttgaagccaaagccgcagcattggcagagaaaagggcctgaaagagaaaaaatattgagttctagtttttgcgggatcatttacactacagataattcaagggtccactactagggaagcgtgtgggtaaaatacctcgtccttctgaccagccaaagccttggccaatgcattcacttcaacgaccttctgggcagcaaacgccatccatgacttgatttcatcatcaagcttagtctcattgataagatcaacagcggtgtggagaagagagcaggaggttgagaccacaagcttgtctgcatcaaaaagacaacagatcaacatttcatacagttgtttttcaataattccctagtaatgtcaggtaaaaggcagatgattttggaagaacaattacctttaccaacaatgccttcaagtgcct

SEQ ID NO: 502 - DNA, 1186 bp, Arabidopsis thaliana landsberg
taataaaattcctatttgactttttaatttttaaagagatgaattaatttactatttaaattttatttctaatggcatatctatgtaattacttacaaaaaataaggttacatttaaaatgtacttcccaaataatatagtaggattacaaaacaaaaggaaaaatgtgtaggaaaaatgatatcaagaaaaagagtgaagccaaaaaaaatagaagacaaaaacaagagactggaaagaatcgccccccaccacaagttcaccactgggctcgtgagtaagtgaactgatacctcatgcaaccaactagatttggtcgtgtgaacacattcatagtataaatttgtcaattgaacataagctttttaagtttgtcttctaacccattctaaaaatatatttaatctctctcacccatagtactgaattacaaaggttttgaatcgaaggtacattataacttttttttttttgctaagtttatgatttgcattatgatcagcgttcacatcttcggagctaaactttttttaacaaaaagaacatagtgaatttggctacgccactgcatttagcaatcgaagaagcaattatatttgctggaggcgccacgccgccaccatatgaaacacatattcagtcactagcagtcctctttctttagtgattggcaggcaagttttgtgacttaatagtgttggtgttcatataatctgcagaactgaaatggtcatatctttcttttctgtttgagtgttcatttgggtctttcatactggtttcttgctttttcagtttagtatgcaaatagaacaaggtattccggttgtgtccaagtggcttatcttcaaccgtttcaagatttgttgcatcaaaaggtgtcaggtttggaccggcttttcccttagcaaggtactgacagaaaatcttacatactctatgtaaacaactacacgtacaaaatgctctgtaaatatatcctagctccgcggtgggtcttacctcttccgtgacagcttgacaggtggttcaattgcaagagacatgacaccttatcaagcattttccattggtgggctaggcagtgctcctagatatggcgagggtgctgatggatcctgccggtcatgccttgttgctaatactgaacatgcggctcctctgatacctggagctcatgcatata

SEQ ID NO: 503 - DNA, 494 bp, Arabidopsis thaliana landsberg
gttaaatggtaaaaggtaatttcccaattccataactaaagtaagcacatgaaccaatagattatacaataattttaacggtaggtttttctattccaaaggatgaatcacagattgttagatgcttttcaagagccaaatctatttcttttttgaccactttataaatcaagggatctagaacatattttcgagaaaatgtttctcaatttgcaatctcattgccttctgaaccacacttttgaattttttacgcttatcctttgatgagccgccttcaaatcaagatttcccttcttcaaactccctcttctgtgacatctttcagatacacacaagagccgttaaaatgaacttttatgcgttgggttgtttttgtacaccaaatgaaccatgacgagatttctagcaaaaatagagtctagctcaaactatagaaaatttttataagatgaacttgttgatagaaatagaggttgcattttgggcgatcc

SEQ ID NO: 504 - DNA, 2854 bp, Arabidopsis thaliana landsberg
  unsure (1)..(2854): unsure at all n locations
tacctcaattgagacatctttgccacttatgtatatcaacgcagcacatcaatcaaggttatgaaacacgtcaaagtaccgaatctatatacggttaccaaagctaaaattttctcccaatccctacggaaatctttgaaacagagcaaagtctcaatcctaaaacctttccgcaggctcaaagaagnnnnnnnnnnnnnnnnnnnncaaacattgctttgcagtttcaattcatcatcactacaacatcttaaaccgactatacaatataaaagaacacaacttgaagcaaacctgttgatgacgtttgtgcaaccagtgtagagcttctgcttactatccttgagaatatgcaattgacagtatttggtaagcgccatagctttagctttgcatccatacatacagaacccggaattgctgtttgcatactgatcaccatcattacccttatctccactaccttctggatcaagcctccgtctcttattcgattgattttgttcgtctttaaactgactaaccccatacttacaccaataatccctgtgttgcgccttgagatcctccattaaagcccaataatggtttctataacacttggccagctgctttaggttgtctgctcggcgtcggagaagctctgggcgtgtgaggtgactagagcttgcgaggatttcatcttcttgtaacatcgtaatcggtgaattcgaggtcgatggtaagacgtttgtgctaggtttagggttccgaatttggggttcaactgaagtggaagccacagcggtggaagatgcagcgttggaggaagacggaggtcttgggggtttcaaggagaaagggttttgctcagtgttcttggcagctgacgccattgtcgtcgccggaaaatgatgacagagaagattcaaaatgcgagatttttttttctcttaattacttgattgaaaacatccatgggcccaaaccaattatttaactattttatcaatgtatgggccaaattattcaacaaataggcccaaaggaaattggatgtgaaacctgattttctgaattaggtcaagtataagtactaatagcatctctttcgagattacgccgctcatttttagggtttcagatataggcagattctcacatttgcaaacatgacgactcaaatcagcaagaagagaaaggtgaattgtgatttcattttctgttttcagtggacttctctagctgtatcgtattggaactgatctggttactgtgtttgtagtttgtagcggatggtgtattctacgctgaattgaatgaggttctcacaagagagctagcagaggatggttactctggtgttgaggttagggttactcctatgaggactgagattatcatcagagctacacgtactcagaatgttctcggtatgtttttgatcttcgagcttaatcatttcttctattatacggtagtgactgtaaaatttgattgtatttcaggtgagaaggggaggagaattagggaattgacttcccttgttcagaagagattcaagtttccagttgacagtgttgagctttatgccgagaaggttaacaacagaggtctctgtgccatcgctcaggctgagtctttacgttacaagcttcttggtggtctcgctgttcgtaggtacgacatttctctagttcgtttgctatgttactttgtttgatcagtttagtttatcattagagactgatttggataggttactagtgtctataagcattcgccgagtcgttatagttgtatgtttagtatagagtaattgttcttatagactctttatggtttcgaataggtattgtctagcttctaagtgtaatgactttaagttctcatgcaatggttatatgttgtatagggcttgctatggtgtgttgaggtttgttatggagagtggagctaagggatgcgaggttatcgtgagtggaaagcttcgtgctgccagagccaagtctatgaagttcaaagatggctacatggtgtcatctggtcaaccaactaaggaatacatagactctgcagtgagacatgttttgcttagacaagtgagtttcgtctgagttgttcttattagagttaagtaaaaaatcaacaatgtctaattaaagtgttgttaaaccgaatatgtagggtgtgttgggaatcaaggtgaaggttatgcttgattgggaccctaagggcatatcaggaccaaagacaccattgcctgatgttgtgatcattcattctcctaaagaagaagaggccatctacgcacctgctcaggttgctgccccggctgctctcgtagcagatgcaccactcacagccgtagattaccctgcgatgatcccagtcgcctaaaagaatcctttgtactagtcgatgtgattttgttttcaactgttcttgctcttttgacagattatagcttctcgtatcttcgaatcagacacgtttcctctgttcttattcgaaaattatctcaagtttccattgttgaaaaagccctttttagtttcataaagcattctctctttggcaaattattccgaattaattcgtaatattacaagaccagtttgtccaaattttggtacatccatcgaattaactaatcgtaattactaattactaattactctcatcacatgaaatatgaaaatacaagtatttgcgtttagttatatccacgtgtttgaaaactaaccgtctgttgttataaaactccgacgattttcccgctccgtcgacacaaaccttctccgtctttcgtaaaaggttcgcgagatctaagtctcacttctaaagctctgacaatggcggacgaaatcggatc

SEQ ID NO: 505 - DNA, 3444 bp, Arabidopsis thaliana landsberg
gcaatatattctagaaaaaaactgtttatacatagaactgcaaacttttctttaagttggatcaaaagtgtatcctatcaatccttgattttgatcttgccttgaagcaaaccatacttggattcctcttgcgtacttctcttcacctctcacccttagtgtgcttaatcgattccttatgtttttgtttattagcttgattatcttctccatcatcgatggcgtctctccatgtctcctctcatttctttcttttcagatagaatgtatcgtgttttgaaacacataccgaaatacaaaccttgtagtgacgtcaagatctttactcactaactccttcatgatatctagccatttttccgtgaatttgttggctagtagtctgcccgctagttctctccacaccgttctcgaataagggcattggaaaaataagtgttctcttgtctccaagggataggtgcagagaacacaactagtatccatgtttttgttccatttaagcattatctctcctgttgcaatcctattcttcaccaccaaccaaatgacaaacgcgtacttcggagtggcatccgaaaaccatatcgctttgtagccttgcatctctggccttgctgaacgaatttgtagccacgtctccttggatgtaaaattctttctgtagcagtcatttttttctctccatagtggtatatcatgttctgtttctcgaatgaggttcaagaatctttgtcgatggtttcttgttcagggtttacttatcactttactaagcgtactgtttcttagaactcccatagctatgcagcctctatctcctaattgttcatatatgcaacccattggctccatgaaccataccaaacagaagttgtgtccccattcttcacttccaccttgtggaatgtctttgcttgttcccggtacttcggcatcttcctccatatccatgacccactagctgtgttatctttcactgcccaaaatgagccgtctcttatgaggtgttttttgacccaatcaacccataatgaaattctcgctgaaagaattctccatattagcttcaatatgcagactttttttgcctcctcaattgatcgtagccctaaaccaccttcgcttttgggagacacgcctctgaccattctacctttcttttccttggattcagagctgggctcgaccacaggaaagaggagcacatcttgtctatttctttaacacaagctttggacaacctgaaggctgcaatccaaaaatttgttaggctaaaaatgacagagcttaggagctgcagtcgtcccgcaaaggatagagttcttgttgttcaggaacttatttggttacggatcttctcaagaagtggaaggtagtctgcagaggtcatcttccttgtcattagcggtaaacccaaatatctcaccgataagtggcaatattcaaaagggaattgctccaagatactctccttcgtacttaaaggtactctcgccatgtatagcgtggatttctcaaggctaatatgtaagccggagtgaactgcaaactcgtccaaaacttttaatgcgccttctatcgacttcttattgccttctacaaataccatgaggtcgtctgcgaaacagagatgtgtgagcttcatttgttttcactttggatggaaaccaaatcttttatcatttgcagctttgtctaacttgcggctagcacattcatgcaaatgacaaaaaggtaggggcttagagagcagccctgtctgagtcctctttcgctattgtaataacctgcaagttctccattcacttgcaccgagaaagaagctgtaccaccacatttttgtatacaattcacaaactgttctggaattttctagagcttctcaggcgtgtttagaaagaaacccctctggcccgaatcaaaagcattggatatgtcaatcttcattgcacaacgaggggaacagtttaattatcattatatttaactgaggaaacaatctcgatctactttctctaatcaggaagacccgtcatgtcatactatactttctctagtcaggaagacccttcatgtcatactatacctttggcctccaagccttacaaaatctcaatcaagttattagaatactaatttattgagcaatgataccactctttctcccatttcaagaccttaaattcatgctctatatatatatatatatgtgggggtgttctttcaggtgatattgaaatggtcgctttactagaaatgactataggagacctatcgaaaaactagttgagtattctttagagaggctcagcagattcattcttaagtatgtgttccaaaatgcggtccattccctatggagagaaaaaaaaatgcacggatacatggtgatcaaccttctttttttttttttttgaaagaatgtaaaattatattcaaacaaaaaacgtttatacaataaatgctacttcatgctgaaatttagaagagaagtagaaacagagtttgacatagaaaaacagaacactcgggctaagaggacgagcgtgtggagaaccaaagctgcaggccatccttgtaacgatggtttctagtggctgtgattgtgctgagacggttccgtacggttccatcgattagcttgatttgtcgagttgttgtggtaggtatctcaccgtgtcgtctagcattcctctcgcgccatatatggtaaagagtagcttgaaagacataacgaagcagaaagaggttgagccggggagttcttgtgttgtgaagcattgcggtgagctggtgccaatttgatgagtagtttgtttgaagaaggcgatgtgccaagttctcccagatcgttgaggagtatgggcaggagaagaacaaatgatctctcgtctcctccgtgttcgtacataagacacagtgtacatgctgccccgtattccacttcttgattcgatcccctgttgctaatttattatgaattgcaagccacgttaagaatgagtatttgggcgtagagtaagagaaccatacacctttcgaccaaaccactgttggatgtgtgcctctgatattattccaagtgaactttgttgagaaagttgtcttaaacttatctcccacaaatctccacatcgagatgtccttctcatttattctgatccgttggcgagtagtatgtatctcagcttcaattctgttgagaatatcaactcgatgctttcgacgccgtcgaggatgtagagctgtttcaaccattgcatcgagaggaatacccaaatcaatgactccacgaggacctgttatatcgatcaatctgcccaactgtgaccagttatcaaaccaaaaagaggttgagctgccactcttaatttccaccttgtgcatagtcttggcacaatctctatatttgagtagctttttccacatccaagaagccat

SEQ ID NO: 506 - DNA, 1679 bp, Arabidopsis thaliana landsberg
cttaataactatatacacccctgtgtggtgcataatctggtatctccacttttatctttgattctgtttctttctttcttaatgaccttttacttgttttaccgatcatcgttaactctctctctctagtcggtcttgttcccggatcgctatcatgtcatgtcgtgcatacccacagctctgcagctgaccttttttttgctctaagaatcagttattcttagggttgttgatattttataggtactagatgaagccttggatctaatgtcccaacgaacatatgaaagcacaattttaaatcgacaatgtatccatgtttactgcgtttatgaaatttgaagacgcagttgctgcatttatatatctccacaacattttcctgcaagatccagttcagatctagtgaatccatgtgggaacgtgtaatctactctgagtatctatcttcttatacaaaacagaaagcatatggtctcatggaacggaggataaccagcaaggttacctctggtgctatataacatggagacccacaagctgtagagagcatatcccccgactgtgaattacataaaccaaaagtcttatttagcatcctttgattgttacaaacccaaatattttgttttgtgtgattagaaaattagaaattgttactttaggaactgcacttaatccaaagtcagaaactttgagattaccctttgaatctagtaacaagttttgtggctgcaaaaagcaaaagcaaaatcagattagccacaaaattagttagaaaaacagaggaaacagagttttgcaaaagttgttgtcttctcttaccttaagatctctatgataaactcctctgttatgacaataatcaacagcatcaatcaattgttggaaaagttttctagcatctgattctttcattttctgtcttccaagtctgtctgaaagctgaccacctgaaacgtattccataactatacagatctttgtcttggttccaatcacctgtgaaaaatgtaaaatttcactcagaataaaaaaaacagtaacttgatgagacagagagacatcagacatcagaggcaaaaccctttaaatgatttaattgtctttggaaaaaaaaaagagagtcaaatctgcaacaagtaaaaaaaaaaactaaaaagggaaaaaaaatcctcatcaaatacagtgaagatggaaaatggggaatcaagactctcaagagtctttttggaattaatttttggaattttttttttccttcgccctagagccgccgtcgaccaccatcccggatagcacaattggaggatgatttggccacagttataaaatccgtactctttagacgctggagcttcttcttcattctcttttgcgattgggtatgagagttttagcgtttattgtaagattaggtgaatgaaaagatgattggagatacgagagctatgattgaatgatgtgggtgtagcgatatgtgatgattggagatcgatctaggagggcaagagtttaaaagcctgaaattttggaattggaggctcttgttcatgggctatcatctctctgcgtcgtggacggcgaggacaaaggccaaaaaaacccacccttaaagaaggacttgtcaggtgtcgaacaaaagtgtcatgtgtagaagtggaaatagttaacctctg

SEQ ID NO: 507 - DNA, 535 bp, Arabidopsis thaliana landsberg
taaagacatttgaagttgatacgattaatgaccttggatagcaccgactcaatgcacgcaccttctatggagagcaataggaaacacacacgatttctcagcaaagagggcgaaggtcttaaaaaattctggaaattgctctaggtcactaaaagattcatccagcaggaacaagggatggaatttgtctaaattaactattggttttaaaacagagtgaggatggagtccccagccgttctcagcaaagttgtaaaacaagaataaattaaggtataacaaatagataaatgggacaaacttgggccacgttaatgtaagggtccaacacatataacacttcgtgggctgaggggaaaaattaatgggccaccaaaatatgggcctatcacataggaaaagtccaacttaacaattatggttttgccttgagcttgttgtcgccgcttaacggaatgatcgggttgttcactattccgatttaacatcgccggaggcaaatgatcggatatggagggcggtcaccggatatgtg

SEQ ID NO: 508 - DNA, 3732 bp, Arabidopsis thaliana landsberg
tcacataagcaatggtatttaacatttttacatgcgttgaactttatcctgaaacatctcgtggtgtcaataataatagtcataagtttggtggttactattacaggtgttgttgtttttgttgctgttgtgatattagtcagcttgtttagcgtacagcattatggaacagaccgggttggttggctttttgcgcccattgttttcctctggtttctctctatcgcaagtattggtatgtacaatatctggaaacatgatactagtgtcttgaaagctttctctccggtttatatatatcggtattttaagagaggaggtcgggatcgttggacctctcttggaggcattatgcttagtataacaggtaaggaaacaaaaatctagttcattctgctcttcaacagttcttattttcttgatcttgatatatttcgttttcttgccatgcctatgaaaatgttaggaatcgaagcactcttcgctgatctatcgcattttccggtctcagctgtgcaaatcgcttttacggtaatcgtgtttccttgccttcttttggcttatagtggacaagctgcgtacattaggaggtatccggatcatgtagctgatgcgttttaccgttccattccaggttttttcttcggttaagttcgtctttcgtatacaaatctgtgtagacaaacgttaagatttaagtacacatttgtgttttgcaggaagtgtgtattggccaatgttcattattgcaaccgctgcagcgattgtggcgagccaagctactatctcggcaacattctccttagtcaagcaagctctagcccatggttgctttccaagagttaaagtggtgcatacttcccggaaattcctcggtcagatttacgttcctgacataaattggatcctaatgatcctttgcattgctgtcaccgctggattcaagaaccagagtcagataggaaacgcttatgggactgcagttgtgatcgtcatgctcgtgacaacactgcttatgacgctgatcatgatcctagtgtggcgttgccattgggttctggttctcatattcaccgtgctctcacttgtcgtggagtgcacttatttctcggccatgcttttcaaaatcgaccaaggtggttgggtacgctcgtaatcgctgcagcttttctcctcatcatgtgggtatggcactacggaactttaaagagatatgagtttgaaatgcactgtagagtctcaatggcttggatcctcggtctgggtcctagccttgggcttgttcgggttccgggggttggcctcgtttacactgaactagctagtggagtccctcatattttttctcatttcatcacaaacctaccggccattcactcagttgtggtgttcgtatgcgtcaagaacctcccagtttacaccgtacccgaggaagagcggttcctcgttaaaaggattggtccaaaaaatttccacatgttccgttgcgtcgcaaggtaaccatctgaaatagtgttatgcggtgattactgtcgattgaacactctttgtattaactgttacatatttggtcgtccattgttaacaggtacggatacagagacttgcacaagaaagatgatgactttgaaaaacgcctctttgagagcctcttcttgtacgtacgccttgaatcgatgatggaaggaggctgttcggattccgatgactacagcatctgcggaagccagcaacagcttaaagacacgctcgggaatgggaatgagaacgagaatctggcaacgtttgatacatttgactcgatagagtcaataaccccagtgaaacgggtgagcaacacagtgacagcgtcgagccagatgagtggagtagacgagctggagttcataaacgggtgcagggacgcaggagtggtacacataatggggaacacggtggttcgagccaggagggaagcgaggttctacaagaagatagcgattgactatgtgtatgcatttcttaggaagatttgcagagaacatagtgttatctacaatgttcctcaagagagccttttgaatgttggtcagattttctatgtataatatatgtatatgtatgtgttgttatattctgtttgtatgtaatgtctatgatgttgtatagttatatcaaaattttgggtttgccaagttattaaacaaacaatggaatgactattttatcagctattaaaacaaaaaccatacatatacattagattgatcttattttattgaaagaaggtccaagtctttgtaccaaaaaaaacaatttacttacactcaatgataatgaaaatggctatacaatatgtgcttttagggtttcttgtacaaatcaacaccaatccttgaaactgtagcactcaaatccgaaagaagcagcaaggaaatattttatacacaaaccattttttacgatttacgtaccagcaataataaattgatagattacttgtggatttggtggttgacagcgtgtggttttgtgtggaccgcagaggaggacatggtgcggagacgtctggctatttccgggaacgcaggtcgaacaaatgggtcaggagcccaacactgctccatcagcattctccactccgggtcacagtagtttggcacggttggtctcaatgtattgttcactatgcctcctacaattttgtcacacgagtaacaaatggtaagagattcagacttctgcaaagcgtgaagtcagaactgaatgtgtatagggatgttatggtgcattagcccaggcttaccgattattgccccataatgcatattggcgtagggttcctcaccggtaagaatttcccataagacaattccgaaagagaacacatcaacctgtgtgtaaatgaagtatccatggcgatattacttgcaaaatcatgtaaagggcattgaaactaaataagtacaaaaaggggttatatttgtttttcatctaccattaccaacaactaatttgagagcattgcaagtcatttacttgcacaagaatgttagggactcataccttttcagaaactttgctgctgcttccactaagtagctcgggagccatccaagggagggttccccttacaccgccagtgaccaaagtgtttctttttatctttgacagaccaaaatcaccaacctgcataaagcatcatctctttgttacataaacaaaagaaaatgaaaatgttgcatcattatgttctaaaactgtcctagaaagtcaccttgcatatgggacgggcgggatcctttaagttgacaagcaagttatcacacttcaaatcgaaatgcactatgctctttgagtgcaaatattccatcccaaaagctgcgtccattgcaatgataagtcgcttacgtcgatcaaggtgcctgtaattgccaaaattgaattggtataaactagagctatcttgaggaagcaaggattccgacgagctgtattaaataattacctgttgctgagcagaacatgcctgagcgatccattgaccatgtactctgtcactgtagctaaagttcctcctggtccatctttcactacgccgtaaaatgccataacatttggatgatgaagctttgaaagaatttctgcttcatgccagaactccgaggtctgaaattttcaagcagtggttggtgaaactgaaaaccaattaaactaatgcaactttctcgaaagaaagagtcatgtttctgc

SEQ ID NO: 509 - DNA, 4591 bp, Arabidopsis thaliana landsberg
caatcttgcttccactcgatgttgccaagttttttaaatttgcttgtcaacttcctgaggtactggacatgaatgtgcttgtgacttcttccgacgcgcgttgaaccaacgtgttaacatagacctaataaatcttagcaattccacaatatgtgactatctccccttgcacaacgccttgtttaacatttcagcaatattgttagttatcaaattgaaacgctgaccagggaaatataaccttgtccaatgagccatccctatgtcatgtagatactttttgcaaaggggggtcaatggcattaatatgattataaagcgttttaaactttccactcgtaaactcatatccagcgtttttcactatctgcgtcaatcctctgttcttgaacttggcttggatattcctacataggtgaataatacattcaccatgatgtgcttgcggaaataccttcttcacccctacctttatcgattcgtgcctatatgataatatagtgagtgtgttgctgtcagctattatcctctccaactttgtaaagaacaaagtccatgcatcattgttctcgctatccaccacagcaaatgctagtggatacacttggaagtttgcatcttgaccacttgctgtgagtaaaacacccttgtattttcctttcaaatgtgtaccatccacaaccaaaacccttcttagatgcttaaaaccttgtattgaagccccaaaagctaaaaacatatataaaaacctcactttcctttcatcttcaatatcaggttctgtttctatatgtgttatcgtccccggatttgttaacttcaaaagatgcaaatattcagccaaaatgctatacgactcttcatcgctcccgccagcatctgttaaagttgattccctagctctccaacactttttgtatgatgcagaaaccctcaaatcttctagtacaaattgctgaagatccattggaacaagaccaacagaaacttcatagtattttgccttaaatacagatgcaatcacctttgatgttgctttcttcatgtactgcgttctagtctcaaccgaatatgtgtgttgaagttgcgctttcttaatttcatagtaaccaacgccattcattatagtttccaatattctccaatcacatttctcatctgagcaactaagaacaaaataattccattttgttcttgtttgcttgaaatgaaactgattctttatcgcatatatagcaaatcctatttggcaatcttctttgctcgcatacacttttccctggtatatacctttaccatcatcatcaatgtccaaatcatgtaagttacctacttcatactcgatgtcccccaacaaaggtggaatgccaaattcctcgtcatccacttcctccaactttctgacctccttccttgttccctgagagcttccaactccaccgaccatctttaccgttcataacttgttcggtcttgttcacatatatagcgtgatcagaaactccgctgccagtacagaaaactacttcatccggattggagcccacaaccttattgttagacccgtaccttacatctaaacctcctgatgccatcaactcattagcattggagccaccataattatctgttaggaaatttgaccaaaactccttatcataaccgcaaaagggcatactatcttcaggtttttccgtgactgctttaacttcctctgtatcgttatcaacgaaaaacaagttttcaacatcaatgttaaaaccttcattctcaatatcatttcgtgacgatttctgcccattgttacttcatatgtttgcttctgcttgttccaattcctccatgaattcgtcatcacgaggagtcaacaaaattgtaggagtttttgaacccacaaacgatatatcgcgaacagatatgacaccacttttaggcgtttttgaaccactttcttcctccatactgctttgacgcggtcgtttagtgctactatctcctcatgtatcaaaactctgtaaatcttcctccatttcttcaaacttctcaaacaaattaagacctctgttttctctaagtgcacttagatagtacagaaggccaacctcgcttgtaaccaaaacttgaggagtcttctcctttgttgtgaacatatctttatccggtgcaacataactcaacgaagtatttacaccatttgttccgaactctttcgaaatcgctgacttaaacgctcctagtgtcatttcctcagaaattggaacaaccctagaaaacagtttgttacagatctccagtttccactctccattcgaagaacaaacccaatctccacaaattaccatacaaagctcatccatcaatccctaaccaaacaaaacagagcattcacgttaattacctattagcgtaattgagtatcgtaaccgtgttacgatttttaaggatatattttcattgtaccttcgtcgacatcgaaataatggctgcattacaaccgtctgtaatcgtgaagtaactcctttctttgtgtgcagatctcaaccgcctgtttaggcacttagtggatacgttttcttaagataccacaacaaacctggccaagattgccggttaaccaaatgatgatattggacactcaccaattcacaagtatgaaacactcatcaattgtagatgtattttcttatttagtggacataatattgtggacatgatattgtggatacataaaacaaaatcagtataatggaaagttaaaaatcagcaaacacaaagaaaacaaaccaataaccataaaacattgtgggaaagattttaaataatcaaaaataaaacttgaattcattatttgcatgtatacattcaaagaggtgcaaagtagagctgaacattttgggagaagcatcaatttgatagaatacaaattatttggaagcctctttttcctacaacaacaacagattcatcactaaccaatataaatcatggtttcaagtttttttttttggctttgactaaaaatagtccaagaagaaaataaggtcaaaaacatgaaagatataatttatatcaaacataaccaacataacaggttaaagtacatttgataatattggacactcatcaatgaactactatgatataatcgttggacatacagaagtggacattaatagtttgcagtctattatttattggacatgatattgtggatactacctaatttgcagaaacaatttcttatattttttcataccagtttcttgtttaatggggatcaagtcaaaccactgcatgaattctactacggttgatacaatttatcattttttatgaacgcaactggaattttctttctcaattctagcccattatgatttagatgctttatgtacatagatatctttatattttttctgctaatgatgcataatgcatttgaaatggcaacattcaccttgttcatggtaaagccaccgactaaattacctgaaataatcctttaatcagctatgtcatgttattcagaaaaaacccttcatttcatgtttcagtggggaatactagtaaaaaaattgctttatgagaatcatgtgatgatataaagccgactaaaatctaggtgttgggagtacaaagcaataaagacgcacacaaaatgtctctactcgccgctctagttattctaaacctttcagatatctacaacttccatcatattaagattatccaagttggttaaaaaatcgctattgcaggtcaataccaattcaggcggagattcctaatcgacttctacgtcatctttccaatcccagtcgcggttaattcgctgcaaaatcatcgttacaaagccttggttaaggcggaggcaactcaattttaaaatatcgttccagaggtttttattggatgggagagagatcgttgcacaggaatattaaccaattcaaggatcattgacccggagattccgaattgactttccaggataattgcttggctggaaaaattaacagccatcgacatcgatattgtgagataatttcagtcggcgaaggtaactccctttctcatctgtaaatatcaactgtcgttttattagaagggaaccaaatcaaaacaaaactatgctaaccggttaagtaatggatggtttagattgaaaagaatataattgtccatttatttttcagaaacaaggaaaagtgtctcgttcctgagaagagcctcaaaaggaataaaagtgggtagaagtccctaaacatgtcaacaacccaataattaatctaaagtgccttctccatttaaagtgcctaattaggaactaattttcaacaaagtgtctaatcacgtaatattctctaaatcttattatataatatataacaaaagaaaattaggataacattgaataacctaaaattttgaaaccaaatttgaataaaaaaattgaactgtaaccaaatcgaataacctatgatttcagtttttttaaaacaagaaaaaacatactgaaatcaaaccataaaatcgtatgtccgaatgtaatgtacgtgcaaagtttgatactgaattttttaaggccgtg

SEQ ID NO: 510 - DNA, 1782 bp, Arabidopsis thaliana landsberg
tggagaggccgctaggagattcttttcccattgtccgggaaagaggttctactcatgttatttaggaggtcaatcactccttttcgggaatgatgataggaaaagttgttgtttccagacagcagttattgcggtgagtttggtaaaaacgttatcgggtcgtctcgtgagatgcccccattgaatcccctatagcgaagaatctctaccaaacttgggcttctaaagagcttatgtacagttatactctgtttcttgctttgtcatgtttattgttttatgttatgataactttttgttctctttttttatctgttatcagtcgtttgccgccggatttgcgatatacaattctctagaggaaaaagcgagagaggcaaggaaggaaatgctggccgttgaggaaaaacgaaagaccgcaattctcgtgatgatgcctttcgtactgttcgttccgaacggagatgctttaaagatgaagttgctatttattaagcctaaatcgatcagttaaagaagcatatccttgacagacgtgttgtcaacgaatctcttttcatgcaatgtcaagttgtaggtactcagaaactcttgaagcagttgatcaaaaaagttagagaaatcatgatgaagactatgtgtgagcttaaggttgacaaaaactcgatattcatatacacgtacaccgaaaccttttatactcaatcaactgtttttggcggaaaaaaactaaaaaccctttgtcaattgaaaatttctgagttaaaatctctaaaattaacctagattttgaatcaagacattctccaaacgaagttagggcaaacttacccaaattagtcgtcgccgtcgatgactcattaacatctgaaactcctcgccgcctactactcttcctcgtctccgccatttgagtttttctatgaacagttaatcgataaacccgaaaatcgtcttattgttagacactttaacacgaactcgatcgaaatttcctccacttaatcaaagactcgaactcgaatagagcctcaattggaataaggtttaagtttcgtcggaatttttctgcgtcttcgaaatgactcttcgtcggaactgttctacgtttctcgaagacagtttttgatttattttaagttttaaaattatttacttacgtttttttaaataattttaaatatttaaaattatttccgtaaccagaaaacggttcacgaaactgaaccggctccgtcagtttctcgttccagggcaaattcgtcaattttgggccgaatggctaaaacttggttggcccagcccactttgccccttcctgaaaaaaaaactcacagaggtggtcacggtgaaattttctttatatatatcatgttgcattctagcttcaaaacttggttggcccagcccactttgcctcttcttcgcgtcttagctaaaatttaatacctttggatggcgtcgaggccgggagttctgacggaatggccatggagtccccttggtggcttcaagttcttggttgccccgttggcgattgcaagcatacattcatacgtgacagctgaggaggaggagaaggacctatggagactaatgatagtggcgatgatgctgtggagaatattcacagccagatatggatcagtgtgtcgcgtcacaagacggacaagggaaggaagaagatcgtggatgtagtgtttacaaaaccttaacagtggacaagcccgttagaaaaagcgagtgaacaaagagaaatcttaggacgaccaaatcatcttc

SEQ ID NO: 511 - DNA, 2215 bp, Arabidopsis thaliana landsberg
tccaattgtgacaggaacattggcttcttgaatccagttaataggacctaaccagttagcagctgtgaagccattgacctcagctgcagacctggcaaccttagcccagttaactcttctgttagcgaatgctcctggtccacggttgttgtactcaacgtacctacatgacttgtggaaactttccccatcccaaatcttccacccttctggtctaatcaaatctcccatctcggtgctcattatcacggtggtcgagaatttcttccacggccttcccaagtatgtcgccaccgtaagtctctctggcgttagtttcctgtcgggcacgatgcggcagttttggaggacgataccaattttcatccctaagcccaattcgtttccatcggctgtgaccgtgttgtattgtcccttgcttcctttacggacaacaattagtgtgttttggatcacggttgcggatttgccgaagatgaagtctactgttcccgagaccacacagtttctgtagaactgacgaccgttgttaacgtacaatgtgtcttgataaccgtcgaatctgcagttgaagatcacggcacggtctccgttcactcggatagccgcggcttggtgtcccattggaccggcggtgttcttgaatcccatccatttcgccatgaatccttccgattcaacctctgcacaatatatatatcgaaaacatgaattatgtagagaaaaatatgtgtaacctaactactgaattagggtttgatgagacttacgaactgtggcactgagggatgtggtggttccacggctgagagcaacacttctgttgtaaaaaatgacggtctttcttgcaccatctccaaacatgaagatgttgttgttcttcttagggatgattacttgctctctgtagagaccggccttgatgtagatgatgcatcggcctcggttattctcaggacaagcatcaacggcttgttgaaccgtcttaaactgtccgcttccatccttagccaccacaaagttcgctctgaccctagcaccgcctccgcggccgcctctacggccacgtccagccttagccatgagcttcctgtcagcacctgaaacccatgttgggattccggtctcgtcaatgtcttcaagaagacgacgagcaggaccatctgggtcggccacgggagattcatcaacaacaggaggggctccgggagtggggattccgcctgtcatgttcttcaagtcgtcaaccttgttgttaatcttggccatggcgctaacgacagtgtggaagatgtcaatagcgttggtagtgagaatcttggagtttgcaatgccctcaccaatcgcctttcttaaatcatcttcttcgatatcgtcaagacaatcagtttggtaattgtaaacaccgattaaccattgtttgagctggtcgattttgctcccgatctggctaagatcttcacccatttcttcaataatggtagcgagatcctcaagagcgtacatgaaaactctcttgcagtaatcaagaacggctttgttgtttggcgagatgctcgagcccatgtttacttcggttttacccgtgaagtttgatgattgggttatagcatctctggtagcgagcatgaaagccttgatcagcttgtttgggtcatcgctctttaccggctcgagagttttgacacatgaggctttgtcggaagtcgcctcgcaaattcctcggaccgctttcatttggggagacagattagcatcaccatttttgtttatgtaggcaacgactcctatggcaactccaactattaagaggatggaggccaccgagaccacaacttttccaatcattttttatgattttttgtttttgtttttgtatatttttgtttttattttttgctctccctccggttttatttaaggtttatcggagagggaggggctttattagataaaagccaagttgttgaatgacttgggccagtatctattgtgatggatgctggaggtttatatagaagctttttggtttctaaaattaggaccgtgcatggattttgcatggagagggagagatttgcggtcgacgaatggctgagagtattcggtcaagaaagctataattaactttaaagatttgtttttgtaattgcttagttgtggattaaaattggtcacgataagataaatatggcgtacgtcccctgattagaag

SEQ ID NO: 512 - DNA, 1306 bp, Arabidopsis thaliana landsberg
cctcagctcctggaaggatttttcgggaaaatggtttccactgaacctttttgtttgactgccacaacttccggtttggttcaattcggatagaataagattctatttcggtttaaattcggtataagagtaaaattcggttcaaattcagattgatgaatgttggttcgattctgtttcactatttcgtaaacagaaagtacaattgagatttgaggaaaaaagagaggaaatttacacttttcgatcagaaaataattaaagaagtaagattttcacacaattttgtaacaaaagaagcaaacaaaatcaaattctggttcaaataaggagaaaaaaaatgatctataaaacgggattatgggctgagaggagaccacctcctttgacagagatcggagttcgagtagcgaagtttgtagcgtggaggaagacaacaataacggtaatatcgtcgtgaaagtgtcgccgaatgccacgttctatcttctccaaatcagaatacctcatctctctcttctttgctgcttcttgtaatgcagctttcactaacttccgagccacaccctgaaagaatcaacaagacaccacaaattcaacaaacaacaaaaccaattcaaaccagacaaaaaaacaagacaagaagagtgttgtgatatgtcttacattgcgtggacaagaattgacaatatcaacagcttcctggttgcttagatgctcccataaaccatccgaggcaaatataagaaactgatcttccggatgaatcttatgaactgttatagtcggttccgctctcatgatcggcttttcaaaacgttctggaaccctaaacttaggtagtagcggttcttgattaaactccgctcttttaaggtatgcgtcaccaatggatcttgagacctgtataatccctttaacacgccaaactttgtgtttcaagaccacgatattcggatcatcaggatgcaacaaacgtaactcctctctcacagattcgatacttgcattatgctctgttgataactgaacagctttcaactctttaaacggatttgcgactttccctaacacaacccgagaatctcctgcgtttgcaacatacaacaatccattacaaacaataccaaccaaacaacaagctcccacagaagcaatctgtggcttggtcttccattgctcctgcactaagccgagaaactcctcctctgatgctacaaaccctctggtgataacatcaggtgacatccctccctgttatcatgtgtacctcttgatgttataaaagagacctatcggttgcatc

SEQ ID NO: 513 - DNA, 2962 bp, Arabidopsis thaliana landsberg
gaattaactcatttccaagagaattttcacaaacacttggccgattttaaactcattcgatataatgcaactacaataaaaacagttcaaatagaaaaaaaaccataaatgaccatgacaacaaattgtggttaatgtttttgatatatagctactaaaacaggcaaaattgtttaacatccaattagctacatctttttgcagcacccaccgcatctgcaaaaaaaatgaataaaatccaaaaccgaggtgaatgctgaatcagacacataccagttgtggagagtttggttgaagacatgaattcaaacccgaaacagactaaccaaaaagcttttctacgaacttttcttaaaaagacacatttgtttagtcattaacttagaataactaacaaaattatctctaagcatttggagggtaattatgcactcaattagttgccaaattataagttgtattgaaggagaaattaggtaagaggaattcttgatttcgaaggcgttggactcgaattaccctatttctccatcaatccaacttaatttcgattctagaattcctagggtttgaagagtatgttggacggtttgtgggatcttatctctgaaagcagtgttcttattgaaaaattgggaaaatcaatcgtctctcaggtttttaccaattacatgagttgtgagttaattaaggtttaacgtatatgaccagttgtgtttatgttctgctttgtgttgtccaattattgagacctttttttttttggcaaatccaattattgagaccatgtgtaaatgttattactttttaaagcaaatatgtaggtaaataaaaataattgacttaagccaaataataaaattgacaaaaccacttaagaagactgcgtcgatttataaaatatttgttggcaattaattgaggaaaaatacagttacgcgtttcataaaaactaaataaaataggatgaagcaaaaaaaggaaaatatcactacgagatctaatgaaaagacctcacaagatttcggacgcccatattagatatgattttttacgcattttcaccaaattatgaccgttgtgggattgaggaaacctaatcttctaagtctctatatattaaagaatcatcatagccttctcgttgcacttcccattacgatcgaaagttctctgctttttatctctctctcacgatttaatcaaagtttcgtcttctctctctctttcaaaagatggctcctcgtcagaagaaacctaacaagtccgatgatgatgatggtgatttgcataggaagaaacagagctttttcaaacagagatttccaggctttaagaagaaagcctctgagctctctgttctctgcggcaactctgtcggtttcatctgttacggtcccgacaacgatctccatgtttggcctcagtctcaagatcataacccacaagccctacatgagatcgtggccaagttcaatgccttgagtgatgagaggaggaagaatcatgcatgtgatctcaatgacttccctcatcatctcaagggtatgtctcgtgaggagttaagaaagcatctccttcaccttgactctcaattacttggagtcagggaacaaaagatagaaattcttaagaagacgctcacgggttcttccgaaaaagatggtgctagggtttcagagaactcggccatctccgatcacaagttgaagatagagcctcatttgaaggatatattgtcggaagatcatctaattagggtttcagataagaagctgggttcgtgtgatgtatttgacgagttggcttacgtggtccgcgggtcaaggaatttgaacgagaatgtttccaattacgaatcaaaagatgcagcttacacgggaatggatcatcttggcactttaggcggtgattatcttcaggaggcggcagcagaactttaccaaacttacaatctagggaatttttgtgatgatcatgtttgggatctggagtttgcctcaagactaccactacttcatacatttagcgatcctctcatgaccaccaatacttgccaaacgatgagcaccgatatgatttcaatttgataacttgatgactacgttagtgaaacatgtttctttcaccttttctcggtgattgatcattttttagtatctaaacttgtatgtttgctccaacacaaatctatgtttgtaaagttttggtagtgttttcttgtttattattgattaatcaaacttttcctttctttctgttacttaaatgctgggcttgagagtagtataagaaatttgtccacaaagcacaccgcaaagttccaaaagctaaaacccttgtaccttggagtctctgcatgtgagaaaggaatatgagagttaaaaagagttttttcgtaagacaccaaatcatctacaatgacgatgagcgcaactttctatcagtgagcttgcaagctagcgttcttgacttcagaaatgtgattatgattaatagttgagttaatcttccttaccaactttaaagaaagaaaacaatcactatgtcatacattcttcaggggttaaacatgtcggatatgaaagtaaccaaaagaatcctcattgagataagcaagtaataccttccaacctgcgaaattgttcttgtctggtgattctaaacagaaagaatcttattcttgttttagctcttttgttctagactagacactagtgaaagtgaaatttcaagaaaggttacaggatcataccttttgtttggtggaaacagaggattctgaaattcctggctgtggtcacatacatacatcaatcacatatttactagtttctaatgagaaagttcagcttggattcagttcatcttctctcatctttaacgtccccactatgtccaaactttggcaatataattcaacaaagactctaacattcttatatgtgagtatgtgacggtg

SEQ ID NO: 514 - DNA, 2690 bp, Arabidopsis thaliana landsberg
tgtcggactatcgatggttttaccaattcgaagaaagaatatgtaagacttatattgttttcatccatgatagctatatctttaccaagacaaaatcataaagttgacacaatttggtttttgtgtttcttaatcaaaacagagacttagtcctaaaacttggaagaaggagtttgatgctgagaaagtaaagaaattactgcagagtcatggcggcgaacgggagaagaatgtaaccttgaacaggataggcttgaagtgctggacttgtgccttgaacagcaagatttgtaccaaacatcataggagcaaaaccagtgctaggaaagaacaacccgggaggagttgtagcagctgatggaggacttgtggcaccattaaaggtgaagtgacgggaagcagatgagctactggttgctccacatgcagtgcatccatgtgctgggggagaaacagttggtggtgaaaaagcagcgtttggccttgagcctatggtagaagcaggagcagcaggaaacggcccacctgcacaagagattagtcaatgttacagagagatataaaagagaaaaatgttatatatgtataaaagatttaacttattagttagttaattacctttgtctccttgcttgtaatcttcccaccttagttcttcatggcttttgtgtagataaggtttggaagcagatatggaaatataaatgttgcctttgctagtggggaacaccaaccagatgagttaccccttcatgtgttggcgcataaccaggattcctactaccttgttcagtggggcgactccattcatgagatgcaaaaggataggatccagtattggtattgctgctaaatgcaggggacagtgaaaaaggcgtgctcggcaacacagaagcatctccattgaaaccgaaatgttgaggacctgcaccgattgaaccaccaccaaaatttggtgggtttgatctaaataggttggaggaagatccaggcaggtaaccaacaccaaatccgggaaaagaactgttcaatggagatccaggcaggtaaccaacaccagtagtcgatgggttttgtccgagaaggttggaagaggattgtccgaaaaagttggaagaagagggtgctggcagggaaccaaaagcagagttgaacagcgaagaaccactcgacggagatggtgggacgcaaccaaatggggggaatgtggaagtgctagatgcactagcttggacaggagcttgcattggcccaaaaggtgaaaacaaactcgctggagttgcaccaaaaatttcagtactagtggaggaggaagctactggcgagataccaacatcaggtctggcaaaaccaacattgttcccaaacggtgaaccaaaagcaggcttgccacaattatgcgctggcccaaagctaggagatggggaatttcttgatgcactagcttggaagggaaaaccagttatctcgaatctaggtgttgaaccgaacatacttagaccgaaatcttgtgttggttgaccaaaagcttgggttggaccacaagctggggttggtgccgaactaactgatgtaacagcaggagcgaatccgagtagtgaagaactgtgaaatggagatgaagttgaggatgaggaagtggcagatgcactagatgatgtagcaaatctatcgaaccataatctaggtgatgaggcaggagattgcgctggaccagaactaacggatgtgatggcagcaggagcggatccgaaactgaatggtgaagaactgtgaagtggagatgaagttgaggatgtggaagtggcagacgcaccggaaccagaagtagctaggagaatgcgaggctcaccaaatgtaggagatggcgctggtcccgaactaacgggtgtgatggcagcatgagcggatccgaagctgaatggtgaagaaaaaatttgaactggagatgatgttgaggtagaaactgtagcaccagaatcatgtccaagagcttgaactggagatgatgttgaagttgaaacaacagcagcagaatcaagttcaagaggtggaactggtccatcattaaccggcactgaagtgatggatgagcaaatcacattgctctgttcggattctggagtattaagtaggtctggattgctaaactggtaacagttgctgcactctggctcagaaaaatcaatcttcattcttctttagatctttcaaactgttaaccacacaaaaataagaaaggacacaaatttgtttagaattagaggataactttaagaaactgattcgtattgcagaaactaagtaacaaaaaccctaaatccagatccgttaagaaagtaatttccactcaaatttgggggtatacatcagaaagtaacgatttttattcagtgatcagtacaaaggagtgattgcaggatcactgaatcgatagttccaaccgataacagagaacagttctcgaagccacagaggaaacagtatgtaaaagcgtggaaaagaagcaacaaaagaaccctaatgacaaagagaaaacatgatctaacccaaatcaagcaaaacaaagacaaagaagatcaagagatactgatcggtattcacaattgttgcaactattaaaatcgcccaaaatcgtcagagtttaaagaaaaatggaacctttgaacaagtaggaagcagggcgccga

SEQ ID NO: 515 - DNA, 4272 bp, Arabidopsis thaliana landsberg
  unsure (1)..(4272): unsure at all n locations
tcgtttgacggggcgcagctgtaatattaataaaattctatctgttgttcatctcgaaacttacctaaagtagagcgaaccttcacatcattgccttggcccggcaactgatcgataaacacctccgagttcgcccgggcttgataaaacaacccgggaaaaagcttactcgcgaaggtttaaaagccgagctcaacgcttgcaaaacgcgaaacctattccaaagtcgccccggaccgatgtcaatcgtcccgacgatctggggaacttgcaaaatcaaacattattccacttcggcaaacctagctgagcaatatgcaagcaatacgaaacgtacgaaacaaaaaaaaaacgatccgaaatacttaataaaataaaagccaacagaagtggcataggttcgaaacaaaagccgacagaagcggcacaaatccaaataaagccaacagaagtggctaaagaaaaacgatccaaaaacaagagcattatttagaagatgatgaagacttcactccggcaccggggcagcagccgggtcgtcaggaagaggcccgggagtcttcggcttccgctgactagcatcctcaacagaagtctcctcatctttttctgcctcggtctcagaatgacctccgctagccgatggctcgaaatgctcctccttgggaaccttctcgaaaagggtccagacgtcgaagtcatccttctcgatctcggtgatctcaaaaccctccaccttggccttgagggcatcccgatccgcaatcaaacgtggcatcagctcggccgatttgatctcgatctcctcagcctctaccagctcgtccaaattagcgacgttcgcataggcttggttgtaatggaggaatttgggattgatcttcagcttgtcatcgagatgggccttcactcgattcatgcgagcttgaaagaggtcagcaacatgaatcaaggccttactcgtctggttctccgcatacttctcacgacgggactgaagcctcttcttctcggacttcagccgatcctccagctcgaccgtttactccctctccttctctagatccagggtgcaatgatccctctcctcgcccataacggttcgctgataagccaacgtcgctacctcgctcttaaggtgcgcggcttctttgctcgccgactccaacttcttcaggagctcgtcgttcttcttcttctcagcactcagctccccacgaagatcctgcgagcccagcacttccatgttgcggaaacgacgctcgtacagataagccagacggttcatcgagccaacagcctaacaaagcgagaaaagagggaaaaagtcaaggaagcatctcggcccaaaaaaaaaaaaaaaaaaaaaaaagacatacatcgaacgtcttcctcgcaacgtcggtaaaggccttcatctcctttaattccttgacctcgggaaaaggaatcagcccgtagctgattttgcgaaaaagatccgcacaagactccgcgtcgcaggttatggggacttcacgacccgagtagtaatgctcccagcggtagtcgggctgcttcgaaacccttgcgtcaggacggatctcctcaatggcccccgaggatcgcctacgatgggggtcgttggcagaaccaggatgaacaatcaaagtgttgcatcccggtggaacaacagagcgagcagatccttcccgctgctttccctgccgagccgcggccagctccttctcccgagtctccttggagcggtcaacagacgaccccgggttcacgacactacgccctggtgacctctcgggggctcagatcgggcagtgcgtctctcttcctcagctgaatgcgcagtccgatcctccccgctcggaaggtgatccttctcctgagattccttcggcgcggatgtcttctgacgtttgtagcgagatgagtaactcccgacctcttcggtattcatcttcatcttccttttcgctaaagaagaaggaaaacgcataaggaaggtggcacggacgaataatcacctcggacgaaaacgcgtacctggagtttttctagctttcttcggcttgtgtaaggataagcgttccttctcttcgcccgtcggccaaacgtatgggccaagcgaatcaatccaacagcataacgaattgccgcgacggtcagctgagaaagtgccatctttctcctggcgacgaatccaagcaagaatatcgggatgggaaacgacaagccgcactcagtgagaaacttctcgtagacgcacatataaccctccggagtcgtccaaggacgctcatgcgtttccggaacccgagccacaaaaccacgcggcgcgttacaaaagcgaagcacggtattcatagaagaagctgacgtcttggttggtcccagatagtcagtcgagccgggcttagggccgaatacagcaggaaaaacaccaatctcatcagaaactgtcatctccttaacatcgtcctcaaaacctcccccaaccgcagatcgaggttcgaagatcgcgatctctccagaagctatggcttccttgaaatcctcatcaccaatttcctcatctgtaagctggggcttgaaagtggttgtcgccgcagcacttgtttcagcccggtcaactagaggagaagaaatgcggcgctgtagctcggccacaacagaagtttgcgaagacgactcagaggaagaatatcccgcctcgccaagatcgtcatcaagagatttggctcgaaaacggtcggctccagaacactctgaagaaccgtccggggtgcaagatcgacgatggtcggagagagaatcgatggaaatatctgacgacggcattataaattgcgagctcaaaatagagagaagggaagaagaaagtacctttggctgcaaagaatcctgagaaaactgagcgtgtttccacatttatagaggcgagagatgacctaggtaatcatcacgctgccgagtaggcgcaatgattacctacgcgccgcttcagcttccgaatccgcaagaaaccaagtgcacgaatcagaaggcacgttggatccacgcgctgcatcgaataggacgaagccacaggcgcgtcagtttcggtgatctgttaaatccgacgtccgcaaccgaacatcggattgggggacaactgttgatacatcaattgggcctcagtgatcaaccggcccatttcaaggattaacgacccagccccgaccatcactttagaactcgagccggcccaccgggccgaaacccggcctggtcaagatgtgagttcggctgcgcagaaaaggggcactctcgggaattcaccttgcgtaccctactatacggatgggtataaataaggaatagaaagtctcgggaaagaggactttttttcgacacctggagaaaggatagcacaagtcagctcgtcgggagaagtctgctcgtcaagaccagccagctcgcccagaagagccagctcgtcagaacaaccagctcgaaacgacatcgcctcgtagcaccctcaacctactacgtcctcagttcgcaacaaatctctcagcccgtcgattgcccagcttcaagttcagctcgtggattagagattgattcttcaccttccctagagactcacccgtatttgtttaattcgtgcattaacagtgaacctccagctttgctcacttatggagtccatgatgtagcagtcttttataagctgtggatgtgtaagacgatgctggaagagagtgatgaagcaaaagtgttgaaggtggaagatcgacacctttggaattatccttgcatagaaacacaatcttattttcaccctataagctcgggtggactaattctaaccagatgtaattctaatagtccgttnnnnnnnnnnnnnnnnnnnnnnnnnnnnnnnnnnnnaccagcacagggggacgaaaacgcatggaaacagcctctaggattcggatatgatcccaaaggaaacactcacaagatcattagtgtttgggagacacaagagcacgtgcttgtggccgaaatattcagcctcggagatacagacacaaaatggaggagcttagacatctcctcttccgcctccgctctacctttcggccatgtttccttctcttcttccacggtaacaattggtggatatgtttattggactgccactataagcgaggtgagtagtgtctaagtaatagctttacctcttgttttcataacaattgttaagctgtcactaagtatgatgaaagtcatgaatacaaatgtaac

SEQ ID NO: 516 - DNA, 6528 bp, Arabidopsis thaliana landsberg
ccaagagtttcacttgaaaaccaatcttatacttgtaaacaaaacggttcgaaactaatctaaaactccaaccaaaaagaatttttgatttcaaaaagaaactttaattggataaagccgtccaggcacaggttctacataccatcggataaagccgtccatgcataagtattataaccaagcataaaaaaaaaagagagaaaagcaaaaagccaccctcgggtccctagtcaagctcttttgatgggcgattgctctcggcaggaaggagcgatccggcttggtcagtaactcccgcctcgtcggctagagactcgaccgacctatgaccacccggactcagaggagcgggctcaggagctagagctttgagatcatctttcagctcggcgataaagcgattgaggttagcctcagcatcggcgaaatccttcaaccactcatcaacttgttctttctctctctccagaaccccgcctagattagctacgcatttgctcgcgcctgagataggtaaatgaattgggcattgacctcatcaaggagcgacactttgtgctcggcagcttttaacttggcggtgaaggcttccgaaacctcccacctcgtcgtctgaatggcccgagtcacctcgctatcacgaagtcctctctcctcagacaacatccccctgagaaggacaatctcagaatccgccttgagattctgctcggccatattaatggcgttttctttgtttacgaaggccatccgctcctaaaccctccctctccaaattcgccgcggcagctttggaaagcgcttcattcttctcccgctcggcggcttgaatccgagactccgcctcagctaacttgccaaccgcctccatattactctgcatagccaaatcatatgaatgtaccatccggttcatcaaagcaacggcctgaaaaaggaaaagttagatttacaatggcaacaccaaaacgagttacatgtaacaaagctgatacccgcagaaaatgagatgccgcctcggcatacttccgagattcaagaagagtatctggaggaggaagcaaggggccaacacatcccccgagcagattggccgaggcagtacgatcttcgaagatcgggagtattttctccgcctcggagccagatgtcttctttttcttcttcttcttctttgacgattcatcgtcaacccgaacgcgcttacccgccactttgtcacttacaggtaacaccacaaccgcctcgggcgcaccaatagacggcttagttccctgagcctcagcgggtgccgcgtcaaccggcacggcagtatcgggaataatgttcccatctcgggacgcatcaggagcagcccgcggcaagatcaaccccgcatcaaccggcgcggcagcatcgggaataacattcccatcttgggtcgcctcaggatcggcccgcggcgagatcaatcccgcattaacaaggcgcctctcctccgccaatcgcctctccttatcctctttcttcttggcgtagacctcccgcaaagtaagcttcgtcgattgcatatctacgaaaaattgagtgcgatggtcggaagactcagagctagtaggacaagaaacgccgtgaagaagacgaagcgcacgttcaactcgctcccgagagaaatgcttcagctaatcgcactttcgagccgataacgcgtgaaaagccgaaagaaagtcgtctggaatcggctcgaggaacttgagagtgcgttctgcaaaaggaaaactgcaattagagaacgaaactaacatcgcatcgggtactaatgaatttctaactacaactacccaaaattccccatctcgtcagaacagtcccgaggagatcttcatgaacaacgtcttcaatggctacaaagaagaagtgatcggtatatggctcgtctttgctcgggaacccatcgataattttctttcccttagcgggggaaatgtagtaccggtccacttcagatttttggcactcgccggatctcgagaaaatttttcagatgagccagcgttatctccgtttctgactcgtaacttttaataccgcggaccgagcatctcgatcatgacccgaggacaacttaatcacggctcggaaaggtctcgggttagacgaggaaaaacttcaaaagacttagccgatgtaagttcaaaacacttcacctccgaaaaccccggaagagataatcttcgaagatatcaccggatacagaaatcccagaatcctcggaagatataaacaatctccttcaacaagataaagataaagaggaatctttcgagaatatcgcgagaggtgatagtctcggaccctataaaagcaccccagagaacaaacaaaaggggacgtacaaaaaatgctctaaacttcaggctatcaaaaacgctctgactttgaaggcaaaaacacctatttctcatattctaacacacttgtacgataaaatcattattttctcattaatacaatcaagaacaccgtccgcggtaattgagaattctgttgttctttgagaacctcacaaagatccattctttgaagatcggattaaccaaccaaagttagcttcaccacctccatggggatggtcgacagggttcataactactcctcttactacaggacgtttactgtaacgcccgcgatcctcaataggatcgttggctaggacttggtccgggagaagaaggtggagtctcggacaagtgagaaagagctggctataagctcggacaaaggggaaatcatgcaggctaagctaggatcgtaaagaaatcacttgggtcagctcgcccaaagctcaagctcagctggaaggagtgacagttactcaggtcgagtgacagtccagctcgggcagctggacgagtgacggttgagctcgaggtagctggacgagtgatggacgagctcaaggcagctggacgagtgacggttgagctcgaggtagctggacgagtgacggacgagctcgaggtagctggacgagtgacggacgaactgggcggttatgggcgaagagatacaactctctggaaaggtgcaactcttcggaagggcgcaactcttcggaaaggtgcaactcttcggaaaggtgcaaggaacggatgtgttgattcgggaagcatccattcgccccctatataaggaagggcgcccaggaccattccactcaccacaacacaccgaaaacacaagaaaactcaccattaaaactctctccctcttgggagaataaatagtcttaggattcggtagccgggctgtggccggcaataaagaaggagggtcggatcgacctaacctcgagaaggaaggtaagggatcctagactttgagtctaagggttctaggatgtgagttagtagtcggatccttgaaaggaccgactagagggctgagtagtatccgggtcatgtgcatcctacacaagactcggtccgggtagggatcggctgaggcggggacgcggctcggcggaggaccggcgggtcttaactgacctgccgagaatcggccggactgatgcgcgatcttcccctctctgaattctctccacggatccgagtagtgtatggcatatagagcattgcatggacttgcatatgattaagtaaataagattacttatggctctatgactttcaggaacgaatggtgatcgtgggaaggacttggcttaggcgcgagagactcaaggccgggaagacgggtggtgatagttcggatagtctagggatcgattatatgacttgtaatagcttatatgcaaactcataggttgtatcgaatcctttgcttaattaataaaatatccgattgtttgtttactctattcgtctcatatattgaatctcggaatcatatgaaacggtttagactaggaaagaacctcataaacggttagggccgagtcacttagtggcttgggtcgagagaactcgcccggactttaggcagtccggatcggggcctttcaagttggtatcagagcatgcttggttctaggactaggtgttgggttaaggggtatcaccactcgtcggcttgagaatctcgcggtagttgttctttactcttttgcgatttaactaggagttatgtggattaactttagaggtttcgcagatgggtaagagcagcaaaacgggaaagagtaagaaggacaaaggcattgtcgaggagactttggttgaggaggaaacgatgatcaacgagaaaaccagagtcgggacaatgttcgatgggacagactcggccggacctgaggccgggaagaagtccataaatgaggaagcaccggagagtagtggtgcaagggacagcacggataaccggaacaatactccaacggcccaagaacagtgggatttgatgaaaggaatgatggcgcaactagccacattgaccaaggccgttgtagcagatccggtggtcctaaaaggggataaccaaaaggacgatgactcggaagttgtggaagtgaatccacaaccgaattatgggcggaaaaggggagactatctgagtcttctcgaacatgtctcaaggctgggcacgagacacttcatgggcagtacggacccgattgtggccgatgagtggaggagtagactcaagaggaacttcaagtctacccgctgccctgaggattaccaaagggacattgcggtccatttccttgaaggagacgcccataattggtggttaaccgtcgagaaacgcagaggggacgaggtccggtcctttgcggatttcgaagacgagtttaacaagaagtactttccaccggaggcttgggataggcttgaatgtgcgtacctcgacctagttcaagggaaccgcacggtgcgtgaatatgatgaggaatttaaccgcctaaggcgttatgttggacgtgaacttgaggaggaacaagctcaagtgcgccgatttatccgtggactaaggatagagatccgcaaccattgtttggtccggacattcaactcggtttccgaattggttgaaagggaagcaatgattgaggaagggatcgaggaggagaggtacttgaaccgggagaaagcaccgatccagaacaatcaatccaccaaacccgcggataagaaaaggaaatttgacaaggtggataacaccaagtccgatgctaagactggggaatgcatgacctgtggtaagagccacagcggaacttgctggaaggccataggtgcatgtggccggtgtggaagcaaggaccatacgatccaaagttgcccgagaatggaaccaggacagtccaaggttctcggtgaagagactggacatctaaagcgagagtgccctaagttgactgcggagaagcaggccggacaaagggacaatcgagggggaaatggactgccgcctcccccaaagcggcaagccgtggcaccgcgagtttatgagttgtcgaaggaagctaacgatgccggaaacttcagggcgatcactggtacgttctcacaactccctattcatttttcaataactgcatttgcattgcatcatgcatatcggaaaggggaggtactcaacattctaagggaatgtgtagggaccttgagagtaggtgacgtagtaacgcacactctatttgattctggggctacacattgttttgttagtccggaattggttgaaacaggtgggttcaggaaagaaccaaacaccgattatggaatggtacgagcggccgacggacgggccatgtatccatttggacttgttcggggcatctcggttgtagtgaacggtgtcaatatgcccgcggacctaatcatcgtcccattgaagaaacgcgatgttattttagggatggactggttgggaaagtacaaggctcacattgattatcaccgaggacgaatacaattcgagagggaggaaggtatgttgaaattcgaaggaataagaacaaccttgggaagtttagtaatctcggtaatccaggctgaaagaatgcttgagaaaggatgtgaggcatatttagccacgatcacaaccaaggaagtaggggcgagtgcagagttgaaagacattccaaggagtctccgtggatccagagaaaattaagtccataaaggactggcctcggccaaagaatgcgaccgagattaggagttttctgggtttggccaggtactatcggagatttgtgaaagggtttgctagcatggctcaacccatgactagacttaccggcaaggacactaagtttcaatggtcggatgagtgcaagaagagcttcaccgacttgaagttgatgttaacaagtgctccggtgctaaccttgctggaagcggataagccatacatggtgtagacggacgcatcaataacgggattaggatgtgtccttatgcaaaagggtcagtgtgatcgcttatgcctcactacaattgcggaagcacgagggcaattaccctacgcataatttggaaatggctgtcgtagtgttcgtcttaaagattggcgatctta

SEQ ID NO: 517 - DNA, 2279 bp, Arabidopsis thaliana landsberg
cgcttatcatatatattaggtttttgtgaatgtttagtttgtaaagttcatatttgaattgtttggttatgtttttatatctaatatcgatcaaattaaagtatcaacgtataagaaaatatataaacagaccaaaactttaaaatttcaaaatggaaaaatccagagttggtaatacgtaggtaattggttgcaaaaagcgactgttttctaatatcgtcgcaaataagttgcgaagatcgattgctttgtgcaaaaagcgagtggtggtagttacgtaggtaattagttgcaaatatgcgactgttttctagtttcgtcgcaaataagttgcaaagatcgactgttttgagacgtttaggaaatttttacaaataaaaaaggattcaaatggaatcgaatcgcgagggtgtaagttggttggctagtatgttagcaactgagctggttacaaatttgattaacaattgtgaagataattacttaaaaagacactgaaaattacattaaaataaaagttttatttatataaattttacaaatacacaaaaaaattatatctattctaattattcagattcttcatcttcttcttctttatcttcatccttggatgttgattcattacagtgaaattcatctccttcttgataacactgtattttactcattttagacatgtatttatcatcatttagcttagtgaccactcattgtatcatatcattttgcatcacatttaacttattttgcacacttaggcatttaggatcatcttgcatacatattgcatgttttggtgtgttttcaggtgcagaaggagcttacaaggaatctactcgaccctctactctatcaaaccaggagggaagcagcaaagcaattcactcgattcctttactcgatccaggcagccacaaaggaggcagcagacacccctcgaccctcctactcgatcctctactcgacctctttactcgatcaagggcgacctactctacaagacttgttgatcgttcaaagcgtcttcggatcttcttcattctccactggaccagacatcttagcatacagataggagaggaagaagcatctactcgaccaattgatcacttggagcatggaggcaaaaggcgcagactttgctccaccctctttactcgatccccaagatcgagcatccatccaaaccgcctcaagtctcttgttttctagtgaatctagggtttttgagactttagtataaataggtcactttgggatttgtccaaaggaccaagtttttatctcttagtttttctttgtgttcttgaatcttaaaaccttaattactcttaatatatttcgtttttgcatttagttctttgagcaaagttgtttatcttgtttagctctacattttgatatgatttgagtaatttttgggtttgtgttcttgattatgttgtctgagtagtgattagggttcttgaggatggtttagattagggtaatctctaggttagtcagtgataacactgtatttactcattttatgcatgtatttatcatcatttagcttagtgatcactcatttatcatatcattttgcatcacatttagcttattttgcacacttaggcatttaggatcatcttgcatacatattgcatgttttggtgtgtttgcaggtgcagaaggagcttacaaggcatctactcgaccccctactctatcaaaactggagggaagcagcagagcaattcactcgacccctttactcgatccacgccacagatcaatctactcgccccttttactcgatcctaaactcgaccagttactcgatcgagggcaacctactctacaagacttgttgatcgttcaaagcgtcttcggatccttctcattccacactcaaccagacatctgagcatacaaataggagaggaagaagcatctactcgaccaattgatcactcgtagcatggaggcaaatgcgcagactttgcagcaccctctttactcgatccccaagatcgaacatccatccaaaccgcctcaagcctcttgtcttctagtgaatccagggtttttgagattttagtataaataggttctttggggtttgtccaaaggaccaagcttttattctgtagtttttctttgtgttttagaatcttgaaaccttaactactcttaatctatttcgttttttcatttagttctttgagcaaagttgtttataatgttaaaatctacatttttatatgatttctgtaattttttgggtctgtgtt

SEQ ID NO: 518 - DNA, 1422 bp, Arabidopsis thaliana landsberg
cctatcacgtcacttacgcaagaactctttccattatttccacactttccaggttaaagggtgtgtagtgttgcacccaaacttcttcatggcttcaacctctgttgtgttatcaaccacaaaaaaaaaatgttaagactatgaaaatatatatacaaaacagttgataacacaaaataaggaaacaagttaccttcttcaacatggcttagaattagaaacatgacaccacaagaaaccataaacaaaactccatatttcatgacttatagtctaaacaaatattctctttgagcttcaaaaatttgtggtttgtctttagtctcatagaaagtatattaagttttctttgccaacaatcttcataattaatatactcaacaagataaaaatatatgtggctattaaataaaaataaagaatagaaaggtggagccaagtcaacgagatcgttggtatcggtcatatttaaaacaaatcttcagcttttctttgattgtttcaataatttcttatgaacatcagaacgtgtacatatacttttcctcttcataaggccaaatccctgcttctaactaaaaacaacattaatctttcttttgttttgttaaagaaacaatattaatacataaataaataaaacacaagtgtgcaagagcgtcgacgtgtatctaagagatcacgagatttaaaaacaaaaaaaagctgctaagttagcttacataacatcatcatctcaatttctacatattcctttccgtaattaatgttagtctcttgtttactcctgtcgcaatgtgtctcttctcctatctccaaagctttcaactatccctgtctatatattcccatcatgtatataatgaatccaatatttcaatattcttttctaaattcttcgatcttatagtcgtagatgtcttccttgatagtaaaaagtctcgggtccattgtctctatcattgcaagaattttcttctttcaacgtagccgtcctgtgtctaatccaagaaccgccgcacatataagctacttcaggatgtctaggaaacgtccactctctttgcaggttattttttctttctctaaatatccttgctcattctcctcaccgcaacggaaatcataggcatgaacatttggttttcgggtcggtcggtttcgtttgaatcctttgatttggtttcgactagacatgagtgttgccgaattggggccaaaatataaatttgagttgagtactcattgtagaatggtttataaatattttgggtatggttatgatatggtttagatcttcatccctatattcaaataattgtggttacatagatgcattttaaaaaacatatttaattgaaagtataagaagatgcattttagacatctctcacttttctaaattttgcttctgtagaccgc

SEQ ID NO: 519 - DNA, 1943 bp, Arabidopsis thaliana landsberg
aatcatcaatgagcacaaatatgtacttactcatgcaactgtagaatgagagataggtccgcagagatccccatggattagctccaatatagacgaggctcgatatgaagtagcttgagcaaatgtctgtcttgtttgttttccaagaagacatgactcacaagtttcttattctattggtgctctcgtcattcctattaccagctcgttcttcaccatggctttaatagtctcatagctaatgtgtcctaaacgagcgtgccactcacacctttcatttgttgtcacagctcgtaaacacttgatgacagaaactcccacttctagagtcaccttgtacagtctgttcttggatctttttgctcttataagcagaacaccttcacggtcatgtaaggtgaggtaatcatctttcatcacaacagcacagcttgcttcagtagcttgtcctaagctaactatattactcttaagatcaggtatgtaatagacgttagctagaattttcttttctccggttttgctaacaaagataattgagccctttccttttatgtcaacacaagaatcatcaccaaaacgtactttctcggtgatctcctcatcaagtttgcaaaaccatttagaactcccgtcatatgattactaacatcattatctaaatgccagatcttgtccgagcttgcttcataaactttaggatccacgtttttctcattgagatacaccacctcgtgtaccatgagtgaaccaatctcgtcatcatcttcattcacattctcttgtgactctttgatgagtttgagtagtcgatccggacaatctgaggcatagtgacctgttttatcacaacggtagcagattaccttagatttatctctttgttgatatccggatgttccacgtcctcttcctctgctacgtcctcgacctctgctactttctcgacctctgcctctacctccgtcatactgagaatccatgttagcatacattagtttcccttgatcttcttacgcatcatcatcatcatcatcatcacatacacgatcttcataggtttttattctgcctacaatgtcttcaaacgttgtattcttgagatctagaacctgttcaagagctacaacgatgtgaatgtatttctttctcggcaaacttttaagaaacttcttgacaatctttggttctttgatgtcttctcccaatgatgctgatttagtttgtatctctgaaagttttcgagcaaattcatcaatcgtctcgggtgtccttcatcttcaatctatcaaactcagccataagagtttgtaactttgcctccttaacacgtgactgtatcttgtcccatacttctttggcagtttttagctttccaacttgtagcgttaatgactccagaatagattggaagagaagtgctcgtgataagtcgtttttctcttcgtcctctgttccaggatcaatcgattgccaaactttgtgtactcgaagtgcagcctccatcctcatgcaccaaaccgtgtagttggcgttgttcaacatagggcattgaattgatgtcgaacctccaccttatttagatttatttgctgcaactatctcactcatgttttgtgtttttagatatcaaacctggattaactctgataccaaatctagttttgaagaagattaagaactcaagatttaagaataactctcttattaagcttaggaaaataactcaaaacctaaacaatctctagatcttaatctcacaaaactcatatggtcaaccacaccttaggactcatatatatagagattaataaacctaatcatgctaggattaatattagataactcctaacttatatcttaagataactcaaaaagatttaacataatcctttgtattatttaatgacttattcgtcaagtcgtttcaggcttatccaaca

SEQ ID NO: 520 - DNA, 3765 bp, Arabidopsis thaliana landsberg
cccgctgggaaaaattataaggccaccatgatgttaaaaagagagcaggagagagaagaacaatataggagagacagtagacagagagagattcactacaaaaaaatgtccattgatagcaagacgtcatagcacggttgactgaactgctattgaagattagatgtatttttagtattcatatgatagcatttaaatgacgctaataaacattgattaaaataatattatttatcctacgctatggatatgttttcattaagcgggaaagtaaaatagtttttttccgcctaacacttaacaaaatgatgaatttccccaatttgtcgattagagttattattttctcaaatttctcaagaaccttaagaactagccatctctgctcaacctctctcaatccgacaattcgtcgccgattaatcttgataataggcttttagtcaattaatcctaaagcactatcatgtcgttgtagtatttcaggttgtcaatccaaatgggtgtgatgctagcaatcaagatgctatcagagttcacagagtcaagccaagcaataacaggttttggggtgttttagcagtcctaagtgaacatgcaggaaacataatttcaaacagaacagtaaaaacactcgaccaacacagcttgttgccaagcactgggtgtggtcgagtgacaggtcgagtaatagacaaaaaatgtaacacggatactcgacttcacagtctgttaccaaacaactaggtggttgagtatcaggtcgagtaacaggagagaaatgcaaatactaagcaacaggtaacaagatgcattaaacaaagaaatcaattagataaagaattcctgaggatggggtaattgagtagtttcgcttcctcagtttacaggtgattgacatgctcaatatattatccctagacaacaagttcgataaccaaatataagtgccaccgcaacagagactctcaagttaaaccagtcccaaactcaatcaccattgacaacagctaacctaacatgcattacaaatcaacaagttaaagccaaaacgctcccggcaaccaataccttggtacagagccacgaatctctggaattagtggttcacacatttcatcgaacaccttttgggcgcggaaatgtctaggctcaaattccagttgattagaaagcgataggcattaagaacaactaatccagaagggatctataaatcaaactcaaccacctagcatactgagaattctaaactactttaacccatccgcagaaacctagtcactactcaaacatcattgcaaagaacttaaacgatgaatagaatgaaaacatgatagcaacagagtaatagcaagatgataacaagatgaacaacttagtaaacgaaattgaaaagcaaatactgaatactgaatagattaagagaaatctggattacaaaatgtcaagaacacagtgtatgcggaataaaacttaggtcacaaaaatgtaaaatacatgctacttatagcaaaatattctgaaaccctaatactcaaaacgacgaagtattgagacggattaagaacggtactcgacccaggtagtcgagtgataagctggagtgttcttctcttccttgtgctcgagtgtctggttgagtgcggaatggagaaaacagtgaagctggcagtcgagtatgaagtcgagtatgaagtcgagtgatggagatggtggtactcggcttggtggtagagtgatcggttgagtgtgtgatgatggtgggactcggccatgtaatcaagtgagtgatcgagtgggtgtgatggaggtactcgaccaaggggtcgagtggtgtgatcgagtgatggtcaggtggtgggggtgaagacactcgaccaggggttcgagtgacgtgatcgagtatctctcgcggtgatactcggccagggggtcgagtgatgaggtgaaattgtgaagtcccctactcgaccagggggtcgagtggtctgttgagttcgtgaagcgtctactcgacctgggggtcgagtggtttgacatgatcaggtacgcttctcccaattagctcgccaaaagctccaaatcacctgaaaacaacacaaatatgcaacatgcatgcaaaactatcctaaacacaaatgatcagaaatggtataaaaagtgatgatatgatgctaaagtgatgacaaatggatgctcaaaacatgcaaaatacacacttatcaagtcccctaaacttagtctttgcttgccctcaagcaaacaattaagaacaagctggaggtgaagtttgaaagcgggaactccaagccaaagcaccagataaaccagatgaaatcaatgtctaagttgatattctaagctgcgaggtgatcaaattctactcaaaaactttagtcatgctcttttatgatccaaacctacactcaattgtgattgctcgagtaattacccgaaatatttaaccgaagtagaatattcagcctgattatcttccgaaccattcccactaaactcctggtacacctgagcttctccaatatcatcacagaaattaacaaccctctgatctctcctgagtagctgctcaaccttagctgacaattcagcaagctgtttcgattctcctcctccacctctattggacctgtcatagtcaacattgtgtttgttgttgctaactgccagattctcaattagctctgtagcttcagtctcagtcttggtcatgaagtcccattgctagtagtgtctaatgccatcttgtaggccttgtcaactccccgatagaaagtgttgatcaacgtagcctgtggaaaaccatgatgaggacagtccctgtagtagtccttaaacctctcccaagattcatggaatgattttgtgcctcctttttggaagctactgatcttattcctcaggagagctgtcctggactgtgtgaaatactgccccaaaaatcaggtgcaggcctagcattcaacgcagctgcacgagcagctgcacaggcagagttggcagcagctgcattgggagcgtttccaccattagcaggaagatttccatcaggaggtggtggatcctgaaacactccatgatgttctccttcaaatttgagtccatcatcatcaacaacattagccatctcagcttctctctgaaccgctaactgcttccttttcttgttctctctttcaaaccttccgatatcctcgtggtagtttactagatgtgatgagcctttgctacggttcatacacctgaaaacaccagagaaaatacgaaaatgaatatcaataacagtaaataaaaaaaatgctttagactagaaactaatcctaaatccttaggtaacgtaattggtccccggcaacggcaccaacttgattgctcgagtaattacccgaaatatctaaccgaagtagaatattcgaggtcgattcacaaggaccaaagatactctaaagatttccgagactcgttcttagctaaagcggaaagattgttttgtttgagttttcaaattgtaaagtaaaaatgcaaataaattaaacgatttaactttcaagatttaaagacattaggcattaggatattttagagaacaataaacaatggaaacatgagacagagaattcaacaattacgagccgttcttgaacatgaacacaacttagactaattccctttcaagacattaatcactaaatttgactactcgtttactaaacttttgcatgtaatttcctagtcaaattcgca

SEQ ID NO: 521 - DNA, 1466 bp, Arabidopsis thaliana landsberg
cccttttatttttaagacgagaaacaatcaatcaccgaacggaacttgttatcatcttctttctccattctaagactactttgcaattcgaacgagtcagatcattcacatggcgtggaaccctataacccaagtggcacacaagtatagtaaccaaaacacaagtgtcgaaagcacattgtcaccaagactaaaaccagatgcataagcttgtacagtggctaagttattacagcttacggaaaattcgggctattctgtcagcccatagtaaagaaaccttacggtcacaaattttagacgttgaattggtcaacccaaaaagctttgggcttatataaacgaaacacagagtccattagatgggtgaaatggcctaatttcttattatagcggaggaaggcccatatagaaaagaggcccaaacttcaaaggggaataagaaaatgtggatgagcagcgtagtcaacgaaggtgtagagaggaacaagtgtgtatcttccataatcaactaaaccgtcgtagtttaatttagtcgatctttgttttagatcttacacttttttggcagtttgaaaccaaaactcacttactagagctcctaaatagtgtgttctgacataacaaatccttgattaccttaagcagcataaataagtcaattaattcatgtgaattcttaagaaacattttccatttttaactaatatggatattaacacgtacgtattctttaaactcaaagcaataatctgtaggccacctttgaaaaaacttcaggaaatacatgtaattatcattacatatatgtcatgtgtgatgagaggattaagaggaagtcgttatcaccatcatatggataagtgacttgtctttcaaaacgtaatttacttttactctcatctctcgtatacggtatactaataatttttactcactgtttcaaacgttttttttaatcggtttttaaactcgaaacatatactatttctgctctcgtattaggtttttatatgagctcacattctcgttttctggcttgtgtgtcttacgttcgtttcattgctgcttttatgccaaaatcctttactttagtgacgaaagaatcttctctaatgaggtttgaagagaattaaaaagttatgataatggaaactggttttccctattgatttgatagctgaaattgaaggcatcatcaacctttgtacagtattagtcattcccataggtacaaaaagaaaggaagacacataggtctgtctagctatctaagttttaagaagactccaatttcgaaacatagactcaaacgaacaaacaaacaaacaaagaccagaacatgccaaaagtcattaaataacatcatccaatgttagaggagctctagctgttaacacctttgccttttctttctccagcatagctttcctatctaagcacttctgcttaaattccttcaattc

SEQ ID NO: 522 - DNA, 14315 bp, Arabidopsis thaliana landsberg
  unsure (1)..(14315): unsure at all n locations
gtcatcagatggatcaaggagctggtggtctggatgttatgcagcggagcctaaacagaacatggattgccaaatcagacgtgaaggcacccataacagtaacttctttttctcttactgttgttcaagctggtcttagccctctttctgagatccctaaggtggcgccttctatttcaaaggtctccgatggaggtctgactagtctgtgtgtcgaagacattcggtccacaagggatcagctaactgatcctccttttcctcctcctcctggttggggtgcgatgtccaataaggagaagaagaagcaattaaaaatgtggcacaaccggcaacgctcattacaagagagagttcttgtgtctaagcttgagactgtgactgactctgggatcccccgccagtcctctctttccattgattgttgttcccattatcatcttttggggttacttatggcgatctttttttggaatgttagaggccttaatagccgccctcgccaatggatagtaagaagctggattgcttcgaataatctcctggtacgttattttttggaaactcacgtcgctcaggacaatgctatttctgttttggctgctactctatcaggttggaggatggattctaattattgttgttcatagctgggacggatctggatagtttgggatccgtcagtttctgttttggttttcagcaggactgatcagttaatggtctgctcgattaaaattcctgatattgctcagtcgtttgctgttacttttgtttatggaaggaataatgaggctgagagacggtctctttgggatgatactaccaggttgtctgcttcctctcctctttgtaattctccatggcttcttgttggagactttaaccaaattgcttctatcacagagcattactctctcatgccgtctaatatttccttacgaggcttggaggacctgcaagcttatatgagagacagtgaccttgtggatctaccgtgtaggggtgtgctgtacacttggtctaatcaccagcaagataatccaattctaaggaagcttgatagagccattgttaatggttgttggcttgctaccttcccaacggcgnnnnnnnnnnnnnnnnnnnnnnnnnnnnnnnnnnnnnnnnnnnntatggtcattctcaataactctccgcctccttcaaaaaagaaaagctttaagtacttttctttcttatcgaggcatccagattttatctcttctattttggctgcgtggcagaaggagaaagctgtgggttctttcatgttttccttaggagaactcttaaaagaggctaaaaggcctgtagagatctgaatagacgtggcttcagttatattcagcagagaacaaaagaaagcttgtcttccctcgaggatattcaagctcaattgatgtccaatccgtctgacttcttattcagggctgaacatgttgcccgcaaaaattggaatttcttcgcttcttctctggaatccttttacaaacagaagtccagaatcaaatggttaaaggaaggtgatgctaacacaagatttttccacagagtggtgcttgctcagtaggctcagaatcttattaagtttctcagaagggataatagggatcgtgtggttaatgttgatcagatcaaaggcatgattgttgagtactattctaatcttttgggatccgaagatagtaccaccagacctaactcgcttgatagaattcaggagttactgataagtgtgtattttgcatgttttgagcatatatttgtcatcactttagcatcatatcatcactgttttataccatttctcatcatttgtcatcactttacatgtttaggataggtttgcatgcatgttgcatatttgtgttgatttcaggtgatttggagttgttgacgagctaattggaagaagcggacctgatcatgacaaatcactcgacccagaggtcgagtaggagcttcaagatttcaagagaccactcgacccccatgtcgagtagaagacatcaccacattacctcaccactcgaccccgaggtcgagcgtctacatccccaccacctgaccatcactcgatcacatcactcgaccctgaggtcgagtgtcttcacctccattacctgatcatcactcgaccacatcactctacctggaagtcgagtatcaccatcaccaccactcgactacatactggatggtaagcttcagagtattcttcattccgcactcaaccagacactcgagcataaggaagaaaagaagaccccagctattcactcgacctcccactcgatcacctgggtcgagtacagttcttaatccgtcccaatactgtgtcgttttaagtattagggttttcgaatatttggctataagtagcatgtcttcgtattttcccaaacaagtttttatctagttttattctggagacactgtgttctagacctttgtaatccggatttctctttatctattcagtattcagtatttgttcttgatttcgtttactgctgttcatctgttatcatcctgttgttacactgttgttgtcatgttttcattttattcatcgtttatgctttctgctatgatgtctgagtagtgactaggtttctgaggatgggttagagtagtttagaattctcagtatgctaggtggttgagtttgatttatagaatttgagcccagacatttctccacccaaaagatgttcgatgaaatgtctgaaccactaattccagagatttgtggctctataccaaggtattggttgcagggagcgttttggctttaacttgttgattcgtaatgcctgttaggttagctctcgtcaatggtgattgagtctaggactggtttaacttgagggtctctgttgcggtggcacttagatttggttatcgaacttgttgtctagagataatttattgagcatatcaattacttgtaaactgaggaaacgaaactactcaattaccccatcctcgggaattctttacctaattgattactttgtttgctttgctgttgtttactgcatcttgttacatgttgcttcgtttttacatttctctcctgttactcgacttgatactcgaccacccagttgtctggcaataaactgtgcagtcgagtatccttgttacattttctgtctgttactcgacctgtcactcgaccacacccggtgcttggcagcaagctgtgttggtcgagtgttttactgtttctgcttgaatttctgtttcatgcatgttcacttaggactactagaaactctaaaacctgttattgcttggcttgactatgtgaactctgattgcatcttgattgttagcatcacactcatttggattttctacctaaaatactacaacgacatgatactgctttaggtttaattgactaaaaacctattatcacctttgaggtcacaccaccaccgccacctcccatccctacaaatgatcaaatcatgggagacctcagagatgctactctccaatatgtgagatgtgcagatccaactgaaagtgcagcaagaaaacgcagaggtatccaaggggaagagaaaggtctcatggctgaaacagcctcaattatgttggaagctgttattgtctcaaaccaaacttaccttacttcagaagaaacagacgcccaacaaactccctcgctgcacaagtactctatgctgaaccaagatctgccaattcatccggctgaactgaccacaatcattgctgctcctgcaaaaaaaaaaaaaggagacatcccccctaaataaatcccagaataaaactttattaccccaattaggatcaaattcaagcaaaagaaacaaaggaataattcaaagttcccccaaaagaaaatccacacctgagaagaataattcaaattctcaagagcctgcttctactagcagaaaacctaaatcaaagtaaaagttgtatcttcaggcgggtagctcctttccctcctcaagtcagcctaatccaagagtgaatcttattcctccaagagtgaaagagaaggtggaatttcaacatccaccaactcagattccttaaaagtaccgaggtggaactattgtgggttggggaaccccacaacaggctagcgtctgcgtgagattcactccaaaatctcaccagaaatcttgttcctcatggagagaaagaatcgtgatgacttggtccttacctctctaacttgaatgaattaccattcacaccatcttgtttccccacacagcccaggagtaggtggactggacctcttttggaagcaagaagtggaagtgactattctgacttcctccacaaatttcattgacacacatgttaaagctgcgaattattttttctttgcctctttaatctatggtgaacagatagagcaaagagaagagcaatttgggagaaacttactattgtagggaaagacacaagtgatccctggtactttacaggagacatctcatttgaaaagcaaggaggctgtaacgctcgcgatcctcaataggatcgttggctgggacttggtccgaggaaaaaaggtggagtctcggacaagttgggaaggagctggccataagctcggacaaagggatatcatgcagactaagctaggatcgtaagagaatcagcagggtcagctcatccgaagctcaagctcagctggaatgagtgaaggttacttgagtcaagtgatagtccagttcgggcagctagatgagtgacaattgagcacgaggcagctggtcgactgtccgaccaactgggcggttatccggacggttatttaggcggttatggtcgaacggttgcttgcccaaagggtggataagggcgagcagttacgggcgaaaagatgcaactcttcggaaaggtgcaactcttcgaaaaggtgcaaggaacagatttgttgattcggaaagcatctattcgtcccctatttaaggaagggcgcccaagatcatttgggataccacaacacacaaaaaaacaccggaaactcaccaataaactctcgccctctcgggagaataaatagtcggaggttcggtagccggactgtggccggcaaggaagaagaagcgtcggatcgaccgaacaacgtgaaggaaggtaagggaatcctagacctcgagtctaaggattctaggatgcgttatagatgagtcgggagtccttgaaaggaacgactagtgggctaggtagaatcaggtcatgtgcatcctacacaagactcggtcctggcaagggatcggctaaggcggggacgcggctcggcggaggaccggcgggtcttaactgacctgccgagaatcggccggactgatgcgcgatcttcccctctctgaatcctctccacggatccgagtagtgtatggcatatagagcattgctttgacttgcatatgactaactaaatgagattacttatggctctatgactttcaggaacgaatggtgatcgtgggaaggactttgcttaggcgcgagagactcaaggctggaatgatggctggtgatagttcggatagtctagggatcgattatatgacttataatagcatatatgcaaactcataagttgtatcgaatcctttgcttaattaataaagtattcgattgtttgtttactctattcgtctcatatatagaatctgggaatcatatgaaacggattagactaggaaagaacctcataaacggatagggccgagtcacttagtggcttgggtcgagagatctcgcctggattttaggcagtccagatcggggccttttaagttggtaccagagcatgcttggttctaggactaggtgttgggttaaggggtatcaccactcgtcgacttgagaatctcgcggtagttgttctttactcttttacgattttactatgagttatgtggattaactttggaggtttcgcagatgggtaagagcaacaaaacgggaaagagcaagaaggacaagggcattgttaaggacactttggttgaggacaatggttgatgagacagattcggccggacctgaggccgggaagaagtccataaatgaggaagcaccggagagtagtggtgcaagggacaacacagataaccggaacaatactccaacgacccaagaatagtgggatttgatgaaaggaatgatggcgcaactagccacattaaccaaggccgttgtagcagatccggtggtcctaaaaggggataaccaaaaggacgatgactcggaagttgtggaagtgaatccacaaccgaattatgggcggaaaaggggagactatctgagtcttcttgaacatgtctcaaggctgggcacgagacacttcatgggcagtacggacccgattgtggccgatgagtggaggagtagactcaagaggaacttcaagtctacccgctgccctgaggattaccaaagggacattgcggtccacttccttgaaggagacgcccataattggtggttaaccgtcgagaaacgcagaggggacgaggtccggtcctttgcggatttcgaagacgagtttaacaagaagtactttccaccagaggctagggacaggcttgaatgtgcgtacctcgacctagttcaagggaaccgcacggtacatgaatatgatgaggagtttaaccgccttaggcgttatgtgggacgcaaacttgaggaggaacaagccttggtgcgccgatttatccgcggactaaggatagagatctgcaaccattgtttggtccggacattcaactcggtttccgaatcggttgaaagggcagcaatgattgaggaagggatcgaggaagaaaggtacttgaatcggaagaaagctctgatccggaacaatcagcacaccaaacccgtggataagaaaaggaaatttgacaaggtggataacagcaagtttgatgctaagaccagcgaatgtgtgacatgtggtaagagccacagcggaacttgctggaaggccaaaggtgtatgtggccggtgtggaagcaaggaccatgcgatccaaagctgcccgagaatggaaccaggacagtccaaggttctcggtgaagagacaaggacttgtttctattgtgggaaggttgggcatctaaagagggagtgcataagcttactgcggagaagcaagccggacaaagggacaatcgtggggaaacgtactgccgcctcccccaaagcggcaagccgtggcaccgcgagtttatgagttgtcggaggaagctaacgatgctggaaacttcagggcgatcactggtacgttctcgcaacttcctattcattatttctataactgcatttgcattgcatcatgcatatgggaaaggggaggtactcaacattctaagggaatgtgtagggaccttgagagtaggtgacatagaaacgcacactctatttgattatggggctacacattgttttgttagtccggaattggttcaatcaggtgggttcaggaaagaaccaaacacggattatggaatggtacgagcggccggcagaaaggcaatgtatcctaccgaacttgttcggggcatctcggttgtagtgaacctaatcattgttccactaaagaaacacgatgttatcttagagatggactggttggggaagtacaaggctcacatagattgtcaccgaggacggatacaattcaagagggacgaacgtatgttaaaatttcaaggaataagaagaacctcgtgaagcttggtaatctcggcaatccaggctgaaaggatgatcgggaaaggatgtgaggcatatttagccacgaatcacaaccaaggaagttggggccgagtgcggagtttgaaagaccatccggatcgtcaacgagttctcggacgtgtttctgctcgttagtgtgtaccaccggaccggtcagacccgttcacgatagaactcgagcccagacaacccccatatctaaagctccgtaccggatggcaccggcggaaatggcggagctaaaaaaacagttggaggagttgttggataaaggattcatcaggccgagtagctcaccatggggtgcgtcagttctgtttgtgaaaaagaaagatggtagctttaggctatgcatcgactatcggggattgaataaagttacagtgaaaaacaaatatcctttaccccggatagatgagttgatggatcaacttggaggtgcatagtggttttcaaaaatcgacttggcctcaggatatcaccaaattcccatagagccaacggacgtgaggaaaacggctttccggacaaggtacgaccactttgagtttgtggtcatgccattcggattgaccaatgcaccagcagcattcatgaaaatgatgaatggggtattccgggatttcttagacgagtttgttatcatcttcattgacgatatccttgtttactcgaaatattgggaagctcaccaagaacatctaagggcggtgctggaacggctaagggaacatgagctatttgcgaagttaagtaaatgctcattttggcaaaggagcgttggttttcttggtcatgttatctcagaccaaggagtatcggttgatccggagaaaatacggtcgataaaggagtggccacgaccaaggaatgccaccgagattgggtcgagagaactcgtccggactttaggcagtccggcgacgttgtactcaagttcgcgccctccccggccgaacctcttaatttttcgcgttttaacatagaattgcctttacgaggctaaattctataatcgctctcttattacacagcggaagtctttctaaccttggtttaattctaaccaactcttgtaccggttacatcgtctttgtcccttagacttacatcgatcctttactcggtcaagacatgcatatattcgctaaccattctaagccaaacaatcgcatattcctttatcctactttcacggtcagttaccaaacgtctatcttaactaataagctagatcgttacataccttggccaatatgcagatttgattccttagcccgtttgtcgccttactccattcgttcaaggactcgtcatcggtcgtgaattgatgaaccaagtccctatcgttacttagacatacaaccaaccaaccccactggtctaagtacaacgatagagattggggatcgtacgattctcttggttcacgatgagcgaatcaatctcttggcttattggtccatctgttctccaaacgtacgccctccggcttcatggtggacgattgagccctcggcttatcgaaccatccatgtttccgatctggtcgttgaacactacgaccgcccacggttttctaaccgtttactcgtccggtccatggtggtcggtaaagctttcgacttatcgagccatccatacaatcggaataatattcttatcacaccaaagggtccgtgaattcatccatccgatcatcgtaggctagcccatgaaatccttcttccgtcgtccttaggtttgctcgcgggtccaacatccgttttgtccatcggttttaacgtagactttcccgttggttattcgtcgagtcaccctttggtcttaccgatctccgatccgtttcaccatggctgaggagatagatacatgaaggcggccgcgatattgatcctatatggtgaatcacgttccttacccattcttggtgctttctccctttatcggtgagattgcatccatgggcgacccttgggtgtgttcggatgcacttatccttgtgcttcctcgaacacttttcttgatccatctcatccgatgatcggtctgtccgacccgatccgtccgacgatcggtctaccagatccaattcgtctctaagacgaacggtctaccctctccatcctctacactccatcgaaccgttggaccgggaggtagcatgcgcatcagttcggtcgagttatactcgccgagccgcaccccctttctgaccaacaacttcgggatgtgttgggactcttttaagaatgttttgtggtgtatggatgatgtgtgagatgccttgggcgtcctcccttatatagggggcgaatagatgcttcccgaagcatcacatccgttccttgcacccttccgaaaggtcacatccgttccttgcacccttccgaaaggtcacatccgttccttgcacccttccgaaaggtcacatccgttccttgcattcttccaagaggtcacatccgttccttgcatctattgggtgatgcaactgtttgttggtacccgctcgaccttacaccttttggtcgagacacctcttcaccagtgagctaccacagtccaccagctcgagtgtcagctgactggaccacccagctgggtcagtacacgatcagctcaccgagctcagtcgagctgtcggtcagctcacctagctaagctagctagtcttccagctggtttagctcacctagcttagctagctagttcatccagcttgtccagctcacctagctggttcggcttgaactttctcgttcttcctactaagtattttggtccgttcctcgaccatgatatagttttccctaaaacaaaccggccttttttatgaacgcgggacgcgtcgttacaagtctaccctccttaaactgaattcgtcctcgaaattcggcgggtgagagatcttgtttacgccctaacttgggacacgggcgttacaagtctaccccccttaaactgaattcgtcctcgaattcggcggatgtaagatcttgtttactccttaacgttttcccatctttagtctctccgagactttagatatcatatttgatcaaatctctatttccgagcttgatcaagtttcctgatctaagtctttacgacactcgatcacatttctgatcctggtcctttcccggactcaatcactattttcgatctttgtcctttcatggccttgatcattatttcccgatatttgtcctttcctggacttgatcaatgttttccgatctttgtcgtttcttggacttgatcaacgttttccaatctttgtcctttcctggacttgatcaacgttttctgatctttgtctcttccgacattcgatcaaatttctgatcctggtcctttcccggactcgatcattatttcccgatcctggtcctttcctggacttgatcatcatttcccgatctttgtcctttcgtggatttgatcaatgttttctgatatttgtctcttccgacattcgatcaaatttctgatcctggtcctttcccggactcgatcatattctcgacttaagtctctttccgactttgtcagtatttccaaccttggtccccaccggactaggtcaatatttttgacttaggtctatttccgaccttgtcgtttttccttgatctttgtcaatctatgataagatcaaaaccccagaaatagtcaaatcccgactaagtctgtacccgatcttagtcaagttccgactagatccaatttccgttgatatcggtccatctccgaatatatcaacctactttccagtcatgttacaagttttgactacaaggataatatcttggttcccgatcgtgagttgggtaactatttccgtttccaaacacatcgatccctcaacttcctcatccgccaaacccttactaagacgttttcccgagcacctatccatcctaggatcaagcatgctctgataccaacttgtgagacccagtcccggacgtctcggcctccggcgaccgtttactcaagttcgcgcctctccccggccgaacctcttaatttttcgcgattaaccatagaattgcctttacgaggctaaattctataatcgctctcttattacacagcggaagtctttctaaccttagaattgccttgcgattcaactcttgtacaggtttcatcgtctttgtcccttagacttagatcaatcctttactcggtcaagacatgcatattgttcggtaaccattctaggcctaacaatcgcatattcctttatcctattttcacggtcgattcccaaacgtctatcctaactagtaagctacatcgtcacataccttggccaatatgcggatttgattccctagcccatttgtcgccttattctattcgttcaacgatttgtatgcgatcgtgaattgatgaaccaatccctatcgttacttagccatacaaccaaccaaccacactggtctaagtacaacgatagagattggggatcgtacgattcccttggttcacgatggccgaatcaagctcttggcttattggtccatctgtcctccaaacgtacgccccttcggttccatggtggacgattgagcccttggcttatcgaatcatccatgtttccgatccggtcgtttaacactacgaccgcccacggtttactaaccgtttacccgtcgataaagctttcgccttaatgatccatccatgcggtccgaacgatatccttatcacacccaagggtccgtggattcatccaccggattattgtaggctagcccatgaaatccttcttccgtcggccttaggtttgctcgcgggtccaacatccgttttgtccatcggttccaactgtggactttcccgttggttatccgtcgagtcaccctttggtcttaccgatcttcgatcggtttcaccatggctgaggagatagatacatgaaggcagccgcgatattgatcctatatgttgaatcacgtttccttacccattcttgaagctttctccctttactggtaagattgcatccatgggcgacccttgggtgtgtttggatgcacttatctttgtgcttcctcgaacacttttctcgatctatcccatccgacgatcgttctgtctgacccgttctgtcagacgatcggcatgtcccatccaacccgtccgacgatcggtctatccgatccaatccgtctggctgatctgatccatccgacgatcggtctggccgatccgatccaacgatcggtctaccagatccgattcgtctctaagacgaacggtctaccctctccatcctctacactccatcgaaccgttggaccgggaggtagtatgcgcatcagttcggtcgagttatactcgccgagccgcaccccctttccgaccaacaacttcaggatgtgttgggactgttttgagaatgttttgtggtgtgtggatgttgtgagatgatcccaaaggccttgggcgtcctcccttatatagggggcgaatggatgcttcccgaagcatcacatccgttccttgcacccttccgaaaggtcacatccgttccttgcatccttccaaaaggtcacatccgttccttgcatctaataggcgatgcaaccgttcgttggtacccgctcgaccttacaccttttggccgagacacctcttcacccgtgagctaccacagtccaccagctcgagtgtcagctgaccggaccacccagctgggtcagtactcgatcagctcaccgagctcagttgagctgtcggtcagctcacctagctgagctagctagtcttccagctggtttagctcacctagcctagctagctagttcatccagcttgtccaactcacctagctggttcagcttgatctttctcgttcttccgactaagtattttagttcgttcctcgaccatgatctcattttctcctaaaacaaatcggcctctttatgaacgagggacgcggtcgttacaaatacaagtataacgataatactgagaatacaggggaatactaggatttgacaataatactgagcatacaggagaatactaggattagacgataatactgagaatacaggagaatactatgatttgacgataatactggaaatacaagtataagtattgaaggatattaaaatttgaatttatgtttgtttcaaacatcaaatattaaatagactatgcagagatgaagaattcttaaaaattaattaaaacgaattaaattagggaaaaaaatatttggtcaaaatacatgctaatagactctaacctacatattcgttatacttttaagctcacttttgatataaactccaacttaggattgaaattatacaattttatatattgttaacatgtgattacattaaacttttagaatttaatagtgatagacttccctcaactgaacaactagataaatcattttgaaggatatgtaatattgtctaaactggaaaacacgaaatatacaactacgtggatattttgtacaaccaaaagctagggtacaactaact

SEQ ID NO: 523 - DNA, 1437 bp, Arabidopsis thaliana landsberg
gaaggcattacagactttaccagaattacacagagataagacaagttcttttttacgctttttttttttttaacagttaaaaagactcaatagagtgtaacggagagattcttctaccagagttgctctcttttggttcgttttcttcctccaaaatccaatcttaccacgggttctttagggtttcttcttcgtcttcctttggatctatgtgaacaggtatgtaactgattgagctgctctttctgattaaccaagtaaattgttctcttgaatcttatcattttattttgtttcatttttcttgttggatttagatccttggatcaaatttgctcaaatgttgtggtaaagtctgtgcctttgattgtatttcggatattttctgtgtgttttactctgatattgattaggatttgtgtatttcgtattttttttttccattgaagcgttttctgtgatctggtttttgatcgatcttattcctcttgattaaccgaacgaaagatgttttgatttctgtagatctcttgcattgtactttcttcattgttcttaattcgattttctctccattgctggatcgcctgatggctcatttagagtttttttttctagctcaaatgtggttgaactatagagtttctgagttcattatttggtcattttttaattgagttggcttgattaaagaagaatttatttgttaatcagctagattagatttgaagattgtagtagattagtatgatgtgaatgttctaatctgggaataaagggtctagtgttgagggaaacatgagatttttcataattgggtgaaatatgtgttgtaaagtttggtcttttatttgcttaattatgacttgtggttccattgactcttgtagtatgaactaagctctgaggtaagcttgggaagtagggatatggccaaaatctctttggtttaccaacttagcaaaaaagttagcaggagttggtgatcagttctcctaccggcttttgcaggctaataactaatacctgactgtaaaatcttccaaggtttcaaccacacagggaccttgtttctcttgttattgtaaaggatgtcaagtattcggaatactcattggtgtcacagatgtcaacgtgctgtttggcttcgagctcgagatgctgtctgttcatattgtggaggagggtttgttgaggaaatcgatataggaccgagtagagctcacagggatgttgagcgtgatccaacctttgatctcatggaagctttctcagcctttatgagaagccgtttagctgaaagaagctatgaccgagaaatcagcggaagacttggctctgcgggttctgaaagcttttcaaacttggctcctctattgatctttggtggccaagctccctttcgattggctggtggtgataatagttcagttgaag

SEQ ID NO: 524 - DNA, 2702 bp, Arabidopsis thaliana landsberg
  unsure (1)..(2702): unsure at all n locations
taatttctaaaattggggaaaatcgtggatacttataaaaattattatatggtttatattcttctattcttctacttgcttttattttgccccacagacagaaatttgaaaaacagaatattccctgtcttaaccatttcgcaagtgttacggagatcagttttcatttggagacacaatgttnanntaaatattcctaatttacttaactaaaaatcaaaaaatttatgtggatatgtagatcatgtggtagtatccagagaatattattattctcttttaccttgaaagaccaatctaaaaattataaaaaattaatctaaccataataatctctagctacaaaatcccccacgattcgattaagttggctccataccccattccatcagtttcaacttcaaaacatagaaattatgctcaagttaacgaaggtcaacaagagtgaaccctcatctgtttcaggtgtcaaaaaagtagtgcagcgtatcataagctatagttttctacgtctgacattcaacgtaaacaaaaaccaattgtttgcttcagttttttttttactcaggttgctgttatccctgaaattcacatctcggcacccgtacttgctaaaattgttagctacgttgctgaagaaggcgtggatgctttgaaacccttggtgaaagctggaccattatataagcggctgtgtattcgaaggaaactctaagttgtgtccgccttgacaaatctcgttattacgtgtggtggtccacgacgcactccatctattatcatttcttcacaaaacgtcttgaagccaaaaatccacatgctttgaatgatgtattgtacaaaccaatagcatatgagaattttgctgccgaatgctatagagctaccttatgggcggagctttacggagagtatggaggatagaaatcaatgtgttcataatgtgatgttcatagttatcttgtcatgtacatttctatacttgatcaatcttatatctttaggagtttaatcctaggtaaattcaaacccccaactaactgtgttggttgacatgaaggtgttgagcacgtttgaataaactaattccccagaatagattctcaattgctaacccttttaggtcatataactcagatcaagtacttatagtaaatccaaacggactgttatcggtggacatgttatattggacagaaaaaaagattatgaacacacatattaattgatgatatccgcaacctgcttcaagacgaatttccgaggtcaagccaaatttctacttagtacaagacacattaaatccccatagcgtatttcaaactctattttactttattgaactttcatagaaacaacgtttttttattaaaagttacaacgtttaattccttcaacgaatcaacgtgtcgatattacagtttacattgtttcactttgtataaatacaactgctactcgtgacttcatcaagacaaccacatcacaaacgcaaaacaaaacaaaagcgtaccatatttctcagtttttgttactctttacttctccttttcacgatggttcaacatcacaatctttacgagttgtctccgatggttactggttggaccatctgtgtcatggtattgagaatttacaaaacatttctcaacccgaacgctttcgaactacgtccagtcttggccgatgaatgggtaaacaattttctttaattccttttgcaattagtagaattcttatttactgcgtgtatctctcacccctaaaatgttgttttaacaaggcacccaaatagaagcaacaattggacctcgtttctttgccttctactttgacaggatccaagagaatcaatggaaaacgataactacgtttcttgttcgacctaactgcgaaacaataagaacaactcctcatgagtttcgcattctattcatggatcaaaccattgtcacttcttccacacccagagaaaccggtttactcaacaagttcactccctttgactacattgttgatgatgttgttggcagagatatcttggttggtaagtaatagcttcttcataaactccattcacttttttcaaaaaatttattttgttaaacacatatctctgacatatctcttatagatgttattggtgcactcgttaatgttgggattccgactaataccgcaagtaacgggaaagatatggccggattcaaactgccgttcatgatcatgtataaaaagtacttttcttcaacatcaatttacagtttttttcaaacatatcatgtttatacatttttgtagtaaggtgagtatataatctcataatttttactgactnnnnnnnnnnnnnnnnnnnnntgcgaggcttatggataaattccagtggacttggagaaaagattttgagcatttcgcaagaacaatgttgttattgcacttgcttggtggaaggttgttagatattatccaggttgtaacttgtttaagattgctagccatgcgccaatatcaacagtatatcccgaacctgatgttgaggaacttgaaaaaatcaaaatggttgtcgactaatggaagatgattagaactatcaaagtgcttgttgcttaaaattgttatctcatcttcttttttttttttcacctcttatgtttacccccgaacaatgtgttaatatttttataaatgatattatatattaa

SEQ ID NO: 525 - DNA, 4661 bp, Arabidopsis thaliana landsberg
  unsure (1)..(4661): unsure at all n locations
aattataggcatgtagtatacctcttaatatgttattcatatataaataatattagttaaaataaaaatctctaactttctaacgaaaatatcgacccacgatatatcacgggtcaatctctaaaatgtcatcttaaagattggtagtagtagttggcgctaaccatatatctgtagctagacaaactctttgcttatacgcactaaaaaagagcattagcatagccttttcttgatagtacagctcgacaatatctataatgattgatctttgaaaagaattttttcaatagtaaaatgaggtatagatactacaaaaattcctaaacccaaccttttcaacgaaaacaataggcagctcatccagcacaatcattttcgctaatgcacttcgacaagcaattggacaatatttcataacatctaaaccacctgattctttctgagctaactttttctgagcttcaaattggttaaaattgatgtatgccttacagattttattatggtttcacaaagtactcgtcccactagatggttttcacccaagtattgcaccacaatagttacacccacaccttactaaatcatttttgagcttggtaaagtggtcccatacatcctaccgttgaacattttgttttttggccgtcgaagaaggatcatcggttgcattcctttttttcacagggattagtgtcttgacttgaatctggcatctacgaatattaattgtgatgaatgataagagataatactataataggacaaagagaacaaaaaatagaaaaaaaaaataccttgaagtttgtgttgcagggaaggcacgtaggggaagagagtttaagaaaaaagagttaatgaaaattaaatggtcaggaatatgattagattttttttttgcacagttgttcgcataaaatggatataataaaattattgttatgggtttgttcatctttataagtttgtggtccaatgagaatgagttttgagttttggacacaagagtgtacggctaatattgtgtttaggttcatatgattttgataaacctctatggtaaagcttgctggataagtggactgtcaaggatgattaataaaattcaaaactatatgtattcgagaacttgttactgttgaaatgagaacaatatgttcaaatatacaaggaaaaataaagaaagctaactagagttaaatgtatattaatctctggttgagttatgcttttgggaccacaaggaggagccttgtgcattgctggccaagaaggacactttgtccatttgtgattgcaaaaggagcgtttggtagaagcattaggtctaaggagtgtctctgtataagtactcttgaagacacacaaggttggttgtcgcaagccaagcggcctaaagaagagtgacagagagacacaatgtaaagagagagatgtaatcgggtagagagaaaacttgtaagagtgtaagcttggggagagttatcttaagtgttacagagtgttatgagtgagtctttggtagcagtaaagatccaaagatgtcacttgagtgatctttgtaaacttgtctctgattatagtatattttggggatctgttgatcccgaccggatgtagtggctcgttaacgccatgaaccgggttaataaatcctttgtgagctcctcttcttccttcatcttgctctgttttatatttctcttcttctccatattttacttgatatgtttccgctttcttgtgttgatgacaaatgagacaaagcttgaacccttgagaggtgcaaaaccacaacagtttcaattatatattgtgtgggttaaatggattttcaaacaatatctaacagattagattcgaatatgaaaattttttagaaacctccctgacgctattatcgagaacgctatattccatctctctctcatttctcaagttgtttcctttatcttcaagataaattttcgcttcgatttaattttcctcttttgcaatccctttaatccaaacctatcgaacctttctctactgttgaatcccctctttgcagcagtgcattccgacatagttagacagtggcctctgagccatctacactctctgcccacactttgcgtatcaaagacaacagtgactgaatctttcgactccacttgcgttcaacttttctattttgagatttgtctccatcgccatatcgtccctagatccacgggccctctttgctcccaaggttttctccatcgatctgttgcaaaactttcagccgtggtttcatcctccgtgtcggatccgccatacagctttctcaccctgactcttgctttatcgaagatatctgctccaacgacgcggtccgtacccctccaccgtagccgccgcgcctccaacgcttcttgcccagcaatctggtttctagggttttcctttatgggccctataaccattgttggcccatttcccctgcggcccaagcccatattttgcgacccaagtcctttaccaattaagcccaggtttgtttctttctgcaatttgcagagtctgtcccaatgtaggcgtcgtttctctgttttgagtggccatggacaccatttgaatggcgaatcaccctcattgctatgctcctgcaaacagtctctaagaaccttggtgctaggtttatctagggctatgctttatgtttgctttttgaagtctcttggtctagttttgatgcgtccannnnnnnnnnnnnnnnnnnntggtcaccaaagccctctatcaaagtacttcatgccgacatctatatcgaccaacttcaagaacatcccaaccatctttccttcccgagtttggatcaagcttcccgactacaagctttgtgtggaattccttaatctccttggtcttcttgggagagaggacccacctgttctgttacggtctcgcatcaatctttctaagcctcgacgatcctccttcctttacnnnnnnnnnnnnnnnnnnnnnncaaaagcactacttggtgtagtacttctcgtcccgacgagattcatgtctttggcgcccttgttaacgttactaagtcttttgacagtaaccatactctcatccactactttgttcgtggaagatttgtcaacaatccttgatcttaaaagtaacaaattcccttcaagtgtttggattatagctctcatggaaccattgttgatgtaccttatttgtgtgttagcttttcttcttatggtgttgggaatgcctacctttgttgtcctttaaactttgggatcttagaatccttgttcctttgtacttgtttctctcttaactgaataaaaacaagcttttgtccaaaaaaaaaaaaaaagattcgaatatgaatcccttaaaaggtaaacttaaacaatcattatgatcttgagaaaaaaagcaattgattgctaaagatttgaaattataaaataattacttagaaacaagaccaatcatgataatcttgaaaacaaacaaaaaattaatatacctctgtcaaagtatcattcataggtcatattcaattttcgaaaatttcaaatttgatatagctcaaattatccttaagcttattccctcaaataagagatcgtcgttagcactgaatgatcgaattccactaagctctcgttgttcacacaataatcttatgatgattaatattaagctagacaaagtagatgaaagtaaaagacaagaaaacagtaaatcgagttgtgaattcaggagattaaagcgtgaggtctagggatagtcttaggaaatagataaattgtagatcttgctatgactaggattgttatcaaactgttcttaaactcaaacactattacagagtaacttgtggttcgctgtattactcattatgtccaaggctaaagattccttgtgttggcttggcaaatccctaatttaagacatgcatgctaaacgagttttataacttcaacttagtaaacaggtcgattcttattacacacctataaacccgactcatctataatagttctgatgacagatacttttttgggcatacctattatctaagatcaaattctaggtgatcaatctagaactagcagtaagaacaattatagatgaagaactctaaaaataatcctaacagattatcgatttactaatcaatctaaatccctagtgagacaccctaaactcaacaaagtgactacttagacatgatcaaagaatcacaaatcttgatttgaataaattgcattgaattataatatgaaatagagtaaaaggagttcagaatgttctctaaatggatatgattcttctctccaaaagtatgtctcttacacaaaactttcttaggtctaaacaatgaccttaaaaatatatatatatatatatatatatacgttactaaaaacgtgcatggtctattttgcaaataagaaaaacttatgggacttctttaagacttggtaaaacgtggggattttctttgtcgaataagggtgtcgatggacaccatcgcatgaataacgtttttgctggtcttctttggtgaaaagcttccaaagttcccccctatgcctatagctctcgaaagtatatatgcaaaactaaagagtgcaaaacatangaaaatgactagaaagcctcccccg

SEQ ID NO: 526 - DNA, 2754 bp, Arabidopsis thaliana landsberg
gaaggctaaggacccgcgaatcattggagtaaacccgcatccacttgggatcagatatgggattaactccaaggttaagcctagaatacgggcaacaccaagaaagttagttgggaggaagttagccactccggctaagcgcccgtgtgagatatgcggccatacagatcatccgaccgaagagtgcttgtatccatcaccgactatgccatatatgaatgattataccaagtgctattgttgcggaggattggggcatgtgtccatgttttgcccgtatgttgcgccaaatgcgggcgaaggatctttgagaggagtcgggccatcaatgactgcggtgacagaggagaagtgtttgaatgaagggatgccctcgtttttgtgggtaaggtgtgagtgtcccaagtgtaggaacccttgaccgatggtccgtaagatcatctaggaaaatatagttaacttttcggctaagtacaaaatcggctgagtcatagcgaaattttgggtgtaaatatgctaaggcttaggacttgttaaatagtgtataaaactaagactaaaatccggtacttattacttgtatgaaccttttgaatgtatgagaagttaagtattttcttgcttgtgtgtggccgaccattatatgagtgagaaatcacttgtataagaataggatgattgtgtttgagttcggaaccccatcggaagtacatcagcaacgcatggccgaatgaagaatcggagaaaagaaattggacttagttgggctcaagacaagtctaaaacgggcatacttcagggaaacatgcaaaagaagggaacttcggttcgaggaacagacagttgtataatcaggacaaggagattcaaaaacctttgcaaaaatgttgggagaattcatagaagttggaagtgaccaaaggttagaattcgaggacaaattctattatggaggggagaatgtagtgacccgcataaaagcatcgggtaaggccaaaggaccgaatgagaaaattttgcccgatgcatggccaattgaccgcatgtgcctaataggtgccaaaccaacaaagggcaaagatgggaaagaatgggcacggattggcgaagatgggaaaagttgggcgtgccgcggcgaagattgccctgccggccgcggaaccgacttgagtagacaccacactcgcagtggcttgcggctcaagtcatttttgaaggagagagagagactgtaaggctgtccgactgataactcggtcgaaaccgagaaaaaattgcccaatttgttttttgtttttttttttttttttgtcaaagcccaaattctgtaaatcttgcccatggttgaggaaactctgtccatgactagagaatcgtcgcctgtggtcgagagaacttgaccgtgagtaagggatcgtcgaacgtgatcaaggagtttcgcccgagacccataaaactttccaaactaccgaatccgtgagttgtggttgaattgtgtgtttgtttgcatgttttctagagctagtctttagataatatgcatgattattcacttagacttaactaatcggattcggcttaagttagaacttgaatcttaaaaacgatatggtatttgacgaacttgataagtaatatcattaaggaatgggatggactggtacatgactaggctaagtgaatacagacttgaataagtttacttcctgaactgagatttgattcgggggcgttgtaatttttggtatcagagcatggttatgcgatgctcgtggacacttgggttttcaatgattttatcgagtaaatttgaatcgcagaatgcaacattagatttcggttgttcgtcttttaaatgactaagtggaggataggtttacctcgttttgtagatgtcgtctagcaaaggaagcaacaccgtcagtccgttacacgattttaatgtgcccaatcttgagaacttcgctctgccaagcagtacagatgatgaaagtttgtccgtagccatgaatgatcagtttatggcggaagatagtgaatccattgagtccgatatatcgattgaaccaaatccgtccgaatgtctggaaaatgctgataatcatgatggtccgttatctagtgaagaggcaaaccatgttgagtggatgaccaccaaggatggcgagttatttgcggtgccaactgagcatgcagccgaagaacaagcgaacgatagtctcaacaacatgttatcgcagttcaatgtgccatggacggatgagaagggaagttttggtgttccgaatctggggaccatgggcgagcatgggttagaactagaagaagtgaatgcagacttgttcgatgtgccactgatccatgcggatggtgcatttggagtaatgaatgagtatggagccaacgatgagtatgatatgctaatgctcatgggaaataacgaagaagatgagaatggagccaaagagaacgagttagagaatgagttagagcacgtggtcgatcagttaattgccgagtgtgctcaagactatggtccgaatggggaagaaggaggacaaaatgggaacgatgggggtgattcctcgtcggactcatttgaatccttaacgccagaacctaagagtccgagtgtgatcaacatctcctcggacagtttgaaagctatcttgatgataccgaatccgagcgaggcggattcatgatgggagaatgaaatgtttaaagggaatgaacgcgagtgatgtgaaggat

SEQ ID NO: 527 - DNA, 3845 bp, Arabidopsis thaliana landsberg
caggtgcattaatcaaggacctttcgagcagagatcaagatatcgcgatggcctttatcaaagctctcgcagctcaacacaaaaaacgttcaacggaaaagaagaaacttcgaaagaaaattaacctaatgttgctgagggtcattgtaacaacgaaataaaagcggtatgttagacgcccgcagtcggccaacccacgtttccgaaacaaattcgtatgcccgagtcgtccaaccacaagagtctagcctcccgcccgtggcctaatgcttttcaacccgtaccgcggacgtgagttgtgttagtccggacaagactaataatatcagtgagtataaccatataactttagaaatccaaatcttatacttatatatatatcatacgagaaatggttaccaaaacatatatagttttcggatcctctttaaaaaccatacataatatacttagtaagatcttacaaaaagccgtaaaatctacattggtttgtcctaagtcacgagcggcctctacaaggttggttaactaaggtttcctgcacaaaaagtagcatcataagtaatctagtattacttaatgagccccggatctagacagaactaccctaatacctctaccctaagcagcatcgacagatactaatactacgacctaagaagaataaatacgaataatgcaaataacacaaagacaaagaaaacacgcaacaagcaagacataatggacaaagaaaaatgcatgcagactcgatttcctaatatgcaatggacaactaatgcaagtatgcttctaaaaacctaggtaaggccttctacgaatccatgatctcccaggacatgcctccatctcttagacacaaagtctacaagagacatagcattccttaatactacatcgtcatgtagcgcccggtcggtagcgatccagcccctagccttcgtatgccataacggaacagggttacacgcaacgcacagcatacggacgggatcctcatggttcgtctaatgttagtcatctaattaaagactactaaaatgacaatagactcatatactattatgcaactatcctatatgcaaaactatactaatcaaacaattaatcgtacttaattaccactaatcgcggttagttcccctaatctaggtttaactagtcctaatcatgcttagagaatactaatcctaattaggtatcactaatcctaattaaatattactaaacctaattaactatcctaatcaggttttaagcgaataattaagctaactaatcctaattaacctcctaagctatattaaggaaataaaagaataaactatcctattcatgtgatacttcacgtgactcaagtactcacagggatttccgagaggtttggcttctaaggtcttctcccgcgagctaggcattttctagtggatttttgggtctgaggaacaaatgggacgaagtggagtatttatagggtcttaagtcggtcacaagatcggccaaaacaagcaggaggtggcccggaccaatcaaaattcgataaatgtcactccacgggcgctccgggacactaatcagtctccgattggtttcctccattttttctggataaacatcatccaaaatggataagctcgaccctaaaggataaggatgaccggaattatagataagcttgagccttaacggataaacatgaaccacagttcaatcctggccgtccgtttcttcattccggcgaaacccatgatctgtcacggaccgcaagaacattgatagggcacactccatctctaatgtctcatgagggtcaatgacacaaatcaaggcttctttaggactataacacgtttcatgccagaattaaccgactaagctcgctaacgtcacttatccgcattttccgttcaatccctcgactattcacgacccatactcatattccactgcccaaatggattcccctatggtctcctagtccttctaaggtttccaagtccttctaaggtttcctaaaactaaggttttcttaagctatcctaggtctaagggctagcctaatggtttcgaggtttaccgatagtcgcatcgtagctatgcttagtccgtctgatggagagtcattcctttacctgtggacttgatccattgtaatgctccttacccatgacttgccacatcaaatggccgaactggtcttgccttttcttagcttgatctcgcattttactcgatagactgcacgtccggccgcatagtcaaggtttggggtattacattcttccctccttaaaagaattcgtcctcgaattctaaggactaaggaagtaactagccttaaaaaaaaaccgattccttcgttggccttatgaagcttctcatgttaaggatctcgccttgggtaacggttcttttataggtttggtctccaccattatcttcttacaacctctttcccattcctaggaagttaatgcatgtctaacggactccgccactctcttgtatgtgatttttgtcatcaccacatacggcttagctaacaatttaacttttcggcttcctagagctttaaggcttagtttaataatcctaaggttccatcctaattcctatggcttttccctaactctcttgaataggcttcaggcttcctaagggttcctatggtttggtacttggttaagtgcgacacgaaaaacacacacaaaacatattaataaaagtaaatcaagcaatcacacaaaaggacattaatataaacataaggtaacataacattagttaacaaccctaaggggtaagggggtgatctggactatcgtacacacccgcttattcaagcctatagatatcatcaaaaaaaatatcacaaagtaaccgaaggttactattggctcccctgtagccgcagctatacatcaaaaaatggggttagttcctaatatacactaaggtttatgattcctaagggaatcacagtagctctaagctacacctcgaacaggtacacccaaagaaaagatcctcctccgtgtcgggaaccggtggggacgatggtccagctacgtgagatggggaagtacaggtgggtgaaggaatctgggcgtcatccctcatcagcatacatgtggccacgtaatgcccatactctccacagtagagacaagtaatggccatgggcatgtacggcgtgtaaaacggacactcctgtgggtagtgcccgtcctcgccgcagacgaaacaaaacggtatttgtatacctgatgtggagcccccgtcaaacgtcggaatagcatcagccctcatgttggctgcaaaacggagaatggggacgtgccctcccatagaagtgcgaaagagctatcgggagagtgatcgacagcctccagaacatatggcgagaccggtggatcctcgtccatctccggatctgactcatacgggctgagtacaaaggatggtgtagcagaactgctcgaggaaacactaacgtagtcatgaaccatcacgatctcgtttccctccggagccagctcctgctccaccgtcctcactcccgtaatcacacagtcatcctcaccatccgaatcaatcatcatcccatgccctctctgcacatcctcccactctacaatggcagctatctctgcaagactaaaatcagcaaccgtgtcgctcgatccagtctccgatataactcgggaacactcggccacatccctcctcacacacctaccccgactctctcacgaaggtcataacgcctggacggcagacccgaggaccgtccctcctccacagactcccaacgacgtgatctcttttgcagcatactataatac

SEQ ID NO: 528 - DNA, 908 bp, Arabidopsis thaliana landsberg
ccccgtcctttaaattgtcatccttttaggtttcgctgtttttagaagaaaggattcttgttattacataactacataatatactaagactaccttcatttcaggttgacaccgttcgtgtcgtgtgaccattttatcggccctctcttctcggcgcaaatgccaagtttcaacgtccaacttctctcttctctctcacagacagactaatatagaatatgtgttatatatagtaatgaaatgatcaatcgaatttgtatactaatagttatcaaattattaaaaaagtatcagctccacttaagatccaaatccctcatcatcaactctcctatataaatattcgaactcctgacaattcatctcataaaaaggttataaaaaaaaggaaagaaaacccaaacaatgtcttcaaatatattggccatggtggccatgcaactcctccttatacgcatagtttcttccaaaacgttacgaatgagtatttgaaccaccaatgtaacaacacacaagggacatacacgcggggtagtacgttagggaagaatcttaaccaagtcatccgtaacatctctcacctccatcttcgctacggttacacctacaactccagtgttgaggcttacgaagttagtaaagatcccaacattgtcttcgttttgctccagtgccgtggtgactcttacgggtccaagtgccactcctgcctcgacacagccttctctggggtaacttcacttcaatataagtcacatatttccatatatgaacatatacacacgtctaatcatagttaagtttgagagataactatattaatttgatttcatcgatacaactgatatacatcttaacgcaagtagaaaagaaagctatatgttatatgtagattattccatgcttga

SEQ ID NO: 529 - DNA, 1181 bp, Arabidopsis thaliana landsberg
  unsure (1)..(1181): unsure at all n locations
tcatctcgactcgtcggtctcgtcttttggttttcacagaagttaaaccgaggaaatcgtaaaggtcagctcttttgatcttctttgttgctactttgtgtgattcttctttcaatcatctaatatgataaattggatccaaaaccctacaattttgaaatcttcgattctagaattttaggagacaaaactgatagtaaagccgtgtatgaacatctgatgtaagaagaaaatgagtttcgtaactccttttgctatctattttcccaatttaaaaattattttttggattgcaatattagtattacgtgaagtaaatttcaatggttccttgttaatatgtagagacgtgatgggttaaaatgtggaaaccatagacttctttcttatgacgtctgtttaagaataataactttagctagttgtctttttttttttcttcttgcaataatcgtactacatcatgtgaaagtttatattaggagttcagatacttatttttggctgaagcttgtactcaaattttggagtaaaatacttgagtgtttttcttaatatgcaacgtgtatacacaagttcactacgatatgtcaagatgtgagtaggtgtactagtactactgtactaagctattaacattacatactacataatatatttttaatacccttttagactttagtttcataatcttttcagacataagatttatttagtctctttcttgccatcgacacttatttttaccaattcgttgaaagaagtgctaaaactataggacacaacgtcaccagtacatgagctattgaaagcatttccccaccaccactcccgattgctggggagacaaagatttgacatatatactttttggtttaatttgacatataaagttaattaatcatcggcggtatcagtagcccccatgttcttcaattttgtttttatgcaagatcgcgcaatttttattttaataaatcatctttttggtactaaaactatcactgatttaatttgattcagctgtttattgtaagaaatttacaacccatggacaaactacagatataaaatagggaaaatccttcccactgatttctgtatattatntttttgtataaagagtatatcattattattagttacggcatatgaaatagaattacgcacactacgtactt

SEQ ID NO: 530 - DNA, 1498 bp, Arabidopsis thaliana landsberg
ttttcacatttatgtccatttaaggaaacttcatcacttcgctgctctgcaaactgattaaccaaagcaagagcattgctagtgacttgagccacgtgaaccaccttataccgaatcagtctcttcactttgcctcccatggctcgttctgagaatccatctagacacgttgtctcgtccgtcaaagcggcactgacccatgtttgaacgttactcattttccacatgaagtcctcactagccacagcatgaccagctcgagcaagttccttaaccgattgagctaaccggaccacgctattgcctagcacttcgatgcaatctttgattgctagatattccctacgtttaaatcttggtgtcctaaatataatgaaaaaaatgttagggataaataaacttttgtaatctcttaaacaccggcttgggctgcaaacagagagtactgcctggttttaagtgtgtggttcacaaaaaaaaaatgttagggaaaagcgtactctttggttagtttggcgacgaagatagtaacggatttggctcgagccaagctgatgatgagagcagtctgggcgagatcttggtcattgttgtggcggatcttggtggcgtaagcagagagtgtgtgcacgcatagtgatggatattgggtggtttggcatgaagacacaataaactggtctgattccgaccggtttggggttgcagatgaagattggagaatggttattgatagaagtatgactagaaagattgtatttttaagctccatggtgttttggtttgtttgtttgtttattttttctaaaatgaagagaaggtgtatcagtggatgctgtttatatagggtttgatttaggtcaaaataaattattaaaatatcctatatcgatttggatttagatctttgcgcaatatataaaaatgtaacaattcttaactcttaagctagattttgggctaagttagactacgtttctaatatggtatcagagctcatggttggtccaagaaacaaattcgtacaaaaatggttttttacctatatggccacacaagtgataggttttgttgtatttctaggcttggaccgtttctcacacgcatctcgaaaaagcctattaaaatgttctatatcggttaggattaagatctttgggtaatatataaaggatgtgacaatctttaactcttgagatagctttcgggctaagttaggccacattcctaatataatagtatttattttattttgtcttgcatatatttcttccgtataattttaaatgatgttttaaaaacattttgtttcattttaaatagtagtttcaattttctatgtaaaatgaattataactaataatttttggtcaataacattttacagtatatacttttatttattaaactagttgtagttattaatatttttatgtaaaagagataaattactgaaattctggtgatttctaatatgcgtattaaaaatttttaaaca

SEQ ID NO: 531 - DNA, 2542 bp, Arabidopsis thaliana landsberg
  unsure (1)..(2542): unsure at all n locations
tctaacatcgattctataaataaaaaatgttattagggtttacaaatcaacaaccactgaactttttggatttatgcacaggtttcaaaggttggatcagaactctcgactggccttcataaaaagatggcttgaaggccacatcgaagatgcgcagaacattcttaaaaaacctgtaattctagcagaatttgggttaggatcggacacaccacgttacactctggctaatagagacggcgtgttcaccacaacatatgacatcatttacgcatctgcgcaaaaaggcggttcggccgcgggagcattgttttgggaggttattagcgaaggcatgagcaactttgcaggtccctcctccattatacttagtgacaagtcgtcgacggttaatattataagtgagcaggcacgaaagatgggtttgcttggtgagaccacaagaaagtaaagtttagtcagcaaaataaaaaattaacatttaaataaagtctttatttaatattttatagcatttataatttgaaaatatgtaatgcaatgataaaaaataaaaataaaattctattatatactgaaatgatatccaactttttatacattccaaaactatatttggatgtctcttgatctcaactctgctcgtaggctatctaacaagtcagcagcaatataggtcttcagtgggccttattgcgcctcattatgataagtaaagttctcgtagtggcctacaaaaattatattgaggggaccagataatagcttcacgtttagaagtttcataaagggaaaactcatatttcatttttgttattgttgacgtataaacaatccagatcatgaaaaaaaaaaagcgtataaacaatcttaaaattctaaccacttccaaattagtttttctcgaaactatttgtgcttttttgtttgttttgcttttgtggattttgattggagaagagaagaagaaatattatatgttttgcgtttgcatttaggttttttgtttgggtttagaaatattgaaactgatgtcttaactcttaaaatatatatttagcgctattgtctaacgttgatgtagtttggcatttactttttttaggtatgttgtatgcattagagttaattgtttgcttttgaaatttcacatttaatttgaatgtgtttgcgttcaagataattaacattatttgtttgtgtgttttctttgaaattaagaagataatttgagctaccactgaattttgaaattagagaggcatcgagggaaacaaatcatatagtttggtgactgatttcaaggggtaataaccaaagaaggtcattagaagaataaatatggttagccagtattgattaggaagataatcaacatgttgaccacaatgaaagttagtcaatgaacggttttcaaataaagattacaaaataactagaccataaaaggtgatattctataaattcaaagtgtccttttaaggtgttgtaataaaaattgtgttattttaatacctataggaaaaaattattgtttatttatttcttatatattatggatgtcacgtgtataattatgaaaatccacgacttagaatgttcatgcattgcaattgtaagaaagcacttatgccttctatatatatattcgttgaaatgaaaacgataagagcacaaaaacaaaaacaaagtagaaaaggatatgaagtgtttgtgttttgtcgtgcttttagcaattctgatcgcacaaaactctagcgatctaggagtaaaatctgcgtcgagtgatggcttcgtgagtagaaaaggcgtccagtttattctcaatgggaaaccattttacgctaatggcttcaatgcctactggctcgcgtacgaagccaccgattcgaccacaaggtttaagatcacttatgtgtttcaaaatgcaaccattcacgatttgaccatcgtccgcacttgggggttccgcgatggcgcataccgcgctctccaaattgcccctggtgtctacgatgaaaaaacttttcaggtaagtaggtctttaatatagagagaaacagctcaaaaatgtatgttttatattgataatgaattagtttgtcttaactcttaaatttttccgggtggaaattaaagggtttggattttgcgatacggnatcgaaaagactcggtataaaaataataatcacctttgtcaataactattctgactttggagggaggaaacaatacgttgattgggctaaaaacacaggccaaaacgtatcttcagatgacgatttctacacaaaccctcttgttaaacagtactacaagaaccacgtcaaggtacaaatactagaacctatgatctttttgattatataacctatgatctttttaattttctctctcgttgtagactatggtgaacagagtggatacatttacgaaagttgagtacaaagatgaacgacccattatgggtctgggagcttatgacgaccacaatgcagagcagatccaagtgggaaaaccttacggcttggatgaatgaa

SEQ ID NO: 532 - DNA, 2734 bp, Arabidopsis thaliana landsberg
ctagaggaaatatataaatcagctagtgttccctctttggatatttttgtccaaatgcaagtttctatttgtaagtctgcgtcgatgccaacatgtatatatttactaccacttagttttacttatagttccatgtggaacatgtgccccaaatacatctattgattagaaactaataaattgtcaagaatcaacatgggatattttaacttcttaattttttttgtttgtatatatattgtccacttcccacaagttgtaatataatcttataacaattaacacttgagaatatcatatttgagttatttgttgtatgttacctttgatttcaagtggatacataaacgacgatattgtttttgttatgctaacaattattggaccacactatatattataatcaaactgttacattacaaatcttgtagatactcttaagagttttactaattattggtgttcatcattatttgaaacaggcattatcacaagtgttcgagtccagattgcaatgtgaagaagaagatcgagagagatacgaacaatccagattacatattgacgacatacgaaggtcaacataaccacccaagcccttctgtagtttattgtgattcagacgactttgatcttaactctctcatcaacaattggtcctttcagacggcaaatacgtatagtttctctcattctgctccatattgatcgtagttacaagtttgtgtatatagatgtatatatatatcaccaattcaccatcgtaatcacgtctcacatgtaactacgtacatatatcttgttcggggttcgttttgtaatgtattgaattggtggaggtggaatggaagtcatcttgtatagttgtacttgtatgtaaggtttgatagtaattttttataaagtaactaatttgtacatgagtctcttttatcgccctatgtatatgttgagctttagaggatcggtgtagctttctgtgcatattgtatgtaagagcatccacattcgtgaccctcttacaaatatctttactataatttattataaaagttaatgttattttaattttgagtcatttattagctaagtctttaaaagtataaaacgtttatgcagagacatggaaggcaccggtctccctagatgacatctagctacaccttggcgcatttgcgacattaattcgtggttgagttagaaggatcaaatttttttctctcttaatttgtcttatattttatgtcttaaaactggtaaaacttatgtataactgtcttatgaaatttcttataattagatgggcttttactcgtatataagataactataaaggtaggcaagactcaccggaggaggactgatggaatgctggaacgcattatacgagctcaagtcatgcaccaacgagatcgttctcttcttcctcaacggtgaaacaaaacttggtgttagttgctgtcaaaccgtagacatcatcaccaccgattgttggcctgcgatgctcacgtctctaggctttacctctgatgaaaccaacgttcttcgtggtttctgtcaatctccaaattccggtggttcttctccggcgccttcctctgtgaaactttgatgtatgcaaactccagtaatgattttgttataatatatggtttttaaatgatataatggcatctccctttggatttttccgtgtgactaaaaccgcatttataatttatacctggacaaagaacaaaaacagtgttgccaagaaacagagcatagtaagaacagagaaagtttctattcaagtaacttgtaaaacaagctagtagattcatgtttttgcaaaaccctagaaaagtcatagtttcattgcttctaaacaattaacagaaaaaaacagggaacagaacatatagaaagaaaagacaagtaacaagtccaacaagaaaacggattcatgattttgtaaccatgctcaagaaaatctcagaatctagacgtgatcgagactccatggtccacctgctccgttaaaatctcagctgacgactcagggagtaaagagttggccacatcgatcacgaaccggtacctgacatcagatttagccaaacggtccatcgcagagttgatatcactcatctttatgagctcaatatccgaaacgattttatgcttggcacagaactcaagcatctcttgtgtctccttcatccctccaatctgacttcctcccaccattttccttcctaaaacaaaacaccaaaaaccctaacagttacttccacaacacgtcaaacatagattcacagcttataacaacgggttatcatcgttttctttaccgagaactagagggaaaattggcaggtcgagtggcttctccggtaagcctaaagccacaagctttccattcactttaagcaaactaaacaacggtaatagagcatgttctgctgataccgtatcgataatgaaatccatagttccaaccgcttccttcatcttttgagaatccgttgtaacaagaaacgaatcagcaccaagccgatcaattgcttctctctctttctctgatgacctactaatcacagtaactcttaaaccaaaggctttaccaatcttaacagcgatatgaccaagtccaccaagtccattcacacctaaacgtcccccccattctttagtcatgccataatacttaaagaaactgtacacagtgattccagcacagagcagcggcgcg

SEQ ID NO: 533 - DNA, 12365 bp, Arabidopsis thaliana landsberg
ttttaaaaataagcttaccccatcccccctaagctaggcttacttataaagtcttttatttgatttaatcactttcaacgcatacttaattttgacaaactgtctttgacatcacaaactgaaatattgaagttattaacattcatttcaagtccctctaaggctctaactacatatcttaccaagcaaagctgggaaacatcacaaactgagatattggaagttaccacccaaaaacttctttgcgtttgctttttctttgacatcaccataagtaaacatcccaatatctctttcaaataagtaaacatcccaaaaatctttgatattttattaaatatttggcttgtattatgtgaaatctgattgcattgttcaaaaagtccgtgaacacttgtaaatgcaagatctgattgcattgttctctgttgaaaagttttgtaattagaattaggagtaatatagcactaaaaaagtacgattcatttttccatttgtatgattgtatccgatcaagacagcttgtagaatcgattctcctttcatgagaagcatcaagacttggaccatccagattgaactaaaaaaaattgattgtacatttctctggattacaaatctgaatcagtatacaactcacacaatgttcaaaaacattgagtacacaagttcagttcttcatcttctattctaccacattgatggaacataaacttgttctttcaaattctgtgtcgcgctttcagtagggaaacctctaactgcaccaattgtccactgcgctatgatcccagcagcaactgcaaacctgagctgtcgctccatcacatcctgatcctcaaacatctcaggacaagttgttagctttctcattatccctgcaacaacagcatcaccagaacctgtcctatcacaggtgaaaggagttataagcacatcttctgttccaatcacaacaccatcaaaagtaggagtatagtaatgaagccgaagtgttccatcagtcacaaccagtagcttcagcttgtcatgccacaatgacttgatttcctctggtgtgtaatggtaatagtctcttctgtttttcgtctgatcaaaatcctcagcgaagtactgtggtgtgtagtttcttctcctctcgtagtaatcttcatcaagtagaaactcaagctcttgctgtgaaacttcaatgatgtttgcttcattccatgctttcttgatcaacttcctagtctcattgcgcgatctccacagcggtaatgggagattcaagtcaaagaaaataagcccaccaaacttcttagaccattgtattgccgtaaaaagagttgattgcattgtaggagacgtcaacacttctgaattgaaatgaaaaatcctcgcctgcattagaagcaccagtaacaaacaaaaagcttaaaaaccaagcagagaagtgctctgtttcattatccaaatcttatcctttatgctcaaagacagagacttttgcataagaaaccaagctcgagctttcatgtcataaaccctagactaaacttgttcctcctaaaccctaggtgctctgtttcatgattatgctcgagctataatgtcatacaccctagattgttcctcttaaaccctagattgttcctcatagattgaaagattgttacctctttaagcacagctaaattgagttctgaagcaaatagcgagtcctcaggtggttctttcacagtctccgccatcattttcccgtccttaaacttgatcttgacacgagtacaagcagttttcgaattctcatcgaatttcacagctctcgtctgaactctctcctgattcatcatcagaacaagctcatctccaaaatcatcttcacctactttccccataaacgcagctctcccacctaaccgtacatgagagatcgccacattcgacggcggacctcccggagctctccaaactccgtttgatccatggtagcatcttccactgcgagtacatatcaggatgcattggattatcatggactcgcaccaccggaacaaactccttctgtacagctccgaagcaacacacaagaggcggatcgtcgtacggaaactcgatcccgtcgtcgtaatcagctaactccggattcaattcaggatcagtctcggtgttatctttctcaactaccgtcgatgtttgcttcttcttcctccctttgcgactaggtttagaggtggtttccgctgcagctccgtttgtgattccgctgccattaattgaagctttcggagtgagaaatcgccttgatgcttgtgaatggcgaactactagtacctctctacggtccagtgaagaatcaaaatggtgaaggtgggggaaaataagaagtgaagccattgatgggtttttgacaccactgtcagggtttatccaaatcttcttcctcttcaaaaaaaaacatatcgggtcctgacccgacttttattcaaaccgggtcaatcctaacccggttcgggtttttacttaatgctgaagaagaaaaatcagttcaattttctaaagaagaaacaaattaaacctcaccgacggattcaattctctcgttctcaggccgtcttcatcgccggagcgttttcttacggtaatcttgcactcgattcagctccttcattttgattttttcttcactggttgttgctagatttgggtttttcgcttccttgtgggaattgatcgattagtttgactgcttcttctattagcaaccttggatcttcatttactttctcgatctcatgtttaggtcagcagtttcaaggtttatgattcctgcgtaatttattgcatagcttaaaattgggattgtgtattctctgtttctgtaccaagcttagcttatcggtatgcatttgctctaatatctattttcacattttggtttagacaaagtgttcattgatagattgtcttcttcacttgtgaattgtgatgaaacttagtaatcttttgattgctgaaactggtaagtctcaggattcctctcttcttcttttttcattcaagatgttgtgattgactaagtgtacttttgttgaaccagatccacaagaaaatctcatctagtgctcttagggttgatcgagcttgttgcttttctcgtgaagcatacttatgttgcttatgtgattagcatatcctcagaagtgttgatatacaatatgtctaggttaaggctctttggaatgctaactcggtgaccgtcctgccattgtttagatttctagatattattgcaaggcaggaataagttcaatctggtggcttttttgatgtgttagaaacaagattttgcactgctatcttcatggttctctgcgctttagatctacagaacacatcagtagcttacatttgcatgcacttagtctccattcattttgtttctaaacctattaaaagataactttgttccactctctttccctgattctgatcattttgagctctatgcatcacagaaaagaatgggcttctggacattgttaaaaggtctgctgctctttgcaaatgcactggcaatcctcaacgaagaccgtttccttgttccaagaggatggacactcggagaactccaccaaaccggtagaagaaactctcccaaaggccaaatcattggtctgatccatgcctgccagtacatgaggctacccctcatgctcattaacacagcagtcatcgtcttgaagcttatctccggttgaagattttgtgtagatgaagataaactacattgcgttcttcaaatgattgtgattagttacaaatctattttgtgtaggagttggaatttgtttttgtcatccctcgcactcaagtttggtgtgcattctacaacattcttctcatatttttacatgccaaatcaaactaaaatgccaaatggtaacaaggttgcaagcttacacacatgaaaataagaaggggttacattagccagtgaagaacctcgtggataactagttaccaagaatctacttgactacattaacagttcacatatcctaaacacacaaaaatcaccaaacatgacttcacttcctttcttgtttcgcatcagcattactcgtcacaacttccattttctccatcttcttatacccaaactccttggtcttgatcccacattcctcctgcatcaccatcgcaagattgttccttttgaaagctgcatatatatgcatcatggcaaagaacacaagccctgttgatccaaaggtcatgacgaagcaagtgacaacctcccacatcctatcacttgtcctcttcttcgcagcctcctcttttctaagttgttcctcttttctaagttgttcctccaaaagcaccggcgcccaagagtgctcatactcggagtgtctcacttctaaactccaagaatgaagatttacattcccactatacgaattcacagcaaccatgaactcatcctcatctctcaacatttgtgacaaatcaatctgatcaaacatcagaggaagaacagattcaaagcttttagatttacttaaccggacttctaagaacttgccaccagcttggtaattaatccaagcgtacaacaaaaccttctccgtcttctccaagtttgcgatcgtgaaattgcgaatcctctcagacaccgtagcaccatcaacaatcaccgcgacattagaatctccaatttgggtgaaactgtcaaaagtatcgaactttacttggaataagagtgatcaacgtttcataacaggaaacactacaatccgagtttccaccacgattaggagaaatcgagaaagagaagaaagtagagaatccggtgaaatactcgaattttatattgttcatgaactcaatgggtttcttatagatgactcgcccaccaccgtgactcactgagtcagtcaattaggtccaagctccgccgtgaacgaccttagcgtccccgtacagggcatagtcttcggactcaaagatcgcatttttaccggagcttgtgaacgagaacgatgaggtagcttccgaaatcgagatgctggagagtaatgcggtgagagacaggagtagaacgagtaatgacctggagagaatgaagctcgccattaatgaagcacgcttgcttttgagattgatttctagggtttaaaattggagatgggatcggacccctgatggagaagagtaaagtggtgactgtggtgggggaagagagagaggaagaacagagaggtatgggtcaagcacttggacaatgtgaaaaagcgttaaaggtgtcaacttttgtctccctcgtttctgagtttttccctatctttgttgtcactgttgtaaaaccccaaaaatgcttatctttttcatttaattccaattacactcaagtgcattttatttaactccagttacaaactcgacatgccaaatagtttagtagcacaaaatactagatggaaccaatagtggtactgtggtagtattaagtaaagtaaaggcatggacgaagtccattgaatccacttatgagagtatctagggtggcttcttagtgtgataaatcttcccggaaattgccgctgctgacttaatctactacgggtcgtcatttggttgttggctctatcacatgaacatcgtctccaaaccgtgattatatattgttttctttttgacaccacatcaactatgtcaaagaacaaattaagaagggcacatcatctttcatggcaaacgcggctatcaatttgaaatttatccaaagtctcacaaaaatgtatattttatcatagaagttggaagtgaataacaaaagtttatgtatttttctagaagttggtaacaagtcagtgttttccctagcaaaaacttctgtttcttgtggactgagttgttttgttgggttatttagttttgagatatataaaaacgagaaaaatgtcatttaaatcatcacttaatcattttcgttggtttaaagcataaactctggaccttgtgatttaaatcctcaattttatgttaacttttattttaatcatgaattttcgtttactaagccaattaaaacacatcgttataattttttttacaaaacttctgattttttctccctttttcttaaaattttctattcttattccaattcaaagtagtttttcgtctttaaaacaaccaacaatgccggaaaaaaaaaaaagaaatttgtgcctcaattgacttagttatcgagaattttaattgaaaatcaacataaaattgaggatttaaatcaccaagtacatagttcatgctttaaaccaacgaaaatggtaaacgggtgatttaaatgacattttttccaatgtatatatataataactacccaacactatgaatcatgatagttccttttttctttgataatattaaggacatcaaggcaccaacaaacatgacaaccttatgaaagtataaaacaatttacataacaaaaaggttaagaccaattagtttaactaaaaatgaatgttatcgaatttacaaaattatatgggatttgaagtattccattatatacattttttttgggacaaattccattacatacatgttttttttggggacaaattccattacatacatgttttttggggacaaattccataaacaaaaaatacttcactttttttctctctctcgggcaactttctaaatctagtttttttttcttctttttttctatttctttttaatcttcacttgaggtttacgacttcaacggtgaatcaaggaggagcaagcttccttctccaacaacggtgatgtgtgttattcgtcatgtgacgcatctatggctctttcatggcggtttgagaagctatgatatcgttcgctctgattcgaggacggaggtttcatagacgagtgtctcacggctcatccgccctattggccgctgcgactagcggtggaagttatccgacgacttttttcgtgctatgtttgtcaatctcccaaaatatttctgtatctagattattcttttttgcttcattataaataaatatatttaattttaaacgtttatagtgtattttaagtttggaaccaataaaatggaagagaaataacacatgtcaaataaagagatgacatatgtcacaactttagaacatatgttttgtgaaaaacttattttattatataagatatgttggttgtaacaaaaaataaaatgaaaaattccacttcacgggttctctcctagtttctttaatgagttatccgaaccaaataaaaacttgattcgaatccggattttattcaatcgaactgaactaatcaaaatttcatcaaaaagtaataaatcttcttaatatatttatatcattgaaacatattaaaagtctataaaataattaggtttttaataaagaaatccagccccaatccaaaagaaaagaccaactaattcctcgccttttgcaatttcgtataattatttcccaatttttgtgtttgttaattaaatctctaaatgttcgctgacttcgtaaatttggattacgtaaaaaacgactttcattagtaaaaagctgaagaagagtggtgaacatattgtaccacgacgcctcttggtctacacatctatcgaaaagcttagagactaacaatattttatgtaagaaagttgtttttttttattctagactttcacatgataacaaaaaatataacatatatctagctagatatttacataatgattccatagtagaatcatatttttgtttgtgtgaaatgattgtaatgttttcctcatcttgaagattcaaatcctttttttcagaagttgtacaaaccacaaccaaatatctttatcttccacctcaaccattgtttaaagaattagctacaaacatttacggttatcttccacctcaaccattgttaacagttagacttttatgaagtcaacaaattcttaaagacaattggcaaacgcaaaatttagtcattttatccaaaattctaaactgaaacggagccaaaataaaattcagttttatttggtgcctaatttataaaatccaataatacgtaacccacaaatctcgaaccaaactaaaccaaagaatacccaaaattaatatcagatttgaggcacgtgagatacgcctgctaagatacacacagctcgaaatctgagtccttctcttctttttcgccatcggaaagatcttaccttcgatttcaatttcttgctttcttctcagttcgtcacgatcggagctttttgtccgatctcaaatgcccaaactcctccatttagttatcttcccggtagcatctaagtagcttgaaatccctaatatcggagttgctctctcccagaaaatctcgagaggttcaagtaacgaaaatggctttggtggcggctttagaggcggatcttcgcgctctctccgccgaagcgcggcggaggtatcccgccgtgaaagacggagccgagcacgcaatcctaaaggttaggatttctccacagtaatgtacaagtgtgttgttcgagcttgaattcactgtaatcattgagattcaaattggtgtttgttttagttaattcgcattataattttccactttagactctaaaattgaattgttgaactcagtgagcttggagaatggatagcatttacattgttggaatctttgttggaatgtttctggtgaattgaattgttaaatgtggagtcattcttgctttttcagcttcggtcgtcatcgagtgccagtgatctttcaagcaatgaagacattcttcggatatttctgatggcgtgtggagtcaggaatacaaagcttagtgttataggactttcctgcttgcagaagcttatatctcatgatgcagttgaaccatcatctctaaaggagatactttatacattgaaagatgtaagttggggtttctgtacctctctgcattatattagatagtaatataaagctatccttcgtcttcttctttatttatacgagttaaggcaaaacagctatctgacgccatgtttccttacttgcagcattcagaaatggcagaagaaaatattcaactaaagactctacaaactattctaataatatttcagtctcgactacatccagaaacagaggtgaatacaccaagcttgatctagtaagaatggaagtctaacacaaaactgctggtagtcgaagttggaaatttaacaaaacatcaatcctgatcctggtctttgacgtaaacaaaacttaaaatagttttatgcatataacaatagaatgcagatgtcaggattttttttttttttttggagtgacccatcaaataagaccactaaaccaaactgtcctgtactaatgtaaaatcattagttctccattgatctgcttgcttgttgctttgataactttagcttctttcttaattccaggataatatggtcctaggactaagcatctgtctcacgcttcttgataataaccgtcctcctagtgtttacaagtacgttgcttttataaaaaccttacctcatttctcctatattattattttcttttacttttttgttttactttgtcaaaaataaaatttatggttttgttttttttggtctcctagtactgctgcagctaccttcaggcaagcagttgcattgatttttgatcaagtggtttcggctgagtcccttcctatgcctaaatttggttctagcagtcaaacagcaaggactggatcagttactggagatttgagtcagaatatcaataattcagagtacgtcagtcctgatcaattctgtctgttgtactcttttatcttaaactttgtactgtctttactgggtaaatatagtattagagctttgtggaattatggttatttttatacacactgggggatgaaatgattacatgccggttgatttgagcttttcctgatgaagtgaaagacataggctctcctttttgaacttacgctttagtcaattggaaccttggcatttggtgttatttatttgatagactaatagaattatgaaagcaggcccttggagaaggatgttatcggtagtcgattgacaataagagacaccctgagtgaaaccggtaaacttggtctgcggttgcttgaggacctgacagcctcagctgcaggtggatctgtatgtgttacactatattgattttggtgctgtatcttttctccagctaagtatcgttaaagggatatcaccgaattaattgttatattcatgctttacaggcagcttggttgcatgttacttctcttccaaggacgttttccctcgaactaattgagtgagttggcaaggctttttaaactctagttgcatatgttgaagtgaaagttgaaaaatcatgtttaaaatgcacgagttctcaatttacttggcaggtttgttttgtcgaactatatatcagtttttaagatactacttccctacgaacaggtaatgctaggatatttcctggtgggcacttgtttttcatccttccattagcgtgatgacctaactgtaaaagtttgcctatttattcatcaggttttgcgtcaccaaatctgttcccttctgatgacatcgcttcggaccagttcagaggtaaaatcatgcctcattaccttttgtattgtatgcgtccatgtgatctaaaatataatttggattagcattaaagtatatcgaatgcgcttacttataagattttgttactgctcagctcgagggagaaatggttgaaccttattttcgccggttagtgctgcggtcggttgcgcatattataagactgtatagttcgtctctcatcacagaatgcgaggtacagtatgcaaaactttacttgttcattttaaactttgtgctattgaccacaaaggaacaagcacatgaaatgtgttctgcggatgactatgatctctgcaagttctctttactgatgtgcgtccatcccatttctgtctgtgcacaggtgttcctaagtatgctcgtgaaagctacatttttagatttgccattgtggcatcgcattcttgttcttgagattttgcgggtaatcgttacattctattattactatttgcacatgtatgtatcacagaataggaatttgtgctcaattcttttcagttcacatttctaaggtatcttgtgtgtctgtgcattaataggggttctgtgttgaggcaagaacattacggattcttttccagaactttgatatgtaaggctaaatacttctctttgtccttgtgatgtactcaatgatgcatgtttaggaaactcccgtctcgttctttcttcacactgcagttgaaaaagtttctaaatcttattggtttttcttgtgattctactaacttttactatggacttttggtaaagattgtaatgttatgtctggtgttatagaattctctgttcgtcctttttttctttccctaattatgtctctcgtgtgatctaatattaactttgtctttcaaggcaccccaaaaacacgaatgttgtggagagcatggtcaaagcacttgctcgagttgtttctagcatacaggtgggtgtgtagggcaggacgcccgttatgtttcctgtagtctcaatttgcattagttctagtagtcgctaattttgatttgtttattagttggttttagatgtgcatttagttttacttattatgtgtacctgaaaagattctatggaagaatttcaggaactgtatagtggcttgtttattatagctcaagaattgaaatcgcataataggagtaaaacttggaacatagcttaattctagagttggtttccttggaagtagtttcaggagacgagtgaggaaagtctagcagctgttgctgggatgtttagtagcaaagctaaaggtaaccaattatttgatgctatgatgattattcattacctctaaggacctcagaattcgattaatgttacttcattctaagaaagatgtcattaaatatattccctattgctgtaggaattgagtggattcttgataatgatgcatccagtgctgctgttctcgttgcgagtgaagctcatgcaataacgttggcaattgaaggcttacttggagttgtttttacagttgccacattaacagatgaagcagtagatgttggggaggtaattgatgcagggttctcctctgctattacatattctttctactctttacctgattgtctcttgtgtttcatacttacatttcttcaaaccatcagcttgaatctcccagatacgagcatcttccttcatcagattatactgggaaaacctcacttc

SEQ ID NO: 534 - DNA, 3192 bp, Arabidopsis thaliana landsberg
  unsure (1)..(3192): unsure at all n locations
tcgttctacagaaacaacaggaagaagatcattggtcttggggccgaacgggtgcaaaagggaagaaagctaaataagaccgtcttgttgcagctctgcgatggtgacaattgactaatagtacaactttccgatgaagatgaagatgaaggtgaaggtnnnnnnnnnnnnnnnnnnctctccctcttcaattgtctcaatctacccgagttcacatttgtgggcattggcataaacaagactatgatgaggcttgagagtgagtatggtttgacctgcaagaatgttgatgagattggacccgccacatggaatctgaccaatatgactaccgatgtgaaatttacgatcagtactattgtttcgactgagagaccatcaaatgccgtacttgaggactgggagaaatttgttctcaataagaaccagatcaagcttgcagcctccaatgcatactttgcttttggcattgggaacattttgttggatgttcagattttaagttaatgaatctagatttctgtttgtctttctttgtttttctttcttatgttcttcagtatcttgttgtagtttgcatttcaaccgttttaaagaccacaaaatgtggtatttggttcttcatttttttgttcttgttctctctgttagaccacaaagtgtaatattgggaaagttttgaggttaattagactgccacaataagcgttcaactagctagagtctgaatgattgtagccaccctaaactctgaggtcaaggtaaaggtataatattattactacaccacgtgagctattgaactgggcctgataattaaaagttgattagggcctattagaccacataacgaaatcttgagccgctgctgctagggggctgaaggatgattaattaagtgttcaacttgaagcaatgaaatagcttctgagagaagagagagttatgaaactgaaatgatcatcattttttttcttgggacaaatcagtcatcatctcttaatcttatctatgtaaagtgtaacttttttttgcgggattagtttccaatttgtgattaataaaacccaaattttaactaatgtataagagtttgggcttagaacccaaaataagtgggcctctatgcattgtctaccttttgatagtgaaactatttttgaataaaatgacaaagtagaactgtacagttttttgatgttttccatgaaaaagaaataagttccatgtattggagagaagagagtcagaaaaaaaagagtcaaaaagattcttttgaaagacgggtaaacttcggagttccaagtaattattgcattttcatatacgctctgttcttggattctctaaatcttagtatttgaatacaaatgcatatgtagcaaatttaatattgtaactatatgtaaattgtttttttacaaaaaaacctccaatgtatttagtttttgcaaacttaccctcctaatccttaaagtacatgacaattgacaactacccaaccaaagaaaaagctgcaatacaaatacaagcctcggttatatcgatcatccaaacatgtgttttctttttattcaaaaacgaaaagcaaggagcattgtttgattgcatgaaaacgaaattaataactcagatggtaaggaagctcgttgttgaccctatagaatacatagaatgcttcaaaaaaaaaaaaaaattgtaacaagtgtcgttctctatagagaaacaacacaacataaaattcttaaaacgacattgagaaaaggtgtgtattactgttttttccgttggtggttagttaattgtcattcatttttggaatataaacggtaaacttttgcaaaaaggaatattacaaggatttgtattgcaaaaacaaaaacacatcaatagttacttcgataaaagtaaaaatggttgcagagtattattattactcaataggccctagctcagtcacacaggtacatccataatagtgccccattaacttctttcactctcttattgtgtgtggaacagtgaccaagaaagagagagagagctttgctttgcagaaaaaaatgcagaacttttggttcgccatcttcttcttcctgctaacatgcgcaccaccgtctcctttatcctacgcatccaccgtaactctcagccgtcgtctcctctatgactatgaatcacctcttcctcttcctctatcccccattagccctcctttcttccctcttgaatcctcccctccttctccacctcctcctcttccgcctactcctccgacaactttcgccgtctttccaacttttccggctaatatctccgccttagtcctccctcgctcctctaaaccacaccacacttcacctacacttctcctcccagctctctccgccgttcttgtcattgctacagtcataggcttagccttgtttctctacggccgccaccgagggcaaactcgtcatttaaagaactctcattgttctagtagcaacacaagcagctatggtgatgaacagagtcatatcaccactaacttcaacatggctgctactacttctccttcagaagttttttacctcaatacagaggaatctgaccatattagaaccggaggtacttttttcttgaagcaagactcgccggagatacgaccattaccaccattacctcctcgtagcttccaccataacaactatgaaacagaggtaaacgaagaagacgaagaagaagaagaagatgtgttcttctcaccaatggcttctctccctggctcagcgaactcaagcccttctcattcatgctcttcctcctgctccggttgggtttctccagctaggtcattctctatcaccatgtctccaccaaaccctagatactcagacgccactaacctccagtctccgtcaccggagagactaagagtaaggaagaactataacggaaatgggtcgtcttctctaagaatgtttagcttctggaatcaaaatatgggatttgggtttcctcgtatctcctctgcttctacttcaccagacagaggattcataagaacaccactttcgtctctctactcttcagtttccacttctcctgatgggttattccggaagtttctcgatagttcgccgccgatttggaatgactttagtcggaatgtgaagtctgttttgctctctcacactgcgtcatcaa

SEQ ID NO: 535 - DNA, 1757 bp, Arabidopsis thaliana landsberg
ccccacgggtttctacactttgtacgaggggttcttttatggctgcttcttgtggctgtcagttccgaggcaggttttggagtacgtgacgtcgtaccagattgccctctcccagatcacgatgcggtccttgagacatttgctcgggattttgatttgcagttatgaatccgaaaccgaaattacgcttgctcatctgaggaattttctcgagatccggcgggttcccaaatctgaagtggatcggtattacatatctcctgctaagggaaagaaaattattgacgggttctcgagcaaggatgaatcgtataccgaccacttcttttacgtggctctcagagatgccgttcacgatgatcttctcgggacggttctgacgagatggggaactttgggtagttgtagttaacgatctgtttacgtccgacgcgatttatatatttttggttctttttccaactagtttcttttgtcgcagaacgcaccctcaagttcctcgagccgattcctgacgatttcctctcgtcttatcacgcgttatcatctcggaagtgcgattggtcaaaacatttttcccgggatcgagtcgaacgagccctccgtcttcttcacggtgtttcctgcccctccagctcagaatctttggaccatcgtactcaattcttcgtcgatatgcagtcaactaagcttactttgagggaggtgtacgtgaagaaaaagaaagataaagagagacgcttggcggaggagaagcgcctcgcagaggtaaggctgagtttgtcgcggggggcctctcccgatgcggctcaagatcgggacgttgctcccgaggttgtggttccggtcgacccgacgcccgctggggctcaagaagtcgatcctacagttggatggctttatccaatgatttgtagaacctatgcctggacggctttatccattttgcaattcgaactttttggtggaattctaaaatcccgaaccgttttattgcctaatataattcagtttaagtatgggtgaagcttttcggttgcgatctgattcaatctttgaccagcgtttagaaacgagctgggataccggtgtttgagtatgaccgggtttcagaagatagaattcatagcctgctcggaaaaacattcgagcagattcttatcttgaatatttatatagcgcgctgtaacctctagcgcagcgggtttgcgctaaatattgggatatgttcggcacctctagcggagctttggggggtgtactacgggttatatattgcctgggagtataaggttacccggttggagttagaggtggactccgagattgttgttggttttctcaagacggggattagtgatactcatcctttgtcattcctagcgcgtttgtgctatggctttatatcgagggactggatagtccgtatttcgcataagtatagggaggctaaccgtcttgcggatggattagcgaactatgcattttcgttacctccggggtttcatgggcttggtgcttgtccggagagtgttttagcggtgtttggtgatgatgtcaatggggttgggacttcacgaaatgttttgttgtaattgttgttttattttaataaattgataggggaattttccctatcccttaccaaaaaaaaaaaaaaatatagcgcgctgtaaccgaaacggtgtaaatgaaattttggaaataataggccgtcgcccgttaaaatatttcaaagtaaaaagatttagaaatca

SEQ ID NO: 536 - DNA, 766 bp, Arabidopsis thaliana landsberg
atttaattattacaaaattacaaaatatttaaacaataattcataaacatatcataaataagattaacattaataaaataaatgatttttttatgggacgggttggcgggacgggtttggcaggacgttacttaataacaattgtaaactataaaataaaaatatttatagatagatacaatttgcaaacttttatgtatactaacttttaaaaataaattgttcccgcggtgtaccgcggattaaaatttagttattattaaaaacgtgaaactatatataaaaaaaaacatgaaactatatagactatagtataaaactaaaattgggttaaagatatagaggatgagaaaattacgtttgtgataagctagagaaaagtcgcggagtggagataccatactcgtccttttttagaacaatataattgaatataggatccaatattttcaagtatttataaatacatatatagatagatttttttttggattcattaatggtatctctcattgttttttataattaaaataataataaaaaatagaaaaggaaggaaaaagagaacgtttctctgcctaaaacctctgagatattctgacaaacatattttgacataatctaattagttaatttaaatttatttgaataataaaatgataataaaaataatatagtttattcacccgatatttttttcagatatttaccaatgaagagcaaatctaaatatagcaagataacgtatatgactttgtataatgat

SEQ ID NO: 537 - DNA, 1009 bp, Arabidopsis thaliana landsberg
catatttagcttagtgatcactcattgtatcatatcattttgcatcacatttagcttattttgctctatcttaggcatttaggatcatcttacatatatattgcatgttttggtgtgttttcaggtgcagaaagagctcacaaggaaatctactcgaccctctactctatcaaaccaagagggaagcagcagagcaattcactcgacccctttactcgatccaggtagctatagacgaggcaacatactctactcgaccccttactcgatcctctactcgaccagtttacttgatcaagggcaacctactctacaagacttgttgatcgttcaaagcgtcttctgatcctcctcattccccactcaaccagacatctgagcatacagataggagaggaagaagcatctactcgaccaattgatcacttggagcatggaggcaaaggcgcagactttgcagcaccctctttactcgatccccaagatcgagtatttgcccaaaccgcctcaagtctcttgtcttctagtgaatctttggtttcaacattttactataaatagatcactttggcgtttgtccaaaggatctatgctttatctttcagtttttctttgtgtttatggatcttaaaaccttagttactcttagtctatttcgtttgattgtgatagtaggtttttaagatcaattattccaagacactatcctgtcattgtagtattttaggtgtcaatccaaatgggtgtgatgcagacagatgcgatatgatcagaagttgctaagtcaagccaaacagaatttggttggttttctaacagtcctagtgttgatgcagaaaacagtaaaaagtcacagaaatgactgatatactcgatcgtagggtcgactgccagaagggaccccatgatcgagtacaacaggatgacagagagtgaaaatgcagaaatggaccagtttactctatcacgcagtctcactgttagtagactgatatgatcgagtagaatg

SEQ ID NO: 538 - DNA, 597 bp, Arabidopsis thaliana landsberg
ctggttttcagtttggttgtgaatagtctattaatctccaaatgtgagttaaggacttggatccaatttttttactgagctaactttaattacaagagttattatagcgttgacgtcattgttaggtcattaacaaaagcgaatcctacgattgatatgttgtgtttgaatccgtaaaggtgttattggtttatgactttgaaaaagttttaatgacttaaaaaagaatagaaagtagataaaataaaagattttaaatgattattagagagttttgtataatttttgttattaacttttccaaaattttgtaaaatctttctataatcttgtaaaatcttcctaaactttgatttgtgatttttccaagattttaacatatcttcaaaatattgtaaactattctatcgtcttctataataagggggtgatattggtctgtgattttgaaagagttttagtgacttttaataaataaagaaagtagataaatcaaaaaatttaaatgattactaaagagttttgtataatttttatgattagtttttccaaaatcttgtaaagtctttctataatcttgtaaaatctctcttaatc

SEQ ID NO: 539 - DNA, 4818 bp, Arabidopsis thaliana landsberg
gtcgtgtagctatctcacgttgaagattttgagtactggatggactcagtgggatcagtccttactgggcaagaatcaaagagactcagataattgtacaacgccagagaagtggatatcatcaccaggaaatctggagatcgcacttatacacagcttgtgaggcttcttataatcgacgaaattcatcttcttgatgataatcgagggcctgtgcttgaaagtattgtcgctaggactcttaggcagattgaaagcacaaaggagcatattcgtctggtaggtttatctgcaacactgccaaattgtgacgatgtggcttcatttttgcgagtggatcttaaaaatgggttgtttatatttgaccgtagctacagacctgtgcctctcggtcagcagtatataggaattaatgtgaaaaagccgttacggaggttccagttgatgaatgatatatgttatcagaaagtagtggctgttgctggaaaacaccaggtccttatttttgttcattcgaggaaggaaacagcaaaaactgcaagggcaatacgggacacagctatggcaaatgataccctcagcagattcttgaaggaagatagtcaaagtcgtgaaattcttaagtgtttagctggacttctcaagaataatgacatgaaagagcttctgccttatggttttgcaattcatcatgctgggttgacaaggactgatcgtgagatagttgagaatcaatttcgctgggggaatttgcaagtgttgatttccacggcaactcttgcctggggtgtgaatttgcctgcacatactgtcattatcaaaggaacccaagtatataatcctgagagaggggagtggatggagctgagtcctttagatgttatgcagatgattggtcgtgccggaagacctcaatatgaccaacaaggggagggaataataatcactggatacagcaagctacagtattatcttcgtttgatgaatgagcaactacctattgaaagccagtttatttccaaacttgctgatcagctcaatgctgaaattgtgcttggaaccattcagaatgctagagaagcttgccactggcttggctatacatatttatatgtccgcatggttcgtaatccgacactgtatggcgtatcgcctgatgcccttgcaaaagacttgctattggaggagagaagagctgatctgatacattctgctgccactatcttggacaagaacaacctgattaagtacgacaggaaaagtggacacttccaggttactgatttgggacgcattgctagctactactacataagccatggaacaatagctgcatacaatgagaatctgaagccaacaatgaatgatatagagctttgtcgtctgttctctctgagtgaggagttcaagtatgtcactgttcgacaagatgagaagatggaactggcaaagcttttggatcgtgtaccaattccggtaaaggaaacactagaagatcccagtgcaaagatcaacgttttgctgcaagtatatatttcaaagctaaagctcgagggtctttctttgacatctgacatggtttatattacccaaagtgctggacgtttgttacgagctatttttgagattgtgttgaagagggggtgggctcaactgtctcagaaagctctcaacttgtctaaaatggtagggaagaggatgtggagtgttcagacacccctctggcagtttcctggaattcccaaggagattctgatgaagttggagaaaaacgatctggtgtgggagaggtactatgatctatcttcacaggagctaggagagcttatttgtaatcctaagatgggcagaccacttcacaagtatatccatcagttcccaaaactgaaacttgcagcacatgttcagccgatttctcgttctgttctgcaggttgagctcacggtgacacctgatttccactgggatgacaaagcaaataaatatgttgaaccgttttggataattgtggaagacaatgatggtgaaaagatccttcatcatgagtactttctttttaaaaaacgggttattgatgaggaccacactttgaacttcactgtaccaatctctgagccaattcccccacagtatttcatccgagtggtttcagacaaatggcttgactcgccgactgtgttacctgtatctttcaggcatcttattcttccagaaaaatacccaccacctacagagctactggatttgcagcccctcccggtgatggccctaagaaatccttcttatgaaactctttatcaggatttcaagcatttcaatccagtgcagactcaggtctttactgttttgtataacacaagtgacaatgtagtggttgctgctccaacaggaagtgggaagactatatgtgcggagtttgctatattaaggaatcatctcgaaggacctgattctgcaatgcgtgttgtctatatagcacctcttgaggctattgccaaggagcagtttcgcgattgggagaaaaagctcggaaaggggcttggtttacgggttgttgagttaactggggagacattattggatcttaagttgcttgagaaaggtcagataatcataagtactcctgagaaatgggacgctctgtcccggaggtggaaacagagaaaatatatccagcaggttagtttgcttatcgttgacgagcttcatttaattgggggtcaaggtggtcaagtgttggaggtaattgtctctagaatgagatatatttcaagtcaggttgggaataaaatcaggattgttgcattatcaacttcccttgcaaatgccaaagatcttggagagtggattggggccagttcatgtggcctttttaacttcccgcctaatgttcgtcctgtcccactggagatccacattcatggggtggacatattgagttttgaagccaggatgcaggcgatgactaagccaacatacactgccatagtacagcatgccaagaacaagaaaccagctatcgtttttgtcccgacccgtaaacatgtccgccttactgctgtggatctgatagcatactcgcacatggacaacatgaagagccctgatttccttttagggaatctggaagaattagagccttttttaatacaaatttgtgaggaaactctgaaggagactttacgccatggcgttggctacctgcacgagggtttaagcaatctggatcaggagattgtgactcagctttttgaagctggacggattcaggtatgtgtaatgtctagttcattgtgttggggtactccattgaaggcacatttggttgttgtaatgggaacacatttctacgatggacgggaaaattctcattcggattaccccatctctaatctgctccaaatgatggggcgtggtagccgacctctgcttgacgacgctgggaagtgtgtgatcttctgtcatgcaccacgtaaagagtattacaagaaatttttgtatgaagctcttccggttgagagtcatcttcaacatttcttgcatgataatttcaatgcagaagtagttgctagagttatagagaacaaacaagatgctgtggattatcttacctggagcttcatgtacaggaggcttccccagaaccctaactactacaatctcctgggagtgagccacagacatttatctgatcacctctcagagctcgttgaaaacactttgtctgatcttgaagtgagtaaatgcattgaaatagacaatgagttggatctctctcctctcaatcttggtatgattgcgtcatattactacataaattacaccaccattgagcgattcagttctctcttggcttccaagaccaagatgaagggtcttcttgagatcttgacttcagcttcggagtatgacttgattcctatacgtcctggtgaagaggacgcagttcggagactcatcaatcaccagaggttctcttttcaaaacccaagatgcacagaccctcgtgtgaagacaaacgcacttattaaggcgcatttctcaaggcaaaaaatcagccggaaccttgtaatggatcagtgtgaggtccttttatcagcaacaaggcttcttcaagcaatggtcgatgtgatatcgagcaatggctgtctgaatcttgctcttttagctatggaagtaagccagatggtgactcaaggcagtggggatcgagactccatgcttctgcagcttcctcacttcacaaaggacttagccaaaggtgccatgagaatccggggaataacattgaaaccatatatacgtggatgttaagtctaataaagatctttacgaaaggttttaaagaaaaaggagtcttttacgcaaattgcagttattaatagcttatatggtgattaagaaaacacaagctcacgccaaacacacattcatttcatatatataaacacaaagtaaaaaggagaaaaaggatgaaaacaaacaacgacgttttcttttttaatttgctctctccgtagtggctaattatacataatttaatcacacagtctcgaaagagtagtatgattatagtaagtcttctaatacctctcgtttaggtggaactaacacatgacatctttgagaagcttgtaccttcttctttagtcttaggatatcttggcgcgtccacaggtcccacctcggtccttccctccatgtctctctccagtaatacctgcaatgtgatatcttttccagggcttacttcgttacttcccacaatctcatatgtaaggtcaatgttggggaagaggttgcagaatctggcaatgt

SEQ ID NO: 540 - DNA, 1043 bp, Arabidopsis thaliana landsberg
atcatcttttattggtttatcaagtttttcttttttagaactagaaatagcgtcttctttctttgttgagctgtccataacaagctcttcatgactcagtttctcggatctatcataccctttttcagactcatgacagtcaagaaccttctcaacaagatttttatcgggtaactgagctgctcccacagggtcctctttcattggtttttctattttttcttccctacatctagaaatggcttctttttcctttcttgaactgtcttcaacatgttcttcacgcctcaaattcttggactcatgatagtcagaagccttttcaacaagatcgtaacccagtaactgtgctgctcctacagtttcctccttcacattttccaaggactctttcctcttcctccttagcctaatctcctcaacacttgtaggtcttgttcgagcagcagatccttcttcatttacaagtgtttcatgtccatcacgattttccttttgcttattaacttcgttcatcctgctttattcccttgagataatgagcagagagcacaatcatcagcagacataaatcacaaactaatagaatgagaacaaaagaaaattataaggcaatgcacagctgaattcatgagtttccactccctcgtccaacatagaaatcattaccaggaacttcaaaattacaagatacatggagccaaaatcacagaaacagaaacctaccaacacaatactattccagatttttttatcatatcatagatcttcgatcacatttaccaagctcctaaccaccagaaaaagcaagttatttaactgattgtacaagaaacagtgactgcgcctctaaaaaccaacaccatttcctaactacttgactagaaacttcaagatgaacgaatagatcagaactacgatccgattgaatgtaattgcattaggtcatccacgacctagagaactagacggcgcagagtagagatgtttacacaggccattctactacgcactaacgacataaacattgaattactagctac

SEQ ID NO: 541 - DNA, 644 bp, Arabidopsis thaliana landsberg
actgaaatcgctcactatctactaatttggttgcatatacccgccacgggcaagtgttccccacgcagaccgcgatgaccatggttggacatgatttcgcatgaataaagtggaacttgcggcgaatcgcacgaataaagtggaacttgcggcgaatcgcatgaattgccaattttgtgcaacagtcatctttgtttttgaacaacctccccatgaaaataacgtccccttcataatccaatgttctagccgtttttgttcccgcggttgcctcagctgcccccatttgctgtcctcctagggtcatctctgtagcacacatacctcgccacatttccgcaaagtatgttcttctaaacgcctcaaactccgcttctgcagaagcttgtgctgcgtcaaacatattaatacttggtaaaccagtcgttaacacaggtagaggcaatgttgactcgataacttgtcctttgcctttctcttttgcggatgcctttcgtttatctccgtcaacggacggcttgggtaccgatgctctaagaggcgttgcgtatatcggatcctttatccttattcctgcatttacgtatatcctttctcggtccttcaactgtttcgctccacctcttgggatgaaagattcactt

SEQ ID NO: 542 - DNA, 1144 bp, Arabidopsis thaliana landsberg
gattataacttataattttggattatggattagtttttaggcgattttgacactattttgaatcaccacaaaaattaagaatatttgtttctattaaatttgtgctatttttggaactttggaaataatgtgctaaatttggatacaaaacttatttttgtgctatttgtgagaattgccttaaaaacttattccaactctcgtgttttgttcttactcacatgattccgacaatcatttctcggaaggttatcttatcctaaaattattctaactcaaacaagcttaactgttaagttctctcaagacgtttaaccaaaatgataagtgcactttagtgacatagctggccaaatcatttttttaaacctttgtgcatgcaccaccatattcataaaatcgaggtgttacagttcacccacattatagatcccaacgtcctcgttgcgcaccatgaccgtcaccccgacggtgagagccttcttgactccgcacttatctggatctggctctgataccactgtaacacctcgatcgcccataccactcacgtcttctctcgagcccatgggcccaacctttgtcgatggtttgcctgctacatccgggaggtttaaagacttatttaccaaccctacaaatcaccacaaaatattttcccgtcttttttcctcactcacacagttttaaaaaccagttcccggaaggtgacccatcctgaaattactcgagcccaaacgtacttaattgtggagctctctttgaacgtttgaccaaaaagataactgaagtagccaaatcaaatattctaaacctctttgcatgcattatcatattcctaaaaccgggatattacattattggttctaaatatttttcgagttaaaacacttgtagtaggcctaccagtgagagctttcttaactaaatctccttgtagtctttgttgaactgctaaaagtgaactaaagttaaatgattgtcgataaatcagagagttgttttttgcttccatgtcttatcattttgccatagggttctttagtttaagacacggtaatctgagtttttccttctttttcttcttacctctacgacatgctcttcttctttcttcgtcatttctattaaggttcgatattct

SEQ ID NO: 543 - DNA, 3827 bp, Arabidopsis thaliana landsberg
taccagacataagtgtgaattttcttccgagccgggtatctcttgtcggtttgtagtcgaacggctcgtttcgtgcgagttagaccgtttacccgaagcgtttacgagattcgcctcggggtggtatcctgaagtacccgaggcgctgctaaattcgggtcggaagattacctgcagggtctccgaggtgttttctaatctggctcgggatgattccttgatgcgatttccgaggtacttgtcatcggcccggagtacgcgtcttgaaacgactcccgagccaaatatacccgacagatgtttccgaggcgtttttggagtttgtttagttggctcggttcctacgagaccaaatccgaccccaacagtttgccccccagctcgttgtcttcgtttacgagcgacgagtttcgtgcggttaaataaccgagccgacagtatatcttttcagttcacgatccttggcgcttcgacttctcggacggtcaaacttccattcatgcgtggccgccttctttcttgagaagtggaagcgtcttgcttattcccgaggtttgcgcgcgtgttttctcctaccgagctcacgcgctattgaagtgttttaatttctctttcagacccgacgcgcctttatgtctctatatatatcgagctgctcctcaggattcatttatctgaagttgccaaagaaaaattttgaggtttgcttctttttctctgatcttgatttctttgcatcgtttttctttttccggtagtcttccgacgttgtttgttagtattttgattttttcggctagaaatcttccaaatcctcgtttcgtcagttcattccgagccgaagatgagttttccacgaaacagcgtatctctctcggtttccagttggctcgccgactccagcgattccaatcatagagatgatcttcccccgatttacaagcgtcggattgtttggacttcatctgagggttccgaagctgatgcagcttcgtcttcgaacgcatccgaggcgactccctttgtggctcgggaggacgctactgctgatattgctcgcaaattagatttgcctgaggattccaagccgtcccttgttcgtaagctccgtgtcccagctgttgacgaggccagtgcttcgaattggcaggacgtgacctagcgttttatcccgaagttaaaatcgaagagcatctgtttttcgggcctgatgagacggagaaccttgttcgagcgttcgagcaaaccgcttttgagaaagccgagagaaagaagaggaagaaaaataaaaaggtggttcagtcgaaccctcgaggctcatctttatccatcgagcagtcgttgtttgacttaagggctcggttcggttttggcaacgtcacccttcgcgttcctagcccaaatgaacgagccgacgatccccccgagggctttcttactctgtatgaaggatttttctacctttcttttctctcgttgtcagttccgaggttgattttggactacgtgacatcgtatcaaattgccctctcgcaaattactgcccgatgcttagacatctcatcgggatttttgtgcgtggttatgaaactgagtgaggtcacgcttgctcacctccgaaattatttggaaatctggcgagttccgaaatccaaggcggatagatactacgtttctccggctaagaacaggaagattatcgagggttttccgagcaaggatgatgcctacactgattacttcttctttgtggctctggaagacgctgtccttgaagatttcgtcgggaaagttcttacgaaatggggaattttgggtagtttagatattccgtgaattgacttgtttgtgcccgaggtgattattgtgatttatgctaatattatttcgttgatgtttctgcagatcgcccgatcaggtttctcgagccgtgtcccgacgaccttatttcctgtcatcgagagctgtcggtccgcaagtgtcactggacgaagcacttctcccgagattgagtcgaaagagcactcaagctatttcacggtgtttcttgtcgtttcagctcggagtcctctgatcatcgaacctagttttttgttgatatgcagacttccaagcccactattcgagaggtttatgagaagaaaaggctcaccgccgaggagaaacgtgcagccgaggagaatcgcgtcgcggaagagagaggcactgctgaaggaacggatgtcaatcccgaggcttccaggactcaggaggttcctttggctgctgcgcccgccgtaccgggactcgccgagatggatgacgccggtttggctctgactgacccgccggttgaggctgccagacaggcgatagttgcactcccggcacgtgataaggcctcggcaagcgtcctcagattgatgactccgaggagaagaagaggaagaaaaagaagaagaagttggcgcaaaaggaggataaacctcctatctttgaagataaggtcgctttggtgaatctttttgggaagtgcaggggtcgcctacttccgcctcgagacacccattttcttcaggtaagtatgttgtctattttggtcattggttgtgttccccgagccatttttgaacgtggtttcccgtctatttttcaagctatgggttcaatgaatcgaatggtccaatcttatgattcgcctatgtgaaataatctagaggcggtcaacaagctggtggataccgaggccagggcgaagaaggctgagcaggagagagacgcggcggtctccgaggcctctgaggcgaaaatggcgagagaagaggctgagaaagaagcctatgtgaacaaggagaacgccattaagctagctgagcgcaatctgaaaacggattccgaggttgttcgctgtaagcgaatgcttgtcgaggcaagggggctcagagatagcaagatggctcggggtgcatagaaggttaggcgagagactttggaggtctttctcgctaagtttaaggtggtcgaggggaaggtgtctctcctcgaagatgccaatgaccagtttatgtatttgtcccaggcgcgggccaatgcgcagctggtcaaggtgcttgaggatggtggatccttggcgaccgagaagaaataggtcgaggaatggctctcagatttcgcagatgccgagacaatcctcgtgcggatcacatccgagctgaaagaagagcttaaagcccccgctcctgagccatatcctctaagtcctggcggacatagatcgatcgagaccctcgcggatgagatgggagttgctaaccaatcttcgctgtcggacgtttgaattgtaatatcgagccgttttgttcagataattttctattcgcaccaaggctgaatctcttcgttcatcgatcagatcgagctcgtcgagcaacctttgagtattatcaggttcgtggtcaggagataggcttcgccgcagacttggtattgtcattttggctggaattacacattccgttctgtagactaaggtgaatggagtttctcatgtggttcgacgaggcatcgtccggtgcgaccatagaacactttcgagttattcggagcacgaacactttcgacttccatcaccactcatcttcccgcctttgagtctcgcgcctaagccaattccttcccacgatccccttctttccctgaaaagccaacaaggcacacaatatcgggtcacttagcgcatacaatcaaaccatgcaatcttgctaagtttcggtgatgactcattcggaaaaacaaattgggagaaaggaagtaagcgcattagttcggcctagaagcgtcggatcgat

SEQ ID NO: 544 - DNA, 6853 bp, Arabidopsis thaliana landsberg
  unsure (1)..(6853): unsure at all n locations
actttttgttctattttttatctgttacctgacgactaccacctgatatgcattatacaattttctcgaggaacaggggatagtggcgagggaggaaacggtggtcgttcagaaaaatgaaagatcgcggaatttattgcagcaactcgtttgtgtaacttgaactcacagagctcttggaaagtctcaaaaagtcggataattttagtcgagctgagaaatcaaggttgagaagttcccgtgacgatgcccttcgcactgctcgttccgaacggagccgctttaaagatgacattcctctttataaagccaggatcgatcggttacggaagcatatctttgacaaacgcgtttcggacgaacctcttttcatgcaatatcaggccgcgggttctcgaaaactcttgaagaagttgatcacaaacggtttggcagtcctcggagagactatgtgcgagcttaaggttgacaaaaagaagtggggcaaagtggtcgatgaccttgcgattaccgatcttcttgacgatgacctcgtggcctttacagaggttgaggatgaggcagcgatgacgacggctgagggcgaagcgaggattggtggtacttaggtcgttgtgaccttccgaagcgacaagaggatgggggttgcttttatgctgtttttttttatctctttcggtatagtaaactttgttcgacgttttggcttttgtggctttgtcggatcggcgttatgtatgattagccctttgttgggtttgcgttgtatttcggatgtttgtatggagtttgactatcgcgctatttgacgactctctttattgatgatgtttgcggtttattcttcgtttagcatacttgatattgtatttgtgactgtcttattattcattaggcgcgagctgcagctcggctaatcctattcatatgctcggtttatctttgagttttcatgcaaggttgatctcgggtaacatttggtgaaatgtccttggcgttttaaacttggttttgaaacacattatggagcaagacgtctcttgacttatcatgtatatgttttagccgaaacaacaagcttagtgttcattagacaagacggactcatcgtacctgataggtgcggttctggtgtccggcttatcttgtatatactctgaggtcggcaagaacgtgcaagccggaacttggcttattatgattccgccgcctgctggctaatgcgaggttgtctcggcttttattctctacctaagtaaagatatggattatttcgccactgaattcatgtggaacgcgattaaatcgtgctcctggccagggagtcgatatgagagcaggtcgattggcgaggcggactcgtccaaaagagctcgtcaaaagtgataaggcataagttgcgcttatttttttattttatttttaagttatagttgtgcccgcaaagggctgcctacgtatccttaggaagggatcaagccatccgtagttcgttgttgttttttttttttatttttttttttttgaagatgcggacgcggaaatgataagacgtggtggtgatagtgtgtcgtggtagcgatgcacatcagtgttaatagtaatagcgtttaaggttggacgagttccaggagcgaggaattgaagtcccgtccatagtcaacaattgataaacgccgggtttaacgactttgaagattagataagggccttcctagtgagctccaagcttgccagcattgatttcggcggtattttcaaacaccttgcgtagaacgagatctccttcgacaaagtagcgggattttacctcttgttgtaaaattttgctgcagcctgctggtagttctggatgcgaaggagagccaggtcacgttgttcttcgacggtgtcgaggttggcgaggagaatcttgtcgttgagagcagaattgtggacaaacatagaacgtcggatcgtggggaggccgacttcagacggtgccatagcttccataccgtaagcgagggagaatggtgtttgaccggtagatcgccgaggagaagtacggtgtgaccacaagacaccgtcgagttcgtctgcccatgcacccttgttttcttcaaggcgcttctctagtccataaataatagttttgtttgtggcctcagcctgtctgttgccttgcggggtgtagacgtactcagccagattctccattttgcacagaaaccctcgaattgaagtgaagtgaactgagagccattattggtaacgatttcgtacggaagcccgtggcggcaaataatgttcttccaaacaaaattctggacgtctttcgattggatccgggcatatgattccgcctcgacccacttggtgaaatagtcgatcatgacgagaaggtatttcttttggcgggacgcatgaagaggtctgacgatgtccatcgcccaacgcatgaatgggtaaggaggcgcaatagtatgcaacagttccgacggtgcgtgaataataggcgcgtgcctttgacacttttcgcatttggcgacaaacttactgaaatcggagagtatggtgggccaagaatggccatgtttgcgtatgcgaagtgccaaagcacgacctcatgaatggttcccaccagcgccttcgtgaatttcacgcataatttgtaaagtttcgtcaccggcaagacatgagagaagtaccccagcagcgttccaacgatgaagattgccatccaacaatgtatactgcccactgcgggcacgtaaccgtcgggcgacccacttatccgtcagtattgtgccatctgcgatatagtttcgtatttcatcgcgccaatcctgaacaacgagatcgtccgtctgctgggggaacgtaggttcggttggaggcgattgggctggctgtgttatcgcataaacatttggtggtgctgaagatgttgatgcgagcgtattgacgattaagtagattatcggcggcccaggcaaatcaatagttggcgtagtctgcgtgtttgtagagggagaaagatcaatacttgggtgatcgatgctctcgacaggtataatacgacggagatccggatcagatgtcgaagcattatcgcttcttgggatcttattaagttcaaagtgctcaaaattacgggacagatcgcgaaccaccttgagataggcgtccatccgttcattttttgcctcgtaatcgccgctgaattggttagccaccaattgcgagtcgcaataagcttgtattcttttaacgccaataccgtacgcaaggcgcaaaccagctatcaatgcctcgtattcagcttcgttattggaggctgggaaagcgagtctgaaagattgctccagcacttctcccgtaggagaatccaatcgtacgccaactccggatccgtgtcgggaagaagcgccatcaacgtgcaatatccatttctcggacggaggggcgccctcgatgagattgggtgggagctcgattataaaatcagcgagtacttgtgatttcgcgcatgttcggtttttgtacgtaagatcatattcgcctagctcaaccgcccattttgctaatcggccagactggctcggactgtgcaagatcatccgtagaggctggttagtcaagacttcgattgcgtgagattggaagtatggtcgaagtttgcgagccgagatcactacgacataagcaagcttctccagcgtagggtaccgcagttcggcaccgtcgagaattttgctaacgtagaaaatggggtgctgttctccgcgatcttctctgatcagaactccgctgatcgcaaaacttgagacggcaatataaagatacagtacttcgccctgctcaggtttggccaaaatcggtggagttgagaggtagtcctnnnnnnnnnnnnnnnnnnnnnnncacttatcgtcccagtcgaaaagtttgttgctccgcaaaagttggtagaacggaagacatttgtcggttgaacgggagataaaacgatttaatgcagtgatccgtccagtgagccgttgtacttcgcgagtgttccttggggagggaagattgattagcgcagagatctgttttgggtnnnnnnnnnnnnnnnnnnnnntgacaaggtatccgaggaattctccagaagtcacgccgaaagtgcatttggctgggttcaacttcatgttgtatttgttcaggacgtcgaagcattgttgcaagtgagagacgtgttctgcagcacgggttgacttaacaagcatgtcgtcaatatagacctccattgtgcggcccagttgctcggcgaacattcggtttactaaccgctgataggttgctcctgcatttttgaggccaaaagacatcaccttgtaacagaatgtccctcgatctgtaatgaatgccgtcttttctcgatcgttttagtggataagtatctggttataacccggaaaagcgtccatgaaggacagcaattcgttactggcagtagcttcgacgagctggtcaatacgcgggaggggaaactatctttcggacatgctttgttgaggtccatgaaatcgatgcaaaaccctccatttgccgtcttctttttttacgacaacggggtttgccagccattcggggtacttaacttcgacaatggagccagcgccgaggagtttatcaacttcatcgttaacagcttttgagcgctccggaccaagctttcgtcgtttttgtttaattggcttgaaggttgggtcaacgtttaattcatggcaagaaacctcgggatctatgccgaccatgtcgtctattgaccaggcgaacgttgcgacgttcctcttaagaaatgttatgagctcggtctttatatcttcatcaagatcagcgccgatccccacacaccgctctgcgtttgagtcatcgatgttaacctgaactaccaattctctggtaggagaactttcttcttctgctcttttcttaggtgcgggctcgtcactgctggcttcggaagctcgctttttagtggatggttcggcagattccttgggttcggcgtcctttaattgctataagtcgagctcctttcgaagtttgcattcaattaaaaagcacgtacgagctaacttttggtttccccttattgtttcgatgccgacgcttgttgggattttgatgcattgatgatatgacgaaggaatcgcctgcatgtcgtgaatccacggcgtgcccaggattatgttgtagattgctggcttatccacgactacgaacttaggccatgttgccgcccctcccagatagatcggtaatttaattgttccgttcgtcatcaatgtgttcccgtcgaagcctgttaaggggcggactgacggcttaatgtgacgttcatggacttccattttttgcaggacgtctttgaatataacgtttactgaactccccgtatcgattaagattcgagtgacttcactttctccaaagagtagctcgattaccaacggatcattgtgctgcacatctacgccgagaatgtcttccaaggtgaatgttaggggggccatctcctttgttgcaggtgacgaccataaagtggcagcccctgacttaacgtattccttgattgatcggaaagagtcgcggcaagcggttaaacctcccataatcatgttaacccttcggcggggaactggtgcgtcgttatgttgttggtcgttttctcgattttttttggagggttccatgtcaggatatcgttcttcttcattagctggtggtgcttcttgctgacggccagtatgtggacctaaacggtggaacacgttattgccatctcggcctccacgtgccgcgtaggtattgttatggcttttgtattgtctatgctgaacctcgatgtcgcccttcttgtacttgttcagtaggatactttgtaagtgccgacatacggcggtggaatggccagatcgtttgtggaaatcgcaatattgatccaatctattctcttcatctgttcgccgagccttatcgaaattggctggctgagcaactgggtctgcctcgcttacgagatacgatgcagccttcctttcggtctcctgccggtactcgtggttgtagtgttggcggggttcgcaatagtcatcttgaactttttccttcgactgtttgttagaagtatgtttcttgctgaaggccagcttttcttcttccatttcaatatagcgcgtcgccttgtggagggggtcctctagatacaccggccggtttaacaacaaatcatcgcgaaagggtgactcatgctacacggcgttgcgtagtgccgagatggccgcctcatccgggacgacgatgtgagaaacgactgccttgaacctgtcaatgaaggtgcgaagcggttcctttgggccttgggccatagtccaaaggtctgcgtgtgtcgtgccgcgctcgatgtacatggagtaatgcttcaggaaggcgattgaaagttccagaaaacttcctattgaattagcaggtaggtcggaaaaccaattcaaggccgcacccgtaagatgttcggaaaataactgacacttgccggcctcagcttcgctcggatgaaaatgggccctttgcgtggcgatgctgaaagccgataaaaattgttgtggatccgtgttaccttcgtaactttttaactttatcttgttatcatgccgaactgagacgttgctgatgtgtgcggcaaaaggtgtcttttgggttttttccaggatctgctctaactcaggagcggaactgctcgcctgatcccctttctgggacattgctaggatctacttctcagctcctggatttcctcgttctgagatcgctcgtgatattcacg

SEQ ID NO: 545 - DNA, 9530 bp, Arabidopsis thaliana landsberg
  unsure (1)..(9530): unsure at all n locations
gaattcgccgcacgttacaccaaacgaacatttagctggattcaacttcatgttttttttgttcaacgtttcgaagcaggcttttaggtggtcgatgtgatctgcggaccttgtcgatttgaccagcatatcatcaatgtaaacctccattgtctttcctagctgaggggcgaacatctggtttaccaatcgttgataacgagccccagcgttctttagtccgaacggcataaccttgtagcagtacgttcctctgtctatgatgaaggaggttttttcctggtcgtctttatgcatcggtatttggttatattcagagaaagcatccatgaatgacaatacctcgttgccggtcgtggcttcaaccatccgatcaatatgggggagtggaaagctatctttaggacatgctttgttgaggtccgtgaaatcgatgcaaaccctccatttgtcgttcttcttttttacgacaacggggtttgctaaccattcgggatacttgacttcaacaatggagccagcgccgaggagtttatcaacctcgtcgttaacagcttttgagcgctccgggccgagcttccgtcgtttttgtttaactagtttgaaggttgggtcaacattcaattcgtgacatgcgacctcaggatctatgccgaccatgtcatctnnnnnnnnnnnnnnnnnnnnnnnnnnnnnnttaagaaattttacgagctcgacccttatatcctcggcgaggtcagcgccgatccctacgaatcgctctgagtttaagtcatcgatgttaacttgcattaccaactctctggcaggagaattttcttcttctgcccttctcttaggttcgggctcatcgtgctgatttctgaagctcgctttttagtagtcggatcggcagttcccttgagctcggcgtcctttaattgctataaatccagctcctttcgaagtttacattcaattaagaaacacgtacgagctaagttttggtttcccctgattgtttcgatgccgatgcttgttgggattttaatgcactgatgatatgacgagggaatcgcctgcatgtcgtggatccatggcgtgcctaggattatattgtagattgttggcttatccacgactacaaacttatgccatgtcgccgctcctcccagatagatcggcaatttaattgttccgtttgtcatcattgtgttcccgtcgaaacctgttaaggggcggaccgatggcttaatgtggcggtcatggactttcagtttttgcaagacgtccttgaatacgacgtttacagaacttccagtatcgattaagattcgagtgacttcactttctccgatgtggagctcgattaccaacggatcattgtgtggcagatctacgccgaaaaggtcttctgaggtgaaggtaggnnggggtcatcttctttgttgcaggtgacgaccataaagtggcagcccctgacttaacgtattccttgattgatcggaaagagtcgaggcaagcggttgaacctcccataatcatgttaacccttcggcggggaactggtgcgtcgttatgttgttggtcgttttctcgattttttttggagggttccatgtcaggatatcgttcttcttcattagctggtggtgcttcttgctgacggccagtatgtggacctaaacggtggaacacgttattgccatctcggcctccacgtgccgcgtaggtattgttatggcttttgtattgtctatgctgaacctcgatgtcgcccttcttgtacttgttcagtaggatactttgtaagtgccgacatacggcggtggaatggccagatcgtttgtggaaatcgcaatattgatccaatctattctcttcatctgttcgccgagccttatcgaaattggctggctgagcaactgggtctgcctcgcttacgagatacgatgcagccttcctttcggtctcctgccggtactcgtggttgtagtgttggcggggttcgcaatagtcatcttgaactttttccttcgactgtttgttagaagtatgtttcttgctgaaggccagcttttcttcttccatttcaatatagcgcgtcgccttgtggagggggtcctctagatacaccggccggtttaacaacaaatcatcgcgaaagggtgactcatgctacacggcgttgcgtagtgccgagatggccgcctcatccgggacgacgatgtgagaaacgactgccttgaacctgtcaatgaaggtgcgaagcggttcctttgggccttgggccatagtccaaaggtctgcgtgtgtcgtgccgcgctcgatgtacatggagtaatgcttcaggaaggcgattgaaagttccagaaaacttcctattgaattagcaggtaggtcgaaaaaccaattcaaggccgcccttgtgagatgttcggagaataactgacacttgccgacctcagcttcgctcggatggaaatggtctctttgtgtggcgacgctgaaagacgataaaaattgttgtgggtccgtgttaccttcataactttttaacttgatcttcttatcatgccgaactgagacattactaatatgcacggcaaaaggcgtcttctggtttttttccaggatctgctctaactcgggagtggagctggttgcctgatgaagtttctgggacatcacctgaattgtacttctcagctcctaaatttcctcgttttgagatcgttcttgatatccacgtccaacggcatttagaccgctcggccttgtgttatttgctcggcgcatggcgcttgcgaatccttccgaatgtaagctggtggttgaccttggaggtccgtgtaagcgttagtgagaacgtcgaaccgttcgacattctttcgatcctgagcttgaatttgcgccagaatgttacgcatcaatgctcctggatcatctggccttgctggtggagtcagagctgggcgtccttccatcccttgtactcctggctccaatcccacggtcggcgttggtgtgttgagtgtgggtttgttctccacgggattgacctcgatcgggttcgtcgcgtctttgccctgctcacctcctgttggagcgacggcggcatgctggatcctgtctggggtgtcttcgacgaactccccacggtcgctttcatgttcgcttcccggcatccttccttctcgtagatcttcctcggctttctcttctccttttcttgtggtagacccctacctggcgcgccaattgttggagtataaaaccgaacttccaaaccgaagaatgaaatgccgagccttaaggaagatctttattaatatccttgaagttcggctgtttacaaaatgtttccacagccgagcttaaacttatttaatacagacttcacaagtcaaaactagacttatgctttttgaatcttaattagaagtttctattgcttttctctgccactttttcctcttcctttttctgacattcctttgtcaacatttatagtactgaaaggacagtctatcgttcaggtttcttctcgatgtgggactttctcttgaccaacagcttccttgaggcgggcctcgtctgatgctgggctctttttcctttaacgggccggtcttccctcctttccttctttattactaattttgatgtgttgggcttttaaacgtgttggtggggcgaagcccatgtccaacagttactcccccccttcaaaatccactcaggaccttgaggaagccgtacggtttcacgctgccagctgctaagcttctggatctttccctgccgcgcgtgaagtccctgaagacgcgtgggcgggcccagctgcaatcattattgctaggttttaggcatagagcccattacttctgtcgttcccggaaagtctattctgtcttaaatcaacatcagccgtctccgaagcactctgctctaaaggtaataactttattcgacccttcgactttgattttctgattcgatctgcattctcttgtattcgtgccttctgttacattttctgcctttcttccaaatctgcgtttttctcgtctcaagcaatgggttcttcatctccaaacaactccgtcgactcttacatccgcgagaggacttcttcggacctttcagggaagaaatctccttcaataggttggtccgaggagtcgtctcgtcattctgtcgggtcttcgactcatcgtggaaaatctgctgaggttccttcctccgagatagatcgtcgcgaaatctccgccgttagagatagggttccctcctctagtcgtgttcctactgttgttccgagcttgcgagatgatactgattctgacggagctgggaatcgttatgccgacgatgagagagaatcggcggatgaaaatgtttcgggtgaatctagaaaaaacgagatggtcgatctgggacccactacgtcgacccgtgaatctgttggccgaacgaccgacttttgcttgttgccgggccctctaactattaggatcccacgagatacggatcggccgagtgattgtcctgaggggttcatttgtctcttcgaagggtttttcaccgagacgggacttcgctttcctattcccgactttctcatgcgattctgtcggaaccgtcagattgctatatcccaactgacggtcgcttcgatacgaagtgcagcctgcctccagatgctttgcacgaggtgcggcattcccctttcagtggagcttatggaagaacttacttctttcagtaaagtacctcacaagctcggccagcattatattagctcagttaggggtttcaagattctcgaaaacggaacctcaaagacccgggactggttaggaggatacttctatgctaaagtggaccggaaccttgtggaggatccttcggttgaatttaaaaactgaatggaaccttgattatggtagactttaggcctctgtccggctctcctagggtcgtcatttcattttgtcttcagtttcgtttaatattttcctttttattatttttttggagcgtcgaaccttcgaatccttcgaaattgctctcgacgaatccttgatcaggccgagactctgagagaacaagctccgattgactggaaacaggttccctgtccgaagcataagaaacagaacaagcgcaaaccgcaaaaacgaaagagttcggcccgtccaaagaaaatgtccggcgaaaatgttaacttggcaaccctcatgcgtgagaaacgagctcgcaaggaggctgaatccaaagctcgtctagcgatagttgacaaaactcatgaggacaaggctcgtcttgatgtagccgagaaaaatcgcaagggtcttgaggataagaccaaaaagggtacgtctggcgccgaacgtcgggacgttaccgatgtgacccgagtggacaaagctcgtccaatcaccgttggtcagaaaggatcatctggccgcagcgtggatagggagaggagcggccctgatacctctggctctaagcgtccatgttcttcaaaagaggtcgctccagctttggacaaaaggaggcgtatcgggagcggtgatgtcgacctttcagccgggccccgtctctcggcaaatgctgatcactcattccgctatgagtacaaagtcagggactccccgttttctgccgaccgggttgaatgtgctcgtttccttcggaaggtggttggagctcccggagaaccggaacatgagtttttggccgaggctgaccttttcgagaagtgggcgcgtgcagagtgccaggttagctgcaagtagaatgacgttctcttctctactccccccttcttcggttattttttttttttttttttttcttttttcttttgttttttttttttttttaaggaagacaatatgtgcgcttggcaggctgttggggcgaataacctcctgatctcgcggtatgatcgcaatctgcgctcggctcgtgaaaagattctggagctcgagggcaaattaaagaatgccgagcgtaccattgctgataacaatcaacaagctaaggcgggttttgaggagttgaaagccttgaaaaaagagactgttgttctgaaagctgagcgttcgaaagaggctgcgacgctcgagaatgttctgaggcaacaaactctgctggaggcccggttggctgaggagaaagagatttttcggcgttttcaggaagagaagttcgcagaggaaatggcgaagacgcgtgccgagcttctgaacaagtattacgaacgctcggaaaaaatctttcgccatattgccgagactgaaaatgcctcgcatatggtgaagatgcatgcgcaagcaaccggtacacttagctgtctgaagtttctagccgatgaggataaaatccctataccggcgagtacgtttgaagagtttgaggacgaggccaaggagtggaaagacaaaattgaagcgttcgtcgtgacggagctggtgaacggcgggagggtcatcacgcctgtcgctcctcatggttcgacggaaaatgtgcagggttcggaggagtctcccttccggattaaccaatttggctcgaaccttgggatcctggcggcttgcgagattgatcccataaccgagttcttcaccgatcctaaactcgctgctttggtttctgcgggagttaagaaggcgattgtgacgatctctgatgatttctgttgtttatgttgttgttctaagttgttgttgtttttttttatctgcttcgccgacgttgttgcaccttattctataatgaaaaatctggtttccctttgcaaaaattttggtgtttcagctttgtgtctttttcgcttaatgggtcgcagaacgtcttctgccgacccttattattgcgggggacgctaaaacgcgttgcactggagcccggcttttatccaatttacgccgaacatttagttaggctggattctcttttggtgcgggtggcttatcttgctatctggtgcccggcttacccctttttgctttgaattgatgtttatgcaacctaaggttggctaaactttttccatcattcgagcaaagttttgcgggaaataattcgaaaatgaattctgggcccggctttaaaatgttcgcccgttttgaacagtgtatccttgaggtaaggagtccatttttttttatttacaaaggacagctgcacccgagagtgggttgcctacgtacctctccttcagaggggatcaagccgatcgtagttcacatgtttgttgtcgtacataagtcttattcaaaggtggataaacagaggtttgtagggtaacttcttcttcaggagtgatatttcttcagattgtgggcgttccaagatcgaggaatgttttcgccggccatggtgagtagttcgtaaacgccactgcgtaccactttggatactagttaagggtcttcccatttagcgccgagttttcctgcattaagctcggctgtgttttcatagactttgggaagaccaaatcgccgactgtgaaggatcgaggctttactttggtgttataatgccgagcggcggcttgctggtaattttggattctcaggagggagctatcgcgaaattcttctgcgtcgtcaatgttacttaagagcattcggttattgagttgtgggttattgacgagcatagttctgtgtaaactgccgacgcttacttctgcgggtgccatggcttcaattccgtatgtcaaagaaaagggtgttgcgcccgttgaacgtcgaggagttgttctgtgtgaccaaaggactccatcaagctcgtctgcccaggctcccttttttgcctcgagtcgcttcttaagtgcgtccaagattatcttgtttgttgcctcggcttgtccatttccttgtgggtaacgcggtgttgatttgctgaggcgaattctccatttggcgcagaagtcttcgaattgcctagagatgaattgagacccgttgtctgtaattatctcgtatgggagcccgtgtcgacatatgatattcttccatacaaagcgctgtacttctccagcctggatcttattataagcttcggcttctacccacttagtgaaatagtctgtcattattagcatgaagcgcttgccgttcgaagatggtaatgggccgacaatgtccattgcccagcgcatgaaaggatacggtgccgtagacgttgtaagagcttcagttggagagtgaataatcgaagcatgcctttgatagggttcgcatttggccacgaaacggatacaatctgtgatcattgttggccagtattggccgtgcttctttattttggccgccaaacttcgtcctccggaatggttgcctccggcaccttcgtgtgtttctttcatgactagctcggcttcttctttacttaaaaacatcaacattacgcctgatgccgtccaccttagcaagtgctccttcatcattgtatatttagctgcttttgctttcaggcgacgagcctcccacttttcttcgggaacgactccgtcagcgatatagtcgataaattcctgtctccagtccttaggtgacacaacgtcaggaggttcgtcgtctgttatcggctcggtgatcatgcacacgaaaagtcccttctggatgctcggcttgtcaatgcactcaactggaataacacgcctgaggtccggatcagatgttgaagctaatattgcaagtgcgtcggctggagcgttcgcacttcgaggaattttatcgagtgcaaaaacgtcgaaggttttcgccagtccttggacaatttgtagataggcgtccatccgttcgttttttgcttcatactctccgttgtactggcttgcgacgagctgggaatcacaataagcttgaagctggtttatgtcgaggcttttggccaaacgaaggccggcgatcagggcttcatactcagcctcattatttgatacttcgaaaccgagccggaaagattgttcgaggatttcccctgttggagaggttagacgtataccgacgcctgaaccgagctgggaagacgctccatccacgtgaagactccatttctcgctaaccgggaggccgtccgctaagctcggcgggagctcgacgatgaaatctgctaacacttgggacttcatgctcgttcggttttgatattcaatgtcatattctgatagttctacggcccacttagccatgcgtcccgactgtcctgggctgtggagaatttgacgtaatggttggttcgtctggactatgatcgagtgggattgaaaataaggtcgaagctttcgtgcggagataaggactgcgtaggcaattttttccaacgttgggtattttagctcggccccttctaacgttttactaacgtagaagattggcttctgctctcctcggtcttccctaacaattactccactgactgcggaacttgatactgcaatgtataggtataagggctcgccttcttcgggtttcgataacaccgggggagttgacaaataccgcttgagttcactgaaa

SEQ ID NO: 546 - DNA, 424 bp, Arabidopsis thaliana landsberg
  unsure (1)..(424): unsure at all n locations
tagttgagttaccttttattgtatgatctgattttattaagacattgaaagaagctaggtggtcttactcttgaactagtgatagaaactgaattagctatgttgcgtgggaatcacaaattaatcataagcaaaactactaaaaaggaaatttttagcttataacaatagttgaattctgtttttagaatggcccttaattaatatatgtatatttatatgatcaatagaccttgaaaagggagaaaaaagtgttgctaccgatattgcacttgtggatgatgagaacgagagtcacaaagatgatgatgttcgtgtagtagaagtaacgttntgtttacagctaccttacgatttattctagatattactacctgtattcaattgataaattactgtatgaactaatcattgtagtaacaag

SEQ ID NO: 547 - DNA, 499 bp, Arabidopsis thaliana landsberg
  unsure (1)..(499): unsure at all n locations
attccaaatttattttggtttttagaaggagataaaacaacagaaaaaaaactttttaaaaaatgaatgtattattcactagtgaaagtgagaatctttagtttccaagcttctttatcatcccaactattccaatctttggttcggtttacatggttttaaaatcaaaattaatttgggttcggtttgcattatataattaatacggctttgagaaaaaaaaaaagaaggaaaaatgctttcgagatcacgcgttggtcatttggaaacaaagcgagtagattagaaataaacatgattttgtgggtcggtgcgtctgggtatggaatggaccgcgtgaggtgacnttggtgcgagtgccgaattccngagcactctgattggctgaaaaataaaatagtagtgatggtactcctcctctcctgctctattataactttttcgtaattcttcttctgaaagttgtgtgggttttagaggtcaccaaaaaaaactattt

SEQ ID NO: 548 - DNA, 620 bp, Arabidopsis thaliana landsberg
atgagattgagattgaggatcatagaactcaaacggtgatgattaagggaatgtctttgaacaaaaagattcccaagaggaaaccatatcaagaaaacttcacagtgaaaagagctaacttggaattccataccggtttcaagaggaaggctctggatgaagaagctagcaatagatcgagttcaggatcggttgtatcaaactccgagagctgtgcacaatctaatgcgtgggactcgacttttccttgtaagagaaggacatgtgtgggacgtccaaaggcagcttcttctgttgaaaagctcacaaaggatctttatactattctacaagaacagcaatcttcttgtctctctggtacttcagaggaagatttgctttttgagaatgaaacaccaatgctgttaggacatggtagtgttcttatgagagatcctcactcaggtgctcgagaagaggaatctgaagctagctcactcttagttgagagcagcaagtcttcatcagttcattctgttaaatttggtggaaaagcaatgaagcaggagcaagtgaagaggcaaataacttgtgtaatcctctagacaagaaagagtgctctgcttgaagagattctaata

SEQ ID NO: 549 - DNA, 674 bp, Arabidopsis thaliana landsberg
ctcaactgcgacattgccacatctagtttggcactccttgcgaggttgccccttgacttgttgcgtataagcaaggtagaaaacagccaccacgaacaaaccctcctgtaccttcatcttctctctttctttctctctcactcttttaactttgttcctgttttgagttttcgctaatctcctttttcttattagaaacaactgtatatgaaatgttctcttcactcattttcgcaggcccgctcccattttgtcatataatgcaagaagacgaaaattcaactacacaaccaatgtaacccatgaggcgtgaagaggacgtttgctgcatattcctgtatagtatttaaacagtgacaactataggtcttggtcttctcgtcattcttgatatttttttcgttagtggggaaaccgatttaattttgttaacagtgacacttattttcttactattcaaagattaagacagttgcaacttgcacggaatcttcaattatgaagaccctcttaagtcaacttcagtctcggtcctctcttcttttctcgatattacaaggcaaatttactcttttttttaacagttaatttcacgctcaaaatatgaaaattgccttttaaaatgacgatttaggaattgagactcctgaatcctgatcacaacatgctctgtt

SEQ ID NO: 550 - DNA, 751 bp, Arabidopsis thaliana landsberg
ttgctaaatatgatttatatgatttatcgcttttttagtggaatcgaactccaacaataaaaaagacagaatcaaatagatttaatcactcgactaaatacacatctccacgtaatttatcgtttacatatagcaaacgaacattatatctgacgaccaaacctaaaataaatacagatggacatattcggaaacataatataccaaagcaaatagtatcaaacctaaaataaatacagatggacatattcggaaacataatataccaaagcaaatagtattataatcgtacagtattaagatgactctaatacacattgacttctttaaataataatataattttatattaatattctaaatcatatgtaatgtataatattatgatagtcttatatcttattatataaagtatggttttcaaagttactaatttatacgatcgtgccacgtgtctaatcaaacgatcggatgtttacatgtgtcattaaaaatttaacttatgattacagtcacctaaataatttatttttgtatcttatacccgcctatttaggcgggcattatttagtctataatatacattgactaactagtaactagtggtgagagtcgtaaataatttgaaaagtgccaattgagacacatgcatcaaaggggagtcatgtaaaatacttcgaagattcatctcaacataaaataaaataaaatcaattgattcctctttttatccaccaaaacattttatttt

SEQ ID NO: 551 - DNA, 2640 bp, Arabidopsis thaliana landsberg
tatatctgaaagagccgataaccgtatggatacgaatcaaaactgaatggatatccgaatgcccatgactaagaaaccttatctaaaggcatgactggttgaaactcagcagttacagttgcgactgcatgagtttacgggattggacggtttcatattcaagcgttataaaacattttgaacgactggtttagcagttaaaaattggtgcatttttgagagctttatgactggttaacggatttacgtttaggataagagaattacggatttctatttttggtgggacaattacggatttacgtttttggcagaaaaattacgagtttgcttttttggtgagaaagttacaggtttacgtttttctcgcagggaaattacggggtttacgttttttggcggaaaattatgtgtttacgtttttggcgaaaaaatgacgggtttacttttttggctaaaaaattaagagtatgtttttggcgggaacattacgagtttatgaaaatgttatcatcatgatgaacatagtatgataatgatggtgatagtattatgatattatgggaaactccagtcatatgcccaaataagggaaactcaagtcggcagacaactaaaagtctccaaagacattgccggggcaaaaaagaaattccccggaaaacaaaaccctatcgtcagggaaccagagtaaaatgacactggaaatacaatgcagaaatgatcaaaacacaatcgaaagaggacgactcctaaaactaaaagcagaggcaacaaggcaaaaaccttaagaaaactgatagaactaagagaacagagaagcctcttcttcttttgaaagaccagcaaatgcgacttatcacggctgcccacggccaaaccagaaataatatctaccacctcctatcaagttgagagtcaatctctcgagaaccaaggatatcagaacccggcaagcaaagagaattcatagaaactcattgaacctcgaaaacacttctggatgcgacgaagaccgaagcgtcacttaacgtctagctagaatcctaaaaaaagcgacagatctaaacagatcttgaaagcagggacaaggagtgaggcaaaacctctcaaaaatcaccattctccgaatgagagcgacaaaggattgagacagttaacaaacaccgcaaacaccaaggagaagaaaactctgtaaactatgaagactaccataaccaaccaataaacacgaaacttctgcttagaaaggaagcgatcccaaagggagccaaaggctgagcgagaaatcaaagggagcgaggaaaggcaaaggattagcagataaactacaatccaaaaccaagtaaacttgacggcaaagaaacgttgaaaggctcaagagcagcaacaaactttaaggcaggaaagagcagagaagagacctcattctccgagccatagcgtagatcaaccaaatccggaattactaacatcttctctgaggtcacaaaacccaaaagaaattaccgcaacgaccgcttccacaaacccaaaatcaaaatcgaaacaaaccaaaagacttcctaatcgatggccacaaattctgcacacaaaaactaaacaactaaccctatctagtcaaagaaagaaaacgactagaaggtcagcaaaactgaccagaagataccaagaacccatggccacagaaccgagaacaaccaccgacgagaccctagccaaggcagaatctgacaaaggcagaaaattcatcttctacaacccgttgggggagggagaaggacgctcttgaagagaagaacaccgaacaaacctcactgtgaagacccgtctaactcgccaagcaaactacgttcaacatcgaacactagaactagaagagggagacaagtctacaacaaaaaagaaagaagcagcaggggccctctcacggctacgacgaggagcgccgttcaccggagagggcgatctgaaatctggagatttttgggcggcggctagggcaaccttgtctagagagaaacttttttgttttagttatacacatattatgtgacacaccaacactaaataaaatgactaactaattcaacaccataaaaactctaaaagtctctcctgtgctgacacatcacctttttcaagtgttctcagcatgacaccttttgagagctttatgactggttaacgcatttacgtttaggataagaaaattacggatttttatttttggtgggaaaattacggatttacgtttttggcagaaaaattacgagtttacttttttggtgagaaagttacaggtttacgtttttctggcagggaaattacgggttttacgttttttggcggaaaattatgtgtttacgtttttggcgaaaaaatgacgggtttacttttttggcgaaaaaattaagagtatgtttttggcggaaaaattacgagtttatgaaaatgttatcatcatgatgaaaatagtatgataatgatggtgatagtattatgatattatgggaaactcaagtcatatgcccaaataagggaaactcaagtcggcagacaactaaaagtctccgaagacattgccggggcaaaaaagaaattccccggaaaacaaaaccctatcgaagggaaccagag

SEQ ID NO: 552 - DNA, 903 bp, Arabidopsis thaliana landsberg
ttggtcgattccatcaaaatttccattatcattctaaattcacaaaaacgtgttaagcaatacgagacaggttgcatcaaagctgaatcaagccgttaagcaattacatcggatcttacctcgctaaaacttatataaatgttatacgagatagagagagtaaaaaaatgacattccttccttctaggtctatatcacctcaacattcttactcttggttcgacgtttcgacgatagaaagcttaatatccaacaattcactacgcaataaattgtgaggtatcaacatgaaattcttttgaggtgtatcaaaactcactttacgaaccctcttcatttgtggtgatctgtaaaccatagtgtgttcatccacagtgtaggagatttgatatgagaactgtccaacttgtggagcagatggtgcaatgcagcttacggttacatacacaccacacgactccctaaaacactgcactgcaaacaatattttcttctcatatacccttgtaatttgtatcttatcgctgataagcatcggggccttatatggaatgctagatctaaagcagttagcggtccagtatgagttcgagatgtgagtcagtttatagtgatcatagagatcctcgtatcggccggagtactcacagtccaatgaagggcatgagcatagagagaaaatgcattcttcttcatgagttgatttttttccatataagaaactcttggcgcaaccaaacatgtcgtttgggcatgtgaccaatatcgattcaagaatattctccattggctgataaaaaagcacaagcagggcatttggtcctcagtttggacagcaagaaaagcatgctaaatgtccattctcacaccgcatacaaaataaaaaacactgtaaaaatttca

SEQ ID NO: 553 - DNA, 9179 bp, Arabidopsis thaliana landsberg
tcagttttacttcaatctcattgactacacaacagacaattagcaacgagggcactaagtttatctggtgaaccaaaatgcttacaaggtaatctcatcattatcccctatgcatatgcaacaatcctaaatgacacactctagactcgatcttaaatgtaatgcaactacatgaacactctgtttttgtgaaatcattttctgaaatttttcaaatttttcaaatgcagactcaagaatataaacaatgcaacacacacttcctgagccctcccccaaacttaaatcacaaaatccattatgtgaataaacttggaagagagtactcaggacaaatccaatcacagaaacaaaataaagaacaaattacaagagatgatataatacaatggtgaagtgaggcgcctacctcagttgaagaatgaacgaagttggtcgtcattggctgcctgtgattgctcccaggccatagacgagacgccctgttctgtatcaggtacagcaggtgggtactcgacctcatcagctctatggcggccagcaccgctcggaggatactcgacctctcttcttctactgcggccaacaccgcggtcgagtgatctcctcgagcgaattaggcatgatctcctgctagatcgagtgagtgtaaccttccttcttctcttgtgctcccaggactcgaatgaggactgcctagccgggacatatgagactctttgctcactaagctcaggcctgtactcaggctcatcaaatctcctcgatggcatctctagaggaggctgtccctgcggaatagctgtagtagaagaggaacagctcagcttatctgtcagaaacttgatagtcttgaaacacttggcgagcagcttgtcctgcttcttgcaccacctctgcagcttactgttgttcctatgagcctcactcaagctcttgctctccctcgctggaggtacatgttcatcaaaatcatacatgctagtgtcgaactccaatgctctgtcttcatccatcccatcctcagcagcttcttctataagatcatcctcatccaatggcggagcgttctcatagtagaggtttccaatctcaggccgaaaatcaatgttatctccctctattatccgtgtaacctcagggctagggagaaggatgctagctctcttatctgtagagtgctcaaacctgaactggtgcaagtcgccaaccattgcgaactccaggaattcgcagtgacgtagatgctcgatacccattgcctgtggctcgagtccatcagatgtgattgggattccacaagcgataagaatcggtgtcacaacaccaccgatgcatagagcacctcgtgctctcttgtggttattgctgacagcctagctcttgtatccacacaggtggatcagaagaagtacagagagaggtgtgtcattgatttcaccttcgagagacatgtttttcttagtttgacggagagtgcctttgagagccatagcgatcatcttgatatcagaactagtaacaatccctgtgatctctcgggagtagagtacattggctatagaacgccggaagtacctgatgacagggctacgtatcagattgctctttgacctagaagaattcaccggtacagagctgccaatggtgatccacaagtctttcaactcttctctatcatacttgggcatagtacccgttccactggggaaaccaaacaatccttccaagcgcttgattgataacctatactcatgaccatacacctagaatctcaagaatcccaatccttcacaattcaactcatcagaggtcataccttggtagagctccacttgcagtgtggagaggaattgaattgtctcttcttcatatgctactatggtataggtgttgaacatcctccaacaatccaagttgtgcaagcgtggtcgagcatggataccttgtgctacaaaactcatttaatttgaagagcctaatatattcctcagcgggcaatacatcaggtttgtgcagaagtttggtagctctgcgagcaagctcaggcatgtactcgtcttccagatcctcatctataagctcatacatctctgtcatacctctctgttattgcttcccacaggctatctcagcgtttcttctgaaactatcatattctctttgttctctctctggccttgaagacgatgactctttctcatccatgttgtagtcaggatcaactgaagaactgccactgtaattactcatgattatcatgcaaaagacttagaagtcaaaattccaatatcaataggttagtttcaaagagaacaataaagccaaaatcgttagcaacagacaatatagacctaaacggacaagtacaatcaagtactcgagtaaccttaaccctttccaagtttctctttcacgggttgaatagagtggcttagattgaatcaggctgaggtcgagtacaagaggtcgagtagagctccgtcggtcgagtaaaatgtcggtgaagttgagtggctctgttgcaggaggtcgagtgaaaacttgtggtcaagtgaaaatttgtgatcgagtacttcttcggcgagtcagaattggtgaggatggaaccacaatttggtggtcgactcttgcgtttgtaaccgagtagttcttgagacttcgacggtgaacgaggcggggaactcgattttggcagcgcagagaaggtcgagtgtggtgagaacaaagtgatggcgagcggcgaagtgaaacagtcgagtatagcgaggaactcgagtgaaattgagtcgagtaactctttggtgagagatggcgatacgtggtcgagtgattcacggtgaattggaatcggtggtcgagtgagtcgtgaaactcgaatgaggcggcggagtaattctttcagaagcggtcgagtggtttcggcgaggtcgagttccgcttaggtttcagaggtcgagtgaaatttcaaaaggagtggtggagattgagtttgagattctctctccatcttgtcctcagcgtgtggtccacactctgttgactgggaaaactgcagaaaatctactgtaaacttgataaactccctgtaaaactctgtagcttctgtcggtctagtaaaatgatgatttaaatttttttaggctttaaacatcactcatactcgaccaatgtactcgagtgcaaggtctccaactgcaacaaaaaaaagtctagtccactggactatatactcgatctataggctttctatagagtaaaagttttgaatttttactctatctccacgttgttcctttgctcctgagaaccacaaacacaactaagacaaatcaaaaataacaagagaagaaaaatttattttcctcccaagtgagcttgtttaaagtcattagcttgactcctttactcctttaatcatcaagaagttcctggaaatgaaccaacgtcacctctggaaggatttgatctgctaagtatttcttgagcctttgaccatttactgtgaagtctccactcttaccagctagagtgactgctccataaggacggacctcagtgatacagatggggccagaccatctggattaagctttcctggaaagagtttcaaacgagagttgaatagcagcacctgatcaccaacctgaaaatccttggtgatgatctttttgtcatggaaaagctttgttctctccttgtagattttagagctctcataagcttctaaacggatctcgtcaaggtcactgagttggatcaaacggaccttgttgatgaaatgctttccaccagcacttattactactctgggaactccaaatctcgggaagattatggtcttgaacagcttcagcacaacatttgcatcgttggtaggactagcaatagctacgacccagtttgatacgtagtctacggcgaccagtatatacttgttacactatgaagatgggaatggacccataaaatcaattctccatacatcaaagatctcaacttccaagattggattatgaggcatcacattttgaaacaaactcctgagcgtccttaaacattgttggccaccaaaagcctacttgaaacaaactgctgatgttgccttttcttggcatgaatcacaatttgaaacaaactcctgagcgtccttaaacattgttggccaccaaaagcctacttgaagaatcttggacactgtcatgaacgtcgcgaagtgaccaccatatgctgagccatggcaatgcagcaggataccttccacttcatcttctaagacacatctcctgtagatcttatctttacaaagagtgtaaagataaggctcatcccagtagtaatggtgtatgtctctaaaaaacttcttcctttcataacttgtcaggttgggaggctttactccgcatgccaagtaattgacgtgatcagcataccatggagattctccttcaatagcattcagttggtggaactctttcccactgtagctccttccgaagaactctacaaccatgagctgctcttctggcattgaatcgtctatcggaaggggttcttcaattctcatccttgaaagatggtcagctgcaccattttcaaagcctttcttatctactatctccatgtcaaactcttgcaataaaagtatccatctcaacagtcttggtttagtatccttcttggcatacagatgcctcaaagctgcatggtctgtatacacagtgacctttgatccaaccaaatagcttctgaacttctcaaatgcgaatacaacagctagaagctccttctcagttgttgcatatcttccctaagcttcatccaacgttcggctggcgtaatatatgacatgaagcttcttatctattttctggcctaaaacagctcctactgcgtaatctaatgcatcacacatgatctcaaatgggtagtcccaattaggcgctcgaacaacgggagcatataccaaagcatctttgatggtgtgaaatgattttaggcagtcctcatcgaattcaaatttggtttccttgcacaatagtctggttaacggcctggctatcttggagaagtctttaataaatcttctgtggaacccagcatgaccaaggaaacttctgatgtccttcaccgtttttggtggctgcaactgcatcaccacttcaacttttcctttgtcaacctctatacccttctctgatatcttgtgacccaacactatgccttccttcaccatgaaatgacacttttcccaattgagaacaagattcgtctcttcgcacctggtcaataccctgccaagattcaacaaacatgaggagaaagaggggccatagaccgaaaaatcatccatgaaaacctccaccatctcctcgattaagtctgaaaatatagaggtcatacacctttgaaatgttgcaggagcattgcataaaccaaatggcattctcttataggcaaaagttccataaggacacgtgaaagtggttttttcttgatcattagggtgaattggtatttgaaagaaaccactgtatccatcaagaaagcaataatatggatgattagccaaacgttcaagcatttggtcaatgaatggtaaaggaaaatgatctttcctagatgcagcattcaacgtcatataatcaatgcacattctatgaccagttatagttctagtagggatcagttcatccttttcatttttaacaacagtcattccaccctttttagggacgcaatgcactggagaaacccaagtactatcagagatagggtaaatgacaccagcatccagcagtttcaaaatttcttttttcactacttctttcaaattgggatttaacctcctctgtggttcaatgctagaataggattcgttttcaagatggatcctatggttgcataaactaggtgaaattcccttaatgtcggataatgaataaccaatcgctctcctatactttctaagctcaaataatagcaggttcacttcatcactatttaactcagcattaatgatcacagggtaagtggagtttggaccaaggaatgtgtaccttagacctttaggaagtggtttgagatcaaccttcggtgccttaagttcagaccagtcatctgaagttggaatgatcggctccccagattcgttggcagacaaggtcgagtggctggtcgagtacgtcctcgagagtgcaggttgaactcgagttgacccttcttcgctcattaccattacctccgttgctggtccattcaatttctcaaagggttctgattcttccatcgctttatgggagtctaacagcttctggtatcccaatgtttccaaatgcagaaacccatcttcaccacttttggttaaagcactgttaagatgatcttcttctgcaagttcttccagtaactcgtcagctaaatgatccatttcttcgatccaaaagagtttcccttctatggtaggcttcttcattgcatctttgacgtcaaaggtcatcctaaagtctttgccaaggtttagatcaatcttccctttcttgacatcaatcatagaacctgtagtttctaagaaaggtcttcccaagatcaaagggtccttgggctcttcatccatctctaggactacaaagtcagtgggtatctctatagctccaatcctgattggtaggttttcgagtaaaccatgaaagatccttactgatctgtcagctaggattagggatatgttgcaagatttgtatagagtgaaccccaatcttatggcaatagagagtggcatgagactgactgatgctcctaaatcacataggcatctgttgaaagccaatggacctaaataggatggtagagtgaatgaaccaggatcaataagcttcttaggaatggtcttcttctgtatgatagcactgcattcatgactcaataccaccatcccttgcacttcttgaattcgctccacgatcaagtctttcagaaacttgtgagagtctgggattagcgctagagcgtcaacaagaggtatccgcaactcaacctccttaatattcttggcaaacatagctctatatttatctgtcaacgctttcttgtgacgggtaggaaatggaagctgcggtttgtagggaggagggacaaagaccttttctttgtttttgacagcaactggttttggagcagttggtgatcctgctgggaagataggtcgagttgctggtcgagaaaacagtaaaaagtcacagaaatgactgatatactctatcgcagggtcaactgccagaagggaccctgtgatcgagtacaacaggatgacagagagtgaaaatgcagaaatggaccagtttactctatcacgcagtcccactgttagtagactcgtgtgatcgagtagaacggttgaaaacagaaaaatacaaaaattcaatagaaactgaatgaagcaggtaagtaaacagagaaatcaattggatgagaaattcctaaggatggggtaatcgaatagtgtggtctccctaatcaattcagttggttaacaaatctcaattaagctatccctagacaacaggttcaacaacagattaattcactcccgtgatagaaaccctcaagcatagctagacactaacctaattcccattagcgatctctaactaagtaggcaataataaccaactgttaaagccaataaccgctctaaacggccaatcccttgggaaagagacgattatcactagaattagtagatccaacgttccattaaacgccttctgggcgctggaacgtctgggatcggattccagttgatcagaaaggaataagcagtaaacacaactaatccagaagggattcaataaatctacacttaaccaacagattcgaccaggggttccataactactctatcccatcctcagaaatcctaatcactactcagacaacatgcttaaagacaatatcatagaaacgaaagatgaccaagcaatgaaagcaaaatctgaataacttaggagaaaaatcaaaatacaaatttgcaggaatgaaaagcggctgctgaatagtagtgcgaaattcgtttctacaaagtgcatgtcttagggcgaaacccttagagacttatttatactaaaataagaaagcgggcttcgagcccacttaacggcccatggacggcgtgatcaagagtgtcgactcaaagtgggcttcctgatgggcttcgaatgggtttcgaatgggcttcgaatgggccttctcttctcttctctttcggatgctcaggttgtctggttgagtgcggattgatcagagggtcgaggtggtggtcgagtaggttggttgacagaatgatctgggctgcttcttggcctctgtgatcgagtaagtgtgtcagctgtcaggatgtactggttcttctcctctacgatcgagtataactggtggactggcaaagtggactgcctggtcgcctctgcgatagagtagaactgcagaatggactgcctcctctcctctgcggtcgagtatatctggcagaatggactgcctggtctcctctgcgatcgagtagaagtgtctggatggactgctgagctgactgcttccctctctactactggtgatcgagtatgttagtggaaatgtgactttctgttatgtctttcctctttctgagcaccaatagctccaaagtacctgaaataactccagaatgcagaatctatgcaagactagtcctagactcgactaaaaatgcaaaatgtacaaaactgattatgaatgctatgaaagatggatgaaactagactcaaaatgatgataaaaggatgtgtaaaacatgcaaattatagacatatcaaattacacatttgtgatctatggagcataataagggattttgggagcttttcagcaatgaaatttatcaaagacgtttttcactcgaatggtatgaatcgacaccacacctatggtcaatcgacacccttatttcggctgaaggaatttccgctttttaccaagtctttgagaagtcgtgaagtttcccttatttgcaaaatagtccctggacatttctattcacttatacctaattatttggtcattggtgatacctaagttttgttaagttgtgttttattattgagagacacttgtggagagaagaatccaatccctacagagag

SEQ ID NO: 554 - DNA, 980 bp, Arabidopsis thaliana landsberg
gaagttggagcactccagcctcataaagcttgatctagtgtgaaaaatgacattgcttgccttttctttcttggcctgaagcatctcaaatccccatggttgcatcacctaatactcgatactagaaccccaaacttggttgacttcagttttgcctgatcggtttggtaatctagctttacctttccatttagctcttttaatgcagctcttgcggcttcctttttcgtgtactctagctcgaaaggcatagccttctgatatcttgtccataattattttgactgcagaggagagttatagggctgtgattatctatcttttcccaatgatattatttttcttacttttgaattggatagcaaatcatgagtaccttcaactagttcacaaaacccttcaaatgctgcacgtaatgttttctcagatgtgtagactagttcacaaaaccaagaaacatgatgtattcgtaaatgttatcttctgagtgagttaaggtgtaggcaacaaattgagaggaagcaaaagtaatcatcattattcaataaacgcttagttttcctttaaactctatggagaatttgtcactgtaataacagattctactatgtaagttcaaaagcaaaagcatgcatgcaatctcaaatgttaagcataccagttatcaagtttaaaaatagtatttgaagccttgaaggtaacctaaaagatttggtatttgcataactggaaaaacagtccgattcacctgatacacggtctccttttattaattcataagtttctttgtacaaccattgatcaaattaatacttaaataaccggtgttcattgccagtgtgaacttgtgtttcaatactttaataactcgtgataatcgcccaaaataatatacttctgtctagcgcaacaaaaccggtcaaaaattatgacttttaatataattttaatttactttttaaaaattttttgaaatcttt

SEQ ID NO: 555 - DNA, 4030 bp, Arabidopsis thaliana landsberg
  unsure (1)..(4030): unsure at all n locations
aaaaattataagcaggagtcgggtcagataataaatgaacagaagtctgccattcctttttcctcaaaaaactttgatggaaactagagaaagagttgaaacgagagtttaagattacaaaagaaggtggccaaggcaagtatttaggcttacctgaattgtttggaaggaaaaagagggatcttttcactagcatagtggatagaattaaacagaggggtctaagctggtcttcaaagcttctgtcagcagcagggaagcttgtaatgttgaagtcagtccttgcggctatgcctacctatacaatgacttgttttaagctgccagcaaacctttgtaaacgtattcaatcagcccttaccagattttggtgggactcaaacccggagaagagaaagatgtcttggatttcctggaaaaaactttataaatcacttaaagatggtggtcttggtttacgagatatcactaagtttaacgatgctttgctagctaaggtaagttggagaatccttaccaagccggagtgtcttctcagccgggtccttctagggaaatactgtcatacgtctagcttcctcaactgcactgtttcttcgtcttcttcccatggctggcggagcatctgttgtgggagagatctgcttagaaccaatcttgaaaaagttgtgggaaatggagagcatatctcgctttggaatgatccctggctttctcttactactcctttgagtccaatggatccgatcaatatccaagaccaaaagacgctggtgtcttcactcttgtcccctatcactagagactgggatttgaatcagataagatcaatcattcttgaacatgaaactgatatccttaagctaaagatcagtaaaagaggaggattgggtaagtggatgtggttacctaatgcgtcgggggagtatagtacgagatctggttactatacttcttgtgcaggggacgaattggttaatgagcctgacccttccctagttggtttcaaatggaaaagaagagatttggaatcttaagagctcccccaagatgaaaattcttctttggaaagctactaagaatgtcttgccagtgggagagaaccttaaacttagacatatcaatccggtgggtatttctcctttctgtggagagaatgattctctgtcacatctgatcttcttgtgttcttctgcagcaaatgtgtggcaacttctacctttacacagtcagctatttagaaaccaaatcagtactttcagacaaggattggatgtagtcaagcggctcctctgtctacccctgactggcttaggcaagggtccgatcctcccttgggagaacgcttcgatctggacagcaaggaacaataaaatcttcacagataatgtagtgctccctccagaagtagctcttctatctatcttgcgagctaaagaatggcaatcggcgcagcaaaatcttgtaaaacgctcctattcccgagtgtcccttccacgggctgttttctcgccagatctgatcttctgcaacactgatgcggcttggattgattctaccgtggcgggactaagatggattttcagcaaccagacgaaacagttgggatttcaggcttctcgatatgtatcgtgtgtagcctcaccgttgatggctgaatctctcgtagttctagcagccttgcaccatgctcttgagcttggtttcgttaacctcttcttagcttctgattcgacggcagtcatcaaaacaattaaagcgaagttccaatctaaggaacttcacgggattctacatgatgtccttgatctcgcttctaagtttgtgtttgtgtctttcaatgttattcccagaaactctaatcttcacgcagatgcgttggcaaacgccggtttaagagcccatgtagctccactttagtttatgaatgaagtttatttaaaaaaaaatgtataaagattcttaatattttcaaaattagttatttgtaatttacctaaatttgatttttaattaagataataaattatattaccttcttatttgtcaactaatgacttatataacctaaaatttataaaaactgtcaattgaaaaattggactttgttatctcaaaaataaattataagaatattaaatttcttttaaattattttttgttagtttaaacaattttaattgaaatccaaaaaattaatattttctattaagcatttaatttgcttttgtttttgaagttaaaaatcaacacttattttttccggtaatatttattaaaacattattttttttttattttctaaaatattatattttaataatttggtgacatggtatttagagagggtatttaaaaaaatctgatgtgacatcctctacaatgatttttggaatgatgatctggatggcttgagaagcctcaaattgtttcttttaatagtagtagattttataaaaacatttttaacacatgtatgcagctcagggattgaacccactagagagaccaaacatcaaactaaaccaagcaaccactaattgaagtcggaaaaagataatgagaccaaaaggcaatttactgcaaataagaattctcttatcaaacagttttaaattaaagtttaaactttgatgcaatttcctttcctttttataaaaaaataattgttgttacaaagacataatctgtcttttcccaaaagaagagttaacctttatataataataggaattgtaagacccgaccgtctttactagtggaccccacattctctctcgggtccatgggcccacctctgtccgacggtcggtgggccacgtccgggaggctttaaagacttgttaccatccctagaaatcaccacatgatcttttcccatgctttgtcctctctcgaatggttccgacaatcactttccggaagggtcacacattctaaaattactccagcccaagcacgctttactgttgagttctctcaagacctttaaccgaaaagataagtgccaatggtgacataggtggccaaattaattcttataaacctttccgcatgcaccaccatanttcctgaaatcggagtgttacaacttctatttcattaatcttgataagcagatcttctagtaggccataaggttttcttaatgtcctatcagcaaaggatcaaggatatgttgcaggcttatattggacgaatcccaacttccttgccacaaagagtggcattaaactgattgtggctcctagatcacatagacaattcctgaaagctaattttctaatagagaatggtagagtgaaagatccaggatctttcaacttttcttgaacaacgctcttttggatgattgcactacactcgtgagttaacgccaccgttccttgaacttctttgatcctctctgtaatcatgtccttcacatgtttgtgtgagtccggtattagcgcaagacagtctactagaggcattgtgatttcaaggtccttcaattatttttccaagagagcttcatacttctttatcagcttcttcttgaatctccctggaaatggtagtgcaggcttgtagggtggaggaaaatactgcttcagcttgggattgagtactacgatcgagtatgggctcctctattgctatttcagctggaattttattctgaacaaaatcctccccttcttgaacttcacagtccctagtgatagaggtagaggcatgtcgagttggcagctctcgatcatggcagatagtgatggcgtgagcagtggcgtactccttagggttctggattgctttccctggaagctaccctcggttgttgttaacagatggtgtaatgaggatgccttccatatatctcatcctaatgcttagtgattcgaacttgctgttaagtttgacgccttgtcggtcaactttgttgtttaattcagccagcttcttagcgatttcctttgctcatgtggtttgtccttgaatgagctgctggatcatagtaaaaaaaaggggatcctctagagtcgacatg

SEQ ID NO: 556 - DNA, 5383 bp, Arabidopsis thaliana landsberg
  unsure (1)..(5383): unsure at all n locations
gcggctagctggtccagtttgacgagtagttggatggaaggaggcgatgtgcaaaatctttccaaaccgttgaagagtaggggcatgagaagaacaaatggtttctaaaaatacacttttcttattctttacaattaaatcagtcctcattcccccacacgaccacaccacaattaatctgttaacactttattaacgacgaaaaaactaaaaaaaaaaagagtcaattagctaactagccaaattcgacacataaattagcaaaatagccatgcgtcataaaactttagtaaatagcctttttttggggtgtgaaataaccaaaataacctggaaagataggcgggaactcgtgagttccgacactaggtgtctatatgtagggaacataaatatgcgtaggtaatgagtaacccattttatttataaaacacacgccatctatatatgtttttgttcctgatgagcaacataacttatagatttcaattaccgatgagaacataaacatgcgtagataatgagtaacctgctttatttattaaacacacgatatatatagatttatttgttcatttttttttaattctataaaccacataccttttagatttcacagatgcatttgatatttaaacactaacttatatcactagatatgccaaaaacggatcatatatatatacagatgtttgctttgtatgcgactacttattcaatggagactaacagataaaaaggtcattggtaactgtaacatagaatgttatttaaaaacaacacatataattcctatatgcagacgctgtctgaaaacaatgggcgtgagttggaaattgtgtattgggcaatagactggtcaaagtatcaacttatagagatcatacattacttgcaatgtttcgttatatcagtaatcattagtatgcaacttgctacataatatggtcgccaaatcttattttgcgatttgacaatgtaaatctatccgtaggaaaatttttgatacgtatctattgcattaaatgcggcgacagtgttatatacgggttccaatattgcattgggggaaggggtgaaataaattccaaaaacaacgtgtttcgtataaatataacataggataaccactaagcatccaccagataaacgacacgtcgcgcatgacgtctgcgataatgttaaaacacatgaattattgtggttatgcatgtaattcaaatacaattcagttatatgtttgatgcgacatttacagaagcgacagattccatcgattagcagcccttcgagagtttggagagaaatcataattattcaaaattatgtggcttaaaagcttgtaagcactgttgcggaaaatatcttaatatactggagccctacttcgtagcgaaagtttccatatataacaggagagatgagtagcatttaaaacacacgataatgagtaacccgctttatttataaaacacacgccatctatatatggccgtgttctggatgagccacataacttatagacttcattactaatgagaacgtaacatgcgtaggtaatgagtaacccgctttatttataaaacacncgatatatatatatatatatatatttgttctttttttttttattctataaaccacataccttataactttcaattacagatgcatttgatatttaaaccctaacttatatcactagatatgccaaaaacggaccatatatatacagatgtttactttgtatgcgactagttattcaatgaagactaacagataaaaaagtcattggtaactgtaaaatagaacgttatttaaaaacaactcatgtaattcctatatgcaaacgcggtatgaaaagaataggagtgagttgaaaattgtgtattgggttatagtctcggcaaagtatcaacttgtagagatcatacattacatgaaatgtttggttatagcagtaatcattagtatgcaacttgctacataatatagtcggcacattttatttgcgatttgacaatgtaaagagtccgtaggaaactatttgatatgtatccattgtattaaatgcggcgatagtgttatatacgagttccaatgttgcattgggggaaggggtggaacaaaggctagaaacaacatgtttcgtataaatataacaaaggagaaccactaaccatccaccagattgacgacacgttgcgcatgacgtatgtgctagtgttaaaaaacatgatttattgttgttcgtataaatataacaaagaagaaccactaaccatccaccagattgacgacacgttgcgcatgacgtatgtgctagtgttaaaaaacatgatttattgttgttatgcatgcaattttaatacaattcagttataagtttgatgacgactgcttccatcgattagcagccctgcgagagtttagagggaaatcataattattcaaaattatgtggtttaaaagcttgtcagcactgttgcccaaaaatatcttaatatattgtagccctacttgttatcaagagattctctatataactggagagatgagtagcatttaacgatcacaccacttcctcttggaaaacaatacaacgaacaaagtctacaataaaggagaacgacaagttacagcagtactaggtatgccattaatgatagatttgttttacagagtaccctgttttctttattaatcagtgttgtattaatagatctttctcgtttccaatttaatgcaaccacttctcgtttttttcggttgtagttaggggtgggcattcgggtaagcaggtcgggttcgggtaaaacccgatcgggtactggtccttcgggtagagtagtttaggacccaatagggtaaatctaaaatatcggttcagttttggttcggttgcaatcgggttcgggtcaggttctagttcggtttttcgggtaaaggaatttaggacccaatagggtaaatcttcggtttcgggtttgttttcgggtctaattgtttgggtcggtttcggtttgggtaatcggttccggtttttttgcccagtcctagttgtagttatcaatggttgttattattgaaataactgaccgatacatacggactgtgatcggatcatggggaatgggtgctgatggtagctgggttttcatcctgaaccaacataacgccgttagacggatgagcattcgagaaggggagaaagtagctatcgttcgccggttagtgaaggaagcctatggctcggagtacgtagggtgtgaacttcatatgtcataccaatggcctgattggatggatattgaagctacctttggaggacgaacgaagccagtaaccatcgcgacagatgagacaatggggttttccctagctatgcgttttgagttggatgacttaagtttgtttgtctctaagctaacggtagatggtgttccggttgatgatggaatgagtcagacatcgagttacaggttgccagctaaggggaaatcaccattgtattgcaatgaggaaagatgttgtaccgacgagtcttttaaatggaaccgcccctggatgatgaagcggtcctccgatgtatgcgttcgacaggtacagatggtgcaagcatcggtggctcttccttcatcacacatgcaccacgaccgggagctactgttgagccagctttgtcttaggaagcaactcttagtatgaacgagacgagtgaaaaggcagatgaggtagtaaattagtagctcaatattttttatagttgcctagaatgtgccaagcgtacatctacatctgtttacgcaggaaggagattcaaatcttgtggaggcagatttgctggcaaatctagggctaccgtcaattaatctggcaactgataattacgtttctgacagcggaagtgaagggtacaacgacgagaatgaatatgacgggggagaaactcttaaggagtgcaacttcttcgggccgtcggcgacaatcatgaccgaacctctaggtgtacacttggacctacaggtcccactacaacaggctcttgaagatatgtgcattaacttcgcatctttcaacggggatgcggcgccaaccctagatgaacaaggagacgaaggtaccacttgcatagcatgctattttcgtataaaacacatctatttatatataatttgatatcgggtacctataagatatcttgcacattctgtatccgtcgagggcttacttatttatgttcaaaatagtccatcatgttgctaaatagcatgtgaaacattggaaactactgtttctttggtttataattacgttacgtcgaatgtatttgaacaataatttatgtttacattgatatacgtaactataacatggcatgcttacttatatcgtgtactttctgtttatttttccatttattcctatatattgtaatatcatgcgttacggtgaaacacattgttgtctcatttgatagctaagttttgttatttttttacaggtcgtgtcgggatggaactagcaattcaggatgttgtgtatgaaggtgatgaactgtttgtcggccgggtattcaaaaacaaacaagattgcaatgtcaagttagcagtacacgcacttaataggcgttttcattttcgccgtgatcgctcctgcaagaaattaatgactttgacatgcatttcggaatcgtgccctttgcgtgtgtacattgtcaaattggaggactcggacaattatcaaattcgaagtgcaacactggagcacacttgcacagtcgaagaacggagtaactaccacaggggagcaacaacgagggaaatcgggagcataattaagccaaaatatgatggcaacacacgggggccaagagctgtagacctacaacgaatccttctaaccgattattcggttagaatttcttattggaaggcatggtaatcaagagaaattgctttggagagtgcgcaaggctcgctgcgaatagtttcagtctgttaccgacctacattcatgtcttgcgagaacgacgacgcgtgggagtggtttttccgcgttttgagcacaactttccccgatggagagaacctgacattcgtctctgactgacattcatccatttatacagggctgagaagggtaatctctactctttgctgttttttatttttacatgtattagattttaacactagcatttaacattaaacccacatgatagttcataaattacgtgataccaatataacgcatgcgatagtaaataataactggtattccttgtttcttattagagatagatctgacgtgttgcggtttttaaccactagcctttaacttagtaaacaaattaatattctttaaatcacatgctatacca

SEQ ID NO: 557 - DNA, 9467 bp, Arabidopsis thaliana landsberg
  unsure (1)..(9467): unsure at all n locations
aaaaaggaagaacaaaatgtctgcagagggatatattcctcacaaattttgtgacgacttagcgacggtctcctatctgctcgcaaagtcctcgcaattctttagcaaatttgcgatggaccttttccatcgcaaatgttcctcgtaaatcgcttgttttcttgaagtaaaaaggtttttaaaaggattttaaagcgtttaaaaagttattgtaatgttaacacattaattgttagtaattgggcgtagacctcttatttttcgaaaaagcaaactgttttatgataaattcacttaagcacaaaattaactaaaaaacaaaacaaaaaaagaaaagaaaacagtgaaagtaacaaaaagtaaaaaaaaaaagttagagaaactgtcgtctctctgagtgtgtattcttccttagaacaatttgaagaaattttgtttctccagcaaaggaatcaattgaaggtaacaaacttatgaaactaaagtttgatatatgggtttgttcgattttatttctttttaacgaatctcttctctgttataacaatatctagggtttttagttcgcaatgtcctcacaattttgcgagagatatatttgcaggttgaagtgaaatcaatagttggtgttaatcctcatgaatatgaccacttggtttcaaaaaagaatcctaaagattaggatttgttacatatttttgatcttctgatcaaagggtataaaatgagcaagaaagattggagtgagtgatggattgaagtggaacaagtacatgaaagtagaatagatcaggtaatgaaacctgcaattgaaacacttgtgtatcacataagaaaaaggaaatcaatatcctttggtgagaaaataggactggtctatgaaaactatgaagttcttaggtacaaagtttgaaggatggacgactatttagggatcgaaagagttcatgccagttctactagagaagaagaaaaaaaagaggaagaagaaaatgttgcgagggatatattcctaacaaattttgtgacgacttagcgacgttctcctatatgctcgcaaagtcctcgcaattctgtatcaaatttgcgacggaccttgcaaatgttcctcgtaaatcgcttgttttcttgtagtaaaaaggtttttaaaaggatttaaaagcgtttaaaaagttactgtaatgttaacactttaattgttagtaattacgcgtagacctcttatttttcaaaaaagcaaactgtttttgtataaattcactaaagcccaaaattcactaaaaaccaaacaaaaaagaaaaggaaacactgaaagtaacaaaaagtaaaaaaagaaacagtaagagaaactgtcgtctctctcactgtgtattcttccttagaacaatttgaagaaattctgtttctccgcaaaggaatcaattgaagataacaagtttatgatactaaattttgatatttgggttcgtttgattttattgctttttgtcgaatctcttctctattatagcaatatctagggttttcggttcgcaaattcttcgcaagtacctcgcaatttttcgagggctatatttgcaggttgaagtgaaaccaatagttggtgttaattctcatgaatatgaccacttggtttcaaaaaagaatcctaaagacaaggatctatgacaaattttttatcttgtgatcaaaaggtataaaacgagcaagaaggattggagtcagggatggattgaagtggaacaagtacatgaaggtagaattgatcatataacgaaacatgcaattgaaacacttgtgtattgcagcagaaaaaggaaatcaatgtcctttggtgagaaaagaggggttgtctatgaaaattgtaaagttcttaggtaccaagttagaaggatagaagactatttaggggtcgaaaggctttctgtcagttctactagagaataataaaaagaagaggaagaagaaaattttgcgagggatatattcctcgcaaattttgcgacgaattagcgatgttctcatatctgctcgcaaagtcctcgcaattctataacaaatttgcgagggaccttttccatcgcaaatgtttgttgcaaatcacttgttttcttgttgtaaaaaggtttctgaaagaattttaaagcgttgaaaaagttactgtaatgttaacactttaactgttagtaattgggactatacctcttattttcgaaaaagcaaaccgtatttgtataaattcactaaagccaaaattcactaaaaaccaaaaaacaaaatcgaaaagaaaaccatgaaagtaacaataagtaaaaaaaattttttgagaaactgtcgtctttcttactgtgtcttcttccttagaacagtttgaagaaatttcgtttctccagcaaaggaatcaattgaaggtaacaaatttatgacactaaagtttgatatttgggtttattcgatttttatttcttttgtcgaatctcttctctgttataacaatatctagggtttctgttcgcaaattcctcgcaagtacctcgcaattttgctagggatatatttgcaggttgaagtgaaaccaatagttggtgttaattctcatgaatatgactattcggtttcaaaaaagaatcctaaagattaggatttgttacatatttttgatcttctgatcaaagggtataaaatgagatagaaggattggagtcagtgatggaatgaagtggaacaaatacatgaaagtagaatagatcaggtaatcactacaaaaaaagtcttcattgatagcatatctttatagcacggattactcaattgctattgaagatgtcatgtaattttcgttattatattacagcagttgataactgctaaacgctaagatatagttttaatattacagccctttataaacgctgatataaagttttaatgagcgggaacacaaaatacttattccgccaaataacacttagtcattttcgagaaaaaaaaccaaacacaaaacaacgtttcgaaaaccctaagaaagaaaactctctcagtcctcagctgtcagtccgacgaactcactattccggccaccgattaaaccctctgttgcctctccgtcgccgtcgtgaaagctctccgttcaactggaacctccgccggcactcaatccgctttatatctgtccactttgagatcgaatcgaaggcaagtcattttctatgtttttttttttctcctttgacactcaattcgttaccctaaatctgttttcatccatctctgagactcaataaccgatgtttgtgtgattttagaatggttttctttatcgattcttaaaattttgtctactttgcatgcctttgtttattgcgaattcatatgaatttcgtcttaataatgttaacctgaactgctctaggtgcttgtgaacaattttgcattcgaaattgtgtatttatttgggcattagagttgcaaattttggattttggctctgtaatttttgattttttattgagtgataaaacttgagaatttcattgtcagattgattaagcttcgtctgttgtctgaatcgtgttgttattgtcacatcgatttagttattnntgttatgtcaaactatcattgattcactttcttgaatataaaatattttgctcattctatatattttgtttaatttgtaagcgttgctgagcgaatcaatggacatttggaagcttatcaattctctcttttcacaggaaaggttagtatcattgtctcccttttgtgaattgttttctcttgtcatagttagtatataagtttgagttatttgtgaatgttgtctgcttgttctgtgattgtttacttagaagaattcttttcagtttcatttattttaaaacatgctaatataatctagtaactgtacttatctactgaattgttttgatagagtgattagtaaatgttgtattctgtgtttgtttatattgaagattcttttgagttacatttgtttaaaacctgctactataatcgagtagcatgtacttaaaacctaaattgctttgattgattacgtttataagtttgaatttacttgtgaatgttgtctacttattgtgtgattgcttattcaggagattcttttctttacacaatatggtatgctgtttaggttactaaaggttaatttatgttacggttagcacatagaatggtggccaaggattgggtgcattttggcaagtaaggaatataattataattataattatatttcttaggtttcagtaagggttttggggagtttacttcttttttttctctctttctacttctgcaacaaagagctgatcctgcttatggagagaggggctatcaagtttgtacgggatgtggctgcggctttgggagatgatatgattgtatgtccttgcattgattgtcgtaacatagatcgtcactcaggctgtgtagttgttgatcatcttgtgacaagaggaatggatgaggcttataagaagcggtgtgactggtatcatcatggagaattggtgtctggtggtgaaagtgaaagcaaagtcagtcagtggaatgatgaagtagttgagttgtatcaggctgcagagtatttggacgaagagtttgatgctatggttcaattgggcgagattgtagaacgtgacgacaagaaagaagacgagttccttgcaaagcttgcagatgctgagacacctctatatccaagctgtgttaaccatagcaagctgtccgcgattgtgtctctatttagactgaagaccaaaaatggctggtctgacaagagtttcaacgatcttctagagacattgccggagatgctaacagaggataatgtgctacacacatcactgtatgaggtgaaaaagtttttgaaatcctttgatataggctatcagaagattcatgcatgtgttaatgactgctgcctattcagaaagaaatacaagaagctccagaattgtcctaaatgcaatgcttcacgatggaagacaaacatgcatactggtgaagtaaagaaaggtgttccacagaaagtgttgcggtactttccaataatcccacgcctcaaaagaatgttcagatctgaggaaatggctagggatttaaggtgacattttcacaacaaaagcacagatggaaaggtctgccaccctgttgattcagtaacatgggatcagatgaatgcaaaataccctttatttgcatcagaggaaaggaacttggggcttggtctttccatagatgggtttaatccattcaacatgaaaaacacaaggtataggtgctgacctgttttgcttgtaaactacaatctgcctcctgacttatgcatgaagaaggagaacatcatgctgacattgttgattcggggtccacaacagcctggaaatagtattgatgtatacttagaaccacttatagatgatttatgccatctgtgggacaatggagaattgacatatgatgctttcagtaaatcatcatttactctcaaagctatgctgctttggacgattagtgatttctggcttatgggaatcttacgggttgtaaagtgaagggaaaaatagcgtgtcctttatgtggtaaacattcagaaagcatgtggttgaaattcagcagaaaacatatctatatgggacatagaatgggtctgccaccatcacataggtttagaaataagaagtcttggtttgatggtaaagctgaacatcggagaaagagtagaatactaagtggtttggaaatttatcataacttgaaaaatttccaaaataattttggaaatttcaaacaatctacaaggaagaggaaacaatcggagtctgttaaatcaggatcaaatagtgatgatctatctagtgactcggaggaggatgaggaagaagaggcagaagtagatgaggaagagttatcaagatggaagaaaaggtcaatctttttcaggctatcttattggcaggtctgttctcttttcttgaaatatgttatattgtttagattgaaacaaagggaaaatgtctaatgcattttgtttgtctgttttgtaggacctaccagtaaggcataacttagacgtcatgcatgtggagagaaatgtggctgcatctattgtatcaacattgttgcattgtgggaagtcaaaggatggtctcaatgctcgcaaagatctcgaggtgcttggtataaggaaggacttgcatccgcaaaccaaagggaaaatgacataccttcctgcagcactttggtctctctccaagacagagaagaagctattctgcaaacgtctatttgattttaaaggaccagatggctactgttcagacatagcaagaggtgtatctttagaagactgtaaggtaacaggactgaaatcacatgattatcacgtcttaatgcagcagcttcttccaatagctttgagagggttgttacctaaaggtcctagggtagcaattgaacgcttatgcaaatttttcaatcacttatgtcagagagtgattgatatggagcagcttttggaaatggaacctgagattgttgaaaccctttgtctgtttgaaaggttttttcctcccagtttctttgacatcatggtgcacttgacagttcatttagggagagaagctcggttagggggaccagttcatttcagatggatgtacccttttgagagatatatgaaagtcctcaaagattttgtgagaaacacagcaagacctgaagggtgtattgctgaatgttacttagctgaagagtgcatccaattctgtagtgaatttttgaagaagacaacaaaagttcaggaaaaggcagatagaaatactgagtatgagaacaactctatccttggagggcgtcctatctctgcaggcacctttattagtcttacagaaatggagagaaaaatagctcatttggttgtgatccagaatatggctgtcgtcgaaccttatgttgagtaagttacaatctatctctctttctattgcttttatatatatatagaaactaattaattgtatctgtaatggctaagttaagcttcactttctacttctatgaatgctgattctgaattttgttttctctgtttactagtgagcacctgcagcttctacaaaacactaatgggagatgcagacgtgatgcgtctctgttatggagtatggacacccaaaattttgcatcttggcttaaagaacaggctagtatttgtctttcacttagtagtttagcttaaagaacaagctagcaatagatataagagcctgactttttctatttttctttaatagatacatcttgattcaagtactcatggtgaaacactgaaatggctggcttatggtccatgttgttgcacaagatcatttactggttacatagtgaatgggcaacgatttgacacaagaacagttgacaggaaaacacagaatagtggtgttttctatgaagcgacatcagtttgtaggtctagtgcaaaggataaggaacaagtggtggatttggtgcagtgttatggctgcataacagacattatactgttggactataatgtcttctatgttcctttattcccttgaaaacatcgatggagagacagaaaaagaagctgaagacattaatggagagacagaaaacgaagctgaagacattaatggagagacagaaaaagaagctggagtgcaagcagcagaagaacctgaaggcgagcttgaaatatctggagatgaagatgttgttcaacctaagaccaagaggcagcgtggaccaactaggatgaaagatattgctaaggatccaaatgccagagtgagagtggagtacaccatgatgggagagcctgttggtaaaggttcagttaaactggtatcatatgtaggcacattggtacgtgaacatgttcctatcacaattgaaacttggaaggatgttagtcaggatatgaaaacggttctctggaaatctgtgcaggtaaattcttcttttcagtctttttttctgcttgttagttgtgtaaaggtttatttccatactttgtgtgatggtaaatgattgcaggcaaggtttgagcttgatgaagagtttcaaagggttgctgttctaaaacaaatgggcagtctgtggaggtcatacaagtcccggactgtgaaagatattaatctggctcctaataatcagcaaaggatgaatctgagacccatgaatatttccccaacagaatggcgcaaatttgttaaagtcaaaactagcgcatcctttaaggtaatgagttggaattatgaccattttaacttttatttgtcaattattaacatgtttaattggtaggttgtgagtgagaaatacaaagaaaggaggaggaatcaaatacctcatactacaagtcgtaaaggaatagtgagattagcagaagacatggtaagtaaattgacatgtaagttgtctcttctggtaagaatgcattctcatatatttgaatgaaattttttttttgacacagaaacttgaaagtggagatccatcagaagtgacaaggctaaaggtctgggtaaagtctcgtaccaaaaaggatggtacgccggtgaacactaatgctgctgaaaagattgtaagtaatctctgcaagactgatcatgatttcagttatcaatattagtagatgacacaatttcatattctgtagagaaaggcggctgagctggttggaaatgatggtccaccaacgtcagcaaatccagaagaagatcacctctctcaactttaggaccagacaatccgggtaggctgagagcaatgggtagaggcatgagtaaaacaaaactagcttgcctccaagtcaagagcaagtgcatgactaacatggaagagaagcaagttcttttaatgaagaaggtcaatgagctgcaagatgaacttaccagaataaagcagagacaagaacctgaagtgggtgaaaactctgctgctgccagggtaagtgattccttctccctttattccatcagttttggaatcacttctttttattaaagtttggccttcttttgtagagtgtaaacagaagaacaaaccctaaatgtctgttggttaattggtctggacctgaggatatcattggtgaggggcgaattctttcttctgatcctgatgacgtggttaatgactgtcgcctatgccctgtggactcgaaggtgttggctgaagctgctaatacaccagatgcatttctatggcgacctgcacctaacatgtatactatcacggaagctgttggacagatgattgcatggcctgcatctaaatgtgttcttgtagagaaggatatcgaaataaaggacattgtgcctttggtaaactgcagatttcagcacattcttagtcagctttttgatgagatcatgtttgatctagtagagacagagctaatttga

SEQ ID NO: 558 - DNA, 3808 bp, Arabidopsis thaliana landsberg
gcaaagttttttgtagccgaattttacatgcgtgaagccgatgttttggtggccacgtatcgctcatccgctagagcaacgagcgtgtcatcacgggcgtatgacacgtgggttggtgactcgcccatacgcttgacacgtggacatgctgacgtcactatttccttgcctatataagctcaactaaaccccaattgttttgtgaagagaaagtgagcagaagtgaagggctgccgagtttaaaccgttcgtccgattcaagttacggtcccgaagcttataactctgcccgaatcattgcacgcattctgttggtaaaaaagtgagttctggataatggtttaagtcgcataatcatattctcatgcattctagattgatttcgtgagttatatgaattgtgtaaatggttatatttgagtgcatatgtgatctttagattcttatgctgatgtttatggttgggaggttatgttgggatattgatgattctatgtgtttgatttaaccatatgtttcataatatcttaacctttgggatcttggtacgtggtgcttgtggtaggaggcaaagaccataagcgtgcaaagatcgtgatatgtttgaccttcgtagtgaaccgtgctattctggggtcttgtaacgatgttacttgatcgccatgaagtacggagaacttggagagacggggctagctaccctggccgagtgtctacacgatggtgtaacatttggtagtgatgctccggttgcatacctttgtggttgtaacgcaggagatcacgggagtgtgtgtgtttggtgttgggtttgaaggcagcatatcgggcccttttaaaaacttaataaaactagagtcttaatgcattgcatttatatgtagttgcttcggcaagctacatttcgttgccattctctattgcgtgtttcatgttgggtatttgggttggggtaaactaatgtctgctgcagggaatcccgagctcatagagtaatcttagattactcatgattagattactcatgattctatttgttttgcaggaaacccgtagtgggaaatagagggcatggtggacattaggaaacccggagtagttttgtgccttttctaaaacaagtatgtttctattatgtatcgtgcttttggcactaggccctggccatgaaacttataaatgtttggtaacatgttgtgtaatattaatacttatgaaataaatcgggttttcttgtacaaattgcgagtaatgactgataatgacttagtccgagtcggcacaacatttaaatatcgcgagggttggcaagcctaaatgatgtttaagtgggagagtggtcgtggatacaccgcacaagggttgagatgggttcccgaacctcggttggatattgatgatcaatctcaatgtggcattttcgaggcgcatctgacttgtccggtcatagagcgtctcgggggcgttacaatttgtggtatcagagcatggttaatgatgctagcaggactcatgttttttcaaatgttttatcgagtaaatgagtcgcagaggcaattagcaacccggctcatccatgtgataggattaggttagatagaataggatttacccttagagtgtattaggtaatccttagagatttaggtgaaacccttttagtcttttagtggtagagttgtctcttaatccttagaattcgagggcgtattcttttaaggagggaagaatgtcataccccttatcaggtctaggactaggccaagcaattttagtcggcaatttagcaagccgtacaatcggaacgatcggaagaagtccttacgggacgagtattgtttcgtcggaccaacggtctggcagttttggggatagtcatgagcaagtggtcagggaaccggatgggtgagtcaagtgcaacggggacttgggtgactgggattaatgtgttgatgcgttgagggaacgcgtgaacccgtcgtggttacggttctttgagatgatcaccgttggtaacggtaatatccccgagtgcgtgggatatgtttcacccggtaccgtggcccttagtaatatctcatcccttactaggcgttgcttatgtactattttccaaacaagccgctacgtgttcgtcgagctttacttgtgcctgggcgatcggcatttggatcacgtagatcatgcctgatgatcggggattttaattgatcggactgagcgtatgatcgagagtgcttttgttgtgtaagcagctagttagaaatagtggcctagtatagtcatgggcagataggtattattttagataagagcaaaatcggatagagatgagatttggataagtatggttgtggataggaacgagaacggatagggacaaaagtggatagggacgtgagtggatagggacaaggtacggataagaacgagtgtggataagtataaatttcggataagtatggaagcggataaggatcgacttgtggataagttcgttcatgtctatccgttccatatagataagatcgtccgagtttatccgtgtacggataaggtcgatcaagtctatccgcgggtttttggatagagttatggataagcttgattgagcctatctcgccacctcgtgcttcccaaaccgccccaccacccctataaatagtcattccgcctcattcttcctcattcacaccaaacgcactaaaatctctctgaaaagtccgtgagtgtgagttgagagtccggtactgctgaagctctacggagtagtttagttaggcgattagaggctgattaggattaggattagatcgagtctaaacagttcagccgaattaatgtaagttctagttatgtttgattccgtgttgcatgtggttccatgtagtagacgtactcatggtaaccagcttgattgtttattttattgattgcttgaggttatgctttcaatattgttatacttccgcttgctgcttgttattttgggttttgggttgggaaattattgtctgttagtgggagctaggacttgctgggcgattagcgctcattccccccctctcttttgtaggtaaccttagttagaaacctttagtttaagcatggatgttagggaagccggtgtagttttcattgcctttgtaaaatgatatttttgtatcgtagtatttacgactcgattgagctttgtttttatacccaaaacctatatttgtatttggtaatgtatatcaatacattacatatgagtaaagaatcggttttcataaaactctcgtgtatcctctcattagtctagtccggactaatcccaactcgcggtcgcgatacgggttgcaaagcctttaagtcccgtggtcgcgaggggcagtcttctgcggtcgggcctggccttgggtgatctttggcaggattcgtctcgggcggtcaccaaccatacgtgacgcttctggattcgttccttagtcctaggacggttcgggggtgttacatctattgcctcgattcaaggtctagttaattattatagatctagcattaagaacaatcaaagataaagaattctacaaataacctagaaagggggcgatctactaaaccatatgaatccctcatgagaaaccttattcctaacaagcaaactacttagacatattgaatgaaacaaacaatataattgagtaagaaagcataaacacaagaaataagataagggaaagaagggatcttttcactgtattgaacactgaatgaatctctgaagaacaatggatgattaacttatgtctgtaaatagggattg

SEQ ID NO: 559 - DNA, 595 bp, Arabidopsis thaliana landsberg
atttttatcaatagattggatcaaactatgtgtatttcttaagtttgtcttctgaagttttccaaaacgtcagggaagggtcgctctttgcaacttatttgcgacgaaaaaaaaaaacagtcgcactttgcaaccaattacttacgtattacctactctcgatttttgcattttgaaattttaaagtttggtctgttgatatattttcttagatgttgatactttaatttgatcgatattatatataaaaacataaccaaacacatcaattctgaatttttttacaaactaaacattcaatagactggatcaaacaatgtggatttcaaaagtttgtcttttgaagttttccaaaacgtcacagaacagtcgctctttgcaacttatttgcgtggaaaaaaaaaaacagccgcactttgcaaccagtacccacctcttaaccactcttgatttttgcgttcgaaatttaaagtttgatctgttatatgtttcttagacggtgatcttaatttgatggtattgatataaaacataccaacacttcattctgaattacaacttattttaaaaaactatctattataagtcatgtttt

SEQ ID NO: 560 - DNA, 730 bp, Arabidopsis thaliana landsberg
  unsure (1)..(730): unsure at all n locations
aggactctttgtactgtttgacaggagtcgtcatcagaacccaaatgcactccgatgatgccatctggatctagtggcatgtttctgaactatcaacaaaaccattttctgcaatgtctctaaccaagtcatacaatattcttttcttccagtatctctcagtcagtttagcagtgttaagatataccttagtccnnnnnnnnnnnnnnnnnnnnnnnnnnnnnnnnnnnntaaaaagtcttgatctgtttccagcacctagaactctattatccagaactctatcgggttaagtgcgttttaagatatacgggaaaagggtctttttcaacccgaacaatttataaagtgcgtttttatatctcaacaaatacacagtgccgttttcaaccttaactcctaaataatccgaattaactacccacactattaaatttgagcgaaaaactacattgacttgaacataattagtcaaccattggtttccactcacttaaatgacacgatgacaacgagaagtaacaccattttagttatctgagtccataaattcaatacagtgacaatgaagtgtcgttttatctttataagtaggatttgagtttgagtttcaagattttttttaagtacgattctaacttctgtcttgcgtttgtactaaaatgtttctcaaagtatttattcatgcaggggtctccaaaaaaccaaaaataggtataggttttacctt

SEQ ID NO: 561 - DNA, 567 bp, Arabidopsis thaliana landsberg
  unsure (1)..(567): unsure at all n locations
cctatgcatgatgacgtctggagatatacctgcaatgtcnnnnnnnnnnnnnnnnnnnnnnnnnnnnnnnnnnnnnnnnnnnnnnnnnnnnnngtgagctctgcgggattaagagaagcattcacaataataggataagtagaattttcaccaagaaaagcgtaccttagccctggtggaagtggtttcaatttcgattttaggagcctttgctggatcccaatctaaagtaggagtcggtgttgaagtcacagatggaagagcttcttcaactgtaagttgcatcacattttcggtctcatctagcagcttagtatatgttgaagtttcgcagtccaaatctgcactatcctctatgaaagagaccaaaactcgctctagtgggtcttctaattccatctctgaaatactatctgaggctgaggaagtgaaagaatctatcaagaaggtttcccttctatgatcggtttcttgaccaaagtgttcatatcgaattgcatagtaagatccttaggattaatggatccttaggtccttctcataagccaagactacaaagtctatagg

SEQ ID NO: 562 - DNA, 4182 bp, Arabidopsis thaliana landsberg
cgttagtagacgccgggccagttcttcatctataaacagcttgaaggatgaagccaagaatagcggtgaatctgtttctgccttgatgaatgaggaatactataaggaagctgagattgcttccatcacagacgacgacatttcctcccactcctccttgacagtctcatcttcaactttagagtctaatggtggtttttctgtgcgaaccgaagaggtaagagatggcaatatctccatattcttctgataagttatgaaaatgaaatgtttctcaatgctttgatgtcttatttgcaggaagaacatgagcgaataaacaagaatcccagagggaatggccacgagagatcaaaatcagtgtcagagagcagacaaagagaaattgctgaccagattccgtcacgttcctcgtcagtagatctatcttctgtgtttcatctcccggagggcatttctgattctgcgcccaacacttctttgtctgggctggagcactgtgctaatgtgtttataactgataccaatgagagctcgaagctgtcaagtaacggtcagcacaataatggagaggccaagtctatgcctttacaaattgacaatctttcggaaaatgcttcgcctcgagcctctgtgaatagtcaagatttgaccagtgatcaggaaccagagagtatagttgagaaatcaagaaaggtgaagtctgttcgatcatcctcggatattaaccggagcaatagccggttgagtttattcagtgaaagaaaagaggctaaggtgtatccaaattctacacacgacacaactttggagagcaaaatcacgaacttggaaagtagagtaaagaagcttgagggtgagttatgcgaggctgcagccattgaagcagctctctactccgtggttgcagagcatggaagttcatcaagtaaagtccatgcgcctgctagacgtcttttgaggctgtatcttcatgcttgtagagaaacccatctctcaagaagagccaatgcagctgaaagtgctgtctccgggttagttcttgttgccaaagcgtgtggaaacgatgtccccaggtatggtaatatctttctttgcataattactattctgagtgaactttctcagagttaaattttgtccgtgaattgcagattgacattttggttgtcaaacactatcgttctgaggacaatcattagtgatactagtgcagaagaggaactgcctgtttctgctggtcctggaccaagaaaacagaaggctgaaagagaaaccgagaaacgatcgtccttgaagtggaaagattcccctttgagcaaaaaggacattaagagttttggtgcctgggatgaccctgtaactttcataacagcgcttgagaaggtcgaagcttggatcttctcacgcgtcgtagaatcaatttggtggcaggtaatgttgctctgttctccctgtttcatcttttcattctctgaaccaattataattcacatgctctttttctttggttgcagactttgacaccacgtatgcagtcttcggcagcatcaactagagagtttgataaaggaaatggctctgcatcaaagaaaacttttggtaggactccgagtagtacgaaccaagaactaggtgacttctcattagagctttggaaaaaggctttcagggaggcacacgaacgtttatgccctctgcgaggtagtgggcatgaatgtggctgcttgcccatacctgcgcgtctggtaaacatttctccttttgagtttgtcacttttggaccttactcttgatttcacaaacgaatgtccacgatttgtaacgcagattatggaacagtgtgtggctcggctagatgttgctatgttcaatgctatccttcgtgattctgatgacaatttcccaacagaccctgtatctgatcccattgcagacttgagagtcttgccaattccttctacaacatcaagttttggttctggtgcccagctgaaaaactcggtcagtgtactcaactcaatagcttggcaatgcttattatactgtggtctctgtaaagctcatgcatttctaatttcaaacagataggaaactggtcaaggtggctcactgatctgttcggcattgatgacgaagatgatgacagcagcgatgagaatagctatgttgaaaaatcgttcaagacattcaatcttctcaaggcgttaagcgatctaatgatgcttccaaaagatatgctcctcaacagttctgtgagaaaagaggtgcaaatgcaacataaaactcacaacacttttttttatatagtcttctttcttttacttgatataatatatttcttctcattgtgaaggtttgcccgatgtttggtgccccgttgattaagagagtgttgaataattttgtcccagatgagttttgccctgacccagttcctgatgctgtactgaaatctcttgaatccgaggtgagaccatttttataatgatggatctaaggctaagcagctaattttgctaacggaaacgtgatggcccttgtaggaagaagctgagaagagtatcatcacaagctatccatgcactgcaccttctccagtgtactgtccaccttcacggacttcaatctccaccatcattggaaactttggacagcctcaagcgccgcagttaagcagaatcaggtcttcaattacaagaaaagcgtacacaagcgatgacgagcttgatgagctgagttcaccgttggctgttgttgttcttcaacaagcaggttctaagaagatcaataatggtgatgcagatgagacaatcaggtatcaacttctcagggagtgttggatgaacggcgaatgatcagacattgatgtgttttgtcttttagtttccacttgtgactgtttgtaaatgtctcttatgtgtcaaaaatctttgtcaattggttgtttttggtgttgccgccatgtatagaatgaagacagtagtaacagtactggagtttgagcttgacatatatacaatttgaataacacgcagattgaccactgaagaatcaaaaacggaggccacttagtcaaaaaaaactctgaaactccataaacgaatcccactcttcagctatcctttgttccttacacaatttcacaacaagacattacaatggtgtttattagaagtaaagtttcaaaatccatggaagccattgattctatagaggtaccttgtaatactcctcgagtcctcgtcctcgaaaggaagcatcggatttgaggaacattctcttggctatttcgagttgatttctcttccaagttgtgtcgtctccatttttgttgttacagtggccgagctttttgttttcacagcgattggtttacattggttttgaaaattcaaattgatctcggttcggtttacttttggtttagagaagaaaaccaaaagaaataagacacgcgatggatttttgagaatgaggtgcgtggatcaaaaaaggaatgatttttgtggattaacccctttaaaaatcgtagacacgcgctcaacgcgacatgggtgagagtggccgtaaaatcgagtcattgataaaagtggagtatgaagtggagctctctcattggctaaaaaaataaaaatagtagggaagctcctcctctcatatattgaaaacaataataaacacttacgaattttctgcgttttcagagtgaatttttattgatgtgcatagattttgtttcatattttgtgtacttgtagtttatcaacacttatgtatcattcgaaatgtataccaaccagtcaggggaaaccttcaagaagaagatcagaaccaaagtatcctctgcgatggaaccagttaggcttgtgtcaggttcacaaggagattatgatacttttggtgttgccgccatgtatagaatgaagacagtagtaacagtactgaagtttgagcttgacatatatacaatttgaataacacgcagattgacatgtattgcagagacgtgcgctagattgttgcaagtgaagcaaatcatgcacgtcttgttgtgatataggaactatttttcatagatggaaaatctttgttgtatatataatagactcattacaagctttagtggtatcatcctcatcacgtttgatctctcgcaaaactttgaattacagaaaaaga

SEQ ID NO: 563 - DNA, 3137 bp, Arabidopsis thaliana landsberg
ttctgtttctatgatcatgtctgagtaatctactttttgaatttagggtttctcactagggatctagatgatatagtagattaacaacctgttaggatctttagagttttccatcttgattgttcttaatgttagttctagagtagctaactagaacttgatcttaggtaataggtagcatttgagagggcatctattatatgaactatcatagatgggctagagtatttaaatacatatagctttggtttttatacttcgatgaacttatcaaacatgatcttactgcatgttttgcgattaggggtttgcaacaagagttgggatccctagttggtcgatcatatattagtgatttgagttttagattggttcgataaaaatcatgatcatagctaaatctattagtcgtctatttcttgagaatatccttaaacatgacgttttaatcatctgaatttacttcaatctatctgttgcatgcttgcttgttttcatttacttttaatacctattgatttagcttaatttccatactatcaccttctgtgtgaacaaaaaaactttgtgaattcgatcctaaagtagtacaactgaactcttatttgagagagtgcttgaggttagtttgagccttatcaaggtggacaacaaaccactgcggatcaactatatttgaatgtaaaagcgatctgtggttggctcgtggcagttttcttttatatatttttgagtctacaccactatgtacatagactttctcgtaccttgattgttgttagaacctaattgctttaaaatattttttcgtgagcaaattatttagctatacaaagataaaagaataactcccttttattagtttaggaatatcactcaaaacctaaactctcttaatctctcaaaactcttgaggaataccacaccttggcatctctcttatataagaaaagaactagaccatttcctaatccttttaggaaaacacacatataattatttaggcaaacttcctaaatacaaaagtctaattctaatcctaatctctttagcttataactcaagctttcttcaagcttacttcaacattctcccctttaagcttgaactcaacctctttcaaatcttgtactcaaataaaaattctcatttccttgaacttgatccttccaagggctttagttaggatatcagcctttttctcgtctccggaaacgtgttctacgaccactagctcattctcaacacactctcgaataaaatgatatctcttcttgatatgtttgcttcgtccgtgaaatacgaggttcttggcgagagctatcgcggacttggtatcgattcagagtgtcactttctcacatgtttctccggtaaattcactaagaagatcttgaagccatagtgattgctttgccgcctctgtggctgccatgaatacgcttcacacgacgaaagagctaccgtatattgcttttgtgtgcaccaagtaatcagacattcatgcaggtaaaagatttgcccagttgtgcttttcccgtcatcttcatccacgttatggctgctatcactatagcctacaagatctttttcagtcccacgagcaaactccaagccgtattcttatgttccctttaagtacctgagaatctgtttgagtgctgcaccattagattccttatgttcctgcatatatctgcttagtacaccaacagaaaaagagagatcaggtcgcgtatgaagcaagtaacgaagacacccaatgcttctccgatattcttttccgtcaatatctttctcattgtgtgccgtagataatttcaaccccaaggccattggtgtgtgaacaacattacattcctccatcttggtttcttctaggatctttctcgcatatctctcttgctttaaggtaatacctttgtcatgttgcaatacttcaatacaagataataagttagcatcccaatatcactcatttcaaatttggattccattccgttcttgaaatcgagtatcatacttaaacttgaacctctgacaagaagatcatccacataaaccgctacaagaagaaggtgctcattttcttgcttctgatacaaggagagctctttcgaacacttaacaaactccaattcgttaagtattttgtttaacttgttgttccacgcccttggtgcttgccttaaaccatatagtgctttgtttagcttgtaaaccttttcttcactgtctttaactacaaatccttctggttgagcaacgtgtacgatctcctttaattcaccatgtaggaatgcggtttttacatcaagatgatgcaccttccaaccatttgaagctgccaaagctatgatgaaacagattgtttagatgcgtgcaacaggggcaaacacttcatcaaaatctacaccatgtctttggacatagccttccgctacaagtcttgcctttgaacttatttatacttctgtctgagttttgtttgatctcaaagacccactttaatccaattagcttagctccgacgggaagatcaactagattctatgtattgtttctttcaatagatgaaatttcttcttttcacgcttctatccattcttttgactcttttgcttcattgtaatcccaaggcttttcatttaacatcatcaagagatactcactttcaatattagcgagcaagacgtagatagataggcggtttctactaaaatgactgttgatttagtattattagatatgatatttgtgtgagttttgtgatttatggatcgcatgggcaataaagattgccatcatagaatattttgttgttcacgtttccgaaaaatcgtggcagatgaggatatcattttgttgctcacatttcttcttttctaaagttatgatatcaatttggattttgttttctttctaaagtagcaagaccatgttaatctactaatatggcatttgctaaaacaacatagtcacaggtctttttttttctttttttggtaaaaggttaagttttataccatttttgatttttgacagaattacagagattacatgaaacagattaaagcaatctacagaaaataaatacaacattactactcaaattgtttggatcgcttctaagcgtt

SEQ ID NO: 564 - DNA, 5671 bp, Arabidopsis thaliana landsberg
  unsure (1)..(5671): unsure at all n locations
aaacacgctcagcgccaaccggtgaatgaggggcaatacttgttaaagcatcaaccgaaccaagaagaagatcacacggaagaggctaggattccggagaacaaactccccgcccccccaaaaagatggaggggacagcaaccccaacgagctccaaaccatcctcgtggaagaatttccatgattatggccagattgttcgacgacgaagattcggtctaagccttgaagaaaagagcttggcaagtatgtagcgttagaaccgcccctgaagccgaaccattaagtcaggaacccatcatttttacttcgaaagatgcgaatggtattcagcatcctcacaataatgcactagtcgtcgaactggtaatggaggacttcgacgtagaatgggttttgatcgacaccggtagttcggtcaacttaatgttcctgaagactctcttgaagatggggatctccgaaaggaagataactcccaaggttcgccctctgacaggatatgatggagaggcgaagatgtcgataggagagatcaagctccagttccaagtgggcagtatcacacaaaagactaagttcgtcgtcattgactccgaaccaatctataatgctatctttgggagcccctgggtctattcgatgaaggcgattccctcgacataccacctttgtctgaagttcccgataacgacggggatcttcactctgtacggcaaccaaaaggtctcccggacatgctacatcatcgaaaagaagcagcgaaggagggagatcttatcgcaattacaggacaaagagcgagctacgccttatgaatgactggctcgcaaatcaataaaggcaccgcgctgcaagatcatccaagagaatatcgatgaaagacagttatcctctgccacacatagatcgcctagtcgaggcgacagcaggaaatcagcttttgtccttcatggacgccttctcgggattcaatcagatcctgatgcataaagacgactgtgaaaagacggccttcatcacggatcgcggaatatattgctacatagtcatgccctttggtgaaagaacgttggggcgacttaccaacgactagtcaacgagatgttcgccaaactgcttggggtcacgatggaagtctacatcgacgatatgctggtgaaatctttacgagccgaagatcatatcaagcacctcaccgcgtgcttcgatatcctcaacaagtaccggatgaagctaaatcctactaagtgcacgttcggagtgacatcaggcgaattcttaggatacatagtcaccgaacgaggaatcgaagctaacccaaagcagatcgatgcaataatcggattgccatcccctcagaacaagagggaggtacagaggttgacaggtcgtatcgcagccttaaatcgcttcatcgcccgctcgatggatatatgtcttcccttctacaaacttctacgtggcaacaaggattttcatttggacgataagtgtgaatccgctttccaagagctcaaatcctacctcatgagtggggcgatcttagccaaacccgaagtcggagaaaccctatatctctaagtctcgctgtcaagtttggcggtgagtggggtattggtgagatatgaccgtgggaatgagaaacctatcttttacaccagtaaggccctgaatgacgccgagactagatatccgaccttggaaaaagctaacattggtagtaataacggccgctcgaaagctttggccttacttccagtcgcattccatagtggttttcaccgatcaaccacttcgaacagtacttcacagtccgaatcaatccaggcgaatcacgatatgggccatcgagctaagcgagtacgccgtggagtaccgatatcgctctagcctcaagtcgcaggtcctagaagatattatgaccgagctatatccggatgtgatcgacgaggtcctagacgagaattggatactttacgcagatggctaatcatcattacaaggtttcgatctcggaattttactccaatcaccaaccggggagatcctagaacagtcacttcgagtccaattcaaagcatcgaacaacgaagtagagtacgaagcacttctggtaggactttgccttgcgaaacgtcttggagccaggcacatcaaagccttcagtgactctcagctcgtagttagccagttcagcggagagtttgaagccaaaaatgaaagaatgcgagctaatctttcattagtccacggtctgtctaaacaattcgaccagttcgcgctggtcaaaattccctgaaatgacaactctacagcagacgctttagccgccctagcctcgaacacgaatcctgacctgagacgaacaattcttgtcgaaagtatagcgaaaccaagtatcgagctgtcaagttcgacctgcgtgatcgtagatcccgtaacggccatggattcgaacattgacgcaaccgatgcaccaggaatagaagtcgacccagaaccttcatattggctagatcccataaaactctacatcgcctacggcgaagtcccggcagatcgatgggaggctcgccgtctaaagacaatggcggcaaattacatcatggtggatggcgggctgtataggcgaagtgcgacaagagttttcctcacttgcgtggatcaaaaggaagccaccacaatcatgaaggaaacacacgatgaggactgtggtaatcattccggcggacgagccttgcctctcaaaatcaagaaagatggtcactactggccaactatgttggctgactgtgaggcctacgcggcgaagtgcgaacagtgtcagcgacatggcctgatgaagaatgttcctcccgaaatattgcactcgatcacaacgccataccctttcatatggtgggctatggacatcgtgggactaatgcccccgtcagggtctaaaagatttctgttagtcctaaccgattatttcaccaaatgggtcgaggcacaggcgtactacgaggttaaatcaactgatgtcgtcgcattcatttggaaaaatattagctgtcgacacgatcttccctatgagatcgttacgaataatgggaagcagttcgtcttactcatcaccaggaacttccttgctaggtggaacattcgcatgagcaattcgactccacggtatcctcaaggaaacagacaagccgagaccacaaataaaacaatcatagccgagatcaagaaaagactcggtcccaagaaaagaaatttggcaaactagctggaaggcgtgttttggtcataccgaactacccctcgacgacctacgtcattgtctcttttttccttagcttatggcatcgaggcaacggctccgagcgaagctggaattccaacgttacgcagatgcatgatgtcggaggaccctggactaaacaatcgactgctatgagatcacaacaacttcgccgaagaacatcgcgatcaagctatcatccggatccaaaactaccagaatgcggcgacaaagtactataatcgaaacattcgagaacgtcgcttcaacgtgggtgatctcgtacttcgagaagtcttcagtaacaccaaagaaaagaacgccgaaaagctccgagctcaatggaggggaccttacttgatttcaaaggtactttgataatagatttttagtcaattatcctaaaacaccaatcatgttgttgtagtattttaggttgtcaatccaaatgggtgtgatgcgaacaatcaagatgtgatcagaagtcactaagtcaagccaagcaataacaggttttggtgtgttctagcagtcctgagtgaacatgcagaaaacagaaaatcaagcagaaagagtaagacactcgaccaacacagctctttgcagagcactgggtgaggttgagtgactggttgagtaaccgacagtaaatgaaacaaagatactcgactgtacagtctgttgccagacaactgggtggtcgagtatcaggtcgagtaacaagaaagaattacagaaactaagcaacagatgacaagatgcagtaaacaacagtagagtaaacaataaattcaatcagataaagaattcctaaggatgggataattgagtagtttcgtttcctcagtttacaggtgattgagatgctcaataaattatccttagacaataagttcattaaccaaatctaagtgtcaccgcaacagagaccctcaagttaacctagtcccagactcaatcaccattgacgagagctaacctaacagccattacgaatcaacaagttaaagccaaaatgctccctgcaaccaataccttggtacagggccacgaatctctggaattagtggttctgacatttcatcgaacaccttttgggcgcggaaaggtctgggctcaaattccagttgatcagaaagcaataggcattaagaacaactaatccagaagggatctatcaatcaaactcaaccacctagcatactgagaattctacactactctaacccatcctcagaaacctattcactactcagacatcattgtagagaacataaacgtttaatagaatgaaaacatgataacaacagagtaatagcaaggtgataataggatgaacnacttagtaaacgaagatgaaaagcaaatattgaatactgaatagattaagaacacagtgtctgcggaataaaacttagtcaacgaaaatttaaaatacatgctacttatagcgaaatattctgaaactctaatactcaaaacgacgcagtatcgagacggattaagaacggtactcaacccaggtggtcaagtgaatggtcgagtgataagctggagtcttcttctcttctttgtgctcgagtgtctggttgagtgcggaatggagaaaactctgaagcaagcagtcgagtatgaagtcgagtgatagagatggtggtacttggcttggtggtagagcgattgatcgagtggatgatgatggtgatactcgacctgttgttagagtgattgatcgagtgaatgattatggtgggagtcggccatgttggtagagtgattggtcgagtgaatgatgatggtaatactcgtcctgttggtagagtgattggtggaatgaatgatgatggtgggactcggccatgttggtaaagtgattggtcgagtgaatgatgatggtgatactcgacctgttggtagagtgattggtcgagtgaatgatgatggtgggagtcggccatgttggtagagtgattggtcgagtgaatgatgatggtgatactcgacctgttggtagagtgattggtcgagtgaatgatgatggtgagactcggccatgttggtagagttattggtcgagtgaatgatagagtgtcgcggtcgagtgatttgttgtagaggttgtggctgagtacttcaggaactcgaggatgactgtactcgagcttgtggtcgagaatgttgatttgatcaggtccacttcttccaattagctcaccaacagttccaaatcacctgaaaacaacacaaatatgcaatatgcatgcaaaactatcctagacatgcaaagtgatgacaaatggatgttcaaaacgtataaaatgcacacttatcactttcctttctaggataggaaaagaaaaagaagaaatggttattccgatatct

SEQ ID NO: 565 - DNA, 2519 bp, Arabidopsis thaliana landsberg
tcttttaatgattatatgcggacagtcattatcactttaataaacagtatataaacgcaataattattctattatttagaatatttttaggatattaattactgattatagatatcatttcaaattctctcactatagatattgtcagttttcgtatattacgattagacgtgaaccatcatgaatttttttggggaaccgatgtaactaatacgcttgccttatcatcattactttatatatatataatcgacttgataattaacgtcttcaaagaaattaaaagaaagcaaaaaaagtgtttaccctaaagttctctccgcaagtttaccgccggaaaacaatgaagttctttcacggtcttgagttgataaatccctccataaccggatggtatgtcggtctcagggttgtgaagtccttcgtgggtcatctcaatgctttgtctaagatagttggcttggttttggcagacgagcatgtaagctaattgaattattgtgtattctttgtctagatcttttattttcagaaccgtattgaacaattgttgcatgtatacttcctagggtgtatccgactactataatgaatttattgatgttggcgattggataaccatcatgcgttttggagtttatccgaactcgaattttgttagggtaacatctcataagttcaagatttgtttcttcaaagacaccgttgttaggaagacaactgctgtggttgcgaatcctcattacgctttgacatatttctcttcaattatcgatgatgagatcgatacgtctgttctaatcggcaaagtcccgtttaatttactgttaatttcttatgttcttcgaaaatcatctaatctatttgaataaatttcaatcatatttagtgatgttctatttttcgttgtatactagactttgttggggcgattcatgatgtaagagaggtggagaataataggcctacacaaaacgatgtcaatgatttaaggatttgtttcaaaactcaagaacaaagagttagattattttataaatataatgaaattgttgttctttagtaaaaaagatcaatttttcttttttcatatgtagcaactgtgtgttggaatgcttggcttggggaaaacaagctcttgatttttgtcagaattatcacagtcgtggtggtggtgttattgtggccgtgcttggatggtggaaattggaccattattttgatggtccaaaaaatgtgcaaatttgcacatgttcatttaactttatgaaaatcgcgaaaagaaacacgtggtttttatgacctactatacaaacatatatagttaaaaataataataatctataaacaataaaaaaaataaaggtaaaattataaatataacctttttattcaaaaaaaatatagaaatttgattaatagtatccaatttttgaatatattttgtatattaaaaatattctttgaccgtaaagatatttgttggttatcaccacgtacaaaagaatgtcaaatagtttgggtttcttctattttcatttagcacgattaaatgtaatattgccttttgttgtaattttatgtataaaataaatgttaggatagaacctagcaaatattttggtataatcatgattgattattatgtcatattctaatatatcggactaatatatatatcttcgttagacaaaaggttgttaactggtccgtgtttttaatttgattcgatatattgcttactgtaatgtacaatactgaaaagttatcaatcaccagtaagcatgtacatgtatatatatttgtttatacaaactgaattatttgttgtgtattatgcaagattttgatggcaccaataactccaagcggtttagcgtggctgaacaggatgcaggttttgaaaactataagagaaaataagcgcaaaagaggttaagtgtttgttattaataactgatagttggataatactaattttattcttaaatgtcgaaaataatatgtttttgcgtgctgttaacgatgatttcgtgtgcttagttatcactgattcagagtcggaagatgatgacgatttgtctaaagagtcgtacgcagtggatggttgtgaagatcttgaggatcttaagccggacatgattacaaagaaaattaaagtcaaaattgttcgaaagtttgtatgcccggcgttacgccatagagtggtggaatttatattttcagattctaaggtaacaattattaattatcataaatttgttatgctataaggattcaacctaattcaaaaatcttaaatagcattgaaagatacatgccctaattcatgtagacgtggctcgacgattctcatctatcctcatagaaggaaattgcattctcttatcagagtttaatgtctatattgtacgaggatgttttagaccagctaggcacgattttgtcatacgtttgaatgcccttacttcgattactttactaaggtctttcttagaaactgaatgttttcgcttttg

SEQ ID NO: 566 - DNA, 1318 bp, Arabidopsis thaliana landsberg
taccttagcaaattggaacaaaaaaaacaacttaaaatgataaagtttggagaaaattaaaagaagttcgaaacataatttaaataagaataggagctgcgaggtcaaactcctaattctcttcaatcacttccatctttgggttctctgaaagttcatcagaatcttcgaaacggctgtaaaagagaaaaataaaaaattgtattgattaattgatgttatggttaaccaatacaataaaaaatactaaaattcttacatgtagcttggaatatctatcttagggaaattggttggattgatgtaaattcctgaagatccaaattcactcttcaaaacattctcgcctgttctaaaattttcatttaaaattatataataaaaataacaatcataagtaaataggattacaatagaaaaaaaaataactaaccctcaatctcagcaattctccaaaacctcacaatggcaacaatgggctgatatcttcattcattttgagaaatttataagtcgctgaactgatacattttgagaaatttataacaaagagttcacagcatcttccaacagcatagcatttcattttttctcccctaaccaatatgacaaaacattagactaagcaatacattattaagctaatttttcagacaagagacacattactaaacatacttaaaaacactacaatttacatattgtccaaaaagtttgaatgagacatatcttgattcatagtcggtttcaccgtggcggacaaacaaatgaaaatttcttaatagccgagatatttgtcaccacacccattgcatctaagtatagaataatatattaatagcatatttcaaaaaaataataacataaactactaacaaaaattcattcttaaaatgagaagaacatagattgactaaaaacttacccgtgacataatcccaatcctcaagacatggatacttaaggtcaatgggaaaaatgaaatcaaagaagtctcttcaccagttccggaagaggcttgtttcccaaatgaacttgatgtggaaacgaaacgaagaatacctaaccctttcttgaggaacaacgacccgaaagtcagagatgtgaatccatgtgtcaggaattgcatctacacgattattctgaaaaaattcccagataactcaaagattaaataatttaaaatgatctgtttcaataataacaaagtaaatttggattaaaagaacgaaacaatcaaaaatacaaaccttgtcatcatgaagaatcatggttgtaatttcaccatgactttttggaggatgattccagattgaca

SEQ ID NO: 567 - DNA, 1707 bp, Arabidopsis thaliana landsberg
  unsure (1)..(1707): unsure at all n locations
agaagaaatgccttaaccttgtcaaagtttaaaaccaaatccgctagactcttgaatcgttttaaagaagcaccccttagaacttaaaccaaaaaagagaaagaatgggaaaaagggtagagttaggacacctaagggagtgggatcatcttctaagctatcacactatgtgtccgttggcttttatctttagcattctggctaaagctcaagctgctaagtgcacaaccataatggagaagatcctccattctcttcctaaggatgcatttgagacatcttcaaaacctctcaagaggtatgtcaagctactttttgacaatggaattaactcagatgaagcaaagctgctgtccatggacatcagtgcaatcatgctgcctaaggtcaagaaggagaaggcacaaagagtggacattgttgtgtacatccgcaccatcactcctggtgagactactgagaagcttcgagatccatgtagttttgttcttgattgctctacctccacaagtaggttcagccgctctttgtgtcatatgggatcaagcatcaacgtcatgcctaagtttgttgtagagagactaggcatgactaactacaggccgactcgcatcactctcctattcgcggatcgttccaaacgaatccctgaaggaatccttgaagatgttcttgttaaggttggtaactctcttatccctactgatttcatggtcctggattatgagaagaaacccaaggatcctcttatccttggaagagcgttcctagctacagctggtgctaggtttgatgttatatttagcgagaatctctctcaaggtttgggattgagagattgagtttggcatggatggttcagagcttattaagcctatcagtggcattgcttccagcacagacacacctcctcagactgctcagaatcccaccacagcgccacacacaacgctcccttttgttcagctcgccaatgagagttgtagagcaacggtgtcgatcgacaccactacccctgtagattgacaccctcgggtttcacagacagatgcttctgcacattctcatcagcccacaccacttgaggaccttcgngataagttctcttctctctcttctcgttctttaccttcgattaattccttagattctttgaagtttgcttcacaagataacaagcctagagttcctcgaaagcttgtttctcctattgttcttgtagctgctccaaccagatccgcttacgtaccgccttggaaggcgaggaggcagcagcaatccaccaccaccactccacccacatcctaaactccaccaaagtcaagctattgactcaaaacaagcgcttagtgcgaggcaacccactagtatggttttctttttcttgttcttttcttttacgttttttttttctttttctcgcttactctgaattcgaatgccattggggacaatgacgtttaagtgtgggggaggcagttactaactacgtttttctttttgagtcttattcttattcttatttttctttttaagtcgttttattgagtcaaaattttgttaggaattatgatctatattctttagattattgcctggttgattaatgctgcaggtttgactcaatccgactattggaaaatatagatggcaaaccaatagacttgaggatatcctagtttccaacaccaccaccaaggcaggagc

SEQ ID NO: 568 - DNA, 2139 bp, Arabidopsis thaliana landsberg
atctcatttctcgttaatgaaacatagcaaggcggggttggagaaacaatctatcaaagtcaataagcagtctaaacatccaatctcttgggttagaatctataaatctcttggaattcgtagataacgcatccatttgaacgtcttttggacgctggatacctagggtcgaattcccacatcagtgaaaaccgcataggggccaacgaatcctgaagggatctaacctaatcttaaccacctgactaacctatagattatcctattgtaatccatcctcaataaccctaatcactactcaagcaacataatgaagaacacaaacccagaaattactgaaatcataccaaaatgtagatgcaaacaagataaacaactttgctcaaagaacgaaatagattaagagtaaattaggttttaagattcaagaacacaaagaaaaactaagagataaaagctacatcctttggacaaatcccaaggtgatctatttatactaaaatgtttaaaaccgtagactagaaaataagagagttgaggtggtttggacgagtgctcgatcttggggatcgagtatacagggtgctgtaaagtctgcgcctttgcctccatgctccgagtgatcaattggtcgagtagatgcttgttcctctcctatttgtatgctcagatgtctggttgagtggggaatgaggcggatccaaagatgctttaaatgatcaacaagtcttgtagagtaggccgcccttgatcgagtaaaggggttgagtagaggatcgagtaggagggtcgagtagagtctgctgcctcctctatggctgcctggatcaagtgaactggtcgagtagaatgctctgctgcttctctcctggtttgatagagtagagggtcaagtagaaatccttgtaagctccttctacacatgaaaacacaccaaaacatgcaatatgtatgcaagatgatcctaaatacataagtgtgcaaaataagttaaatgtgatgcaaaatgatataaaacaatgagtgatcactaagttaaataatgataaatacatgcctagaatgagtaaaatacattgttaattactctagaactagcattaagaataattaaagatgaagcattctacagataacctatcaaggggagggggggggatctactaaaccatatgaatccctaatgaggaaccctaaacctaacaagtggattactcagagatgatcaaagaaacacaaatcataatcagaataggaaatcaatagtcaataggtctctaaagggagtctccacaggcttttggctcccaaaaataaaagagataaggggaatagcctctccaaacttaggtctaaacaatgacctttaaaactatatatatgacctaaaaacgtgatgagccttctttagaaataagggaaagttctgggccgaatatagaaatcttcaaaacttcaataagttgcgccttcaaataaattgcgccttcaaattgccgtcaggtattggtgtcgctcgacaccaggggtggtgtcgttcgacacctacgcggattttagtctgcaaaactgcttctgcaacttaagttgtctgttttgctccatagaatgctccataatctccaaatgcattccaaacatgtaaagaactagaaaagactctaaaaataacaaatagattctaaaacctatacctaaatcatagctaaaagcagtaaaaatagggttatatcactcgattcccaaaatggtttaaaccatttggacacgtcataattatcgaatttttggttccaagacaaaaggtagccctctataaataagagcttatctgccaccgaattctcctcaagtatgatttcagaaatttacttgataaacactacgagaatagaaaacgaaggagccttcaccgtctgtccactcgtccccattagcccattgtttctgtccggtgacggtttcgaaccagccagtgtcctctttccccgcgctgcttttcacttccctccaaaagataaaaaggaggcgtacgacttcatggataaggtcgggattcactcttccttccttaaagcttcttctcctttttttttttacactaatcggtttcaatactagggctgttgacacacatcg

SEQ ID NO: 569 - DNA, 538 bp, Arabidopsis thaliana landsberg
acaagaaacagctggaaacaaggttggatcagtcaacttaacatataaggtatacagtttgagccaaaggggggagggtaagtaacaatgaagtgctttctcatgttaatagagagtatagagcatattaccctacacaccaaatcaaagcgttttcctatctacggagcaaggttttgttctgtaagatatactctgcatagctaagtaccaaaacaggaaatgaaagcttattggaactacattggtaacaaaccaaatcctcaccttcgaacaaggcagaggaagaaacccatctactacaagcagcgtttactctttttccactatcaaaagtttgcatctacacaataaaaatccaaactttattacctcctccacaaaacacacaaggaaaatgaagactctttgtgccttaatgcgagtaaacagaatcatgtcgtcgtggttcttgatttgaggaagttgttcaagagtcctactatatacattaacagtaagtccaggacttggatacgtatcatcaattatcccgaga

SEQ ID NO: 570 - DNA, 968 bp, Arabidopsis thaliana landsberg
tcatgactttagaactgattatagacttttaagtgtggtcagtttcttaactgttttagaatttcagaattggtctctatatatctctcatgcagatgttaaaaattttagagattacaaagctgttttacttagctactttagttaaaatttgtatggggtgttccctttttctcttataatgatatttgaaatgaatctatgtatgtatctgttcttctttttatatttttgatctataagttgcaggctgcaacagtacgttcttccttttctaatttttgatctgcattcatgttaatgtttcttacttttattgatttcgttgttcatgacttatggtttgactatctatgatttctctgtggtatttgttggtgtcatgccttttaatccatatgtgtttgagaaaaacttatgtctattttttcttatgctgatggtacggtgatgtgttcttggtttgacgtccctaaacttgcttttaaagtggtattactttacttcactctcgatctaactctaacgtctcagccactcttatttttatgaatcagaatcactttatagactggaagctccaaattaacacctttggctagttaaaacttatgacgcaatatctataattagcacttgttcttgctacttgcttaatcctcttcattccattgtgatttagcattatttgcctctgtatttagtgatatgctttatttttattacaggtcctatatacaagcgtgagagacaatgtcaaatgattctgatgtgagtatcttcctctctaacacatattatggtaaaatgcttttaatttaagtatcttgacaattttatttgaaacattagaatcttgtgtggagtgacgaacaaatacgcttgtatcttcaactccgattggaagagacattgaaaggaaacattagaaaacagtcggtgaaagagactgcgaggcaggcaattac

SEQ ID NO: 571 - DNA, 3914 bp, Arabidopsis thaliana landsberg
  unsure (1)..(3914): unsure at all n locations
atataccaacataaagcaccaagtagatagctttgtctgtttgagtgactctcatgtagacacatgggtcataactgaagtaatagaaccctaagtactttgactagaataagaacacaactccaataaacacactttattagaacaaccttcacactaatcaatcacagataagtttggacagtattacgcaacatcaacaacctgatttgattcagtcagatcctaaaactacccaaatcacaaacacagcaacaaccgtgtagtcactttgttcactcaccaatgaaacccacgagacaagttcttcttaacttttctaatcttccacttttgacaagtaaactggctaaccctaataagagaccaacgcttctcttatatcttgtcttggaaaacggaggatgcttcactttatccaacaggtccaagtgtagctcctcatcattatctagacactaggaccatgtcctatgcctgacgacttcgtctcctttgtctaaagtgatacgtcttttcttcactccaaccaacacgccacattggcaaaagcaactgttgctttcccgcttcctctgttctgctctgtattgtttcggacatgcctgttgaacttcagacactttgtttcttcaatttccccctttttatctgactgtgacaccacaagtaacctgcaaaagattagagacaaccacatacaagctaagcaatattccataccaacatagaattcaaaaacccgattttaaacaactactgccaagggcataaccattaaaacctgaaacacatctgagttcttggttccatacattagtccaacattaaacacacagaaaaaccgataaagaaaaagaacagggagtttccacaaccacaaaacaatgagtgacaaactccccctatcaagatacacttttaaagaccgacaaggactaagcatctaagcattgtcatctaactcatcatcatcgtcctcttcctccacattctcacctcccatatcatccggaacagagtacgtaacatcaagtactccccctactttagtgcacactcacataaaagaccattctcaacagataacagagtgtaaggtgagagaaagaggcttacctgcaagacgcagctgcatcgttgtgagggatgcaatgaggttctccaaagccgcatccaaggtagggctgtcagtcggtagcacatgcactggtttcacttccatggtgaacttctcagtgtagatgataagtaggaggcctacttatatgctgaagtgaggttcagttcaattccccttaaacactaacatgtcgatgcagctatagggggtgtcaatccagtccactgttactactagcaatcaagataacaactaggtcaagccacattataatgattgtgggtttctagtaacaatcctaggtcaggattcaaacaggtaaaaatgagaacttaagagccctactcgatcattgggtcgagtagaaccaacatgtaacaatattaagaactaaaatggaatcaacagaggatacaaataacaggtaaataaaagtgcaatcagggggtgaatacaaataaatctaagaagaatagaagtcttaaggatggattcattgataagggcaactttagtgttcatcgggtggctaactgataacactgtattttactcattttaggtgtatgtttatcatcatttagctatgcatttgctcattgtataatatcattttgcatcattttatcttattttgcatacttaggcatttaggatcaccttgcattcgcattgcatgttttggtgtgttttcaggtgcagaaggagctaaaaaagactctactcgatccattcactcgatccaggcacgcaacagaagaggcatcattctactcgacctccttactcgatccatgatgctacagagaggctgcagtttactcgaccctcttactcgatcaacctcagatgaagcagcagattgatctactcgcccctcctactcgatcctctactagacccatttactnnaccaagggtgactaactctacaagacttgttgagctatcaaagcgtcttcggatcctcttcattccccactcaaccagacatctgagcgtacggataggagaggaagaagcatctactcgaccaattgatcactcggagcatagacacaaaggcgcagactttacagcaccctctttactcgatccccaagatcgagtattcgcccaaaccgcctcaagtctcttgtcttctagtgaatctagggtttcaatatttcactataaatagatcactttgggatttgtccaaaggatatagcttttatccttttagtttttctttgtgtttatgaatcttcaaaacttaattactcttaatctattttgtttttgcatttagttgttttagtaaagttgtttagcttgtttagatctacattttggtatgatttcagtaatttctgggtttgtgttcttgagaatgttgcttgagtagtgattagggttcttgaggatggattagattagggtaatctctaggttagttaggtggttaagattaggttagaacccttctggattcgcttggcccctatgcggttttcgctggctaatgtagagattcgatcatagacgtccagcgtccaaaagacgttcaaatggatgtttgatctacgaattccagagatttgtagactcgaccaagacattggcttgtctgcttattggctttggtagattgttgcttaaaccctgctctgctatgtttcatcaacgagagttgagattaggaagtagtagagttatgggggtctctgtcacgagagtggattgacccggtttttttgaatctatcgtctagggtttctgcctttcacctgttagccacttgatgagccctagagttgcccttatcaatgaatccatccttaggacttctattcttcttagatttatttgtattcaccccctcattgcacttctatttaactgttatatgtgttacttgtagattgcattttagttcttaaatttgttacatgttggttttactcgacccaatgatcgagaaaggcttttaaagttctcattttcgttgtttgaatcctgacctaggattgttactagaaaccaaccatctctataatcaggtttgacttagttgcttctgtacacatcttgattgctagcaataacagtggactggattgacaccccctatagctgcatcgatatgttagtgtttaagcagaattgaactgaacacaccacacttcagcacattaagtaggcgtaaaaacctacttatcaatttggcgccgttgccaattcattgttgcattgttacattcaagatatcagaaaaagttaagatcaagttcttttacatttatcaagttactaactcatcttttcgtctgcttttctttgtggtataggtactaatctttgtgcatgcaaactcgatccaaaggttttgcacatctactacaattcagagacacaattgacagaagagcttgtgaattacaagaaaccaaagcaaaggcagcctgtgatcaacaaagaccagctgctatggatcaactgaacagacgagttgatgttcaagacccacctaatgttgatcaaccaagaaacattggtgctggtgatgccccaaggaatcatcaccaaagacaaaggatagtgcctccactagttcagaacaacaactttgagatcaagagtggtctcatctcaatgatccaaggaaacaagtttcatggtttacctattgaagaccccctgaaccatcttgacagcttagactatttcccttctctttgggagacaagacacaccattgggagaagactctgccccctgacttcatcacctcatgggatgattgtaagaa

SEQ ID NO: 572 - DNA, 2438 bp, Arabidopsis thaliana landsberg
tattttggtgtaaatatcactcgatgtcatgtgtataattgagtaaattaactagaaccgcgaccggttcttaaaagctaaagaagggtttccttgttagaatatacaaagccaaagacattgttggggtcggatttcacccaggtaaccgagccgatctgatagaaagtgccctgaaggttaggttcgtcggctcgggcatcacttcagagaactatcccttgccggccttaaaacatctcgggtatcattccagagcaatcacgacccagccttaaaccacctcgggtatcattccagagaaccatcccgagccggccctcgaaacacctcgggcaaacgtcatccggctcaggtgtaatccctggagacgagccatttgaccacgatgcgaggaccaacttgatccggctcgggaggaccttcggaccgagccaaaaatacatattcgtccaaggagaagacttgaatcctataaaaggtcgatatatcattttcagaaaactcggaaataatattggagaatctccgaggatattatcgaatccataagttttcccaaaattctcgaagaataaggataattcccatcaatgactctgagataaatggaaatcttccgagaatattgtgagaggcggtttcccaaagccctatataaagcgcctcaaagaactaacaaaagaatacgcacaaaaaaacgctctcaacttaaggctatcaaaacgctctgactttgaaggcaaaacatttatttttacttttctaaacacttgtacgatcaaatcatcatcacttcaataataaaatcaagaacattgtccacggtaatcaaataattctgttgttctttgagagtcttgcaaagatccgttctttgaagaaaccttaaatacaattttgattctgtgagtttcgactctcacaatttggcgctagaaagaggggaagagatttctcttacaccaagaacaaaaaacaagccgatcaatcaacaatggtcaataattagatccttgctaccaccgttgacgcggagggaaacccgatccctccaatccaggtaaacgctcctgaagtcaacgctcccgcagtcctagcaaagctgaggagcatgatggcacaactccagaagaaggtgaacgatcaggagcaagcaaaccgatccttggcccaacagctcgaagtggctacttctcaagggcaggtcaggaccacccgctttggcgcacaacactttcctgatcggtgagcagcggcagatctcaatccaacgagactcgtgttcaacacacaccggtaacacgacgaggccatttcggcggactgcgccagcactcggcggactgcgccagcactcggtggaacccgagcaaaacatgacgaaccgagtagaggaagccgacccgcaggtcccgattccccgagccgaatctgacgaggctgaccagatcaaagtctctaacggccaaaagattcggaggaaaacattaggatgggctgaggagtaagctagggagtaggaaataaatgccatcaagctcttcctagccaatgcagatgccgagatgaagctcgtacgatcacagatgcatagcgctggctactcagtcccaaacatcgatcgcattctagaagtactcacaacacgcctttcactcacatgatctctaacgcgataattttagacccggggaaactgagaatcgagtacttcaacgggtcatccgacccgaagggccatttgaaatctttcataatttctgtggcccgagccaagttcaaaccggaggagagaaatgctggtctctatcatctgttcgtcgagcacttgaaaggaccagccctagattggttctcaagactcgaagggaattctgtcgacagttttctggagctatcgacgctcttcctcaagcaatactcggtcgctgtctcaacagccgaatgagccacttactgagccgctttcctcacaatgttttgatccaccttagctaaagttgagggaataaatgacgtcgcggctctctccgctctgaagaaggcactatggtacaaatctgaatcgcgaaagaaattaaatctgtttaaaccaaaacaatccgggacgccctgcactcagcctcagattatgtttccaataaggaagaaatggaagtgctatcgaaaagggcacgagtcatcgaaacaaacgcctcgtggcgaaaaatcccaacctagctttgaaggcgggaatttagtacaccatgaggggcgaaacttctccggagcccacaattatcaagtcgatacaccccgccgttgagggcgaggccgcggttgaggtcatggacgagaatcatatacttggacgaaagatcaacctacgggaaatgagcaggagtactgcgaaatacgtaagagctacgaccatcacacttttagatgtcatagtc

SEQ ID NO: 573 - DNA, 544 bp, Arabidopsis thaliana landsberg
aatatgagtattttaaagtaccaaatcttatctgtcaaaggatcacatgattacgtataagttttatttatcttttttaattatctaaaagaagtatatcgccgccaaggtggaacaagtcattgtttgtttaacgcgcacttctcctcctcaaccatttatcaaaactagaaaccactatataaaaaaatccacagagaatgaaatttacatattttcaaatctttaaaagttgagaccagaagaagaagaaaaaaaatcatggagatgaccgaagcttccaaacagacaacagcagaaggatcagcaaatccagaaccagaccaaattttgagtccgagaagatcgttggagctaaaacaaaagaaatggtggatctctgtttctttatgtattttcttagtcttgctcggagattctctagtcatgcttctcttgaacttcttctatgttcaagacaatcgagaagatagtgaccaagatctacaataccgaggaacatggttgcaagctctggtccaaaacgctgcgtttccactactca

SEQ ID NO: 574 - DNA, 1540 bp, Arabidopsis thaliana landsberg
atgggtcaacgccgatcaataccgaattctggtgatcggaacatcaaagtaggatggttatggtattggcaacataacttctgtcaatacttcgtgtagttaagaagacatttttaaagtgtgcatgtgtggcggtgtattaagtggcgatgtgttggcttatatttcgtgtagctgataaacatttttccaaaatttttttatatattaactaaccattgataaaaaaaaataaaaaagacattgcatggaattttcaattagagcatatagcttaagaatttttgttaaatcaccgaattataagaccaatcaaagtcgggtgtcaactaaagctagtgagaatgcggatatgtcgcggtagacaggtggcgtaacgtaattaaagataaatagaggaataaaacaaaatcatatcttttttgacattcttttttttacatctaaaaacaaactcatatcatataatagtttcttggcttctctctaaattttaaacagaaaactttccctcctaattcaccaagtttctagggttttcagttctttgtttgggttctttgtgttggtagagatatctccggctgaaatggcggattcgccacggacgagtcaacaaacgccaatactatgcggcgggagttacacaaggtactgccagagatttggtacgacagaggaggcaaagatcacggtgagattgataaggctattagtatcctgacttgtctaaggaaaatagaatcgaagaagccggaatctgatatatctatgataaaagttccaaaagagtttatatgtacactctcgaacaagatcatgattgaagctatgctcatcgcttctcgccaggtttgatctttcttatttttccatgtttttgacgatctcttgtgattcttgcttcatttttcaatatttcatttatacgtataagcatataaagttttagtatcaaagaaaagaaagatccatccaattctggtgtgttcatttatgtcttatgcaaatacagagttaggatccaagacacatattctctggtgtttactctttttgtttttttattcagacgtttggaaagagctaaatcgtagagtgggtgaagcatgaacgcactacaacaaatatggacattcttatcacgagaaaaatgctataatatgtctttaatagctttttcatgaacgctattttagggcactgttattataggtaccccacatacagtagcgtgagttcagtatgctatgttatagttttataacatagctataaagaacagttgtattatcacgtttaattttcttaaaaaaattatataatatttgatttttcgtgctatgttatatatctctaatatagctgttgcgaaatgttgttttatcgtggtttgccttttttcaattggaaaataattagtccaattatgtgctatgttatgctcttatatcaatttataagctacgaaagatgattaaaacatagcattagtgatatgttaaatattctattacctgtattcttatagcattttctg

SEQ ID NO: 575 - DNA, 481 bp, Arabidopsis thaliana landsberg
cttatatatagagaaacagaagcttggtgaaatagcaacaaccctaatttttcaatccttaaaggtgaagtttgtgttcttctttttctttgattctactctttatcgtcacaatagcaaaatatttgatctgggttggcattttgattgaagaattttggtgggttcgtgttagattttggtgggtttaggttggtgttagattttggtgggtttaggttggtatgacaaatatcgtgtattgctatctcatgaaaaggcagcttgtataagcactactcttttgaagcattcagttcctagtctcttgacttttggattgttttctgcagctgaaaaataagattcaggttctcacactcatattggtggtgttggtttaatctcagcttatatctcctacactccagagatagcacttaggtttgtcttctcgtgcaacgaacatcaaaatgtcgttaaggacttttaaatcaatctt

SEQ ID NO: 576 - DNA, 553 bp, Arabidopsis thaliana landsberg
acacatatgttgaaatttccatttttttaaacaatatagtttacattcattccacaaagtattcgtaacttctataacttttcgtgtgtgttgtggacagaggaagattgcaagattatacattccggaaccaattctcgcactaattgttagccacgtatcagaagaaggaattgaggatttgaaaaactggattaaatttggtcatgaagggaaatctctggtcaagattatacgttccggaaccaattctcgcactaatctttcgagacactatcccgatttcgtttagataaaagccctgacttcatcaacatgtcttcgcccgactctgttcacttctcattctactcaaaatgtcttgcaaaacgaaacccttacgcaatgtatctccagagcttgaggctagggttctgttctctcgacctgataggcgccatttcattattgaatgattgtaaagatgtcattcctatagccaaacttctttacattgctctaaaccgctgcgcaggtaatgaagtattagacgcttttaatactttgaaatgag

SEQ ID NO: 577 - DNA, 489 bp, Arabidopsis thaliana landsberg
ggcaaccgtcacattaaagacaaaagttcattaaataaaaaattaatgatttaaggccgaagcccagtaaataagcctacgaatctcctaacttggccacatggttaaacaaagaagctatttaaaagatggactttgcaaatccatacttaaatatagcaaaaaccctcttgggatcataatcttaaaggtttaaaacccacctcaggcaaacacttgttcagaaaataaaagtctacttaggcgatgagagtagtctcagaaataaacttcaagtttttaaagcgataacccccattaagtggacgcatccactatggatcctcagccacctcaaattcagtctgagttggctcgggatcgactgggtccacgacagccgtctcaatctcatctgttatgtcagcaacggactctttagtgggaatcccagggtccgaaccatcatcatccttgatgaccactgttttcggtgttcatggatggagg

SEQ ID NO: 578 - DNA, 621 bp, Arabidopsis thaliana landsberg
aaggtaaaccttaatccctttctacgtaagaagatcctcgacgacaataaattgtctgagaatgtcttagagatggaggattcgttagagggtggggggcgggtactgcaaaataagcttctgttactccaacccgagaaaaaccagaccaagttaggtcagagccgtgcggtttcttccacaacgaatctattgtcttctcctgagaatcaccataatcaacaatggacagaaccattggagaatggtgtgtcaaacacagagcaagagctatcgacttcatcattgagtcaacatcagagcaaatattcagtctttctttataaccatgacaacggaagcttctatcaagtccctgactcgatctgtttctagtttagattatgagttttaattgtctgattggtatggttttcctaagtattatgaatgcaattctcaattctatttttgtctgagtctatattaagagctttaatacagtatacaataaacgctgaatgttagatgttcataattgacgcacataagcaactaattgagtaatcgatcgatgcgatgaactcaaaaactgtagttttcggttcaattctgtgaatggaaatcagtggagcaaagttg

SEQ ID NO: 579 - DNA, 587 bp, Arabidopsis thaliana landsberg
tatcattgacccgaaacgacatttatggtatcgtcgacgaagtgttttgtctattttgtctaagtttggaatgcttttgtctaagtgtgaagagagtggcgaaaaaaccaaatttttggctaagttttttgcctccacagtgatttttcttttatcgtaatgatttttgggttgccgcttaatgaaattctttctcagcactaaattaatgctacaatatagttgccatccgattttatcacttttactagcagttagtgaattagtgctacaatcatctgctaccaatggccgaaattcttgtagtgattgcgacaagaaatggtaaacctttcagctccattcctaaacaaagttcttggaattgattattttcaagaataatttggctgcctaatgcacaatatattactgatcctggttggaactagctaagctactgatgccaaggctcagctactaacaccttcgaagaaggatatcccggtggagtactaaccaagtcatttggatgattactaggcacaaatgagatagctacacatgctgaagaaatcgttatgatattcacattcttggcaccatac

SEQ ID NO: 580 - DNA, 599 bp, Arabidopsis thaliana landsberg
tgttatcttcggtattttcctgcatagaaattcaaaatcgcaaatggtgaacaatcattcaatagataaataacagtcaagagaattaagaataagccaccaactaacaaactaccaagaaagtgagaatgataacttgataatgtcaaaagtgaagaattaactttacattctctagcgttgaatcgtttcccgagccattctgattccttggaagtgtcttcttggagagtgcctttctttgagttccagcctctatttgtttcaacggtggtgtaattatgcccggaggtggagttaaaggtggatcagattcatttgctagaaacaagtttataagatcaattttcatgatacataagagtgttaccaacttaccattcctcacagaatcaccggtcttatcctgctccctgagtaaacgacaattcccttgtctgcaacacctaaccaaaatcaaaaaccacaacagtgagataacaatacaaggactctaaatgcaaaccatcattacacatctaagaaatgcagtcagaaatacgtgaaaacaaactgttaaatacctttcaaacgccatctttccacaccttcaaaggcct

SEQ ID NO: 581 - DNA, 461 bp, Arabidopsis thaliana landsberg
caccctagcttcgggcgaacttaggtttcatgagaccttatccgataggcctactcttgctgcgggcaagggcgaggttgacctgggagacaaacatgggtggtcgccttgctccagtaaggagaatccaatccaagatcgaagggatcgatgagagcatatggagacttcaaacgcggattaatcaactagaggataatgacacgaaagaggatgtaactttggaggacgttgtagcaccccgcgcatagaccttggaggcgaaggaagggcaaggggaggagagaagggaaatgcgcatgaaatgagagaggggaaagaagagaatgtgcatggggtgagagaggcggattgttcatttataaccaagtaaaacttggagccgaatccattcaggcaaaccaatttggtgaccaagggtttgtcccgagccatgcaagccgaattggatcccacgcctt

SEQ ID NO: 582 - DNA, 1570 bp, Arabidopsis thaliana landsberg
agcatcaattctcatattttctattttaattaaaatttaaagattgctatccttcataatgaagcatattctgtggaattgttaatggacatgacaagaatcatttaaattagagaattcttactatacatatgcataaaaaaaatattcaacatacaatgatagaaaacatgacttagctcaggtttgcaatcgaatccatacttacaaaacaatttacaagttctacatgcgccaactatagataatatgtttactgatattaaagttttctctttgccattattttgtttaagttactttggcaaaatactgatttaaaagtagctaattaaatataattcaaaacacatatacaaaaaatgcatcagtatttaatattttaacatggtaacacaaattcttaattcatacataccattaaaattttaaaaaatcaacattaacaaaactaacttgtgtttcaccatcgataacacaaatttctattgcaattttctaaccataattttttatataacaatacttgacatcattacaacctaagataatttttcatctaagattttcagtttaaaactccagaatttgacttatagttcacaatattagctattatgtcataaacaaacataattaacaatcgacaatttttatatatatactataatatatatgactaaaacaaaaaaaaactaattaaatgtaaattttatacaacacattttttacaatataaaatcccgcacgaacgtgcgggtcaaaatctagtagatagttcaactgtattacaaaattgattgtgccagatataattttattttttctttttctaaagactaaattaaacatataataaggatcgattactatttagaattcaaatattattgataagattgagtgtgtataattgtgggtggtctcttttatgtagtctggtttcttttctttcacgtatatagattatggctgcatcatcggcaacaactagatcgtatatcagttctagagactacacatttgcagagaaaataaaacgatgttgtgtgggaatttggaatgttgataaatcccaacaatttggacgaaatgaaatgcaaattatcatatggggaaaggagttttcaggaggaatctatagactaaagcaacatgttgccacgatacaagggaatgttgcagcttgtccaaaatcatccaaaaaagaccaagaaaaatgcaagttagcaattctagaagcacaaaacaagaagaaaagagttcggatgacagatttagaaactcgaaagatggtaaatgttgatgaaaaacgagaggaggatgaagaagtaattgaagtagaaggaatgggagcaaacagaagtgctcgcatgcttggtcctattgatagatactacatgcatcaatcctgaaattcataaaggtccaatattgacaccacatcaacaacatatcaagaatctcctttgcaaaagaaagattacatgtggtacatcaatatgttgctagttgggggtattctcatgggatttccttttaatgctattgcaaatgatgattaaaaaag

SEQ ID NO: 583 - DNA, 1518 bp, Arabidopsis thaliana landsberg
gtgctccagacaaattaatttatgcatctgcctccgtaggacaacacgtttgttattagtatagtgaatgtagacattaataacaaatacgattcatttaattattttaccaaaaagtaaagaaggtccactgaatcacgtgaaatggaccattccaaattcttcggaaactttaaatacattactagattgtctcactcacctaatagtaaaatagtataatggctccacaaaattgccgacactgtattttgttttttcttcttaaaagtattcaacaaatacatcacatacaactattttccgaaaaaatataaaaacaaatactaacttttaaatttggaatgattatcataaatcataaacaattttaaaaatatttaaactatgtggttggagtcagaattcaaattttaggtgggaccaatgtttggattgaaaattatagttttgaatgtgatgcaaaaaaaaaaaaatttaattgaaaaattacgactaatatttgatattttttttcttttttaattaaaaaattaaaatttgggttttcagtcacaatcttctcaaaatcgtaaataagagcatctccaaccatactctattttagagtcaaaatacaaaatttttcttcaaccctactttataattgactcacagatttctgcagattgactctatatatagagcaactttatttttgagttcaactttttttatttatactttaatccctcaaattcaaacttttttatttaatacatatacacatagctttataaacttaacaatcaaacaagtactaaatttaaaataaacaacataagaaaactaacacatagaactaataatttaatagtccggtaaattgtttgtagatccgccaaacatcattttttttgaatcttcaaatgatcttttcgttgtgcacttgacttctttagttcttctaaaagattttttatttccttcttctaaggtgttgataaccgacggttgttatatgatgtaattttttaataaataattagtgtttaatttaaataatatcatattttatggtaattttgcaaatctataatatatggggtcaaattgtaaattatataattaaaagatattagtatataaaatagaaatataatatttttaaaaatatttatttttagagtagattatagagatatacattggagagaaacactcctttaaaatagagttactttatttttgagtaaaatttagagttatacattgaagatggtctaatattgtaatcctcaaacttggttctagtgagctcgataatatattatatattgacagagcagctagagaatttgtttatgacaagttcttactattccattaaatgtcgttgttgtaattacatctgactttggttttcataatattttacgtgttttaaaaaatgccggaaaacatatgggtctaatttagtataaacttgtttttttaagagatttttcaatataatagttagtgaattaaatatagttt

SEQ ID NO: 584 - DNA, 1649 bp, Arabidopsis thaliana landsberg
acaaacacaacaacagacgggtactctctttgttcactcaccaatgaaacccacaagacaagctcttcttatcctttctaatcttccacttttcacatgtaaagtgactaaccttaataagagaacaacgcttcacttatatcttgtcgtggaaaaggaggatgcttcactttatccaacaggtacaagaatagctcctcatcattttctagatactaggcccacgtcctatacctaacgacttcgtctcctttgtctaaagtgatacgtcttttcttcactccaaccaacacgtacacgctggcaaaagcaactgctacttccctcttcctctgttctgctctatgttgcttcagacatgcctgttgaacttcagacactttgtttcttcaatctccccctttttatcagagtgtgacacctcaagtaacctacaaaagagtagagacaaccacatacaagccaagcaatattccataccaacataaaatccagaaactcgattttaaacaactactgtcaagggcataaccatgaaaatccgaaacacaactgagttcttggttccatacattagtccaacattaaacacacataaaatccgataaagaagccgataaagaaaaagagcatggagttttcacaaacacaaaaacaatcagggacaaactccccctatcagaatgcacatctaaagaccgaccaggactaagcaactaagcattgtcatttaattcaccacatcgtcttcttcctccacattctcatctcccacatcatcgggaacagagtacgaaacatcagaatactctgcccctgcttgagtgcacactcacataaaaaaccattctcaacagataacagagtgtaagtggagtgaaaaaggtttacctgcaagacataaccgcatcgttgtgagagacacaatgaggttctcaagacctgcatccaaggtggggctgtctgtctgcagcacaagtataggtttcacttccatggtaaacttcaacggtgcaaacgacatggtatctccttcatcagagcggacaatgcgctgaaagcgcagcatttgatcaatcaggttcggaggcagcagatggagagtggaggaggggttcgcaactgcattcgaacacgcctagatctcatcaaagatgtgtttgccaaagttgaaagctagagctttggccatcatgtaaagcagagtgaccctctctggtttcagaacagatcggttcactgtgggcatccaattgtgacaacagatcttgttgagcagagcgatctcaggagataacaaccgggaagtaggccagttgatcaccttcttcaccatcgggaaggtttgcataaaactccatgacaacctcttgcacataagagtcgatctctgtgacagttaggagcagaccagcagtagagaggagttgcagagtactagcggtgttgtttccatcaagaggaagaaaacgcatatcgttgaagtatcgacccccgatgagcttgtagcgcccaagtccttccgcagtaagaaagcagttattgtaagaagtctctgaggaaacttgagctcagggtacttacggtctcgagcagagagaagccgacagttctcttgatacccggacagaaagagagggcgagcaatc

SEQ ID NO: 585 - DNA, 1368 bp, Arabidopsis thaliana landsberg
tgtgctgtatagcacggatattaatattttgtataaattaaattgtatattttgtttgaattacataaaaaattagtataatataaaagtaatgccataatatttttcaatgtttttactatttgcatataatgttacattggattgactttgtttaaaaatgttatgtttataataaatacaacatatgtacttttaagttaatgtgtaaaatttgtatacaaattgttttggtaaaaaacatgtttcctttgtattagaggatctaatttttggtctaacttagaattagtctttgtataatattttggttatatttgtggatctaattggagcctatattagattatctttgatagggctgacaaaaaaacggacccgataaccaacccaatatccgaaccaaaaaaaccgggttagggcggaataaaattttaggaaatttccttattgtgtagagttttaataaacccgtgtatatccgatgggtccaaaaattactcgttatccaaaaagaatattcaaaaacccaaacattaatttaatatccaaaatattaattatatttaatcgtaatattatctaattatctaagattataattataaatctaaatatgtcaattaattttggacctaaatatccaaaacaactaaactattcaaaaattatttgttatgtttgtcaaaatttagtaaaatatattcaaatataattaaatttattaaaacttaacaaatgtaaaagttttttttgtttgaagacccgctatctaaatacaaatttcctgtttctatttttttgggtctaaaactttttattcaaactgacccaaacccaactggatccgatccaaaccagaacggaatatttagaattattctattgggtagtaaatcatatacccattaatcccaaacccaaacgggttctacccgaacacgaatgggtgactcataagcttatatttgagttaaactaaaaacttttattgtaaagatgattataaatatatgatattgttttatttgattttaaatgcatggtaaactgcgagtcgtatatgttttgttgatattatttatattgtttagtgtttaaaattatacacttgtattttgattgttaattttagagtttcacctttagtataccatcttgtattaatatcgatttaaacccgtcaattctaggattttccagcgtgtattaaaaattgaatcacatcatacacataaaaaaatctaatatgttattaattattgtagtatataagattataaatttttaaaataatataaatgtaattgaatataaatattcaaattatgactcattactcagtagaaaattttcttaaatatattt

SEQ ID NO: 586 - DNA, 1327 bp, Arabidopsis thaliana landsberg
gtattccgacttattctccaggaatgcctaaacagtctaccaacccctctactgaagaagaacaccttattcatgattatgttgctgaagaactcctagagctctgggttggatacaaagctcaagaggataccattggggagctaacttacaagatggaaggactgaaccatgcgatcttggaacttcaagaaatagttaaaggtaccccagttttgaattgaggattggtcaaaagagccttgttcagaagaagaagactactctgttgatcagaaggaagcttattttgaagaaaaagcaaatgagtactcatcctaccatatctcaagagaggatgcagagtatgattcaagcactttaaattcaaccactgaagatgaggatttctctgttcctctcttcaacctcttttctcactaagctctgtaagagtcaagtttagtgacttaaaacaagctcacttgggaggaagtcccatgtctatccatgtatataattttctatttttcttggttattttgatatttttgtttaagtgtttcaggtttgttttagtgaccctaagggagtcaacggtcgagtaaattcaaaccaagtcaagaaagatctcaaccgtttatcgagtcgaatgaggaggagtatttttagccattgatttggatgatcaaatgagaggtgcatcaccaccgtttgagcgagtgacttcctgaggtttattttggtccgtttgatctagtgattaaaagcaaagcattctccaccgtccgatcgagtgaagaaaccaaagaggttggaactggtagatgaagactctgaggaagaaatggcttcaccagaggaagctgatcaaaaagagagaggagatggtgatgatttggaatcaaagaagtgtgcaactcgaaacaagtactacaagcttctgaaccgcaatgagtttttaggaactcaatactctcatcccgagaccattgagagactcggcatctatgatgatgtagactacatgtttaattagtgcagcctgaatattcacatgtttcggccaatggagggtatgaggaagagaccatccagtttctttcatccgtggaattgttctaatatggagagtcagaagacgttgaaatcaggccagacggaagtttgggatacctggagttctgtgtgtatgacgtagagtatcggcttccaatcgagcatctcgaactgatgtatggatttccaagcgaaaagacaggagtcatcgttttgacaagatagagtttcagtcattctggatcacacttgggtctaaacataggttttcatcctctagaaccaagag

SEQ ID NO: 587 - DNA, 721 bp, Arabidopsis thaliana landsberg
catgtgtagaaccacccgatcagtcacatttagttttttttttagaccaatactggtgcttccatgggcgcgcgtagaatgtgatcaacgaagaaaggtgtcaatcttaataacggttttatactcttaggagaagatgatacaaggcttttgacttctcagaccaatactggtgcttactgtttttcttatccgactagtatttgcgttgtctttgagattgtgatatattagctcggttctatgttacttttagttataggaatagtaagagacaacacaagcaaaagaaaaaaagaaaaaaaaaacatgtatgcatgctttcttgaaattcaaggcattccaattaaattagttaaaataaaaactgcaacaaaaattagggcaatagaaagaagaaaaaacgaacacttaaactagaatatgaaatccaagcaagctacacaggaatcattattcccatagtcttatgctgaaaattgagaacaatgaatttgttttcaaactgatcccaatagagcttcagaacatcgccttctacgagatgtaatgaatgcttcatagtactccaaccagtcccgaaataatacttcatgtcgtcaattcttttcagggtaactgtgtatagatcgtcttcccttacgccgtggacttgcacttcaaaaccgatatccaaaacatcatctgtgacaccattcatcctcgtgaggacagacatcac

SEQ ID NO: 588 - DNA, 719 bp, Arabidopsis thaliana landsberg
actaacgaacataataactactaaaacacaaacacacaccaaagatgcagtttaaagttccactttttttcataaacaaacagagcgggtgcacttgggagatacaaagagacatggatctaatctactatatcctaatcattctggtttgagcccaattcaagccttaagtctatcaaccagcgaattcactatataagagacagcacttaatcaaatcaatgttcataaacataataccttaagaaagaccaagactttgatgatagtacttgagatcatcgcaatacatcaacaccacagtctctacatacacatctcacactccattctctcttcgagacctcatcttctccctgagaacttgctcttttctgatcagaccctcttgtgcacatccatggtcactctgtaccaatctctgcccaccaaacgcagcttcttgtctcaagctagtggaatcgttcggacaaggaggagaggctatggggtataagggttctttatcactatataaaaaatatatatacaaaaaactgaaaccaaaattccttaataaaacattacattataataaaataatgatcaaccaatgcatttggttctttatcggttctccattcagatttccaaaccaacacataatcgataggatctaacccgagatgattacaatggagggggttatttttgaaaaagtacaactgaacaaataaatc

SEQ ID NO: 589 - DNA, 5474 bp, Arabidopsis thaliana landsberg
  unsure (1)..(5474): unsure at all n locations
cagaaaaactggagaatgccagacatggcgattaagaaatggacagagactatggaaacgaagagatagatgaatatgatgagtaagtagaagaacatgatgaatataatgaggctgctgatcaggaagcgtatattaatttgtcagatgatgaagataatgatactgcgcccagagagaaagaatcacagataaaatgaaaaaaaacagatgtctgctttccttaactttttaaacagacatgataaaattgtcaaaaaataaaaattttgttttgatgttttggtttacatgttttaaaagaagaaaacgtagaagaacatgatgaacatgatgagactgaagatcaagaagcatatgtaattttgtcagatgatgaagataacgggactgcacccacagaaaaagaatcacaacctcaaaaagaagaaacaatagaggtctgcattccttaattgtttaaaaagacatgataaaattgtcaaaaaataaaaatttgttttgatgtttttgtttacaggttccaagagagaccaagaaagattataaagatgttaatcaaacaccactctctacgcaagaagaagaaatcacccagggacaaagcagtcgtaagttctttttacattcacagatgatttgccttgataaacaacttctaaatatatttttttttggttttgtatcagtttaaactcctttgacgccggtcatgttgagtcaggaagtaatggaaaaaattgacctaaaagttaaaaaatgggcgaaaaacaaattaataagagatctactatcgtcacttgaagaagtaagttaaattacatcattgttttgctgcaaaagattttaattctaatcattttgaaatttttacatttcagattctttggcccgacaataaatggcaaaaaatcgaaatttgggatatgtgggacgagaagaaatacaaattagcattaaagaaaccaacgttactcattcatcctgacaaactgcctcgagctcatccagaagtgaaatacctagctgaacaaatctgcaagataataatggttagtgttaaactcttcttttgtataccgatatatctttaaaaacttgaatattattgttatgcaaaaaataacttacaggttgaattttatttgcaggtagagaaggacagagctactaaggcaaaaatggatttagttctttagactgacttatttcaaacatgtttattttacttttgttatttggaatctatgattgtacttgtattttaattataactgtcaaatctaatcaaaatgctttgatattgtcaactgtttatggctttataagaattgtcatgatttacaagtgattttaaaggcataaacagcttatatgcataacgatagatttataagacattttcaaggatttgtaaagccttgcaaacgaattaacaagagtttacatggtttgctatcggtttttaaggataataaagtggtaaagcatgatttacaagggattttaaaagcttttaaaaggggtttacttgattaacaatcgtttaagaagaataagttaatgtcagaaaatgatttataagggattttaaaagcttgtaaaagtgtttaacttgattcacaattgttaaaagtatatgtaagtggcataacgaaatatttacaaggtattttaaaaggattttcaaagacgttttaaacaggcttttacaaaatattttaaaaaggtaaattattggaattactattaaaattacttgtaaagtttgatagtaattttagtaaacgacttacaagacattttaaaagattcaagttaaaagcttgtaaaagtgtttaacttgatttacaatcgtttaaagtatatgtaagtggcataacgaaagatttacaaggtaattttaacaaacgagagtaataacacgatacaatgaagaaaatattaaaaaacccaacaatattcaattctctggagataaagatatatctaaattgcagcaacacaagttgatttgttgtgacccgactgaccacacctactgcatttgtgtaattttggttttggctgagaccttccatgatcccaaacagaaggtatcctctttttttccgtctgccactaggtacacgagtagaaggtgggagacaaataatttcactaatagtttctggaatctcccaatattccatatcaccatttgggtgaatgctctctgaatatgcttgacgccacctgtaaattacagcgatgtaaactgagattaaaaccacataaacacagataaaaccataaaaagagatattaaaacattttaaaacgcctgtgaagttgtgaagaatagagataaaacatgtaagtagaatgaaactcatcaacaaacatgttttcgttcagattgatatgtttagcagaagcaattccatgtgcgcaaggaaatttatcaatatcaaacatacaacatgtgcaagtccttttgtccagattaaccaaatgcgttttggtatctccttttaccttaaactcttcttgattaacttgacaaacctcaagccatcatgttgaagtatcatatgacgctttcattttcttccctacatttatagtaacagcagacggatgttgactactctcttcacgttgttcattaaaccatcttgtcataatatatctgattgactcaaataggcaaacaatcggatactcgcggttctgtttcaacaaggcattaacagattcagctagattagatgtcatgatgttgtaccgatttgaaggagaataagctcgagaccatttcctaacgtctacctcccaaagatattgtgctaactttttatcactattagtgatttcccagaacaaagaatcaaattctgtcttcgtgtaaactctagaagccgcatagtaaactgaaataagtgaagaacctctgaaatgggtttccaagtttttttgcaaatgaaaagtgcaaattccatgatgagcaagtggataattccctgaaagtccgcttgcaatagaagcagctcggtcagacacaaaaactaaatcattctcatcagggattatattcagcaaacacttcaaaaactagtcccatgacgcgtcatttttagagtcaactattcaaaaaccagtcccatcaatagatatgacttttctcatcaacttataacctctaattgatgcaccaaaagccagaaacgcatacttaaacttattagcagaatcttttttgaaaaaagtgatagaacctggattcgtcgcttgtaccctatggaaccacctcagtaaaacctcaaaactatcatcaagtaaacccctcgcgagttctgctgcatgttcttgaactctccaagccttcgaataattgattccaactccatgatcttttctaaatatttctatcaactgtttaggtctgaggggaagctttcctccttcaaaatggttatcaatcttcctaatgtccttgcagatgcttgacgatgactaacattccttaatgaagagtcacaactgtgatgactaacatactttcgaataacatacctctcggatccaccagccctagttgcacgtagtctccaaatacagttttcatcaatacaatgaagaacatacctcgtgagatctgatttcactgtatgaaactcaaagctgtgcttcactgcaaacatccgcaacgtgaataccatttcatctttgtctttgaaaatttttccaataaacaaagaatcagcatcacttagaccagttgaaaacgcagaactagaatactgttgatcaagaatactagatgtttcagatacacacacctcaataatcctagaggttagcctcggctgccaaaataaaaagcttacctcaaacatcaatctatcttaaataatgattttacaaagatttttaaaaggggtttaaaaacgttaataatgattttacaagattttttaaaagggggtntaaaaacgttaataatgattttacaaggatttttanaacgattagtacctgagcattagggacagaatgagaaacaaaaggatttgaagtagtctcagcctgtaataagcacaatcactgacttaataatgattttacaaggatttttaaaattataacacaagaaggttattgaaaaacctgctcaactgtcacagaaatttgctctacagtcaaacataattgaagcaatcctccactctgtgagaatttgtgcataaacgttgcaagctgtctatcattcctaatataaagaggatgagattgtatggttgtagacgtggagactaacttgtaactaagcttcaaagaattggttgaactatctatttgaaaatcctctacaagaatatcaaccaacgcgtgataggtattgtgctcattaatgagcactaaagaagctcccaattcaatgtctaatttaaattcccaagtcatattgtttgtcaacttccacaagccacaaacaaaatacaattctagcattataacctgataagataaataacagcaaaatcaacacccacaaaaacactgtcaccacagagagaagcaaggtttacaaatcgttttaaagcgtaagtaagtagcatagaataatttacaagggattttaaaagctttaaaaagtggttaacatggtttacaaatcgttttaaagcgtaagtggcatagatctatcacgaaagcatatgcaaaagaggtaaacactaaatcagaaccaaaatctattaagaaatagtataacgaattcacataagcaaatctatcacgaaacagtataacgaattcaaaaggattttagaacagtataacgaatgtacaaggattttagaaacaaattcaatcatcaaatctcaaacaaaattcaaattcgaagctgaagcaaatgtcaaactgtcgattgaatcaggattcaaataacgagttcacataatcaacaacaaaaatcgaataaaccaattcgaaaacgaagatttaagctaacattataaaatcaaacctgggaaacgcaagagattcgacgacgacacacagctctacttaagtctgtgggtagctcattaagggtaatttggggagaaaagtattagaaagggtagaaatgaaaatgggaaaaaaaaagggtagagttgcaaaagggcattgagaaaagggcattagagtgaattattctacttttttagttgtttttatatttttataagagaataagaaggtaaatctttaatgacatatgtaaacatctgattattagacttgacacgtaacaccattatgtgagttagtaactttcaaaatgatactttatataataagatggtgattaaataaaactagggaaatttgcataaataaccaacaaaaaattataaattaagaaactaacattaaaccaaaaaaaggttgatatattatgtattttttggattaaagataactttgccctctacactacatacacc

SEQ ID NO: 590 - DNA, 1662 bp, Arabidopsis thaliana landsberg
tttttacattacacatacttagaccctagaccacatcattgtcgtaagacttacatcagccactctactatgttggaactcccaactccttcattcacttttacataacatctttgactctataacacaacactcattaactatacatacttgggcctaattcatctgcagcccattacaacaaaacacaaagcccaacatctcttctgttgactttgttccttcctcttcatgtgtcgttgaccttcttgtcatgacatcttcttcttccttgctccttctcttactttcgtaaagctttccttgttgcaggatttaatctaggattcacaattccaacactcccccaagaatccgtagattaaatccccaattcaattttagggaattcaatcccattgcttcttcttctcttggtgattcgcctcttctcttgtgtgaatccctttcacgatctttggcacagctcactggtaagcttgccttcttcatctccctcttgctttgaatatccttgcatcgagtttcttcttctcgacgtatttgtgcgtgaagttcttcatctccctctgcttcgattttccttaatcgaactcatcctctactttcttcttttccaggtgatctggagtgaagtctcggtctcttgtcttcctctaggtgattttcttcttatcacacaaaggcaactcttgactctttaatctttatcacttcaattcaactactccttcttctcttttctacaattgacctgtcttgtcaattgtttctgattttcagatattggagctcttgggatttctctttccctcaagcagtctccatgtcttctccgcatcttctctgtgagcctccctcacgtctcttccggttgtcgatgcagccttcttcagcttcctctctctcatgtaagcttctcttctcctcttcttggtgtccacctttgaacacctccttctttactttgattcttggaaccatcaccttagctttagcttctgtttgactcgaaccatcatcactcggctttctctaaccgtagtctatttggcttctccttgagtcatcaccttagcttcttagccttagccgtttggctctgtagagaaaacgaaactgaacggttgcttgtcagagaaacaaacacaaaaattgataaccgagttcacggcttaaccgctatgtctcgggggagatctcttgcttccaaagcttcgctatatcaaagagattacaaacaccatctgacttgtgatgttgtctttggtttcaggtacaatctcaagaagaacaaagatcaaagacaaagaacaaagaaggagaaagcttcttgaagaataaactctcgtttcttctctttctctctagaactccctttgtgtcttgtctcacacctacctcaactatcatatcccacgtagagatatatagatgtgatgggccacttttgctcttcttttctttatgtcaatttcgtctggcccaataagagctcaatgttgtgtgttttggtcaaacccaataacaatctccacctcttgacaacaacacactttctcgaagacttcgacatctccatctccgacaaccaacgtcatctctttctcatctcgggaaataaacaccattgccggattccaaccttcttccgcgaacata

SEQ ID NO: 591 - DNA, 647 bp, Arabidopsis thaliana landsberg
  unsure (1)..(647): unsure at all n locations
ggtgaatatgtacctccagcgaggcagagcaagagcagaagtggtgcaagaagcaggacaagctgctcgccaagtgtttcaaggctatcaagcttctgacannnnnnnnnnnnnnnnnnnnnnnnnnnnnnnnnnnnnnnnnnnnnnnncctcctctggagatgtcatcgaggagatttgatgagcctgcgcacaggccttagcttagcgagtagagagtctcacatgtcctggctaggcattcatcatttgagtcccgggagcacaagagaagaaggaaggctacactcactcgatctagcagcagatcacgcctcattcactcgaggagatcactcgaccgcggtgctagccgcagcagaaggagagaggtcgagtatcctcagagcggtgctggccgccacattgctgatgaggtcgagtacccacctactggagctgatatagaacaaggtggttcatctatggcctgggagcaatcacatgcagccattgacgagcaactacgttcattcttcgactgaggtaagcgcacacttcaccaatgtattatatcatctgttgtgatttgtttttatttcattttgtttctgtgattggatttgcctgcgtanctcttccaagtttatcgcacaatggactgtgtg

SEQ ID NO: 592 - DNA, 2306 bp, Arabidopsis thaliana landsberg
aggtaacgaaaattctcctccgtttctttaatcgaattatgaaaaaagaatcagaattttcaacagagaagaagaattcaaacctgggtctagagaacggattcgatcggagagaacatgagcacagtcgttgcagagatctctagataagaaaggcaaccaattcgtaagaaattcagaagcaatcttaagttcggatgattgatacttggcgagaaaaacatcttcctcataatttggttccattatcttctatcgcacaaaccaaatctcgctgtttccgtactttagtttcagtttgtacggatcgaacaaacttttctcgagttcgtttactttgctcttttgagtcgtctttcattgataacaaatttaggtcggatttgtttataaatatttacaaaagggtagttttggaatttaccactacaaaacgccgacaaaagttctggtccgtgaagcccatgaatcaaaaggcccactttaagtttacgttacccggaaacgaaaatatttacaaaagggtagttttgtgatacaacagcttccactctacaagctcgtggtgaggatgagctcctccaatgtgttttagtatcttttttatgcgttcatgtctgttttgactttgttgccgaaaatttttactaaaactagtaaagctaagctctttgagtcgtttttcatgtttaattgaagcagtagattgttcttcttccactattggatgccatggaagtagaaatcttcaggattcttcttggctttgattctgagatttttgcaatttgaaagtttaatcaaaggctactgtgatttttttggatatttttctatgatttgtgattttgagttgtggtgttttctctttttcccgttgttgagatgttgagaaaatttatgtccagaattgttgattcacactatttgctgattcggtttggtttgcattggttttgaaattaaaactgatttcggttcggtttcattggttttgttgaaaaaaactaaaagagtcacgcgatggagaatttggagagatgtgcgtcgataaaaaaagtcatgaattggaaaggggtttacccacagaatcgccctcactcgctcaacgcgctctttctgcgagtgggtacgaaatagagccttctgattggcttaaaaactcaaaaagtgcaatagtatacttgttgctagctcttattatttgataaagttttgtacttgcatcttttttttcagtcaccggaagttggaatttcctttgtgataggatctaaacaagtatcaaagtctacaaatgttgaattaagcaagttaaagcctttgtgattcccctgtatcttcaacaacctcgtctttaaaactttatccaaagacatgtgtggatagtcatagcaagccacagttacattatacaggaaatgtaccacctaaggctttgcattccaaagaaaatgtcacagtcactttgtttgatatgtttgttctgtggattgttaacattccataaagtcgatatggatcttgcataggcttgcttactcttttgatccagttaattatgctgctgatagaagtaagcaagcgttctttttcaatacgttaaaattgtcatgtcatgacggacaagcttactgggcctagttaaggattttggacttgaagaccaaaaagtaagagagtagcagctagttgttttgatttgaatactatttgaatcttatgttcagaaaacagaaccatgctatattattttccaatgtatgatattcgttcgaggtggaaatttatttagtttttatcataagggcctgatgtagcacatgattaattgttttgcataaacccacttttctaaacatttcacttcaactcttgttttgattcgcgaattttaaaatactgaaagtacatgtaaaatatatgtggagaatatctagtagattgaaagttaaatcaaaaagcccgtctagctcagttggtagagcgcaaggctcttaaccttgtggtcgtgggttcgagccccacggtgggcgttattcttttcatttttctaaaaccttctcttctttttttggcaaacctttttttttaagcaaaccttctttgtaaatctgaatcaaaacactttcttttttttttcgtcaacaagtaactagaacatgttacaaaacggaaatggccaataaagaaaaaacatattttcaattcatatacaaattttaacacaaaaatcccataagaatttaaagaaatccccttgcttgacagctccttatagctccactgaatattacctcggctcc

SEQ ID NO: 593 - DNA, 1082 bp, Arabidopsis thaliana landsberg
aaaatgaaaaacactagtgtctgcaaaattctatatgatttaattcagatagctagcttaaaagatgcataaggttgagagaaaaatatcacatatagtacgagtcagactttgcaggacaagttaaactcgtcgataattatgcaaactcatactttaatcaggcttattctagcttatatgatgctgtcaaagatgcaaatcaacagagtacgtgttttgagagtatagatcagattttgattacctttccccattcagaaccaagcccactgcatctcatcttcaagtggatcatctttgtccccaactccatctcaaccttcttcttcaagtagacttcttcaggttcaaaggagtctaggtactcagcatacctctgataagcagtacgcagcgcatcggttatatcatttggtaaaggcttcacaccctgcacacaatacaactaaaacatcaaacaaaccagaaatcaagaagatggtttagttaagcaaacaaacaacaaacctccccactcattccgatgctatcatcgatttccatcttaatcgaagtgagaatcccaccaaattcctctacagcttcagctgctcggaacacgtttttcaaagcctcttgccctgccttatcatctgtgtttttcgatatcgcggttttagcttctttaacaacagcagaaggaagctcagcccagtctgcagccatcaagtctttgaatgcattcaaaacatcagagtcttccatttcaggcatgtgagaaacatcttcgctaaatctccgcacctgtcccattcccattgcacgaggatactgcaaatctgcgtattttcacagtcaattacgaagtgcacgcacaaatagacctctcaaaacacctaatcaatgtatctacaaaacgcattcgtaaagaaattaggaggctcaccacgaagaacacttgcatacgaaatgaacgagcctttattgatctgaacatcaccaatcacagaagcattcggagccacaggaatcaacgtccgatgcctcgacactgaaaacaaaccacaaatttctcaaatgaaagttttcaatctaaactc

SEQ ID NO: 594 - DNA, 1242 bp, Arabidopsis thaliana landsberg
ttaccatctacattatcttccttaagcagtacttcttcttcttctttagcatattattacatcaatatcaattggtttataatcaatcataagctacatcatatttggtgtattttgtggactaattattgtttgaaatgtttttttttttttgacgacaaaataaggtcatccatttaaactaaaaacgggcggttttcttcgagagaaaaccagtccggagtagaagagcttacataggaaaaaatagaacttcgtgctcttgccttcttagcaagacaatcagcacggacattgtttaaacgtggaataaaagataaagaaaaacgaggaaagctagactttaaagaataaaattttctaactcagaagaaaaagcgggtcactcatcagaagtgtccaaaagctgtgtcaactccttgcaatctgtctcaaaactatatattacatgatatatattaaaactagttgttttaacttttcaaagagcaatgtcatggatcggcgtaatgttttgtgatttcttacaaccattactgattcaagtgatcatcttccacgcaaaattgcaggcgggggatgtctcacaaatcaatatctctcctgaaataatctcagtagaatctctgccaggtctgaaattcagacccgatccgcaacatatatgcctaggcctgttacggttatcgacagcaatgtgacaaacgcggtgcaccaggtgatggatgcaatgcaagcgccggtctacttcgagacatacatcataaaggggaaaaatatgaatcatttgacgtgggaagtggtggactcgatacggaagaacaaagtgtgcttgaatggcagagtcaataactccttgtgtggtggtgcaaggaaagagcttgatctctttgcatctcttgtcaactgctttaatcttaatggtcaaccgagtcgccatgagaatgttgacatcgtggtgatcagagagaacacggaaggcgaatatgcaggtcgggagcacgaagttgttcccggtgtcatagagagttttcaggtgacaatgacaaagttctggtcagatcgtattgctaagtatgcttttgaatatgctcacttcagcaaaaggaagaaagttacagcagttcacaacaatggaaaatacgaaaaactagctgatgcgtttttcttggagtcttgtcaagaagttgctaaaatgtatccaaacatcacctacaacgaaatcggtattaataactgctg

SEQ ID NO: 595 - DNA, 528 bp, Arabidopsis thaliana landsberg
aaaaaactaaaatgagtaatggaataactattaaaaatataattttatgttaacatgtgatagttgggccgggtattggaactataaaccggcccgataaacttttcaagacggagacaatcctggaaaatgcggaggtggctaaaggagactctctctactggcaggtaaacgaaactcgtgggaaatggacaacgagaggattcgagagctatagagacttcagatcaagcagatttgtgagcttggtttgaggaattccaagttgaagaagtcaatgataatgatgacctctcttcatttcccttctcttcccacgctcaagcttcgtgagccaatctctcctcttaaacgctggttgagaaacactttacaaagacaaaatataagccaaaaacgctctctgtagtcgaaacacaataacacttacaaactcacattaaagtcaaaatgacaataaaagtgcttaataagctccgagtggtaggccagtcgaaacacaaaaacacttacagaatttttaacgac

SEQ ID NO: 596 - DNA, 534 bp, Arabidopsis thaliana landsberg
taatagtcgtggattacttaatgattttaataagttattatttttaattgatatttatattctcttggattgggatttatacaataaatcactgagggtgaataattgttaatgaattatgtgtatgatgcattgttgagaatgttgttagaaaaaatatttttatattaaaagtaattgcttattgcatgagtgaataattagataaacaaaaattatatttaaattaaataatacgaaaaaatctaaaaaaacggaggcgtagcgcggatgatcacgtaataactataatatgtcttaatataaaaaaaaactcaatatcaaattgtagttaaactcaattataaaaaaacgaattgaatatcctattataaatgttgttttgcatgacccaaactacattgtttcctcgctaaaaccgatggcacgcctaaatctgggtgccattcacacctaaatctgggtgccattcacacctaataaatacatagaatacgggaaaacgggtaatctattttttggcaataactactg

SEQ ID NO: 597 - DNA, 440 bp, Arabidopsis thaliana landsberg
  unsure (1)..(440): unsure at all n locations
gaggaaaaatactaaaaacctgtggattttttttaaaaatcatgtagattttactaaaattngggttaattttggaaaaattgtataattataacaaaaactaaaaataattcggttatcaactcgaaaatatgttggacactagaactcaacttcgtgatcgacgagcgcattaacaattaaaatatgatttggtcgagcatatatgaattttttttggcatgaatcaatattttaactaatcgttattatttatgtttacgtcatgtttgtttaaacttttatatcaagtatgtttcaaattttataagttgcaataattattaagatttttttatttttttttcttaagaactccaagttaagaatttaccattttgcatattgccaaaatttttaatcttttaaccaaactcttaacattcaaaattttcaaaatc

SEQ ID NO: 598 - DNA, 621 bp, Arabidopsis thaliana landsberg
cttcaaagtttagtataaagatccaattaagataatcattaaatattgttaagtagaacagtaatctctatattcaacagtaatcatgcttaaaatccatcgcaaactttgctacggatttgcgactacagagagaagccacgcaaatccattgcaaagtttgcgaggcattagcgggacaaaaaaattgcgactactttgctactgacgtattccctcacaacttgcgaggaaagagcgaggcttctgttgcagctaatttgctaccgagtacgtccctcgcaaattgcgtgtgcttcgcgagacaggtcgtccgccgcaactagcgagaaatttgcgagacccataatttgccgtgaatttgctacggattacttccctcgcaaattgcgtgtgttttgcgaggtaatttgttcctcgcaaaatttgcgagggacttgctacgaatttgattttgcgacgcgcgttttgcgaggaactaaaattcgtcgcaattccctcgttaactgctctttgcgagggactagcgacggtttcttccctcgcaactggcgtattttcttgtagtgtaaatttacagttttagttaagacaaaaatttaaagacaaaatgtaactgaa

SEQ ID NO: 599 - DNA, 797 bp, Arabidopsis thaliana landsberg
attatacaaaatataaaataccaaaaatattatattattattataaatgtgaaatttaaatataactaataataaaataaaattcttcttaattattcaaactaattaaattttatactcaaatatgcatttgcttcataaaaaaacatcatcaagtaatatgcaaatgacaaaaaaagattatgacaaattaaaaaaaaatattttcaaattttgggtgttccggattaataatattattacaatacttagttagtatcttatcattcttcagtttggtttgatgctatgattttgatagagaaaaaaactaacattttaagaataaaaatcaccaccatatattaaagttttggggaagaagcttacactgaaaagatgacattgaaattattacaactaagatgtcatttttgttctttaaggtctaattaaatttatctttgaggtatggttactctcaaatctccaatgatcaattcaattcttgtccctatttttattttttaagtgtatctattatctattttttttggttcaagagcttatttctgaacagaatgaaatcttagcataagataacatcgaggaaaaaagtcaatggaagacgaatcttaaagaaaagacattaaagatttttgagtttttttctcaaaatattcaagaatcttatcagatttactaagcgtcattgtggattttaatcaataactaataatcatttgagaacgttctatagtcccaataaaaaaaaatcaattttcaaattctggtaaacaaacaaacatagcttttac

SEQ ID NO: 600 - DNA, 9163 bp, Arabidopsis thaliana landsberg
gttaccgagatagaccctagccgtcctccgggaactttttggtaagcctcttgtgtttcttttccttaagcataggtagtactagtcttagttaacagtttattgcctaatggaaccttgtgttggtaggtttgaggatgacccttcagttgcagctactgtccggagcatctttgaaagagatttcaaggagcctcatgctaactggttaatgacaccccaacatgtggttgatcgctggtttgaaacttttgctgtaagtccactaaagtctgttttgttgtgtaaagctttttagttgctgtaatattaagtctaagttttgctgtcacttgtgtctgttttgtagcaaatgtataattgggataaagcaataaacaagagagttaagactgagtttgaagcaaagctgaaggagaggatgagtgatcaagtttctcggtggaagggaaagtggagagagaagggagatgcatcaatgcctcgctggtttgatcctgcagagtgggccggtcttgttaagttttggaaggatcctaagtcagaactgaagagtatcaacagtagaaatgcaagataccatgatccggatggcctcgggatacataaacatcgcactggccagacttcttacaaagcccgtgctcgcaaacgtgtaagtacctacgcacctttactttatttacattgttgaacaaacaactaaccatattttttttctgttgtagtgtgagatgactggagagacttgtccagattttcttgtgctcttagatgagacacatagaaaatctgatgggactttcattgatagaaagtctgaggaggtttacaaagaagtttcttcgaggattcaagaggaggagtctcagctgtgttcaggggacactacggagagcacaacttctggggggttatctattaaggccaagaacaagatttatgctcaggtaaaatttttgttttgtcattgtgttttgggttacttgcattatgttttggatggcttgcaacatttcattgtgttcagtcatttgtctttcacttcaatattgttttggctggcttggattatgtcattgtctgttcatgatcttgtctttgtcattgtcagatggcttgagtagatagttcttgtcattgttttttttagtgtaagtctgttgtggcttgcattatgatatattgaatatgaaacggttatgattatgtcattgtgtttgtgattttgtcttccttagtattttctattgtggcttgcaataaatcatagtgaatatgaaactgttatgtcattgtctgttcatgtccttgtctttgtcattgtcgcatggcttgggtagctagttcatgccattgtctttttcagtgtttgttgtggcttgcattatgatatactgaatatgaaacgattatgattatgtcattttgttcgtgattttgttttccttagtatttggcaattgtggcttgcattatatcatagtgaatgtgaacctgttatgatttgttgtgtttttggttttgagtttgttacaggttgctctaaaaaacaaaggcagggtttatggggctggttcattgcagatagaagcctcctcagctcatgctagtccagtgctgcctggggaagacccggttgttctctctcgaaagctggctgtcgctgaagctactattgcaacccaagctgagaagatcactagctttgacgtctacttcgattatcttgccgataaggatccagagttcgttgccctctttcgagccagaacctctacaaggactgagccgaccagctccaatccgataccggaggagcccaataccgcagctgctccatctgctgggatcagagatgaggcagtcggagccacatgatcatcctctccatctcaagctttctaagattataacttgcattactttgggtcaagaaacatagacttttttggtttgtttaattatgtgttgaatacttggatctttatttcagttgctataaacaatgatgctttcaatttcaattcaagtttcattttcaattgcaattagttttcaaattggctatgtttaatactcaatgtcacgatttaagctaaatgtgatctctaaacaaaaccttaacctcggcttctatgtaaactcagtgtgatgcaaataattcgcaaattcgtcgcaaaagttactagggatttgctactaaagctaaaacacatcgcaattccgtcgcaaaaattgcgagggagatgcgacacctgtttaaattgctaccgttgttgtccctcgtaaattgcaactagtttgcgagagattttgttcatcgcaaaatttgcgagggaattactactgttaaccatttgcgagacgcgttttgcgaggaacagctgttcctcgcaaatctctcgcgattaacgatttgcgagggattaccgacgaaatcttccgtcgcaagtcgcctgttttcttgtagtgagagactcattaaagagatttccacggatgaagctaaacgtgctctcttttcgcttaatccagataaagtaccgggtccagatggtatgacagcccttttctatcaaaggttttgggatttgaccgggccagacctggttaaagtagttcaaaacttccattcatccagctcttttgatgagcgtttgaatgagacaaatatttgcatgattccaaaaacagatcgaccaaggaagatggcggaattctggccaatcagcctatgtaatgttagttataaagtaatttcaaaagttctcagctctcgtctgaaaaagattcttctggagttaatatctgagactcagtctgcctttgtggctgggagacttatcacagataatattcttatagctcaggaaaattttcatgccctccgaacaaactagcttgtaggaaaaagttcatggctataaagactgatatgagtaaagcttactatcgtgtggaatggtcttttctacgagctctcatgttgaaaatgggtattactgagaaatgggtagacttgataatcttttgcatctcatctgtctcatgtaaagtactcttaaatggagctccaagaggtttaatcaaaccatcaaggggaattagacaaggcgatcatatttccccgttcctctttattttgtgtacgaaagctttggtagcgaaactcaaagaagctgaatggaatggcaggatccaaggtcttcaaatctcacgcgcaagtccttccacctcgcatctcttgtttgcagatgacatcttatttttttgtagagctgacccagctcaaggtcaagagatcatcaatattctccgcatttatggtgaggcatcaggacaacagttaaatgctgctaagtcgtctgtaatgtttggtcatgatgtggacaatacgacccagagtaccataaaatcaaacttgggtatccaccgggatgggggcatgggatcttacttgggtttacttgagaaaattcatggctctaaaacccaagttttctcctttgtgagggatagactccaaaagagacttaatacctggtcagccaaattcttgtccaaaggaggcaaagaggttcttataaagtcagtagcacaagcccttccgacatatgttatatcgtgttttttactctctaaggctattcgctcaaagttgagtagtgctattgcaaatttctggtgaaaaactaatgagaatagtaatggtatccactggattgcatgggataagctttgcaacccacactctgaaggtggactaggttttagatcactggaagagtttaatctagctcttttagcaaaacaactatggcgtcttatccgattcccaaactctcttttgagtagggtcttgagggggagatattttcgatatagtgatccattacatatcagcgcatcaaatcgtccgtcttttggatggagaagtatcatggcaccaaacctcttcttgtctttgaatttcggaggaccataggttctggaatgctgactcgcgtatggaaagatccatggattcccactatcctagcgcggcctgcaaagagcattcttaacataagagattctctactctatgtcaatgatttaattgaccaaaacacaaatttgtggaaattggaccgtctccaagcactgatcgatcccgttgatattccactcattttagggattcgcccaagtcgtacctacttgagtgatggctttagctggtctcacactaaatccggtaattatactgttaagtcaggatattgggtcgcgagagatctttctcgtcctacttgtgaccccccttttcagggaccaggtgtttcggcacttcagacacaagtatgaaagcttaaaactacgcggaagcttatgcatttcgtgtggcaatgtatctcgggttgtctagccacttgccaaagattgacctatcgtcatatgggtacagataaaggatgcccccgttgtggagaagctgaagagacaattaatcatctcctttttcactgtccaccttcacgacagatttgggcattatcgcctattccttcttcagggaatattttcccaagaaattccctcttctataattttgacttccttttttggcgtggccgggaatttggaattggagaggaggtgttagaactctttccatggataatttggtatatctggaaaagtagaaatcgttttgtttttgagaatttcagggaacccccccttgacactttggctttggcacttaaagaggcatctgtttggaaacaagtaaccctaaaagaagacgtccccatacgctcaccgcctctcctagtttcttctcagatttcgctcaccttggtccctgaatgtcaacttgatgcttcttggcatgcagaggaccccttaagcggacatggttgggtccttgttcgacaagacttagtcctccatcttggcctcaagagtgctcgacgaagtttatcaccgcttcatgcggaatttgattccttgctatgggcaatggaatgcatgatctctattggcgatacttctgccgcttttgcttccaactgttcagacctgatttctatcattgacaaccaagacgattggccgacattcgcagcggaattggcatcctatcgctctctagtttgttttttcccttctttcaatattagatttcttcctcgtagttctaatactcgagcagatagtttagctaaaaaagcttgggcttgaaacagtcttttctcccatgtaagcacatcggttcctgaatggctctctctagcggagagtctcttcccgataacttaatataaatggtgtttgtggaaaaataaaaaaacacccaaacctatcatctgccatatcacacgcttcaagactcacagagattcggctaaaggtttaaggttagcaacgatctcaacatcttatgacttcctaactatgatcccaactcaacttcccttggctcatctcaacttcattcatcttgatttaacgactcttcattataataatagccttcaatcttgacggttaactcaaaatcaacccttataaatagtttctagacgaaaactaaatcatgggaatgattcaaagaaaacagactatcagatttctcgatcatttcttgattatgcttgacgttcctcaatcagaattcttggatattgctcacgatcacaacaattcctccgtagcagcctttcagtgttttccctctcttccttttaaatgacacgggattaatcgagtgtttataggcatatttaccttgcgctccaaggtatcggatattggcgagtgttgacacctcacgggacaactgtcaagcatggcgaacggtggcaacacatttctccgacgactttggctcaaagcaacaagaaatttggctccaactctctaaactttggctccaagtttctcagtcaatgacttggtcaagggtcgatgtttggtcaatggttgatcaaaggttgcggcttgtataatgtggtatggtcgttgtcgctcggattggtaatactttaatcatcgttcgcctgaatcactattatctcaccaaaccattgttcttttcaaaattctcccgatccaaactaattttgactcgtccaacttacttattatctatccttaatggtttttagattctttttaagttcatcttggtctcctcttgatcatcccttgtacggccatttacccttaagcaagggtcactacagtggatgtcaatgaatcacacatcaatgatcctccatatggttatctcctgcaaacacattcatggtaatgatatcgatgtatatatgcagccactaatcaaagacttgaagcagttatgtgattatggaattaaaacgctagatgcttccacaaagcaaacatttaacatgcgagtagctatcatgtggataatgtttacgacatgaaaaaactgtttaattggttatcgacgttttcttcctcgggatcatagctttcgtcaaaacgtggtacatttcgacggaaaagtagaaacaagatctccgccagtaacattgacaggttctactattattcatcaactagaacaagttaatgttactcttggtaagaaaaatggtttagttggagttgggaaaaaaaagaaagcaacgtgatgcaggaagatgtggtacttatcagtggaagaaaaaaagtattctctaaagttgtctttttgagtattctttcgtgagctaggtatacgttctgacttgtggcctgatgataatgagaaatatcaagcaacatatttttctttgaacaatcaagcgaaagacacttttttaagtgtcttccagaatgtaaaactccggatgattatgcttctaatttatcaagttgtgttgatgtcaatggtcgaaagctatcatgcttaaaaagccacgattttcatgtaataatgagaaatctattttcacttgcgatttgaaatctgttaccaacaaacatgacatcaacaattgttgagatagataaattacaatacattattttagtaactttatgtcgtatggaggtttttttcctcaatcatttttcacggtgatggtgcatttagtagtacatctcaccgaagaggcaaaatacggtggaccgttccattttgttggatgtatccgaccgagaggtgaggttttcccattttatgtttatatatatatatatatatatatatatatatatatacgaaactgaaacttactagattcaattatatacacatgatgttaggacacttcaaatgatatgttcgaaattgcgctaagcctgaaggttctatatgtgagcaatatttagctgatgagtgtgtaacattttgctcaatgtatctcgatgatatagagacacgatttactcggattggccgggttgatgatcgacctctagctgagactagcataaacccaaattcagaacttttacttttatttccaaaccttggaatagttgttggagcgggtaaagtttatactcttaatcatgtagagcggcaacaagcacatcgacatgtattggtcaactgccaactactagatcacctacgggagtaagttctcttattcaagaacaactaattttatttatgttttattgaaattcactaatgtagacgttatggttattgtatgtttaggaaatataaaaccgagttgttgaataaacaatctcatcaaagcaggaggaatcgtgttatcgatattgacagagaaatgcatcttagttttgcaaaatgaatcaagtagaaagtaaagacaaaatgagttagatgagctaactgatgatatgatgcttagctctgggtccatctgaaaatgttttaaagtatacagcttatgatgtcaatgttttcaaattccggacaacaaaaagagaatcaaacctgaaaacacaaaatagtggtgtttttgtggctactgagactacgagctatgctagttctcgtgatcctaaccccaagaaagggaactgtagcttactatcggaatctgatcaaagttatagagttaaactaccatgaagttttcaaagttgtaatattcaagtgtaagtgggcgggcactcttacagtaaaaggatataaaatagatgcatattgtaacaccctatcccgctattaaaatataaacaaaataggagcatcatgatagacgcccgcagtcagccaacccaggttttcgaaacaaattcgtttgcccgagtcgtcaaaccgcaagtgtccagcctctcgaacatggcctaaggcttttcaacccgtattgcacacgagtgttgtgtaagtcagaaaagactaatatcagtcggtctaccataaaaattttagaaatttgagtctttatacatatataccaaatcgcatatagttttcgcatcctctttgaaaaccatacatcatatgcttagtaagaattttacaaaaagctgtaaaacctacatcggttcgtcctaagtctcttgcgccctctacaaggctggtcaactaaggtttcctacaaaataagtagcgtcataagtaatctagcattacttagtgaacccggaatctagatagagttaacctaatacccttacccctaagcagaaatcaacacacaataatactacgagctaacaaaaataagtacgagttatacaagcaacgcacaatcaaagatgacacccaacacacaatgcaagcaaaatgtaatgcacaatgtataatgcatgcagactcaaattcctaatatgcagcggacaattaatgcaagcatgcttccgataacctaggtaaggaaaaaaacctccatacgacataaagttactaaaataatgtattgtaatttatctatctcatcggtatcaagcacctttgcagatatatctctcaaaaacgacaaagctcaacaattgttgatgtcatgtttgttggtaacatatttcaaatcgcaagtgaaaatagatttcttattattacatgaaaatcgtggctttttaagcatgatagctttcgaccattgacatcaacacaacttgataaattagaagcataatcatccggagttttacattctggaagacacttaaaaaagtgtctttcgcttgattgttcaaagaaaaatatgttgcttgatatttatggttatgggcggcc

SEQ ID NO: 601 - DNA, 513 bp, Arabidopsis thaliana landsberg
tgcaggaagaatctagaggatcccccgagtagaccaaatttctacattcatccaggcattatagaatatagtatcataatcatcccaatctggagaaaaagggcgattgatatagtcacctttagtgaattccttgttgataggaattctctcttttggatgctttggccatggaaatcgatgaataggaggttaaggggctgcagcttcggattccggttgagaagggctgtgaccacagtggagaagcgccggcggtgtggagggacggcgcaggaggaaggtccgacgctcttcctagctttctttttctggcatgtcatcttgcacatcgatggaattgacacttggggaagatagagggtgagattctattgagtttagagcctgaaatcacgagaaatggtgaagaatcgaaggatctggaaaatgagggtgtcgatcgacccaaggtggtgtcatcgaaccatagtgtttttggtcgacacccttattttatttatttatttattt

SEQ ID NO: 602 - DNA, 1053 bp, Arabidopsis thaliana landsberg
ttagaattttcatgattatagaagtgacacaaataaaaaaataaaaatatgaagagagagcgttccataagagttcttctaacctttaacatttccgtccccataaatatcaactttctttttcggagggaacaaagttcccatttgagataaatttccgccgaagtatgcggcaaaacaagcaccgacaaggtatgtgtgggaaatcccggcggccttaattgcatttcgtatttccattttttgatcgaatgtttcacgtcctggtggcatggcatgtcccatacgtgacggatccattccaaattctgatggtaagaaacgctgaaatattttttaacttattgtaagtagtttcactgaaaatattttaaaattttagtttaagcaccccggaacataaaagctaagaccatctccattccacattctatgagaagggttttccaccattacaatatattatgtaaaaataaaacctttagatagtctttgaacaataatgcatgcaagcttattcaaactttgttattggtaagcaaaaagtgtgacttttgtgtacacaattatcttacaaacggatctttatctgttccaagaaaatgattaaatttttaaaaatgagtatatgtctatagagttaaattcaattcatttgcgattgttagcaaaatatagccgtaatatatcagctattttcaaaagatgcatatgtcattgatgcatatgtcattgatgcagacagatacattgtaccttcatatttttttaacacatatactattaatttatgttggtatatttgccaaagcaacttttttggaataccagctacaataatcggtattttaaattgctttaaactctgatgaaaaaggtaacaactacactagaaagaaaagtgtttagtgatgtatgagtccttttaccttgacgttaccggcctctttgatggctgcgacgagcttgagctgaacggggatattgtgggtgcggaagtggacaccggacatggcggagacaaccacgtcgacttgctttacggcagagaca

SEQ ID NO: 603 - DNA, 806 bp, Arabidopsis thaliana landsberg
aactttctccccccgaatccttcccatagcttcatgtgggatgtgatttgaatacttactagactgctgcaacttgctactagtgaccaagtcctgactatgtaggtacttcggattcagaatacctctttgaacgaactcctttgaatgtggattggatgatttccacatgtaatggttaccacctgtgatgtgtccttggtcacgacagtaccaacagttcctcgttcttctgctcagttgtttgacactcgactgactaactcttgcttttgacctcgtccttgccttcacataaccagacttagcaaagttgttaacaagaacagctctattcataaccttatttgaggtacatgaatatccacaattacgataaagatcatctttctttatgtagacttgattcccttgcttatcgttcttgtggtgctgcttgtggtgcctgacttgcgtaacacgattcagctgtaacaatcagctctgtagtgtttctgacttccgcaataccaacatcctgttcttatgctcttcagatgattgtgatcaacctaataatctgactgcctccagttctgagtaggcatactcctggtcaacgcctttcgagccttcgagggtgcatccttgcggtgtgcttttactggtttgatatcattagatttctcatctgaagttgtccctttgacaaaacgcgttcctccttttgaacttgatccatcatatccaagacgccaagtaacgtttgaagtatcttccaacagtcaggagcttgtccaagtctttagtccccctactcagcatct

SEQ ID NO: 604 - DNA, 672 bp, Arabidopsis thaliana landsberg
cccagtccacacaaatttctcaacattcaagtgctcatgcattcttattaaaagggtacatgacgtgctagtggacgtcccccggaagtgaaaaatggtgaaggcaagactagtggcaagggtcgtgcaaagaatctgatgaacctcctaagccgcctgtctttttcatgtctttatggactaacaaagtctttgatgtttggcaaccttacaagcaatagtcctcgatcatgtcttttaaggttcttattgatgtaggatgatgtttaattaactatgtatgataatcattaatcatgtaggatggtattgtgtgatcctagtttgtttttttgttgggatctttattttttttcttaaacttaacaactcttttgacttaatagaatgactatttatgttaattttagattccattacttcaagccagacaacaacttacataccacaaaaaaaaaaaataaaaattcagacaacatcacaacactacttgcaaaacactactttcccattgcaagtaccaagtaccatcccaatgacaacaatgaagccttgccaagactacacaataaactgacgaagcattgtttttttctctcattagctaccaaaactttcattttcaagcctaatcctttttctttgcctcgttcgaggttttcacccaacccc

SEQ ID NO: 605 - DNA, 696 bp, Arabidopsis thaliana landsberg
ttctaaacccctaattaatattccgaagtatcataacaaactttcttatcaacaaataaaactttaaagaagaaaataaattgggatcgattagtaaaccatatatatatatatatgctctcccattcgtctacatgattaacgattagataaacaccaaaaatcattatttccactccaaactaacattcacaaacacaaagagaacaaaaataagaatggcttcccaaaccaattcttacaccgtttctgaagtagcgatcggatatccagtgacaccgtcctcggccactcctcctcgttgtggatggtggtcacgtccaatagtgactatgccggcaacttatgatcctaatcttataccctgtttcggcggcatattcaccttcatcgcggtttttgtattgatcttttatttcatcaatgagattcactgtcacgccaaattcgccattcgatccatcgccgtctctccctcctccgccacgtggcacgttgatttcctcgtcaaaaaccctagctacatgtatttacaccagtccaacaaagattaaatagatatatattttcctccaaattttatgaaatgaagcaatggcttcttcttctcttgcaggtatactatcaactacggagtaggtgaaactgcgttgaagctcggtgccataaacgctgccgttttaagtacttctcaca

SEQ ID NO: 606 - DNA, 4489 bp, Arabidopsis thaliana landsberg
  unsure (1)..(4489): unsure at all n locations
gaacggtcgttgagctccttagctttgcttcgagtaagctaaagttggaatgcttggttacacactcgtatctgctgcaacggctccttgttctcgtgcttatagggttcttagcatttaatttgcattagtgggttattgttcttttatcaaagttgaaaattaatnnnnnnnnnnnnnnnnnnnnnnnnnnnnnnnnngttgttgtttgtgcatggttattgtagagagagagagtattcgattgtcttaatatactgtagttttgttgatataatcattgcattatttagttaagtttccgatatgaaaaattcaaactttcgtcccgtttttaaaaaattaacaaagagtaggacttgcattagtacatgataaacgttgtgtttacaatagaataacacaagattgtttgtgagagtcgaaactcgcacaatagaatttgttttaagggtttcttcaaagaacggatctttgtgagattctcaaagaacaacagaattctcaattaccgcggacggtgttcttgattttattaatgagaaagtaatgattttatcgtacaagtttgatagaatatgagaaataggtgtttttgccttcaaagtcagagcgtttttgatagcctgaagttgagagcgtttttttgtgcctctccctttgtttgttctctgaggtgcttttttatagggtccgagaatatcacctcttgcgatattctcggaaaatccctctttatctttatctcgttgaaagagatttgtctttatcctccgaagattctgggatttttgtatctggtgatatcttcgaagattatcggctaagtctttcgaagtttttctgtctaaaacgagatctttccgagccgtgattaagctggcctcgggtcatgatcgggatgcttggtctgcggtacttaaaggcaagctcccgaggtgttttgaagcccgtctcgggatgattttccaagtcttatccccaaggcgtcctaggtcgggtcggagattactttatgagactgccccgaagcgttctcgacatcacctcggtatgggttcttgacgagaactccgaggtgttttagtctggttcgggataattctccgatggctcccgaggcggtgactcataggtcggctcgctatcctgggtcaaatccgaccccaacagtttgccccccagctcagtgattcagtagaatgacgagcttcatgaatggatttcccgagccgaccgttcgccttctagtttttgtcgcttcatcttctcggacggtcaaacttctattgcatgtcgccgactatttttgaggagtggaaacgtttttcgcttgttcccgaggatcatgcggatcttttttcttctgccgagcccacgcgattgaacgcattttgaatgtttaatgcggatccgacgcgcctttgaaaaactctatattagcagcgagccactccttcaatacttcatttgaagttttcgaagaaaataaacaaggtttgcttccttctctctgatcttgatatttctatcgttttttcttttccggcgaagctcctgtcgttcttcttgttatttttgattttgccgggatagaaattctagtttgccggttgtttcccttctcgtccaacgtcccgagccgagaatgagttctacacaatctccgtcgaccccgagcgcttcttttgtcgattctagcgattcgaatcacccagatgatcttccccccatctacaaacgaagatcagtttggacgtcttccgaagattattctgtttcttcttcggatgcccccgagcagacgactcccttcacggctcgggaagataccaatgccgacatcgctcgggaattggatttacccgacgactctgagccgcctctcgttcggaggtcctttgctccgacggctgacgaagccgggacatccaattggcaagatttgcccgagcccttcatgccgacggttaagatcgaggattttctttactttagggcccgaaacgcagacagaagatatcttgcgtcttaacgagcataaggctttcgagaaagcctagaagaagaggaagaagaaaggcaacagggcgatagtgccggatccccctggcttgactttgtttaccaagcggtcgctttcggatctgagggcctgattcaatcttggtgaggtcaccgtgcgtgtgtcgatccctgatgnnnnnnnnnnnnnnnnnnnnnnnnnnnnnnnnnntctgtatgagggatttttctattattgcttcttgtggcttccggtcccgaggctggttttgcagtacgtgacatcgtaccagttcgccctctcgcagatcacgatgcggtccttgagacatctgctcgagattttgattcggagttatgaatccgaaactgacattgcgcttgctcatctgagaaatcttcttgagatccggcgggttcccaaatccgaggtggatcggtattacatctctcctgctaagggtaggaaagttattgatgggttcccgagcaaggatgagccgtataccgatcacttcttctttgtagcgctcgaagatgttgttcacgaagacctccttgggtcggtcctgacgagatggagaattttgggtagttgtagctaacaatttatttgtgcctgttgcggttttatagtttctttttcttactgtagttttcctttgttgcagaacgcaccctaaagttcctcgagccgattccagatgatttcctttcggcttttcacgcgttatcggctcggaagtgccattggttgaagaagaagaagaagaagactatagccttcgagcgataaagcggcgggtaaacgcgttcggatggatgacgaatcgtacaagaagaaaaagaagaagaagaagacttcgggtgccgaggcggagaaagtgctcccgatctttgaagatcgtattgcttcggctaatctcctcgggggatgtgtagacgcaagtttgccgagacggcatctcacttcttacgggtatgtgtttcattattcataggttatcttcggttccaatattgtaaccctatccttttcttgttcaggtcgttgcctcgatgaaccggatggtgcattcgtacgactcatctatgcggaataatatggaagcggttagcaagttagccgaggcggagtcccggattcaagccgccgagcgagagaagcaaccgcgacgaatctggcaagggaggaggctgagcgggcggcctttataaacaaagagaacgccatcaagatggccaagcagattctgagatcgttcgtctaaagcggatgtttgccgaggcgagaggacttcgtgatagtgagctggcttgggccattcaaatgacgaggcgagaggtttctgaaacctttatcgccaagttgaaagctgccaagcacaaagtgtcgctccttgatgaggtcaatgaccaattcatgtacctgtcccaggcgcgagccaatgcgcagctaatcaaggtgctcgaagaaggcggggttctggataaagagaacgatcaagtcgatgagtggttaaaggattttgccgacaccgaggctaacctcaaccgctttatcgccgagctgaaagaggatcttaaagctccatctcccgagcccgctcctctgagtctgggtggtcataggtcggttgagactcttgccgacgatgcgggggttaccgaccaatccggatcgctccttcctgccgagagtaaccgcccgtccgaagagctcgactagggacccgaagcgggatttttcttgcccttttttttgttagtatgtttggttgtagcacttatgcctggctttatccaataatttgtaaaacatgtgcctggatggctttatccaataagtttttggagttcgatattttttggttagaatctttctttagatccgaacggttttatcgaccagtgtgagagactgggtttttaagtgaaacttctcggttgcgatccgatcagaaacacttacaaaccagcgtttagaaacgagctagggtaccggtgttaagtataaccgggtttcagaagatagaattcatagcctgctcggaaaaacattcgagcagattcttatcttgaatatttatatagcgcgctgtaaccgaagcggtgtaatggatactccgagccgtcgctcattgtattagatgagtaaaaagttgaattttttatttgtttcggttcggaaacctataagataataaaatgggagtatgaatatacggacccactccccccttttttaatgggggggtagctgaactcgtccgaagacgannnnnnnnnnnnnnnnnnnnnnnnnnnnnnnnnnnnnnnnnnacaaatttagtcaccttggatttagtgtagtatttccttatgtgcattgtgttccatgatcttgaccgcccttaccgtttaagtcagcgagctcataaaaaagggtcggatgactttagcaattaagtatggtccttcccgg

SEQ ID NO: 607 - DNA, 4021 bp, Arabidopsis thaliana landsberg
aatcggagtttttgcattgtttgcatgtaaactcatccgatttaccgaaatcgtcgccatcgttgtcgctggagatgcatgatgagcaacgagaaccgttcgtcgattcgtcggacggcgacatgacgacggcggcgaaaagaatcttcggattgcgccaaaggtgatgataggtaagctttggtgggaaattgggaattggcttttgaataaaatagaaagaagaaagagagaaccagaaaaaggaagtttgggagagtgacgaagacagcgaaatttttagatttacagggccactaagaattatccagttgtcaaggagtgactgacacgtgtcggttacggttttttttttcctttctgaatcttttgattcttctgctttgggaaccgtaaacgatttgtagtatgggtttgtgaaaggccatgggcttattttatgggcttgataacagacaggataatattaaaaatttggaacgttacaaaaagaatacgaatattaaaagagataaaaattttattattattagtattgaatcctttttaattttttttttgtgcaaagtaatagtattgaatccaacacaatttttctttttctttttggaatgctagttaacatttcttcaacaaatatgtataacacatgttttatcattaaaaacttgaattgtttaatctcatgagaatccagctaagatcaatataataagaatccaacaaatatcaatattataaataatttcatggttcagtcaattaattagatgtcgaaatgtgtaaaaaaaattaacttctttttctctataaaaactactataaaagacatatttatattttttaaaattataattgttttggcgaataaaaacaaacaaaattatctataaataaagagattgtaattttattagtttagatttatgacaaaataaatttttgtgaatgtgacaaaatagaaataccaacaaaaaatataagacgttgagatgcacaaactgttggggtcggatttggcctcgtaggacccgagccaactaaacaagctccgagaacgcctcagaaacatctgtcgggtatatttggctcgggaatcgttccaagacgcacactccgggctgatgacaagtacctcggaaatcgcagcaaggaatcatcctgagccagcttagaaaacacctcggggaccctgcaagtaatcttccgtcccgaatttagcaacgcctcgggtgctttcagggtaccaccccgaggcgaacctcggaaacgctttgggtaaacgatctaactcgcacgaaacgagccgttcaactacaaaccgacaagaggtacccggctcggaagaaacttcacactaaggccaaaacatctcaaacctaagggaaagacttagacccgacgcatggtcaagataccatgtccgaaaaacctggaaatgatatttggaaatcattaaggatattaacaacaaagagaaaatcccgcaaagatctccagaagataaagatttatcactgccgcctcaaagataacaacaaatctcccaagaatatcgcgaggggcggctcaaagccttatataaagcacctcaaggcatgagagaaggggcacgcacaaaaacgctctcaacttcaggctatcaaaaacgctctgactttgaaggcaaaaacacttattttcatattctagaacacttgtatgatcaaatcattactttctcattaatacaatcaagaacaccgtccgcgataattgagaattctgttggtctttgagaatctcacaaagattcgttctttgaagaaacccttaaaacaatttctattgtgcgatttttgactctcacaatttggcgctagaaggagggtgtattgagatttctcttactcccagaacacagaaccaaccacccaaaccactatggtcaacaatcagattcctggtaacacagttgacggagagggaaacccgatccctccaaaccagacagacgttcctgaagccgccgctctcgcgcgcctagcagaactaagaagtatgatggctcaacttcagaaaaaggtgaatgatcaagaacaagcaaatcgatctttggcacaacaactcgaagcagctacctcccaaggacagatcaggactacccgtttcggcgcgaggcatcttcaggatcgacgaacagcagcagatctcaacccaaaaaggctcgtgttccacacgcctagcaatactacaaggcccatccgccgaaccgcaccggaaattggaagagatcgaaccgaaccggcaatcttgggaaatcgagaaacgaatcgagcaaagggaaacgatccgcagctccctcctccctgagcagaaattgccaaggctgatcagatcgaggtctcagatgataaagattcagaagagaacgttcggtgggctgaggagtacgccagagaaaaggaaataagcgctatcaagctctccctagccaaggcagaaaacgagatgaagctcgtaagatcccaaatgcataacgcagtcttctcggccccgaacattgaccgcattttggaagagtcccacaacataccattcgcacacaggatctccaacgcgataatctcagatcaaggaaagctaaggatcgaatacttcaacggatattccgacccgaaaggacaattgaagtcattcatcatctccgttgcccgagccaaattcagaccagaagaaagagacgctggtctctgtcacctgttcgtcgagcacttgaaagggccagctctggattggttctcgagactcgaaggaaattctgtggacaggccgaggacgaggccgcggtcgaggacgtggtcgagaatcctacacttggacgaaagatcaacccgcaggaaacgagcaggaatattgtgagttgcacaagagttacggccattatacttttgttgttgtagcctcggagcaaagttggcagcaaaattgctagcaggagagatcggtggaggtttgaccatcgaagacttggaagcggaaaagggtaaaaccgagaaggtcaatgctgtggccaatcccgggcatgcggcccccgcggcgaacatcgaaggacccaaaagaggccgaggtaatagcgaatcagacgacgacgagccataagcagctcgggggagaatcttcacaattttaggagattcggctttctgtcaagacacgggggcatcaatcaaagcttatcaaaggaaagccgacacggatcacaactggacgcggccatttaacagaccaaatgacgaagtaacttttcacgaaagcgataccaacggtttagaccgtccgcacaacgatcctttagtcattacactgaccatcagtgatttccatgtcgaaggagtcctagtcgacacgggaagcatactggacatcatttttcttacgactctacaagaaatgaagatcggcatgatgcaaatcgtaccaactccacaacctgtgctcggattctctggggaaaacactatgactctcgggaccatcaagttaccagtccgagccaaaggggtagtaaaaatcgtcgatttctctgttaccgaccagccgaccgtgtacaacgcgattatcagcacaccatggttaaatcaattccgacgtgtcgcctcgacgtatcatctctgcctgaaatttcccacaagcgacggcgtgaaaaccatctggggaatcaaaaaaatgctcgaatctgcttcatggcagcacacaagctcaggaaccccgtcactgaatcgaaggccgacacgaatcataagaaggccaagcttggccgagctgaagagaagtcaattatcgagcagttatagcagctacggattgaagaggcttgggagtccacaacaccaactcccgatccggtaatctccatctgccttgacgacgaaaagcccgagcgatgcgtagaaatcggcagagatctaggagaagagttaacagctgaactcaccgctttcctcaaaaaaaacgtcaatacgttcgcctggtcccagaa

SEQ ID NO: 608 - DNA, 880 bp, Arabidopsis thaliana landsberg
  unsure (1)..(880): unsure at all n locations
cgatcaagtcgtcgtcgttaactatcacaataacagcttttttgatctgagccttgttccttcaaagttgcagcaaaactctttttctcagattgattcagcctttaacgattacaaatctatctccgccgccgtctcatggatttactctccgtgtagcgtatcaaggagttctcggcgctaccagaaaaacttatccgaaatctgaagttattctgcatgatctattcgatgttgcgtttcaggcggttgagctttggatcgccgatcatgttgttctccgagaagagaattatgatttcctcctcgttttcacattgccagcgagatttagatcccggttcaccactgtcttctcgctcttacatattgcatgcccgtgatttctcattttctataaaactggtgagtttagattacgctattggaaggtatttataatgctttgataaaacaatagggttttgggtgagtgggtacctaaaatcttgctgatcaagtttataatatcttcaagatcttttatttttggaattgagttaagtttaaaaaaattgttatggaatatgctcacaaattttggagagaataaatctcgaaaagaagaaattaaggagaaagtattggngagtaattagttgggatgatagccaatagtagaagattttagaagaaagaggtcgtataattggaaaagatttttggcaaccatttttgagagaatatagcaaggatatgattgnggggaagtagatagtatattcaaagatcaactgagattttaagtggaatagagccgattaatgtggaaccgaagttaaagaaacaaaaagttatgggcaggtagcattaaaaattaggaatatacttgagtatgtaa

SEQ ID NO: 609 - DNA, 233 bp, Arabidopsis thaliana landsberg
gtacgtcgctacttggattaacaagagtaatcaaaatgaataagaaaatccaagtattttagagtatccatgagttcaaatttgatgcagacatgataattaaagatcagattcaggttcaaattgatagagcaatctaggcatggttcaggtttatttcaaattcatcgactacgcaacagactactttctacgagggcgctgaggttatacggtcttaccctgatgcttac

SEQ ID NO: 610 - DNA, 4054 bp, Arabidopsis thaliana landsberg
tgttttcctgtaactgttcttgcgtgaaatcgatgcccattcactatgtaaccagtaaatgatcttgcgttacaacgtggaccataagccagccatttcagtgtttcaccatgagtacttgaatcaagatgtatctatcaaagaaaaatagaaaaattcaggctcttatatctattgctagcctgttctttaagccaagatgcaaaattttgagtgtgcatactccataacagagacgcatcacgtctgcatctcccattagtgttttgtagaagctgcaggtgctcactagtaaacagagaaaacaaaattcagaatcagcattcatagaagcagaaagtgaaaagcaatatagaaaagcaatagaaagagagatagattgtcacttactctacataaggttcgacgacagccatattctggatcatagccaaatgagctatttttctctccatttctgtaagactaataaaggtgcctgcagagataggacgccctccaaggatagagttgttctcatactcagtatttctatctgccttttcctgaacttttgttgtcttcttaaaaaagttactacagaattggatgcactcttcagctaagtaacattcagcatttttcttttcaggtcttgctgtgtttctcacaaaatctttgaagactttcatatatctttcaaaagggtactgtaacgaccgcgtcccgcgttcataaagaggccaggttgttttaggagaaaactagaccatggtcaagaaacgaatcaaaatacttagtcgaaagaacgagaatgttcaagctgaaccagctaggtgagctggacaagctggatgaactagctagctaagctaagtgagctaaaccagctggaagactagctagctcagctaggtgagctgaccgacagctcgacttagctcagtgaactgatcgagtactgacccagctgggtggtccggtcagctgacactcgagcttgtggactgtggtagctcacggatgaagagttgtctcggccaaaaggtgtaaggtcgagcgggtaccaacgaatggttgcatcgccaaaggatgaaaggaacggatgtgacctttcggaaggatgcaaggaacggatgtgacctttcggaagggtgcaaggaacggatgtgatgcttcgggaagcatccattcgcctcctatataagggaggacgcccaaggcatctcacatcatctcatacaacatccagacaccacaaaacattctcaaaacattccaacacatcctgaagttgttggtcagaaaggggtgcggcttagcaagtataactggaccgaactaatgcgcatgctacctccctgtccaacggttcgatggagtgtagaggatggagagggtagaccgttcgtcttatagacgaatcggatctggtagactgatcgtcggatcggatcggccagacgtatcggatcggacagaccgatcgttggacgggtcaaatgggataggccgatcgtcggacggaacgggcggatagactgatcgtcggatgggatggatcgagaaaaatgttcgaggaagcacaaggataagtgcatccgaacacactcaagggtcgcccatggatgcaatcttaccggtaaagggagaaagcaccaagaatgggtaaggaaccgatcgagatcggtaagaccaaaggttgactcgatggataaccaacgggaaagtccacggtggtctcacgttcataaagaggccgggttgttttaggagaaaactatattatggtcaatgaatggacaaaaatacttagtcggaagaacgagaaaattcaagctgaaccagctaggtaagctggacaagctgtatgaactacctagctaagctaggtgagctaaaccagctagacttgctaggtcagctaggtcagctgaccgacagctcgactgagctcgatgagctgatcgagtactgacccagctgggtggtccggtcagctgacactcgagctggtgtactgtgatagctcacgggtgaagaggtgtctcggccaaaaggtgtaaggtcgagcgggtaccaacgaacggttgcatcgcccaatagatgcaaggaacggatgtgaccttttggaaggaggtaaggaacggatgtgaccttacggaagggtgcaaggaacggatgtgatgcttcaggatgcatccattcgccccctatataagggaggacgcccaaggcctttagggcatctcacatcatctcacaatcatccatacaccacaaaacattcttaaaagagtcccaacacatcccgaagttgttggtcggaaagggggtgcggctcggcgagtataactcgaccgaactgatgcgcatgctacctcccggtccaacggtttgatggagtgtagaggatggagagggtagaccgttcgtcttagagacgaattggatctggtagaccgatcgtcggacggatcgggtcggacagaccgatcatcggatgagatggatcaagaaaagtgttcgaggaagcacaaggataagtgcatccgaacacacccaagggtcgcccatggatgcaatctcaccgataaagggagaaagcaccaagaatgggtaaggaacgtgattcaccatataggatcaatatcgcggccgccttcatgtatctatctcctcagccatggtgaaacggatcagagatcggtaagaccaaagggtgactcgactgataaccaacaggaaagtccacggtgggaaccgatggacaaaacggacgttggacccacgagcaaacctaaggccgacggaagaaggatttcatagtctagcctacgatgatctgatagatgaatccacggacccttgggtgtgttaagaatatcgttcggatcgtaaggatggatcgataagccgaaagctttatcgaccaccatagaccagacggataaacagttagtaaaccatgggcggtcgtagtaaacgaccggatcgaaacatggatggttcgataagctgagtgctgaatcatccaccatggaaccgaagggacgtacgtctggaggacggatggaccaatgagccaatagcttaattcggccatcgtgaaactagggaatcgtacgatccccaatctctatcgttgtagttagaccagtggggttggttggttgtatggctaagtaacgatacaaattggtccatcaatacacgatcggatcagaatcgttgaacaaatggaataaggcgacaaatgggctaaggagtcaaatccgcatattggccaaggtatgtaacgatctaacttattagttaaggtagacgttagggaattgaccgtgaaaataggataaaggaatatgcgattgttagcgaacaatatgcatgtcttgaccgagtaaaggatcgatctaagtctgagggacaaagacgatgaaaccggtacaagagttggttagaactaaaccaaggttagaaagacttccgctgtgtaataagagagcgattatagaattaagcctcgtaaaggcaattctatgttgaatcgcgaaaaattaggaggttcagccgggaaaaggcgcgaacttgagtacacggtcgccggacgccgagacgtccgggactgggtctcacaggtacatccatctgaaatgaactggtccccctaaccgagcttctctccctaaatgaactgtcaagtgcaccatgatgtcaaagaaactgggaggaaaaaacctttcaaacagacaaagggtttcaacaatctcaacttccatttccaaaagctgctccatatcaatcactctctgacataagtgattgaaaaatttgcataagcgtccaattgctaccctaggacctttaggtaacaaccctctcaaagctattggaagaagctgctgcattaagacgtgataatcatgtgatttcaatcctgttaccttacagtcttctaaagatacacctcttgctatgtctgaatagtagacatctgagtcctttaaaatcaaatagacgtttgcagaatagcttcttctctgtcttggagagagaccaaagtgaaacaggaagg

SEQ ID NO: 611 - DNA, 604 bp, Arabidopsis thaliana landsberg
ttctcgagcctcctcgatctttagttgcaataactgcttagaaattgctttttcttcagctcggccaagcttggccttcttgtgattcgcgtcggccgtcgattcagtgacaggggttcttgagcttgtgtgctgccatgaagcagatttgagcatttttctgatttccccatatggttttcatggcgtcgcttgtgggaaattttcaggcattgagatttggcgctaaaaggatgggaaattgagatatctcttactcccagaacacagaaccaaccacccccggtaacacagttgacatagagggaaacccgatccctccacaccagacagacgttcctgaagtcgccgctcccgcgcgccaaccagaactaagaagtatgatggctcaactttagaagaaggtgaacgatcaagaacaggcaaatcgatctttggcacaacaactcgaagcagctacctcccaaggacagatcaggattacccgtttcggcgcaaggcatctttaggatcgacgaacagcagcagatctcaacctaacacgactcgtgttccacacgcctggcaatactacaagtcccgtccaccgaaccgcaccggaaat

SEQ ID NO: 612 - DNA, 1581 bp, Arabidopsis thaliana landsberg
gaagcatctgtgtgatctgctgcaagaacggacctactgatgctaaaccaagtagctcctgcagcgctgtctccgttaattctagctctccattgacaaaggtcccattcctctctcttgcaaatagtgcactggctaaagacctataaaagtatctgaccaccggactccttatctcgttgctcttggtcctagaggatgaaaatccatgtttagactcaagcgtggcctagaatgactgaagctctctcttgtcaaaacgatgacttgtgtcttttccgcttagaaatccatacatcagctcaagatactcgattggaagccgatactctacgtcatacacaaagaacttaaagtatcccaaacttccgtctggcctgatttcatcgtcctttgactctccatataagaacaattccacggatgaaagaaactggatggtctcttcctcatacccctccattggccgaaacatatgaatattcaggctgcactgcttaaatatatagtttacatcatcatagatgccgagtctctccatggtctcgggatgagggtatcgagttcctaaaaactcattgcgcttcagtagtttgtagtactcgtttcgagttgcacacttctctgattccaaatcatcattgcctcctttctctgtttgatcatcttcctctggtgaagccatttcttcctcggagtcttcatctaccagttccaacctcctccccacgggcttctttcctcgagtgatgtctgatttgttcctcgagaattcccttgtagagtgcttactcgaccttcgggatcgagtatttccagcgggagagctgaaagtctcttcttcttgcatcgcttcctcctcttggctcgattcactgtgatcgatctcgaaacttgcttgttctctcctgctcgacctgaagggtgacgattcagaaagtcctcgagctgctgcatgcgaagaaggtgttgggtacctcttcgatggggagagagctttgttccggatccttgacaaaagcgagcgccagtttgtcatcaagaacaaaagtgggagaaactcaaaaccaaaatttagtaggttaggagattgaatgatggaggaaacaaatgaatttgtgaaaagtttttgataagaaagggaagtgaaggagataaagagagaattgtaaggattcgacattcgagattgctttggtatgggaggcggagagatgaggttgttgagttcgggaattgcaatggggggacaaaagcaattatggggggggggggaaagaagacaaagggacaacagcgtttcaatgaaggcgggttacgaagcttgactcctacagtgcttagttagaaaaaaggttgacgagaggaacatagaagtcctcatcttctgtggttgaattttcagtgcttgaatcatactctgcatcatctcttgagatatggtaggatgagtactcatttgatttttcttcaaagtaagcttctttctgatcaacagagcagtcttccccttccctctcaaagttttgatgctgaaacaaaagttaatatgagtttttggttttgaaacatacaataggg

SEQ ID NO: 613 - DNA, 2062 bp, Arabidopsis thaliana landsberg
  unsure (1)..(2062): unsure at all n locations
agtgttcacctacagataagatatgtatgtaccaccatctaaatacatcttatccaaaaaaagcatagtaattaaacacacaacatggtttggttcttgtaaatcccaagcccggggaggagaagctaatatgtatacacttacgaggatgttgagttttccttggaagagagagaacacggtttccatgagtttctctcgttgctcacgcaaagaaacgtcgcagatagaagtggtgacctgaaaccctttttcttgccattcacgtaaacgttcttgaagctgagtctcgtctctagcacatgtgtggactcttgctcccaaaattgacagttcctccacaacagcttccctgttcatgacacgcacacacacacaaacatagtcagttcttccataactaaatatcacaatgcaataaaagagcatctaaaatggagactgacccgatgcctttagtgccaccggtcacaagagcattcataccttgaagactccatcttttatccattttttcttgtatcttacttgaagtgaccagaaatgccacagattttgtatatacaatgaatgtggaacggataagtatgaatctagtgattatctttgtatgtgtggtggaaataatacgtagccttacgagtgaagatgaaaaaaatctaagatagtggtcctaaccaaaattgacattttatagtcaaaatatttgagcaaaacttgctcattgtcatttccattaacttcactcacaaacgtcttacaagaatgttgagcttgccctcaaacaacgaggagacagtttgcagagtgtttctctctccggacgagaggatacatcacagattgtaccactcacttgaaatcctttcttttcccattcgcttaaactttgattgagcagtgtttcagatatgtcggatacatggactttggccccaaaaccagctagctcctctactatggcatgcctaaaacattccacaaacataaactccttgaattcttgaccattttggatatcaaatagaagtagaaaaatggggtaagaagacaaacccaattcctcccgctccaccggtcagaagagcagtcataccttgaagactccatcggctgttatccatctttatctatcacataactaacaagagcttctttaaattgtatataaagatagattactaacaactttgtaaataagaaaagatacaattacatgatagacattgggcaactcctgatagttacatctagggctgtccatcttacctaaactagtgggcgtttgggaccgtggacaatgattttagctatcaaaattatccgaacatatattatattggaatacttactcaaaacccaaatactcaaaacccaaaacccactatttcatgtctcattactctaaatggaaacccttagtgacatctgcatactttgatggaccctcatttgacacccatgctgaggaaaaaaatctctcaacatcaattctgaccacttgtcttatcttgagtttatttcaaacccagctagctagttcttccactatgtggtatgtcagtatatgaccacttgtaggatttggaccaaagttcttttataaattactagagaatacccatggatattgcattttgggatttcaaaccaaattagacactccatcacatgttgagacaccaaatgataccattaggcgttggccaaagtagataatgaattcagatattgaactctcgttcaccacaagcataaatatttcaggaaacaaaacatagagaataacaagaagaagaagggggacccaatccctttggcatcacaagcgactttagataggaacttatctaaagtacatttcttaattattacgcaggaaaatataatccaaacacatgcatatatgtattttaaggcagagtcttgaggaaacgttgacaatggcacctncacacgacccatcggtggcctactctcaccttttctttgcatctttatcatngagaaactgaacatttacacaaataaaattggaagtatgaatagattatttcatata

SEQ ID NO: 614 - DNA, 2314 bp, Arabidopsis thaliana landsberg
gaaagagttcaaaagattatgaatgcaaaagtggtaaagtcaagttcttaattaggatgggagatgggattgccattaggtcttcattgattatactttgggtagatgggatcttatctttgtatgcataacttgggacttacctttagcattctactaaagcttaatcattcttgagagatcccttgttactaaagcctattctttaagggaccatttttgtcttttgaccctttgcccttagccaaatgagtctcatctgcattgtatagtatgatccatggttcttgcttaatgaatgttaaagggaatatgctgatttgaatgcttgaatagactaagtgaaagattaggttgtgttgtgaagaagatggctaaagtccttgttttagatccaactacagatacctatggcgggcatatgataacactagattttaacctttttaagcccttgtttttcatgcatttagcttagtttcatgcccctttttatgcattcttagtctcttttccttcttttgcacattttgcattgcattgcatagcatacttgcatttggagtgttttgcagatgaattaggtacttttggactcaacttggaggtttctagcacaagggatggacagactcgagttcgggggacctaaggaaggatttgaagtatactcggcctatgtactcggctggaggccgagtggagcacacgtgaagaacaaggagcctactcgaccaaggcactcggctggaggccgagttgtgcacttaaggatgaagagaagctactcgaccaagccactcggcctagagccgagctgtgtgaccaagaccaagccactcggcttttctactcggcctagggccgagcgctcctgcgccgacttatcttttttgtcttattcccaattagggcaacctaggatggcctataaatagacctcttatgtttttgcccaagggatcttcgttttgtccgctggtttttagggttctttgattttcttttgcattttctggttgttctgttgagaatttggatttgatttcttctgcaaacttgtttatctcattgagatctatcttttgctaagtttataatgatttctgagttttatgaattttctgggttttgttctatgatgttcttcattgttcttgagtagtgttcttcagagttcttgagaatgggttaggtttaggtggattcctctcttctttagctagctaagtgtttatatgcatgattcccttctgttttaggagttcttaatgctattttctttctgatcaattgaaaattgatttcagactttctccatccaaaagatgtttgatgaaatgtctgaaccaactaatttcagagatttgtagattctagcccaaggaattggatgattagactgcttattgactttaatagattggtgtttaaagcctgctttattatgtttcatcaacggaagttgagattaggaagttctaaagttatgagaatcactcacacggaagtggcttgatttggttttgaatctattgtctagggatagcttgattgagtttgttagttagctaatggattgaggagtccactaagaccaattatcccattcttaagagctctgtgtcgtttatttgtgcaaaactcgtgtttttagtactctgttcgtttcgtgcaaaattggtgtttttagtattgtactcgacctgcttactcgattgctcgaccgagtgctttacctagtgcttggtttactttctgttcttgttatttgatttgcatgttaacctgttgcttaggtttagtagaaacacaccaaacttattcacacttggcttgacttagtattctctgatcatatcctgattgatagcaattacacccatttggattgacaccttaaatgctgcaatgacataagatgcatttagggaattgacacacaaaacccttgtatcaaacgctggacatgacgaaggtagacaaaacttcttctgacgtctcacatccgctgaaatgtccgacaataattttcagagtcatattgtaaataagatcaaatgaatccaaatctgaaagaggatgaagtttaacttaacaaacatccaaatttaaaagttagtatatgattttctttttaatttttttttttttaccgaatatagtaaattttaaactttcaaaagttataaatattatagctggtatacttaagtttaataaaagtttagaatcttatgaaaatatttcaacatataaaagttgtgagatgggtttgaatcgactataataatattttttatatttaattaat

SEQ ID NO: 615 - DNA, 3456 bp, Arabidopsis thaliana landsberg
acttttgtattttgggtaagttctatatataaatttttgtttttcattacatcataatcatgtcgtgtgggaatgggtgcaagtctgttatatccatcaattggtcacgggtttgatccctaaagtgctcatttttctttctttttaagtgaatttaaaacgacgtccgttggttcaacggagactgttaacggaaagtcaactctgttatcgttctgttaacggaaaattaacgtcatgcccgaaacggcattttgaaagttcatgcttttttcatcccaaatttgaaagttcaagcttttttcgacatttttcccttttaatattacagcactttataaacgctgagataaagttttaatgagcgggaacacaaaatacttattataaacgctgagataaagttttaatgagcgggaacacaaaatacttattccgccaaacacttagtcattttcgagcacaaaacccaaacacaaaacaacttttcgaaaaccctaagaaagaaaactctctcagtcctcagtcgtcaatccgacgaacttactattccggccaccgattaaaccctctgttgcctctccgtcgccgtcgtgaaagctctcggtgcaactggaacctctgccggcactcaatccgctctatatatgtccacttcgagattgaatcgaaggcaagtcattttctatgttgtttttttctcctttgacactcaattcgttaccctagatctgtttccatcaatctctgagactcaataaccgatgtttgtgtgattttagaatggttttctttatcgattcttaaaatttggtttactttgcatgcctttgtttattacgaattcatatgaatttcgtcttattaatgttaacctgaactgctttaggtgcctgtgaacaattttgcattcgaaattgtgtatttatttgggcattagagttgcaaattttggattttggctctgtaatgtttgattttttattgagtgataaaacttgagaatttcattgtcagattgattaagcttcgtttgttgtctgaatcgtattggtattgtcacatcgatttagttattttgttatgtcaaactatcattgattcactttcttgaatataaaacattttgctcattctatatattttgtttaatttgtaagtgttgctgagcgaatcaatggacatttggaagcttatcaattctctcttttcacaggaaaggttagtatcattgtctcccttttgtgaattgttttctcttgtcatagttagtatataagtttgagttatttgtgaatgttgtctgcttgttctgtgattgtttacttagaagaattcttttcagtttcatttattttaaaacatgctaatataatctagtaactgtacttatctactgaattgttttgatagagtgatttgtaaatgttgtattttgtgtttgtttatattgaagattcttttgagttacatttgtttaaaacctgctactataatcgagtagcatgtacttaaaacctgaattgctttgattgattacgtttataagtttgaatttatttgtgaatgttgtctacttattgtgtgattgcttattcaagagattcttttctttacgcaatatggtatgctgcttaggttactaaaggttaatttatgttacggttagcacatagaatggtaaccaaggattgggtgcattttggcaagtaagaaatataattataattataattatattccttaggtttcagtaagggttttgggaagtttacttctttttttttctctctttctacttctgcaacaaagagctgatcctgcttatgagagaggggttatcaagtttgtacggtatgtggctgcggctttgggagatgatatgattgtatgtccttgcattgattgtcgtaacatagatcgtcactcaggctgtgtagttgttgatcatcttgtgacaagaggaatggatgaggcttataagaggcggtgtgactggtatcatcatggagaattggtgtctggtggtgaaagtgaaagcaaagtcagtcagtggaatgatgaagtagttgagttgtatcaggctgcagagtatttggacgaagagtttgatgctatggttcaattgggcgagattgcagaacgtgacgacaagaaagaagacgagttccttgcaaagcttgcagatgctgagacacctctatatccaagctgtgttaaccatagcaagctgtccgcgattgtgtctctgtttagactgaagaccaaaaatggctggtctgacaagagtttcaacgatcttctagagacattgccggagatgctaccagaggataatgtgctacacacatcactgtatgaggtgaaaaagtttttgaaatcctttgatatgggctatcagaagattcatgcatgtgttaatgactgctgcctattcataaagaaatacaagaagctccagatttgtcctaaatgcaatgcttcacgatggaagacaaacatgcatactggtgaagtaaagaaaggtgttccacagaaagtgttgcggtacttttcaataatcccacgcctcaaaagaatgttcaaatctgaggaaatggctagggatttaaggtggcattttcacaacaaaagcatagatggaaagctccgccaccctgttgattcagtaacatgggatcagatgaatgcaaaataccctttatttgcatcaaaggaaaggaacttgaggcttggtctttccacagatgggtttaatccattcaacatgaaaaacacaaggtatagttgctggcctgttttgcttgtaaactacaatctgcctcctgacttatgcatgaagaaggagaacatcatgctgacattgttgattccgggtccacaacaacctggaaatagtattgatgtatacttagaaccacttatagatgatttatgccatctgtgggacaatggggaattgacatatgatgctttcagtaaatcatcatttactctcaaagctatgctgctttggacgattagtgattttcctgcttatgggaatcttgcgggttgtaaagtgaagggaaaaatggcgtgtcctttatgtggtaaacatacagaaagcatgtggttgaaattcagcagaaaacatgtctatatgggacatagaatgggtctgccaccatcacataggtttagaaataagaagtcttggtttgatggtaaagctgaacatcggagaaagagtagaatactaagtggtttggaaatttctcataacttgaaaaatttccaaaataattttggaaatttcaaacaatctacaaggaagaggaaacaatcggagtctgttaaatcaggatcaaatagtgatgatctatctagtgactcggaggaggatgaggaagaagaggcagaagtagatgaggaagagttatcaagatggaagaaaaggtcaatcgttttcaggct

SEQ ID NO: 616 - DNA, 2972 bp, Arabidopsis thaliana landsberg
tggttgtctcgatttacttgggaaatacaggtcttgctgatttgattcaaatcatatacactatgctcatgtgcttgaagaagtatatttattgaaaattatttgtaaaatttgattaatgttgattgcagtggtgagaattgtgatgtcatgactgcagaaaagattcttgacgaggatcattatggcttatctaatgtgaaagaaagaataatagaacacattgctgttgaaaaacttagaggcactccacaaggtcgtatttttgcctttctagttcaatcttctgtgctaaaactttttgtcctcatcattttataatttctgaaggtgaaaatttgtcaacagggaagatcatttgtctctctggcccacctggagtaggtaaaactagcattgggcgttcaattgcacgtgctcttgaccgcaagttcttccggttctctgttggaggactatccgatgttgctgagattaaggtatacacatgacaaaactatgattgaaatctgtagaaataataacatatcatcttatacattgtttaggggcatcgtcgaacgtatattggtgccatgcctggaaagatggtgcagtgtctaaagaatgtgggaacagaaaatcctcttgttctgatcgatgagattgataaggtagctagcttgttagtatttgaattggctttttggagtttgtagtcaaaatgaattagtttcgtttctttgttaaagcttgaaattctttgcaataagtgtctatggttccttggcagcttggagttaggggccaccatggcgacccagccagtgcaatgttggagcttttggatccagagcagaatgcaaattttctagaccactatctcgatgttcctattgacttatccaaggttttcattgccattttttcttctctttacatttttcatttgcaattttctttctttgtgatccaccaaattgaaggaaaaccggaagccattgatccgatctgagtattggtttcataataggaagtttgtgttggaacttaggtctaattaaatttcttgcaggttttatttgtatgcacagcaaacgtgacagataccattccgggtcctctgctagacagaatggaggtgatcactctctcagggtacattactgatgagaaaatgcatatcgctagagactatttggagaaaaccgcacgcagagattgtggcattaagcctgaacatgttgatttgagtgaagcagcttttctttccttgattagaaaattatggtaaaaaaccagaagtaaaaattctccaaagcagatttgagaagatttaccgtaaggtaagttgctacaaagtcgcaatgtcgcatgtttcttgaatctcaaactatttactagaatcagcagaatctaaaatcatttgacctttttggcaggttgctcttgaactagtacgccaaggagcagtttcttttgatgttactgacactaaagatactaaatctttggccaagcccgattcagaggttaagagaatgaaagtgaaaaatattatgaagatactcgaatcagcaactggggactcaacagaatcaaagactaagcagagcggattggtagctaaaacctttaaaaggttatgattgatgaatcaaaccttgcagattacgtaggcaaaccagtattccaggaagagaagatctatgaacagacacctgtcggggttgtgatgggtctagcttggacatccatgggtggctcaacgttgtacatcgagacaacctttgtagaagaaggagagggaaaaggtggtcttcatataacgggtcagcttggggatgtgatgaaagaaagcgcacagattgctcacacagtcgctagaagaataatgtttgagaaagaaccggagaacctcttttttgcgaattccaagcttcatttacatgttcctgaaggagccacaccaaaagatggcccaagtgcaggctgcaccatgatcacttcgttcctatcacttgccatgaagaagcttgtaaggaaggatcttgcaatgactggagaagtcactctaactggtagaattcttccaattggtggcgtaagtaacacactacaatgactctgttttagctttcgggttactgatttcttctattgacttcattttaatacacaaaatatctctctctctctcaggttaaggagaagactatagctgcaagacggagtcagatcaagacaataatattcccggaagcaaatcggagagactttgaggagcttgcggaaaacatgaaagaagggcttgatgttcacttcgtggctgaatatgagaagatattcgatctagcattcaattatgaccattagaagaaatatgagaagtttctcacttgggattttcattttatcatcgattcttagttctgtaggctgatcttcttcttctaactcttattacctcaaaatgaaatgacccatgagccatggattttgtaatatgtttctactaattatggtaattcatctctgtttctctgagtacacaagtcaaaaccctaatcatgaaacgttttgttgtaataacaaactcctttaatctaactccaagatcttccatcatccgtcgtgtgtaccttcagcgaccctccaaatcttcgtaatttacaaaaacacaactgtcttcttactgctaaatatgtacattttaaattaaaatttggtaaatttcctttttaagggtatcttgaagtaaggttatagcatgatcataagatttctaaaaacaatagttctctctgcagcaacagtttagggaaaggattaagcctaataagctaaaaatcccaaaacgtgtattgcaagttattgatgaagagcttacgaaactggaggtttttaagaccggtaacgactttactatcgctcgcaactaccttgagtggttgacccgatttccctggggaaattacaggttttgctgattt

SEQ ID NO: 617 - DNA, 601 bp, Arabidopsis thaliana landsberg
agacttactgggagggacttgagagtttacactaacttgtgtaaagacttaaagtctcgtttaatcgcttatagccaattcgttaagtctctggaacgtttgatcgagaaatacaagaatctttttgtacggttggtagaaattgcctacggtgataaagaagatgaggctgtaactagggttaaagtagatgatgataacccgcaagaaacagagacgaattagatcaagttggagggaaagaggaagagaggaatgttgtgttgtgaagagttaagatatcaagggacataagaacctaaccgatatcgaagaagatatgtacaaatgggaagatgagatgttcgaggtagatatgttgatgagagttctaacaagtgcagtggagagtgcaaaggaagttattaagggagagatggagctgaaagatcttggagcaaagttctacagatgtgtagagatgttatatggtgaagatatgtttgaaacagtgacagaagatcatcaaagagctttacctatgatcttgagccggttgaaacagaaactgcgtcatgtcacgactgcaagagaaagattgaaacatcttttggaagcaaac

SEQ ID NO: 618 - DNA, 4028 bp, Arabidopsis thaliana landsberg
aaagcaaacactctatatacaatcctaagatgaaatgcaatctacatgacattatgtttttgtgaaatcatttcctgaaaattttcgaatttttgtggttttttctctaccttagatgatgtagaatatgaaataagaaaagtgaacacaatgttaaacatgtcttgaaccctctccctaacttaaattacacagtcccttgtgtaataaaaatctgagaaagaattcaagaccaaaacacgaaacacacaaagaaaaataaaaatgctatggtatgtacgatggtggtggtggtgttaccttaggtgaagtaggtggagacaaggtcatcaatgctctcctttgtgtagctccagggagcgggtcgtgctggacttggattagttgaaagaagtagtgaaaaaagaaattttgaaactgcttgatgttggtgtcatctaccctatccctgatagtacttgggtttctccagtgcattgcgtccctaaaaagggtggaatgactgttgtcaaaaatgaaaaggatgaactgatccctactagaactataactggtcatagaatgtgcattgactataggaagctaaatgctgcatctaggaaagatcattttcctttaccattcattgatcaaatgcttgaacgcttagctaatcacccatactattgcttttttgatggatatagtggtttctttcaaataccaattcaccctaatgatcaagagaaaactactttcacatgtccttatggaacttttgcttataaaagaatgtcattcggtttatgcaatgctcctgcaacatttcagaggtgtatgacctctatattttcagacttaactcgaggagatggtggaggttttcatggacgattttttggtctatggccactctttctcctcatgtttgttgaatcttagcagagtattgaccaggtgcgaagagacgaatcttgttctcaattggaaaaagtgtcatttcatggtgaaggaaggcatagtgttgggtcacaagatatcagagaagggtatagaggttaacaaaggaaaagttgaagtgatgatgcagttgcagccaccaaaaacggtgaaggacatcataagtttccttggtcatgctgggttctacagaagatttattaaagacttctccaagatagccaggccgttaaccagactattgtgcaaggaaactgaatttaaattcgatgaggactgcctcaaatcctttcaaaccataaaggaaactttggtatctgctccggttgttcgagcgcctaatctgggactatccatttgaaatcatgtgtgatgcatcggattacgcagtaggagctgttttaggccagaaaataaacaagaagcttcatgtcatatattacgccagccgaacgttggatgacgctcagggaagatatgcaacaactgagaaggagcttctagctgttgtattcgcatttgagaagttcagaagctatttggttggatcaaaggtaactgtctatacagaccatgcagctttgaggcatctgtatgccaagaaggatactaaaccaagactgttaagatggatacttttattgcaagagtttgacatggagatagtagataagaaaggcattgaaaatggcgcagcggaccatctgtcaaagatgagaattgaagaaccacttccgatagacgattcaatgccagaagaacagctcatggttgtagagttcttcgaaacagctctgagtccccgctttcaaacctcacctccagcttgttcttgattgtttgcttgagggcaagcaaagactaagtttgggggagttgataagcgtgtattttgcatgttttgagcatccatttgtcatcattttagcatcatatcatcactgttttataccatttcacaacatttatcatcactttgcatgtttaggatagttttgcatgcatgttgcatatttgcgttgatttcaggtgatttggagctattgacgagctatctggaagaagcggacctgatcatgacaaaccactcgacccccaggtcgagtaggagcttcaagatctcaagagaacactcgaccaccaggtcgagtagaggccttcaccattaccacctgaccatcactcgatctcatcactcgaccccgaggtcgagtgtcttcacctccaccaccagaccgccactcgatctcatcactcaaccatgaggtcgagtgtcttcacctccaccacctgaccatcactcgatcacgtcactctacctagaagtcgtgtatctccatcaccaccactcgactacatactcgatgacaagctccagagtcttctccattccgcactcaactataccctcgagcacaaggaagaaaagaagactccagctattcactcgacctctcactcgaccacgtgggtcgagtacagttcttaacccgtccaaatacttcgtcgttttgagtattagggtttcgggatatttggctataagtagcatgtacttctcattttcgcaaacaagaagttttttatctagttttatttccgcagaccttgtgttctagactttttttaatccggatttctctttatctattcagtattcagcttttgttcttgattttcgtttactgttgttcattctgttatcatcctgctgttacactgctgttatcatgtcttcaacttgttcaacgtttatgctttctgttatgatgtctgagtagtgaataggtttctgaggatgggttagagtagtgtagaattctcagtatgctaggtgattgagttgcagggagcgttttggctttaacttgttgactctgtaccaagatagaattccagagattcgtgactctgtaccaaggtattggttgtagggagcgttttggctttaacttgttgattcgtaatgcctgttaggttagctctcgtcaatggtgattgagtctgggactaggttagcttgagagtctctattgcggtggcacttagatttggttaatgaacttgttgtctagggttaatttattgagcatgtcaatcacctgtaaactgaggaaacgaaactactcaattatcccatccttaggaattctttatctgattgattttattgtttactctactgctgtgtactgcatcctgtcatctgttgcttagtttctacaattctttactgttactcgacctgatactcgaccacccagttgtctggcaacagactatgcagtcgagtatccctgtttcatttcctgtctgttactcgacctgtcactcgacctcacccagtgctctgcaaagagctgtgttggtcgagtgttttaccgtttctgtttgattttctgttttctgcatgttcacttaggactgctagaacacaccaaaacctgttatgcttggcttgacttagtgacttctgatcacatcttgattgttagcatcacacccatttggattgacaaccttcagtactataacgacatgatagtgctttaggattaattgatcttaaaaacctattatcacctagtttccaactcaaccactaaggctggagctaatctcactgctcttctttttacctcttcaaacagttagtattcatagatcttgactcgttgttcatacctgatattgagaccaatgtgataaaaagaatatgttcatctccccttataaaaagaaaaaaatataatgagagattgagacgactttcagatagtgtataagggtaggaatgtttcatatgaccccattattatacattatttggaacgatcaattacaaaggttggaaaaataccgagggtgtcgatccagtatgcgagttccccatgtttactctcttaaaataataagtctgggggagagaaagaaccccaaagaaaaaagagcacaatcagcaattttgaaactatggagcccaatgagaaattttgaaactatggagcacaataagaaattttggaagcttttcagcaatgaagatcttgaaggacgtttaaagaagctggtgtcgaaagacaccacac

SEQ ID NO: 619 - DNA, 2210 bp, Arabidopsis thaliana landsberg
gaaactgatcactgaagcagatggatatcaacctcatctcatagctcctgaacaaggttatcgccggctcatagaatcatgcttagtctccattagaggccctgctgaagcagctgttgatgcggttcattccattctcaaggatcttatccacaaatccatgggcgaaacatctgtaagaatatctctgctcaaagtcataaacccaacaacaacagtaacacttatgagttttgaagcatgattatgtgttttcatcatgactacaggaactgaagcaatatccaacactcagagtagaagtatcaggtgcagccgtggattcattggatcgaatgagagacgaaagcaggaaagcaactctgttactagtggacatggagtctggttacttaacggtcgagttcttcaggaaactcccgcaagattctgaaaaaggtgggaatccgacacattcgatattcgacagatacaacgatgcttatctccgaagaatcggctcaaatgtgttgtcatatgtgaacatggtctgcgctggcttgagaaactccataccgaaatccattgtttactgtcaagtccgtgaagcaaaacgaagccttctagacatcttcttcaccgaacttggccagaaagaggtaacaataaagatatactaaaaaacctatatgagcaaattgacaattgtataagatatgagtaagaatgttaaaatggtttggtgttaaaaattatagatgagcaaattgtcgaaattgttggatgaggatcctgcggttcagcagcgaaggacttcgattgcgaagaggctggaattgtatagaagtgctcaaacggatattgaagcagttgcttggtccaagtagagagacgagaccctctcttcacactccattttttgtttctttaggatacgtttccttctacatttttttgtctcttttttttttccatttgtcattgtattcggtgttcgagttatcattgtttctgaataaaagtttttgtaagacgatggttggcgcagtagaatatggttgaccaaattatttttcaaaaaataaatagatttcatggactgaagaaacatatgacgtgatctcctctctgttttaaaccaccggaaagagagaacaaaaggagcaagcaaacagaagaagaagagcaaactaaaataaaaagaagtacataaaaatggagatgcgggggatcgaaccccgtgcctctcgcatgcaaagcgagcgctctaccatttgagctacatccccaattgattatagtcatccattgtttataattgaaccataatcttggtttacgtttttgttttgtttttatgtcattaaagcctatacattttatgttgatgctggactaaccaaatgtgccaattcatgctgggaatattgtgttccctttagggtaattccaattgttgaatgccagaaatcttatgtcggttcacaagtattcatataattaatctagtaggcaaaacaagtttttttagatttttggaaacaaagatgaatatataattaaaacacaggtagctgaatttgaggcaaactaggttccatgtagaaccaacttataattcatatcgatataatatcgtacaaattaaaatcagaaaaacaaaaacaaaaaaaaacttaatccctttaagactaaaattttctgaatctatgtatagttattctaaaacctatatacaaaaatcaaaatagatatacaattaatctatattatatacaggcagccacgaatatacacgtatatttgtgttggtttgttcgctcatgtgttctgtaaaaattatcatgccagaatatgcagataatataataggataagtgcaataaagaactttgcctgaaagttaaagctaataaaaatatattttatatataaaaagaatgttcttaaaaaatagaaggtacctaattccctctacatattaaccagtcattgtggtattattccctttgtgtatataattagtcttgaatccattattcatttcctttgaataaaccatttgttttttagtataaaaaatctaatacctattaggctattaccctccaaaattataatccgaaaataacttattatctattttgacccaaaaaaaaaaaaagggaaataacaacatgagaaataaaataacataaattggaagaaaaattcataattggttggtcgca

SEQ ID NO: 620 - DNA, 4827 bp, Arabidopsis thaliana landsberg
  unsure (1)..(4827): unsure at all n locations
tgtttaagcaatgcagcctgaatattcacatgtttcgaccaatggaggggtataaggaagagaccatccagtttctttcatccgtggaattgttctcatatggagagtcacaagacgatggaatcaggccagacggaagtttgggatacttgtagttctgtgtgtatgacgtagaatatcggcttccaatcgagcatcttgagctgatgtatggatttcctagcggaaaagacacgagtcatcgttttgacaagagagagcttcagtcattctgggccacgcttagtaagtgctctatctgcgagagaacggaatggatctgttgtcaatggggcactacaattgatggagacagcgctgcaagagttgcttggttcagcatcgaatggtacggttctagttggagatcagacagacactttggtctcattctacctaatcgagcacctgctgagttgcagagaatgagctaagggacttaagaaaccaggaagaatggttctggaaggagttgtgacaccaattctgagagctagcaatgtacctctacattcaacgtcgattcctccaagatggattgatatgcaaccccttatcaattccaagagtttttggtcgcagtagaagaatggcctatataagtataggttcgattaccccacatcaggacaatccatttttctactcccaaaccccgcttccacttcaaccagagatggtggcaacattgagttttgcccaccaatggagaacctctatattttaagtgatgaagctgtgccgatggaaggagtgaatgatgatgagtctccaatccatcattacgctacacaacagttttacttcgaggagtactcaacaccaaggcaaagtaaagactcaaaagagattcacaagtgctttggtttcctccaaagcttgtgtaagttccaggacaaagctatcgcggcactcaacaagaagtttaacaatctccaactcaagatcagctgttcttcctcaagtacagcaaggcaatcatccttcgaacctagagaaaaggaaaagaggagcaagttgaaaaaccgaagaagaacaaggaaatcagacgctggagcaagcctctctactgcaccacttgaggagccactcgatcaacaacccgagcaaaaggtcgagcatccagctaatccaagttcagcacaacctgatccctggagttacacaaagtagagtatggacgacttcgtctcctcctacttaacctaaacgctgaggtaacaccacctcaaccattttacataccatagcatttttatttttctttgtgtgttttgtgttttggtcttgaattcattctcagatttttattacacaagagactgtgtaatttaagtttgggggagggttcaagacatgtttaacattgtgttctcttttcttatctcaaattttgcatcatctagggcatagaaaaaaccataaaaatttgaaattttttcagaaaatgatttcatcaaaaacagagtgtcatgtagattgcatatcattttaggattgtatatagtgtgcttgcatttaggattgctcatttgcatatgggataatgatgatttcaaaccgataagcatgttttgattatgaagtaagttcaatgcccaggttcttagttctttgttgcataaccgattgtatctctgaagtaagactgcaccctgctttgaatttgtaacttgactatacttctttaattcgaaactcgcttatctgatgccattccctatctattagaacatgaattgaatttgaaattatcaagtctatgcattgtttgtgaactcatggctaccatatacatacttggattatcttattcacttcaccaccctctgttaatccaagtagttgtttcacatttttagagcagtttcccatacccttagcctagccttatttcaagccaaagatcatttgtgtgtgattgtgaggcctttttcgattgaggttggtataacgcgttaggtatgaaccgacaagagcagtctttcatctagacctagcccacgctttttgggttagctaggactaggtggagacttgtatttgggattgggaatgtgtatggaatgaatgggaatgagagtgagaatgagaatgaaaagaaaaaaaaaaagaaaaaaaagagtaagactttagagttctaagggggatacaaaagtgttaagtctagtaaagggtttggaattcaaagaagttaggcattgtgattcaaagaaaagggtaaatcgccctatgtgctaagattagaataaaagccttaagtttgtcaaagtataaaaccaaacccgctagactcttaaatcgtttcaaagagaaccccttagaacttgaaccaaaaagagagaaagaatgagaaaaagggtagagttaggacatctatgggactgggatcatcttatgagctatcatactatatcattgggtagatgggagtttgttcttgtatgtgtccattggcttttacctttagcattctactgaagctcaatcttttctttgagagtcccttgttactcgaccaaaccattagaaccaaaccattagagggaccatttttgtctcttagcctaagcccgaaatcaagtgagttcataaccattgcattgcttgatccactgttcgtgcttaatgaatgttaaagggaatatgctgatttgaatgcttgaatagactaagtgaaagattaggttgtgttgtgaacaagatggctaaagtttttaagtagagatcattcaacctagcactctagaactagcaacatggacattgagactatctattttacatgcatattttggttctgaatccccaccttcaaacctcactcctagcctagttctattgttgcttgaggacaagcaaagagctaagtttgggggtgttgataacactagattttaacctttttaagcccttgtttttcatgcatttagcttagtttcaagtctctttttatgcattcttagtctcttttccttcttttgcacattttgcattgcattgcatagcatacttgcatttggagtgttttgcagatgaattaggtacttttggactcaacttggaggtttctagcacaagggatggacagactcgagttcgggggacctaaggaaggatttgaagtatactcggcctatgtactcggctggaggccgattggagcacacgtgaagaacaaggagcctactcgaccaaggcactcggctggaggccgagttgtgcacttaaggatgaagagaagctactcgaccaagccactcggccaagagccgagctgtgtgaccaagaccaagccactcggcttttctactcggcctagggccgagcgctcctgcgccgacttatcttttttgtcttattcccaattagggcaacctaggatggcctataaatagacctcttatgcttttgcccagaggatcttcgttttgtccgctggtttttagggttctttgattttcttttgcattttctggttgttctgttgagaatttggatttgatttcttctgcaaacttgtttatctcattgagatctatcttttgctaagtttataatgatttctgagttttatgaattttctgggttttgttctatgatgttcttgagtgttcttgagtagtgttcttcagagttcttgaggatgggttaggtttaggtggattcctctcttctttagctagctaagtgtttatatgcatgattcccttctgttttaggagttcttaatgctattttctttctgatcaattgaaaattgatttcagactttctccatccaaaaggtgtttgatgaaatgtctgaaccaactaatttcagagatttgtagattctagcccaaggcattggatgtttagactgcttattgactttaatagattggtgtttaaagcctgctttattatgtttcatcaatggaaattgagattaggaagttctaaagttatgagaatcattcacacggaagtggcttgatttggttttgaatctattgtctagggatagctaatggattgaggagtccactaagaccaattaccccattcttaagagctctgtttagtttattcgtgcaaaactcgtgtttttagtactctgttcgtttcgtgcaaaattggtgtttttagtattgtactcgaccttcttactcgtttgctcgaccgagtgctttacctagtgcttggtttactttctgttcttgtcatttgagtcctttatcttctgcttagtatagttttattccttaatttgatttgcatgttaacttgttgcttaggtttagtagaaacacatcaaacctattcacacttggcttgacttagtattctctgatcatatcctgattgatagcaattacacccatttggattgacaccttaaatgatgcaatgacataagatgcatttagggaattgacacaccgaaaacccttgtatcaataactcagccataacacgatttgtgggataataagtcagccacaacgttctaataactcatccatacatcgaaagaatctatgataagtccgccatctcgttataataactcagccataacacgatttgtgcgatgataagtcagccaccacgttctaataactcatccaaacattgaattaatctacaataagtccgccttaacgttagaatagctcagccataacacgaattgtgcggtgtgaagtcagccatctcgttcgnattgctcagtcaatatntgaaaatcgcttataatttaaacattgtacattcaacatcatagattcatacagacataaagct

SEQ ID NO: 621 - DNA, 1442 bp, Arabidopsis thaliana landsberg
acctactcctttggatgtttttttcgtggacccaaatattgtatatcacatcatgacagcttaatttcattttgttagctaaaattgttctcaatattttatcattcaaaccaatttttaaagggaatcttgcaaaatctgccatattccactctatttctttcaattcgtgctatattctgaaactcctttcaaaatctgccatattttggtccacgtggaattcagtggacgaaattacccttaaggtgggtcagcgctctgacgaagatggtgacataacagcttttggctgatgtgatgatacaggacgaaaaatcatggtggaagcataaaggattaggggacagaatagtggagaacaactggcttctactgttgttattgggtatttaaaaatgacttgtttaaacaaattggttatccaaaattctgcgggggacaacgtaatatataatacattaggagacatgattacctgataccgggggacaacgtaatatataatgcattagggaacatgattacctgttagcagaaaacaattggagtaagacttttgttttagtctccagatcttgtccccgaatagaaattctctgttgcatctacgttttgtcctcgatttcatcatcttgctctattattatgaatcatacatcttatatgcaattgttctcatttaagaattttgaattttatttagattttcgccatctattttggtccccagattagttgagcgttattgtcttcacatagatgctgaaaccatctattttttgccatttattttcgccatcttatatgataattttgaaagataatgaaatcgggacaagatctagatacaacaaagaatttatgatgaataaaattgggagacaaatttaattgaaagttatatgtagagagacaaaagcatttcgtttaatctttgggaagataatggtgtatggtcaaagtgcacggatttcgaggaaagagagataaaatagagaagaaatggtgaggacaaaattgacatttcccatccaaatgtggcatgaattgtaaggcccataaaaatatggcaaattgcataaggattttgaaaaatatggcataggatgtaatttttccatttttaaatatatatttgatatttactttttaaaataatacaaatatggataaagttagcaatacaaatgttatttgtcacttacaattgttaaaaaaatattctttaatgaattatttttaccctccttttggagcctttgcattttttttttattttttatttctaaaaacctatatatgtttattttagctttctcacaagtcacatctagcaattgttttggttgatgaaggccatgtttaatgcatagtcgccgcgactacggtcaggaaaacaaatatcacggtagtgaaacgctgcaagccgcgataccatt

SEQ ID NO: 622 - DNA, 4123 bp, Arabidopsis thaliana landsberg
  unsure (1)..(4123): unsure at all n locations
agaatatgtcataagaaattgccagcttctgacttatatctactgaaatctcaaataaccaaataactatgaatatctattagtagggaaaacacccttaactagggcggtgagagtgatattggatttggacatctatttctttataataacaattatatattcaaataattttgaagtaaaaaacatgtttttatttcgataaaacgttatttacctgaaattacactattttatttaacaataatataaaatttgtatatacttattgatttgataatactgtttaaacggtcacatgtaaatttgctcgttacttagtaaaataacaacaattatgtttttatgaaaaaatcattttggtcaaaccatgcaaaaataagagttctgtttgcttaagatcaattttgttttgtaaagtacttaagatcatttagcaaattcatcgatagtatacatatgtttccacttgtatgatattacttcaaacactacaagaaaacagtcgttttgcgagggaagaattactcgttaatctctcgcaaacaggtatacgcaagggatttacgaggaaaacgagttcctcgcaaatcgcttctcgcaaatggttatatgtcgcaattccctcgcaattgtaccgaggaactgttttcctcgcaaatcacacgcaattgttgcctactacttccctcgcaataactgcgacggatttgcgattcttttttaaccgcttagcaaatctctagcagaatttgcgatggatttgcaagcgttctgcaacgttttttctgatatattaagacttgattagtgtctgattagtctctaattacctagttaattagttgttaattatagatgattttgtatgcagttcaaagctgaaatttcattaacttgttctaaatagataaatacacaattgaagtttaaattcaaaaacaatattagattgtttgaaactctaagaacttgttctaaagagagataacaaggaaaaagcaagacaatgttttcaaaatacagttgatggaggagaggatcctgttgcaaggttagctagggcagcagctgctgtctcctcattggccacctccggttctggagcagtagacacaggtggttcatttgggttggcctgtcctgtctgtgtcgaggaaccacgtcgaagaattgcagccaaagcaggatctttttcagcaagatagtcaaacaggatgtcgaagctattgatcttctcagcctgagattgaatgcatgcttcagcggcagccagcttctgagaaagtatgaccggatcatcactaggaagcattggaccactatgggctgaggatgcttcaaactgcagagatccaaccccataaatccttcctttctttcgcggagcaacctgcaaagatcacaaacactcacaaggacacaacaaaaaaaccatgagaaacaaagttcaaaagaattcagacacaaagtataatgaataagctgccaagattacgagaactttatatcaaacactagagacacaacacaaacatttcagacaagtacacaacacagacacttcagacaagtacacaacataattcagagaagtacagaagtacacaacagaacagaattcaactgccaagtacacaacataagtcacacatggacacaacataattagacatgtacacaacacatagaattctgacacacagtataatgaataagctgtccagattacgagaacttgatatcaagcactggagacacaacacaaacatttcagacaagtacacaacacaaacacttcagacaagtacactaaagaattcaaacaagtacacaagtacacaacataacagaattcagctgccaagtacacaacataattctgacaagtacacaacagaattcagacaagtacacaacacaacaagctgccaagtacacttcagacaagtacacaacagaattcagtcaagtacacaacacaacaagctgccaagtacacaacataattcagacaagcacacaacagaattcagacaagtacagaacacaacaagctgccaagtacacaacataattcagacaagtacacaacagaattcagataagtacacaacacaacaagctgccaagaaaaagcacagaagatttacctcagtaaaaatcttgttcttggaatgaacagacaatccacctgatccagtgctctccggattgtccattgagcacatatgagactcttcctcttctatcctagatgtcactttcttgtaaatctcctctgacttcccatcgatgaaagttccatccgcttttctgtgtgtctcatctagcagctcaaggaaatcaggagttgtttctctagtcttctcacactgaaacacaaagagataaacaagttagattcataacattgtagtttaagtaatggtaaggagagaagaatacttatcttacccgttttcttgcacgagccatccggatcatgatatctagcatttctactgttgttactctttttctctgactttggatcttgccaaaactgtactagacctttccacacatcaggatcaatccattttggcttggcttcatcacccttctccttccaatttcctttccaccttgacacttgatcaaacatcctagactttagctttgcttcaaactcaacccttactcttttgttaattgaacggtcccagttatatacttgctacaaaacagacaaagcaaacatcagactatgaaaccaaacaacaaaacaagcataaacatcaaaagaacacagaacttaccgcaaacgtttcataccatcgatcgattgtagtctttgatgtctgtgaccaattggcatgaggttctttgaaatctctttcaaatatgctgcggattgttgctgcaactgtagagtcattgtcaaacctacaacaacagcaacaaaacacataaggatctctatgtctttatacttctaagaaactacaatgctaagtacaaccaacctaaatccagagacttctaaggcagaatcaaacttctaaggcaaaactaaccaacttacaagacctaattccagagactataagcttaaccttaccatagagtacccggaggacgctttgggtctagccttgtcaagccagcacgaccannnnnnnnnnnnnnnnnnnnnnnnnnnnnnnnnnnnagacggtcagcttgaacatcagaatgattgacaaaaggctgagtcgttggcgttggaggcgatggtggaacggttgaacctgaacctgaacctgaaccttgaacccctgagatattcccaccactaagcggagaattgacatgcaacgggtcacgctgttgttgtctaaaccggacataagtattatccgacggcatcttgcacaaaaaacaaatcaagtgttagatctgggaaaaaagaagtaagatcggagaagaagaataggtcagatttgagagaagaacttagatcggagaaacagaggttacctttgaggcaaaatagatcgagtcagagaagaagagccgcggcggttctggagcacagatcgaagaagaagagaggcggcgaagagagctctgcgccgtaattagatcggagaagaagagaggcggcgatgagtgtaacagattagagaagaacaagaagaagagttagatctgggaaaaagagtaagatcggagaagaagaataagtcggatttgagagaagaacttagattggagaaacataaattacctttgaggcaaaaccgatcgagtcggagaagaggagacgcggcggttctggagcacagatcgaagaagaagagaggcggcgaagagactctgcgccgtaattagatcggagaagaagagaggcggcgatgagtataacagattagagaagaagaagaagaagagaggcggtgacggaatcagatcggagaagaagagctccggcgccgaagagatcagagaagaagaagaaaaaatttagggttagggtttgatgcggctggtttgagctccgctcaaactaggtcttcgagtatgtatagaaatttatttcctcgcaaaaccctcgcacagtttgctttgaaattgcgaggaagatttttaaaccaattaa

SEQ ID NO: 623 - DNA, 1224 bp, Arabidopsis thaliana landsberg
aggtcgactctagaggatccccccttaatgagaaaccctattcctaacaagcagattactcagacatattgattgaagcaaacaacatatttgatataaaagcataaacacggtaaatagaataagggaaagaatggatcttttcactgtattaagaactggaatgagtacctgaagaacaggggatgaatagcttatctctctcacaatatggttttgcaaaaagcttgataagaacttgataatcgaaactagggtctaaaataatgttaataaaccctataaaacatccagggactaataatgcaaataaggaaatcttctggggcaaatttcctcttctgtaaatttccttttctttagcttttgctccaaaatgtctcattatctccattgttgtcccactacatagagtacttgaaaagacattaaaaagacctcgagaaataacataaagactcaaaatcctatacctaaaacatagataaaatcagtaaaaatagggatatatcaaggatgatggagcagttgcagagaattggcaccaggtatttttctggtggtactagtcctgaggaggccggcaattggcggtcgcgggttgagcggaacttcggttcgagcagatgcctggtggattatcgtgtggatttggcaatgcattttctagagggggatgcacatttgtggtgggggagtgtcactaccatgaggaggcagacggaaatgtcttgggcagattttgtggctgagtttaatgccacgtactttcagtaggaggcgctcgactgtatggagaggcgttttcttgagttgacacaggttgagcggtcggtacagaagtatgaacgggagtttaaccaaactcttggtgtatgcgggtcggggcttggaggatgaccatgcccagttgaggaggttcatgaggggacttcgaccggatctgagggtgcagtgtaaagtgttgtagtaagccatgaaggcgacactggtggagacggctactgagatagaggaggaccttcagaggcaggtggtggtagtgagtccagcggtacagccgaagaagactcatcagcatgtggcacctagcaagggcagcaggtgggaccagcaccagagcgattactggtacgcctcataaaactaattctcggtcaaagtcgacagaaaaaaatacaaattatttttagttatgtttgattaaaaaatttatatttataa

SEQ ID NO: 624 - DNA, 552 bp, Arabidopsis thaliana landsberg
  unsure (1)..(552): unsure at all n locations
gtatagttgaataccaccactaatttttgctattatatctgttctcatagaactatcttttgtgattctaattctgttttgcataacataaacatacaacatataacataaatctgaatagatattatatcataagtctgattccaatccaacatacaccatttaaaagttaaaacataatcattcaacataagtaactgcaaagccaaatacataactagtctaattccaaatttcataacagaagtaagttagtctagtcttaacctaattaaaactagctaacttggaccattgtttcttcactccctgcaacaattaacaatgtctcgtatcagcagctaaataaaaccaaagcacaaggatcacaacaatttcaaaacttaccctacattcttcaaagtcaataggtcaccaacttatccattaccctagattactctatntcatcagatggcctccaaactgctgcatcatctacattcactacatctattcaaactctagcgaacatggtgtaccttttgatctggatcgattgaatgcattcgt

SEQ ID NO: 625 - DNA, 2596 bp, Arabidopsis thaliana landsberg
  unsure (1)..(2596): unsure at all n locations
tacattcgtttgcctgtcaaagttcaaattttttttctttttgaatagttgttaaattgaatagttgtcacagttcagattttaaggataacacagtttttaactttttattcattttccattaaggatcatagtgcaataaaagatacatatggatcagtgacaacaagtctcgtgatctcctacaccaagactaagaggacaaagttctcaaaactaaatcgaaaaacaaacagaccagaacacaaccagttagatccaaactcttcaggactaaaatagactcaagtcatcctcatagtcaggatccaacataaacttttccttgaagtccttcaaattttgttcaagttgttgcacccgagtcttaccaagctctttcagtttcgtctcctaccaatccaacttaaaaccggcttttgtcagataagatagtgtagaatgtgcattggcgagatcaacattggagagtttctcaggggactggctcagaatctcattcaagcagagtaggctattcaagtatgttgttcttagatgtgtgttctccacttggaagtttgatgcaatgtctggatgctttttaaagagattgttcaaaggttctacctgcaagtgaaaaatgaacgtataagtagtaaaacctcattagatagcagtttttggagatccgaaaacatacccacaaaacatttatgcaggttttatagtgagatgtaatatgtattaaaaagtacttttcttacctgtgaaggaagaacttgaaacccattgatatcaatgctttcatgaactaataaagtttccactaacacatctgatttgccaacaacttcaagaacacaaacctcggcaacaatcttgacttctccattcaccataaacccaccatttacgtcaagaagttcgttaaggggaagcattgattgtaaacccaagctgggaagcttctgagcaaaccagggttgccctactataatgtcataatcaacatactaactgctttagtcaaagcaagcattgcacaagacgtacatagaatctcactacaacacaagcatttaacctttgtccgccttggaaacatagtcaagcaaatatagaaagaatcacctttctgtttggagagtttttccgatttttgattaacaacagttaggcgatattttatgtgtcttttccatccatcnangggggnncccccaaaaaagattcagaatcagcacatccacacagagacaactttattaatcctaccattctggatagcaaacctgcgttaacaaccatgcacacaattactactaatgacaaacataaacagttcaccttgagcccaacttgaatataaataatttccttgatggcaaagaggagaaattcttaatcgtccacgttatcttcttttcatattgctcttccattgttcttgatgaagactattcacaacgaaactacgaagtttgttaataacaaaaaatcaaacaacaacttaaacacacaaaaaaaggaaagagagaggaagatacactatatgagttcgaagtttttaaaacttaaaacaacacaaacacacatataagaattaagtacacaacacttcatttttataagcatctaataggtttcaacgggaattgtgttgttgacgaaaactagagaaatgtgaaacgctttggctcctcatagctcattggtgggctgataggactaattattgatgcgaccacatatattgatcatgattacacagtcccaagtaaaaattgattttgctttgagtccaaaggaaaagtagcaagaagaaacccattcattaacaacgttttttcacctaggctaataaagtaatgattcacctcttaatctcttataataccaacaaattgaaagaatgctaggttattccattgagctatttatgtagttttaacaaacaaatgtttcaacttcttaatttactccttttatcagttatctttgaaattccggatgaaccaagaatcgtattccccaaactcagaaccactgagtatcactttattagaaatctgattaagaagtttacaaactaccttaattggttttacacaagatctaaactactttagcttgtcacctgagatttccctaaacacacaagagcagatcacaagaacacattctttgatctttctataatttcaatcagactaaaccttagtctctaacaatgaaaagcgttgcactagctttttcactcacaatcacggccaagtctaacaagaactttagcacctctatttataccatcgaggtctttggtcttctaggttagccttcgagatcttggatcactccaaatcttcgcgtgaatatcttctttccaagctgaactcctcctgttgtggtctccacgtcattcgttcatttggcggcatatccacgtcagcatcaatgacttgatcttcactttagtcctctgaaacagcttccagcttgttccagcaatcagcactccttctgattgtcctgacagagggtgcactaacaattttatctaaaaaattgtctacttctttgttttcaatgactcttacagtgtgttgtacattat

SEQ ID NO: 626 - DNA, 1405 bp, Arabidopsis thaliana landsberg
caccgacagatccaacattacaacccgattttaaaacgggtaaacaaataataaacacttccttatcgccattgttactctgttttgagatctccctccacgcacatatcatcagatctacacttcccactcaaaattttccagaattcccaaattcttctctgtatatttcctctaacactctcgaattcactccctaacttgtgatttaaaacaagtcttctcaaattttgttcatctccagctacaaaaaaaatggcgcagcaaaagttccttcaccagcgaccaatccaaaacccattcacaaacccattctcttcttctcctctttccacttcttcaatctcaaatcgtccaatctctctactcagccgcaacggtctcctcctccttctcgctctcctcgttatcctcggcgtattcttaccctgggcaggatctcctttattcccgtctccaaacaaactctctccttctcaatccaaatggcgcgactattccctccctcaagctgtcaaattcgtagctaagaacgggactgtgatcgtatgcgccgttagctatccttacttgccgtttctcaacaattggttgattagtgtttctagacagaagcatcaggatcaagttctcgtcatcgctgaggattacgctactctctacaaagttaacgagaaatggcctggtcacgccgttctcattccttcggcgctcgattctcagaccgctcacaaattcggttctcacgtataatacatctacacagagttttcatcttctcgatccaattttatctctagcttccagttcatgaaatctagctgaaaaatggctttgaaatctgagaatccatacttagttttgatcagtgattcacttatcttgaatgttcgttgattagcttgtttagtccctgaggtttcggttttaagctgtgttttggctgatcacatgaataacaaaagatagtgaacttgtggatctagtagcagccatgttttccctgtttctgtatgtgatagtctatgttaagagcttgtattgcaatggaatcgattgtttaaactaatttcttgtatagggattctttaatttcacagcacggaggccgcaacatctcttggaaattttggagttaggttacaatgttatgtacaacgatgttgatatggtttggttgcaagatccgtttcagtatttggaaggaaagcacgatgcgtacttcatggatgatatgactgcagtatgtatattttttctcagacatcttcttcattgatggtatttggattagtgtatttattattgtcttgattgtggtgtcagattaagcctttggatcactctcatgatttaccacctccgggtaaaaaaggaaggacttatatttgtagctgtatatttt

SEQ ID NO: 627 - DNA, 506 bp, Arabidopsis thaliana landsberg
gaaaaatgtcactttatggtgtaggatgggatagtttttggttacatgatttctgagcatggtatagaggttgagggagccaagatcgaagtcatgacaagccttcaggcgcctggaaacgtcaaagcagtgaggagtttcctaggtcatgcatgtttctacaaacgattcatcaaagattttagaaaaatcaccagaccattgacagctctactctgcaaggaagtcaagtaatgtgtgatgagagtgattttgcagttcgggttgttatagggcagagaaaggataagaaactccatgccatctattatgcgagtaggacatttgatgacgctcaaacaaattatgcaacaaaagcgtaagagtttgtagctgtagtgtttgctttcaaaaagttcagatcttatctttgtggatctaaagtgattattcatacagaccatgtagctcttgagtatctgatacaaaagaaagatgctaagccaagacttgtgagatggatttta

SEQ ID NO: 628 - DNA, 1724 bp, Arabidopsis thaliana landsberg
ttagcataacttttgcatcgtggaggactgttttttcttcgacccacttagatacataatcgggcggggaccaatatatatttgttaccgcatgaaaataggaatggacccataaaatcaattcctcatacatcaaagatctcaacttccaagattgggttctgaggcatctcattttttctgctgatgttgccctttctatggcatgaatcacattttgaaacaaactcctcaacatccttaaacattggtggccaccagaagcctgcttgcagaatctttgacactgtcttgaatgttgcaaagtggccaccatatgcggagccatggcaatgcagcaaaataccttctacttcatcttttgggacgcatctcctgtagatcttatctttacaaagagtgtaaaggtaaagctcatcctagtagtaatggtgtatgtccctgaaaaacttcttcctttcataactggtcaagttggggggatgtactccgcatgccaaataattgacgtgattagcataccatggagatcttccctcaacagcattcagttggtggaactctttcccgctgtaactctcaccgaagaattctacaaccatgagttgttcttctggcattgagtcttctatcggaatgggttcttcaattctcatccttgacagatggtcagccgaaccattttcagtgcccttcttgtctactatttccatgtcaaactcttgccccagacgtatccatctcaacagtcttggtatagtatacattcttggcacacagatgcctcaaagcagcatggtctgtatagagagtgacctttgatccaaccaaatagcttctgaacttctcaaatgcgaatacaacagctagaagctccttctcagttgttgtatatcttccttgaggttcatccaacgttcggctggcgtaatatatgacatgaagcgtcttgtctattttcatgacatgaggtcacgcacctctgaaatattgtaggagcattgcataaaccaaatgacattctcctgatcattagggtgaattggtatttgaaagaaaccactatatccatcaagaaagcaatagtatgggtgattagctaagcgttcaagcatttgatcaatgaatggtaaaggaaaatgatcttcctcaatgcagcatttaacttgctataatcgatacacattctattaccacttatagtgctagtagggatcaattcatccttttcatttttaacaacagtcataccgccctttttagggacgcaatgaactggagaaacccaagtactatcagatatagggtagatgacaccagcatcaagcagtttcaaaatttctttttccactacttctttcaagttgggatttaaactcttttgtggttcaacgctagagtaggattcgttttcaaggtggatcctatgattgcataaactaggtgaaattcccttaatgtcagataatgaataaccaattgctctcctatactttttaagttcaggtaatagcagtttcacttcatcatcatttcactcagcattaatgatcatagggtaagtagagtttggaccaaggaatgcgtaccttagaccattaggaagtggtttgagatcaaccttcggtgccttaagttcagaccagtcatccgaagttggaatgatcagctctcaaaagaagctggcagtcgaggtcgagtcgttggtcgagcatgttctcgag

SEQ ID NO: 629 - DNA, 1125 bp, Arabidopsis thaliana landsberg
gagtctcttggttgacgaggaggataaaatggttgtgtgttctgatacaatgtgttctgatacatggagtgttactaaaacgaggacccgaatttactttgctaaagaaggtatacaagttcatcaagagattgcacagaaaccaaaaaaatgtgggccatttctcgtcagttatgttccaagtttggttcaaattcagtcaggtaataaacagagtagctgaaaaatattcattgcctttttttttataagtattatcctttacttttcaaatacgttgtttatgactgcttaatgaggtatctattctcttggcaactcttttttattaatacagtatgtgtaagcatatgaataccgaaagcaaaaagagtagaaagcaaatcagcgaaagtgcatatctcaactccctaaagttgtgacatattgtaattgtatctccaacacaaacacaaacatctgtgtatatgtaaccatatatgttcatgttgtttcatgaaattacatagactttcttttgttccagcatagtcgatattatcaggaaagtcatcgaggttatatgcattaggatcaagtacacaccaagtgttgggctgtcttgtcaaagacttgtccttgcctttacccgagaagtcaagcacatatttcggtctcccatcaaactctaagatcccccaatacctccggcgctatactcttggcatcctcatagacaaggctgaaaagttaaaaatccatgatcactcctttcctcgcaggcgttccatttccagacatagcatgctttaccatcccctgattgaatctctttgcactctttacattagcgttcttgtctccatccgtacgccatatatccgtaggctcgtttccaacagctatgtacttgattttgatcttggatcatacataacacatgaaggaagttggctttaagaccaagcttcaacattgtacctctgtgccttctccaaagccttgagccgccgtgaagcaacctcctttgatcctcccgtctcttctgacacaatctcccctaaagccgacattacatcaaatggtatatctgtcgacgagccagccacataaacgacagctccatcacataacagatcccaaact

SEQ ID NO: 630 - DNA, 512 bp, Arabidopsis thaliana landsberg
ttctgcaagtaataatctatatatattaaaaaaaaaaaaaaatctcatgtatttaaattgatgttcttgtggttggagaagtatgtgttcagttggatctctggtttgtaaaagacttattaaaagagtcggttcaggggcttccatctctgttcaattattgacctatctttaaaagttcaaaatctgatagatagccggtcaaatttttggaacattgatcttttgaaagagctctttgacccggatgatgtccagctaataagtgcactgcacttggatgcgtcaacaagggaggatttttcgggttggcatttcacacaaaacggaatctatacagttaaatccggctaccatacagcacagatggatatcttgggaaataactcctcttctattggcctagagatcaaagttatgaaagcacaagtgtgaaaagtgcaatgtccgcctaagttgcgccattttttatggcaaatattagcaggctgcgtgcgagtaacagagaattt

SEQ ID NO: 631 - DNA, 1281 bp, Arabidopsis thaliana landsberg
cctcgcaaattcgcgagacgtttgcgaggaaactgggtggaaagcacgattcttcgcaaaaacatcgcaaatttgcgagggagttgcgagtaacataaatccattgcacattgcgacacctttgcgacgcgtatgtattctgtagcaatttttgcgacggatttgcgagtcttcgcgggttaggtgagcacgttttaaattatcttaccgaactggttggtaggtgggattccctcgccaaattcttagcaaaaaagcttagttccttgcaaatccctcgcaagcggcctggcaattccctcgcaatatttttttggacatctataaattgccaacgtaacgtctaagaaatcataactcaaatcacaacatttacttacaaacaaaaaaatcttttcaaaaaaaaaacttcttacaaaaataataatgtcttggggtggagagtatgagatttacacattacgaagttggatgtacaatcatagagatcaagcgaccggtgaggtgacgagagagtattgtgacggactgtgcagtttcaatattctgtccatctcgtaagtgtctcaatgagaaatatttggaatttaatgtagtcaagaaccatctttataatagaggatttatgccaaactactatgtctggttacgtcatgaagaggattggaaaccctaatcgaatctttgtgtaaccctacaactttgtgagggatttgctacgaggactcgcaagtcccttgcaaagttgaagcgatttcattggttgtttagtcggttcctcgcaaatccctagcaatgttgcgagggatttgcgaggctatttaagtttatatatacaaccacgcgagtttgagcgaagctgaaaccaagccgtctctcttccaaaccctaaaaatttcttcttcgtttctctctcgatctgacgactgccgaagctggtcgccgccgtcttgaccttcgtcagcgatacagagagccgtcgtgtcttcatcttcttcgccgtcgtctggagcttctcatccacacctgttcttcatcgccgtgtacctggagcttcttcggcgacgtctgttcatcctctccgctgtgtctacctcttcttcgccgccgtctggaacccaaaggtaatgttttgatttgttaggattatcgattagttttttgtgttggtctttcaaaacctagtgttgaatcggttttaatctgtcttattcgagtttatatttggagatctaattaggtttctagttgcatgttgattttcattgtagatcttattag

SEQ ID NO: 632 - DNA, 1087 bp, Arabidopsis thaliana landsberg
ccaccgcgtgcataccagaggttgtagccccgcttcatgatccacctccgcctctgctgcatcctatgcaggctcatgtgcaagagacgacgtacttggatgctctcacgtatttaaaagacgcgagcatggagttcttcagtggtaagtctgaccctattgtagcggataactggaggaagaaattggaaagaaatctagataacgttcggtgtccacaagcgttccgtaaggagttagcagtgcaatacttgaaggatgaagctcaagtatggtgggatatattgttggccagacgcgtgggcaatatgagttgacttagggtggatttcaaggcagaattttcaaggaagtattttcctagagaggcaatttaccggatggagcacgagttttcaaagctttgtcaaggaaacatgactggttgagcaggttttcaagccgaaccttagatgaggaggagcttgttcgcatgtttattaggggtatgaggattgaacttcagaatcactgtgagatgaactactacccccaacatgactgagctagtagaaaaagctgctaatttggaaattgggctggaaaaagagatggcggaagctacgaagagggtgggttctcacaaaaggacctgggataaccagatgcgagagcaagctcatatgtgtgttacttgtggaaaactacatagcgaagtttgctggatgatctcatgaggttgctcgaaatgtggtgatttggagcatagcagagagaattgtccaagaggacttgatcattgtcataggtgtgggcggcgtggtcaccatgctagagattgcaagaggcaacaagtcgaccgaaatgaggagcaattaccgccacctccaaaaagaccggcattgggaagaggcgattaatttatgtcgaaactagatttatgtttgaattatgtttcttatcgtatttggagtttaagttttatgattcatttagtaattgcaagactacatgatatttgattcattaaaggtcaattgaatcttttcgagagttatgttttgaatagttcaagccgtataacgatgaaatcataattcaatagtaa

SEQ ID NO: 633 - DNA, 1597 bp, Arabidopsis thaliana landsberg
  unsure (1)..(1597): unsure at all n locations
ggtatatatggtcattgacaaacaacatctcaagcggaacaagtgtgttttattccttatccatacacgaaaaaatcaaagcgggagtggctcaatgttttaaaagtaaatctaatgggaaacatattaggagaatatgaaaataaagaccaaatgttgcaaacagaaaatgatgattttgttttaatgactacaattgaagatcttgtactcgacaatttgacagaaaatcgcaaccccataaacctcaatctagatgtcggagatgcccagaagatggattccgatgtaatttatcgtcttctgaagatgaagaacaagaagacgaagaaaaatattagttttgtgtttatgatatttacttaagttattatgtttaattatgcaaacattttaaattattttgaaaaactatttttgactaagtatgttttctatgtttaattatatttgtatgtataattattatttctgaatatcagcaggcccaaaaacacaaagcccaaacccaattataagaatttaaatatgcgacttattgctgacattttagcgactgtaacaatactattgggccataaaaactcgaggcccaaacccggtgactaatttgtgacatttttacgactacaacaatattattgggccaaaaatttcataccaacacaacacggtcacaaagatcattacccaactaaaccctaagaacaaaacacataacttaaatcctaagaacaaaactttcagactttcagaccaacacaacacgagacataacaaagaatcaattcagacattttctcaatctaatcaatctcacaaaactcattactcaactaaactgacattgaaaacaacatgggatcacaaacaagagaagaagaagatcataccatattgtattcggtcgaggaatgggagagaggacggtgacgaacttatccctctcctttagggattgaagtgtgtcctcctggagatccggcgacagaggtggatattcttcgaagttgttgccttaagaggatgggtgactgtgagcccgagacttttgaactgcagaaggcggagggtcttgctgagaaggcggagggtcttgttgaggagccggaggaacctgctgagtagtcgcggcttgagtcgctggattgttctgcacttccacggaggcagacctttgcacttcaggttgtcgactgccagagtgctggaacaactgtagaggcggcggatagttccgaacatgagctgtcgttgagtgtaaaggaggaccggcggcttctgatgcaggcgtctctagcagaggcgaccgttctgctgccggcgtgaaattgtactnnnnnnnnnnnnnnnnnnnnnntcgaccagccgtggatgtggaggtctctgagcaaggttaggactggttcgcttcttttttctcgcccaaacatgatattaaggaaagatctagatgagacagcaaagaaatcgaagaagaagaagagagattaagaggaaaacgaagagggatcttagatttgctagggtttaaagaggaaatcgaaacggagagtttgaacaaagaagaagctgcgaatgttcgaagagaagagat

SEQ ID NO: 634 - DNA, 1522 bp, Arabidopsis thaliana landsberg
  unsure (1)..(1522): unsure at all n locations
attatatctagttcaatccattgctacatttttcaatatttttaatggagttcttttatttaaactagaacttgtaaggaagtgaattgggtgaaaaaagaaacatagtttgaattaggaaagcttaaattttgaaacataattctctcttctttagacatcacttattagcttaccctctctgtacgagagtatatatgtaaggaaacatgatttgatcaataacactttaagaaaaaccaatgtaccacttgtgaatatgatatcagagctgaaaggaatattgaaatgacttgacgaccaagacaaacaaaaagaaacacacaaagaaagatatagcttatttagtcacctctcttactctgttagggtattcatgcagcaaatgacaaaattttcattgctctcgttttcaatacatttatttgcttggttttacattaaaccacactcaaaacaccttttgtgtttcaactttggtccaaagttgtggtttcaagtaatttgggtggcttattgattagtgaatataactggaaggttactagtgggttggatgttatctagctgtacaactttgtaactttgtaagggagtgagtttggtatagaaaagaaaactcagtgcagagacaatgagaaagctttgttagtatatgttttaagaatcacttttgtcatagaattagaagagcttttagtttcggaacataaatattctcttcttaaaaacattacgagacatggtttgatcaacaaaaataaaactgtgtttaaagcaaggattataacacactagggcagttgaaacataaatatcttcataatgccacatcttcataaaaataccaattcaaaggatgaaaacagaaaaggaagagattaaatgtagagcttgttttagtaatctcttttccttttgcttccagctagctcgatatgacccaaacttggaacataattagcaataattggcgaatatcctccaattgtctgaactccaaaattcagtagtatgaatttagtatcctccccaacagctggaacattctcctcgtcttcttcctccatccatcccttactcttacaacacaagacgactttcttctcctcgtctagcaggaaacttaggccatgccaaaaaccaacgtcaggcttcggatacaatgataacaccttgctccacgacaccacattggcctcaccaatcttacttgtcacccatacctcagtcttggatgtagaaccgccctgtactaacaccgaaagcttctcgtctccgacaacggaaagattagaagcctcaaaaccatgcacttgacaggggggaggcagagaaacataaccaaatctctctgttccaaaatcaaatttgatcaaggttatgcgaaagtcccgtggcnnctcgcttctatctatacccaaccagtaagtgtttcccttcaaagagaaacactctctaaagtagtccatgtagtgcggtggcttggatatatcatcaataaccttcatgagtcaaagct

SEQ ID NO: 635 - DNA, 293 bp, Arabidopsis thaliana landsberg
  unsure (1)..(293): unsure at all n locations
cataaaccaggtgaaattccttttatancagccaattttaacttaatttccnncananactnnctaagctctnttaacaactgatgcacttgttcatcacttaatccattattaataatgacaggataagtatcatttggaccaaggaacgcgtacctcagaccttttggaagaggcttaaggtcaacctttggagctttgagttctgacaagacatctgaacttgcattttccttaattctttacataaacagatttttgaggtacttgtgggagtgtggaatgagcatgaa

SEQ ID NO: 636 - DNA, 550 bp, Arabidopsis thaliana landsberg
  unsure (1)..(550): unsure at all n locations
tttatcgatagcatatgcataatttaaatgctatcaaattgtgaatcgcgatcaaatttttgtttacccgcaaaattaaaattgactaaacctgattaaaagaaaaaaaacattttacccagaaaaatcccctttctctcgactcacgactgttcgactttggttctcacgacatctcttttctcaaatcctcaatctcgttctctttgatttcagatttggaattaaaccaattgataatcgatttctaatttatctgtatgatttggcttgtttttgcagttcaacttagggaagaaccgaaaggtatgtgagatttatgatttaatcgatttcactatataaaagtgttgggttttaattttaaggtagtgatgatgttgattttgttttggagacggttttcaaagctgcaaggatttgttgttggcgactgttttacctctgtaagctgtattctcatactaatttgtttcatttcagtatgtgttgatttgattgaaagttangtgagtgtattattgcttgaatttatcatcacaaaatctat

SEQ ID NO: 637 - DNA, 605 bp, Arabidopsis thaliana landsberg
  unsure (1)..(605): unsure at all n locations
cataggataaaaanagagttgaatatanncttatgaagcatcngcatcatagaaagggacctgggattgtttatttttataaaagaactactccaaccatactctgctattgctatgcacataaaatcaagnnntacgatgtttgtgtttcgagagggagggtatcatatattttataggtacttttcagcatatagggttttagggttttacatatgancggcgtaaattaagggttttagggccaaatccgtcagttcatattctgagagcgaacgtgaggcctttcgacatctgctttaatatataagatggagccattctggttacaccattccacattgatatgtataagaagagaaagcttcttattataaggcacaacatacctattgtcacatttaattccacccttcttaacatagtcatcagtttttctttttctatagatagcataaccatcactaccaacctttgttatatattgatgttttctgggataaagtttagacattcttcatcaacctacatggataattgacatttggtgaccatatggaccgtgaatcatcggagttttgatacttcatatagctttggttctt

SEQ ID NO: 638 - DNA, 1028 bp, Arabidopsis thaliana landsberg
tgcattttgtagagagatatgtattggttggtttatgtgtattggttttgtggagatatgcattttgtggagatatgtattggttggtttatgtgtattggttttgtggagatatgcattttgtagagagacatgatactgattcaagaaccacaaccaccataccataactcagtatttccactagcagcaaaatgaccagtaacaggactcgataaaatgacttaaacattgtttctactgtgtaagcacatgagcaagtaagaaaaacagaacatttctcaacatttgattcataatactcgagcatcaagtgactgcataccctatacatcatattcattgccaaaagatgtcctattatcaaaccaaaaatactctccaagtaaaaacagaaaaaaaacaaacaaagttttacatgtgcagatagcaggagaaggaaagatgggaatcatagtaattataaaggcatcttacaagtaggcgagatgaaatgatgcacttactttgttataaaacaacagtccatcctgtataagctgagtgaagtccgctttggtcgcagttgtaaaaaggaactacactgaacctgaacttgtggtaaaaggaaggcggatcacaagcaccagtctcaacaagtttcgattgtaaccaaaagaacatgaactctgttgtacattcataaagcgagtaacctctccaacaaaccatatcaatcacatagtatgtctgatccgactgcataaaaaacagtaacaaatcacctcctagtgaaagatacagtctagtatagagtacgagtttgcagtaaacaaccagaaaattcataatcccaaaaacacttaatattataaagagtatagataattgtttacaacctaattcaaaagcaaaacttaatcgtcggggtctcgggtgttgttcaggttcagcagcacatccaaaacaacaaattccacaatcaaattgcaaaacacttcacgattccaaacaaaattgcagagataaattctttcaaatgctgaaca

SEQ ID NO: 639 - DNA, 717 bp, Arabidopsis thaliana landsberg
  unsure (1)..(717): unsure at all n locations
aagcaagacaattgataaagaaacaacagtattttaagtgtgatcctctaacgggaacaaaggggtaagaaagcaagatcgattgaaagagcatctgcaactctactgacccaagagacatgcatcatctgagggccacaagcaagagaaagcatcacagttagccacaggtaaggaaaagcattcaaaaccttcttgttgtagttatcggacacatcgttcaatgcccaccaagttgcgaaatatatcccaatcttaaccttctgtctcgattgattcaagaacttggataccaatttcaatcggacgagaccgatcagccttgtaagctccagaaatgagaaaagatgcttctcaggtaaaggattaggcttttggaaatttatgataatggataagagagaaaattgaagctttgcttgaattgattgtcttacgtcggcgattgcattaaggaagatgaaattaaaatacaaattaatgattcgttaagcaaaaccaaacaaatttgaacttgtctgtactatactagacaaaccattgatctacgaggcaaagaaaatctaatccgttcacagaatgatggatatataaatcatcatataaataaaattgcgtctttgttatatatatagtcattttaaggtccatcacgtccatcacacaaatgaaacacanatccttttctgatatcatacctttatatgaatacaataa

SEQ ID NO: 640 - DNA, 960 bp, Arabidopsis thaliana landsberg
atttcgtctaaatatgaaactgataattttttaatatttaaattactttgtttgtaatttttttatctaatatatgttctgaattatacaatcagagggcttaaatctaagttaaatcaacacttattattaaagcagcaaattagttgatataatagtagaaaagaagatgactttaataaatatatacagtaaccattcatatgagtttaacaggacaaataactggtgtaaaataacttagatacttaaatgcaaagacatttacatacttaagccaagacataatgcaaagacatttacatacttaaatcaaagacgtgaaacataaataatagaaagacatttacatacttgaagcaaagacatgaaacatattttaataggtcgtaacatgatcactttttttctttctttatctcagccgtggacaacaatttaggctttgtagatgacttttgagctgcattatctttcgatgaagtgttcttagaagtcttgatagacgagttgctgttttcatagttagccgcctcggaagattcagtgtcaatctaaacaaaaataaaattcaaaattttaaaatacataagcacttgaaaattaaatgtaatggaacgttagagttattacctgatttatagttgcatttgaaggggtagagacaatgttcatgtctgaatcaggttcagtctaaaaaagatatcaccaaaataagtacttatccctaaatgaaatttgttgtctatctaatgcttattcagtagcaaacctcgctggtagttaagtttgaaaagcttgagaccatgtgagtgtttggatcagttgtgttctgtaaataaaaaaaatcacattaatgttgataccatgaaaaacgaatgtaactaaaacgccaaagacaaaatgatttaccatttgcaataaattttcctaaacttttaacaatttcgggtgtgtccg

SEQ ID NO: 641 - DNA, 654 bp, Arabidopsis thaliana landsberg
gggggcggttttcggtcctgctccgatttaaatctccttctttaccttcttacatcaagtaaagattggtctgttcatttaagaaaacggccagccgtctcccctatgcggaaaagggaaaagctcaataatttcctcacagaaccctcaacctcctagagtttaagtccctgctttcaacaaccctgagcttctttgaagacatgaactcacaatcatatgaaaactcatcaatcctgcaatccataaggtctttttcatcaccccttttccagcccggtgggtgcggacctcggaaacagcctcttccagtttcagttcgccaaggaacctaatctactcaaagctttggagaaccaactcttccatttctccaaatcgatggttatcctccgaaggtgggaccctacggtagacaagtcttttccgtctcatatcacttgcatccatgtccaagaaatttgatgtaagttaaattaatcttaagaacactctctcaaataaagagatcaattgcaatagtttaagttcgaattccacaaagctctcagatcacagagtagactaatagaagattaatagatctagctatgatgaagattcgtatcgaaccgttttggaactcacatcactaatgtaaactaaccaacgcta

SEQ ID NO: 642 - DNA, 2104 bp, Arabidopsis thaliana landsberg
gtattcgaagtcgagcaatcattttcagttacggatctaattcgagcagcttcaatcaatttcttgcaatattccttgttgaagttcttttgatttgttctgcaaaatctaatggagcttcttcttcttcgtcttaataaatttgcttatgctgcaatcccggcgcttccctcctccttggacatcccattatcaacgccaccaatgcgcaaataataatgccaatttttattttattttttcgtttatttttattaaatgtatttacctttttttttttttttttttcaaccgatataaattaaaactcaaaagagtcaatctcgagggatattgtttacatacgtgacatgaacagtctgtaaagaaagctacgttctggttatctgctccaatcatgcacttcatcgcccaaagaagagcttccatttcggtatgtagaggagataggcttctacgaacgttgacggctctcatggttggcgactctccaagagatgatagacagaaccatcctgttcctgagaactggtcacttgctttccaagatccatcaataaaacaccgaaagccagaaaaagttgtatcttgtgatacatccctcacccaaattcgattatctatagacaaagaaccatgactttcactatggagctcgacttgagcttcctgccacgattgagcctcttttaccgctaagagcaatatttccattggatctttatccacattttcaaaacctttttcatttcttgctttccatatataccaaattatccatgggtaaggagccgaatcgacgcctgaaagaattctccaaaacaaatgtgtttaccttctccaaaatgtgtttacctttggatccatggaaaatcattagttttggtgggaaataaaaaagcaaaatgacacttttgccaatttttattacactgtcctaaatttatcacaaattttagtttattctttacaatattgcacgtggtttttatactttttgctgtactttttcataacgaattaacgagtaaaattaaatatggcgtaataattaatcaataaatattttaccggttatgtagtttcgaattcaaattcgaatgttgttgaacattaaacaatgagtaaattctttcactgttaatagagcccattaattatttatataggcccaataattaggcctattcagtattcacgatccttggcagaaatatatagcggcacaaaaaaaaatacataatcggttttgttttttccggtggatgtaatgtcgaatacaccaaaagacggcgacggagcacaggtaattacaggcggcttgttccccgtcttccctacttcggcgaactccatctcagctattacgaatgctcctcaatggcttcgcaacgctagatatcaaaacggatctctctgtcatcaacgctgccgcttcgacggctccttcctcatccgaggtcgaggctggagacgacgaagatgaagaacgaggagctgatggaaatatcggtttagctaatcaggctagggtttataatttggttgaagaagaagggtctttggagtctgatgacgacaaggtaaagaggaagcgagagaaaaagaagaaacggaagagtgataatgcttcggatgaatctcgttctcgtaaatctgatgaatactattcgaaacctgtgaaggattattacttggacactcgtcctgatccagataatctggcttatggctctatttacaggtactttgcttataatttgtctagttatggttggtttcattttctgtattctgtgcaaggcgttttaagagtgtagggatattgaaattttgcttctgtttgcataatacaggatgaatgttcctcgttataaacttgacaattctcagagagttccagggtcaggttctctgaggttttatttgcggaatcgacgtagttctatgcttgacacagagattgatattgattctttggaggggagagcaaagtctgatacccgatactggtatgcaaaacatgctgccatggtgcgcaacaagaatttcaagcgtattcgtttatctgcttcaagtgaagctgtggattcttcctatgata

SEQ ID NO: 643 - DNA, 601 bp, Arabidopsis thaliana landsberg
acgccatacttaggatgatcagttttcagaatgaggaagtgcttgctaaaaagttcagaattagactaaggttaaacactgttccactctagagagaacctcatattcaatcaaaagctatatgtagagttaaaaatttggaatgaaaatgaatcagcggaataaattcaccggagagcaaaatgccgtatggaaaagaggcgcatgatgagctactcaagatggttgaagggaaatgcttgaaggtgttagtatatacagaggatcgttatggaagatgtgtaggagatatatactgcaatggaaaatttgtacaggaagtaatgctaaagaaaggtcttgcttggcattatgtagcctatgacaagcgtgcagagctcgcaaaggcaagcttttataaacctttgtgcttttcatttacaattttctttgattattccttctgatgtttaacggtttgttttggtgttttgaattcagtgggaaaatgaggctaggcaaaagcgcgttggcttgtgggcatcttctaatccagagaagccatgggagtggagaaagaacaaacgtggaggcaattaatgatagcagaaccaataaaaac

SEQ ID NO: 644 - DNA, 782 bp, Arabidopsis thaliana landsberg
taacattatattctcacctcgccgtatctcacgtcgcaaagacgttttgcatatttcttctcttcgtgtgatatttttagataacttaaattaaaagctagaattttagataaatctaaaaatatttttaatatatttcaattcaacaataattaaaaaggtttgggtcaatatatatttagtccaggatattagctttttcatcgttagtttgttaacttttcatgatctatatatatattcattatcttgctacatttcaattatttcatacatcaaaaatcaggaaaaaaaaatacaacaagaaagcaaatcacaagatgatcaacccattagcaagacaaatcctcacaaatttgatctaaacaaaccctattatggcgaagaagtggttcatcttaacgaagtattggaacaaaaggatattagagcagaaaatttccgatctatcgagaagacaatctctactcgtaattttgatctgaaccatcagtatttcgaagaaggagattctcaaatcaacaaaagatggaatgaaattaaactggaaatgctgaggcttttgctgcctcctcgaaatttgaaggattgatttggctatgacttaagagaaaataattatcttatactctatttattaagataattatcttatactctacgtagcttcaatgtcaaaattgattattgaattgttatttgttaaaatatatgattggatttgttttcaagatttgttttgattattgctttgttaattaaaaaacgtgtgatgatatgga

SEQ ID NO: 645 - DNA, 665 bp, Arabidopsis thaliana landsberg
accctagtgaaagggaaaaataaaataaaattagtcgaccaaagagccctaaaaatgataaagaggcggcttagaccacgacgaataagagtcgtcactcaagcatcactatggtccagtccctgtgaaatcgataaaggtgcttcacattggtactaattaacaatgaccacaacaccaataaccaaagcctcaagtgctccaacactagacgcatcaccataccttttacatccagatgatcaaaatcacaccaaatcaagtatctttagctacatgcctacatatactctgtatctaaaaagaagaaaaatttgcaaatatctgcattattttttttttggtagaatgagggagattgcgtctcccgttttattaaaagaaaataaaaaaattacacttggacatgtctcgggtacgaaacccccgctacatcatctaacaaaatagaactaacaacatcgggcctagactccaacaaatgcaaacctagggataacgagaaagcatagttcgctaatccatcggcaagacgattagcttccctatacacatgagagattcggactatccagtccttcgataaaaacgccatagcacaagcgtagtaggaatgacaagggaaaagaatccgcaatccctgtcgtgagaaaaccaaccaccat

SEQ ID NO: 646 - DNA, 1183 bp, Arabidopsis thaliana landsberg
atttccggtgtctttgtcctgtactccacaaatccgcattaaatagtaaagtctaaaattatagacaaaagcttggcatgcctacgtttaccgattcacataattaaaacatgcaattactgtttctaacaattcttatcaatgtttggatactcaaattttaaatatcagcaaaaacaacttgggaataccaatacctgatctcatttttaaaactataattgacaaaaatctttattgaattcaatttttgaactatctttaattatacaaactaagagaaatttaaagaaaaaatcaaaaatatttttaaaatctaatatgaaaaaaaatcctaacactaattttcagtacccatatcgatatttcatctccatgcatctacatattactacttgttccatactcaaacgttcttgaatacctaaaacatgaagagttatgtctataatagttggaaaggaacttaccttgattatggcaaagtttaaatctctgtgctcggtaagtcgtccaggaataagatcttgacctactagtatcattccgaatccatccggacataaggtattataacacgcacgtcctcctgcctaaataaaaccatataacatgtgacaataaatcatatggtataaaaatgtaaaacaagatttatcccgctcacattcgtatataccaatagccgacagttaaagaaatgatgcaatgccgggtgtacctaaaacgaatagaaaatttgatggatatatatcaatcaaagaaaatgatcacaccataatacatcgagtatataaaaaaatagcggatctaattaattgactcacagaccaaccaacttggatgaattcattgccaatttgaaaatgcatccgagtagagctgaactgcgtaggtccaaccaaaggattgaatgcattagtattcatatacgctccattgtaacgccttgttttttatttaagagtccgcaccacaccaaactgaatacaatggttgagacaactaacattagtagcccactaatctcattatcgagacactgtattatatgtaataaatctctataaattaatactatcgcgacaacaaaatagaatttataaatctattaatgtctcatcacgtcataatttatagagaggatgggctaattttatacactgttacaacttttatatca

SEQ ID NO: 647 - DNA, 4489 bp, Arabidopsis thaliana landsberg
  unsure (1)..(4489): unsure at all n locations
tctgtattagcttgtgttaggttgcagcaatgattagcttgtgttaggttgtgtcttgattagcttgtgttaggttgtgtcttgatttgcttgtgttagattgtggtggattgctcttgtgtccgctttgttaatttgttgtgaacatagattgtgtcttgattttcttgtattagattgtttcattggattggcttcttgctctcttgtgttcgcttgctatcttgtgtgtttgacctattttgtgtgaacatagatcttgtcttgattagcttgtgtaagattatggttgcttgctatcttgtgtgaacatagtggtcatgtctagaaccgcttgtgttctgttgtggtggcttgctatcttgtgttctattgtggtggcttgctctcttgtgttcgcttgctatcttgtgttctgttgtggtggcttgctctcttgtgaacgcttgctatcttctgtgaagtggtcatgtctagcaatacttgtgttctgttgtggtggcttgctgatgagtgttttatttcatttcagtcttttacctaaaagaccacacgactactacaagtgcacagtatatcggagtagtattttaggatcgaatctacaaggagagaagtagttcagagaaatccttaagaagagagtgatgctagaacaaaaataaagagaggggttgttgtatgctatgagtaaccaaattaagagacaaataactaaactaaacggtaagcaataagagagaaagcgttaggtcatctggggtttctccagatgtcacggttcaataaataaagtatagatctcaatctaggtgataacatggttatctttgtttacttccaaattctcggacatacgaaactctatcaagaccagctaaccctaacgattagtaggtgaaagccggctattatcactaatatcttgcatactcagttgccctatcagttagtaagtgctaacatggtttcaaaataccagatcaaatcatttagttcaaatttgattctagcccattagtccgtatcactcggcgggtgtgcaacagtaatagttctttattcggttgagttagttcaagcattcaaacgagattttgccaaagaatgaaatacctaaggtcaagtactaggtgatgttccagacatacaagcattaagattcaactcaactagaaaaaatagtgtaaacgatcaaacaaaaccatagaaaccgccaaactagactttcgatatactagtccccatgaattccccttcgaaaccccctcaaacccaactagagatctactcgctcatggcaaaggagctaatcaaaagttgggttgagtaaaccataactaaaagatgaaaaaacttaaaaagggtttagagattacttctttgaatgtagaatacaagaggtaaagctccagcttaaagagtcttacaggaaaacgagaaaaagagagagagagatggtgttcttcaagctttaagaggtgcggcggctaggaggcagctcttggcgacggctagggttcactggtgatgaaggcacacctagggttaggacttaaaacaagtatttatacttgaggcctaagaattagatttaggggtaagaacgtcattccgtcgggtaactaagtgatcgggccgagaagtgggcttcagggaaagagcctaatgacggcagcgcatagaggaaaggacttgggcgtgacctaatggtcggtggtgagctactaggagctgcccgggttcaagtctcatcggccggatgtgttttggatttattatttccaaacagcaaattcttgacatgtcttcactcttcgggtcatatcttttgaccggcttcatggcttgcttcgagtcaacttcgacgttaatcttgactcttctagctttccaatgagatcaagatatcttcatgccgatatcgagaagaccttggccggatgctaaacttccaaagcacttgaatgatcgtcttttgatacttttaggttcaaaactcttaaaaccttcttggcacctagaatacgtgtttctcttcttatgctctctaaaacataagaaaataatagctaaaacgggctaaaaagccgtgttatcagtccccaacttcaaacctctccttccgcttatgtcttcttgtttgcttgagggcaagcaaagacaaagtttggggagttgatatgcatgttttgagcatacatttgtcatcactttagcatcatatcatcactgttttataccatttctcatcatttgtcatcactttacatgtttaggataggtttgcatgcattctgcatatttgtgttgatttcaggtgatttggagctgttaacgagctaactggaagaagcagacctgatcatgacaaaccactcgacctagaggtcgagtaggagcttcaagatctcaagagaccactcgacccccaggccgagtagaagacaccaccactcaatcacatcactcgacccccaggtcgagtgacttcatctccatcttctgaccaccactcgatcacatcactcgacccccaggtcgagtgacttcatctccatcttctgaccaccactcgatcacgtcactcgaccacgcggtcgagtgtcttcatcccattgccagaccactactcgacctcatcactctacccggaagtcgagtatcaccatcacaccactcgactgcatactcgatgacaagcttcagagccttcttcattccgcactcaaccagacactcgagcacagggaagaaaagaagactccaactattcattcgacctctcactcgaccacatgggtcgagtacagttcttaatccgtcccaatacttcgtcgttttaagtattagggtttcagaatatttggctataagtagcatgtacttcacattttcgcagacaagaagtttttatctagttttatttccgcagaccttgtgttctagaccttttataatccggatttctctttatatattcagtactcagtattcagtttttgttcttgattttcgtttgttattgttcattctgttatcatcctgctgttacactgttgttatcatgtcttcaacctgttcaacgtttatgctttctgttatgatgtcttagtagtgaatagatttctgaggatgggttagagtagtgtagaattctcagtatgctaggtgattgagtattggttgatagatcccttctggattagttgttcttaatgcctattgctttctgatcaactggaatttgagcccagacatttccgcgcccaaaaggtattcgatgaaatgtttgaaccactaattccaaagattcgtgaccctgtaccaaggtattggttgcagggagcgttttggctttaacttgttgattcgtaatgcctgttaggttagctctcgtcaatggtgattgaatctggtactaggttgacttgagggtctctgttgcggtggcacttagatttggttaaagaactgctcagcactctttacagaggagttttaccacgcatcagaatgcttctggataccgccagcaaatggaacttctagaacaaagatgttgaagaaggtggaaacactgaataccaaagtttgatacttagaaggacattctgcatcttcttctgctccaaaacaaatcagccaacttccaggcaaaggaattcagaatccaaaagaatatgctcacgatatcactctgcgaagtggaaaagcacttccaactagaggggaaccaaagacagtcactgaggacagtgaaggtcaagatggggaggatttcagtctcggaaaaaatcgagcagacagaccactcgagcatccactccagcatccactagagcaaccactcgaccacgttactcgaccaacctttccagcaacatcaccaactgctctgaaaccagttgttgtcaaaaacaaagaaaaagtcttcattcctcatccttacaagcccccacttccatttcctggccgacacaagaaagagttagaagataagtacagagctattattgccaagaacataaaacaagttgaagccaggatacctcttgttgatgctctcacgcgtatcccggattccgaaaaattctttaaagacttgatcatggagagaattcaagaggttcagaaaacaacagttatgagccatgagtgtagtgccatcatacatgagaaagatgaaccagagaagctaggagaccctggttcattcactctaccatgctccctaggttcattgacattcaataaatgcctttgtgacctaggaacatcagtaagtctaatgccactctcagtagctaagaggtttaggttttaacaaatataaatattgcaatatctcttgattttggctgatgggcnncgttagacaacctcatgggttattagaagatttgcttatcaagattggaaatgggagggtgcctacagacttcatagtgttgaacatggatgaagaaccaaaagatcccttgatctt

SEQ ID NO: 648 - DNA, 1247 bp, Arabidopsis thaliana landsberg
  unsure (1)..(1247): unsure at all n locations
catgctagttattttgacgtagcaccaaatacatattgttaccactagcgaccagagtgtaccctttcagtagtatctcctcaaattaatccagaaacgagcacctcctgtgacttacagttgaccaatttaaaagctcaattaaaatggagatcccatgtcttgcacaactcttcaattccgtgttcaatgagcctccattaatatgtagataactgatagcattatagagtagataaacttaccctccatcaatttttattgcagaagcaatgatctcttcttcatattgaccaggaggctggctattaggaacgtctattgagacaagctttcattacattacacttgctgtaagttacagtttagcaatttaagagctcatttcaacaagaagacaaagccacgaaaacataaagtaaaagcgagaaacagagaatcaattagctcatgtgaattccacaacttcataaccagcgaaacctataagtggaatgcaaatgaaggacttagaatgtaaagcaaaatgatcagcttgcacaacgcaaaacctagacggatggttcataaacaattcaaaagaggattgctaataccaggccatggtgaggtgtttgtcaagacatgacatcccttcacctcatttgcaaaagttatgtattgatctgatactaaagaagccacttcgaatggaaatccaatgtctctcctcaataccatgttcaacgtcaaaaggagactcaattaaatatgagatcatatcaaattatcacttttaacacaaaacattgacatcaagtggtactgtcagcattctagagtagataaactaattaccaggttgctggcgattaagaacgtctattgagacccaaattacacttattttccctacaataggaagcatactaggctacgttaatctcacaaaataagacaaaaatgtttccacataaagacggttttggtgacttgccaacatctaataaaaaaactagaaacatccagataagaacaagaacaagaatcaaaccggagacacagtaatgcaaaacaaaatctacaccggaaacaaagcaacacaaaaacattatatctttgattacctgccaccatgtcctcctctaccgtctatttctctttgcnnnnnnnnnnnnnnnnnnnnnnncgaaaatcacgaatcagaatccccttcatcttcgagtctcggaatctgcaattcaaaagattttttggtactatccaac

SEQ ID NO: 649 - DNA, 1615 bp, Arabidopsis thaliana landsberg
accaagggaaaaaagggcactcttaaagtggaattaaattgtgttctaaaaggatgtgaattgaactcccgttttggtactttcagtaggggaaaggggaagggaggggaaattttttccacgtgtgcgcagtaattttgacatgtgcgcggtttttttaacgttgttgtactcaagtttacaaatcatatagttcagataaaatcaaatactatgggtgccaaataacagccattgcagcgattgccttggcctccttttattttgagtcctttaacattttggacgtcattttccggtggatggataccttcaacgccgtgatgtcatctgggatatccaactgtgacatatccgggactaaataaatagtcctgtaatacgccattgcccacatctccgtccaataatactttgtaaccaattcatgtaattccatacctcgaattcttgctgtatctctctcgaaggaaatgaaagcgactaatgcgtgaatacaaagatacttttggatatcgaacaccttgcaactgcatgttttcaagagcaagttgactaaaattctatcccttcatctcccgtgacattgtattcaagctgaatgtgtttagctccgtcacttttagtttctccgggtcaacttataaatcatgcaagtagttctccactaaaggcacaaacttattatttttagttcctgaggcggcatctttgggatgttcattaaaccaaacagaaattttggccatgatcgcatctagcatgggtagtaaagaatagttccttgcattgagaaaaacagaattcaacgattccacacagttgctagtgtccaaattgtatcgttcccccgggaaacaacacctagcccatttttctttcacggttgtatcctccaaataataagccacggtaggatatctcaccttaaatactctatactccctctcaaattctgacatggtataaatccgacttaactccatgaatttccaagcaagtacgtctctattgatgttagtggcaagacctttgacattttgggataaatgccaaacacaatacccgtgatgagttgcagaatacacattacgtatgcacttgatgaggctttaatttccaacagtccaggaaaagtatcatgaagaagagctgttactaattcaggggtatatttcctcttcctcatccttgtaatactcttactaatccggaaacaagtatgcatattgttgtactttctaatagagtaaatacttgcattctgaatatttgaagctcgtatacgtcaaccacagtgttctttaaaacaagccaaaacataccgctccttatcagactttttgataacataactgaaactgttagcaaatgcacctttgtccaccacttcctgcaatgctgccatgcttggaaattcttgtcgtaaagtcaaaccaataccgtcttcccaattctttttttaaactgactagattctacaacagttggaggctcaacatattcatcacccctatcatgacaatcatcacgtgatctaaactcatgatctagagtatcattaatctccacgattgccccatttggttatgttccttgttcctcctattcaccc

SEQ ID NO: 650 - DNA, 671 bp, Arabidopsis thaliana landsberg
agttctcaataaatcaattaatatattaagtatagcatgtaaaatctatactagtccgtaccatattatatatttgtctaaaagtaaataaattttatgcatatatataccataaatataattataagttataaatatatatatatgttatttctttgtgtgtgccatactgctatatataaatttttggatttgtctttttggcgggccaaccgaatggggcagcatgatgtgaacgggatttgttgtggagttaagtgaacttttatgcaacttggaatctccattattcgctcttgtaaaaagattaactatagaaaagttataagataataagaagatatcaatacaaagtacccaggcaagacaaaaaaatgaacgatgtcgcaagaaaaaaacaggaacatgtcagaccgccgtgcgaccaccccggtaaggtagccgtcaatcacgctctagccgcacggtcatggttcattaaccagggtttagagcctgtctcttgagaaatcaatgaaacagaggtacgatcattgctgctctctcaatgttatatatccggcaacattgtttttcaaaatagcgatgtgggataaagttatataaagatcacattagaaaagcatgcatgggtcgtgatatatggactaaggcccacttaattatcatat

SEQ ID NO: 651 - DNA, 1196 bp, Arabidopsis thaliana landsberg
ccagtgggcctgcctgtcgcggtcttacaaaaatgaatatccatttttggccggcccgtttgacacatgtaaccataggggtaaatcattgtagacaaccatgattattcaacccaaaacccaaaatcatctaaattaaacgctaaatcctagacaataaagcctaaatcctaaaatgtaaaccctagatactaaaccctaaacccttgacataaaccctagcccttgactttaaagcctaaaccctaaatcctaagttttatatgtacataatcaataaccatcacttttggtccatgataatagaaagcatgcttctaaatctgaaaacagaaaatattattgagatcgatgtggtcatacactcgtatttatgttttgttaatatgtattcgtggataaataaatataaacatttccgtaaataactttttgtggatatgaccaatagaacttgtttcatcatattttatcaacatcttttacataacataacacttgttttatggataatattatcaaaccgcaatcattttgaattatcgaccgtcaacacacatccaccaaactctaaccatgtggttatttcaatcatttcgaattatcgaccatccatgcacatccaccaaactctgaccacatagtttgcataatagtaatttgcatacaaatgagaaggacaaaatagtaatttgcatacagaacatcctcttcgtgaaaacctagccgcctatcactgtgctgtcatcttcttcctccgacccattaaccaattcaaccaccatgtcttctttgattcatcaaaaccatcaccattattaccaccatcatcatcatccctcttccacctctcacatttcacctctccatcaactatcacaaaaacaaattataatctttaccttatccatcaagattaagtcaaattaaacaaagaaaagttaaaatatatatatatatatatatatatattccgattttatcaccggatcttaacaattttgacttagcaagttgaatcaaacaaattgttttttttaaaaaactttgaaaatctataaaatttgattttttattaccatatctttctttaagtatcttaactatacatttccaattatccaggcccataattgaaaacaaacttttttgccataatctcatccatccaactttttttcttataaacataaatt

SEQ ID NO: 652 - DNA, 604 bp, Arabidopsis thaliana landsberg
  unsure (1)..(604): unsure at all n locations
gatgatgcaaaaatgaaaagtttatcattgactcggatgtagacaaggtttttgcaatacttgtgcatttgctctgtttgataagtcaacattttcgttttttttgccaatcatgcttgatgcttccattcttttggataggtttattctatagagtggaactgaccaatgtctcatattggtaccgaatctacatggactctctattcttcttgaatcagcattaccgttgaaatatattgcgctctctcattgcttctgtgtttttggcttctttaatatatacataggtgaaaggtctactaactatcagaactttctttattgattccaataagattaatgaggccaaatattgaactagggaattgtagggctttaccccgaagggagcccttccagaaattctcgaaggccctagacaagcttaggcctaggagggggtttggaaatagttttcaaccagcaatagacgcgcctcgggnnnnnnnnnnnnnnnnnnnnnnnnnccccaaacgcaaagatactgttcaggggaccaaatcctctttgctttataggcacacaatacccatcatctggtacttaacttcgagggggactc

SEQ ID NO: 653 - DNA, 508 bp, Arabidopsis thaliana landsberg
  unsure (1)..(508): unsure at all n locations
aaagccaaaacgttccctgcaaccactaccttggtacagggccacgaatctctggaattatgtggttcagacatttcatcgaacacattatgggcgcggaaatgtctgggctcaaattccagttgatcagaaagcaataggcattaagaacaactaatccagaagggatctatcaatcaatacacaaccacctagcatactgagaattctacactactctaacctattctcagaaacctattcactactcagacatcattgtagagaacataaatgttgaacaggttgaaaacatgataacaacatgtgaagtggtgatgtcctctattcgaccagggggtagagtggtctgttgaggtcttgaagcttctaggtcgagtggtttgacatgatcaggtccgcttcttccagttagctcgtcaacagctccaaatcacctgaaatcaacacanatatgcaacatgcatgcaaacctatcctaaacatgtaaagtgatgacaaatgatga

SEQ ID NO: 654 - DNA, 2756 bp, Arabidopsis thaliana landsberg
  unsure (1)..(2756): unsure at all n locations
accattcattcatcaaatgcttgaacgcttagctaatcacccatactattgctttcttgatggatatagtggtttctttcaaataccaattcaccctaatgattaggagaaaaccactttcacatgtccttatggaacttttgcttataagagaatgtcatttgctttatgcaatgctcctacaatatttcagaggtgcatgacctctatattttcagatttaatcgatgagatggtggaggttttcatggacaatttttcggtctatggcccctctttctcctcatgtttgttgaatcttggcagcgtattgaccaggtgcgaggagacgaatcttgttctcaattgggaaaagtgtcatttcatggtgaaggaaggcataatgtttggtcacaagatatcagaaaagggtatagaggttgacaaaggaaaaattgaagtgatgatgcagttgcaaccaccaaaaacggtgaaggacattagaagtttccttggtcatgctgggttctacagaagaattaattaaagacttctccaagatagccatgccgttaaccagactattgtgcaaggagatcgaatttgatttcgatgaggactgcctcaaatcctttcacaccatcaaggatgctttggtgtcttctcctgttattcgagctcctaattggaatatccattcgagattatgtgtgatgcatcaagttacgcagtaggagctgttttaggccagaaaatagacaagaagcttcatgtcatatattacgccaatcgaacgttagatgaagctcaaggaagatatgcaacaactgagaaggagcttctagctgttgtatacgcatttgagaagttcaaaagctatttggttggatcaaaggtcgctgtctatacagaccatgcagctttaaggcatctgtatgccaagaaggatacttaaccaacactgttgagatggatacttttattgcaagagtttgacatggagatagtagacaagaaaggcattgaaaatggtgcagctgaccatctgtaaaggatgagaattgaagaaccccttccgatagacgattcaatgccagaagagcagctaatagcgattcagcaacttaacaagagtgctcaaattaaaaaatcactcgatcaagtatgtgcagtagagaacaagcttccgtggtatgctgatcacttcaattacttggttggtggtgaggaccctccgagtctgtcgggctatgtgaagaagaagttcttcaaggacattaaccatttttactgggacaaaccctatctctgcacactctgtaaagataagatctataggcgatgcgtctcagaagacgaaactgaaggcatcctactgcattgccatggatctgcctatggtggccactttgcaactttcaaaacagtgtcaaaaatcctgtaagcaggtttatggtggccgacaatgtttaaggatgctcaggaatttatctcaaaatgtgatttatgtcagagaaaggggaacatcagcagaaggaatgagatgcctcaaaatccgatcttggaagttgatatttttgacgtttggggaattgatttcatgggtccatttccatcttcttatggaaacaagtacatactttcaagacccctattggcacgactcctttcaaccttctctatggaaaatcgtgtcacctacctgttgagctcgagtataaagccatgtgggcagttaaactcctgaactttgacattaaaactacagaggagaagcggttgatcaaactgaacgatctaaacgagattcgcttagaagcttatgagagttccaaaatctacaaggagcgaaccaaatcttttcatgacaaaaagataattttaagagattttaaggttggtgatcaagtgctgctgttcaactctcgcctgaggctttttccaggcaagctcaagtctagatggtctggtcctttctctgttactgcagtccgaccttatggtgctatcactctggctggaaagaatggagacttcacagtcaatggccagcggctcaagaaatacatgatagatcagtttattccagaaggaacctctgttcctttggaggagcctttaaacgcctaatgagtatgaggagtcaagctagagacctaaaaacaagctcacttgggaggaagtcccaagcctatctttgtacatatctttaattttgcttgttgtttttgatgcatcttgttagtgttttcaggagataagtatgaagagctgatggaaatagattctggctttgaaggaacaacaatacactccagtatagcgatgtggtcgagtatagcgaatgacgatgtggtcgagtatagcgaatgctgcagtcatgacttctctagtcccgtagcttacgtgaccgcggtgctggccgcagcagaagaagagaggtcgagtataatcggagcggtgctggccgcgacgaaggagtagaggtcgagtacccccagggggaagctgagacacaacacggagattcttcgatggcctgggagcaatcacaggcagctattgacgaccaactccgctccttcttccactgaggtatgcacctcactccaccattgtaatataccatctcttgtttttattttggttttgtgatgtgttttgtcctgagtactctcttccaaatttggtcacacagtggactgtgtgatttaagtttgggggagggctcangaagtgtgtgttgcatcggatataatcttgagtctgcattcatc

SEQ ID NO: 655 - DNA, 2779 bp, Arabidopsis thaliana landsberg
actggggcgtccctcatgctggaccgatgatgtcaatcgaccaacgcatgaatggatacggtgaggctattgatgaaagaagctcggtcggttgatagatcgtgggtgcatgtctttggcactttttgcatcgttttgagaatttttcgcagtctttgatcattgtcggccagaaaaacctgtggcgctttatcttgatttctagggctcttactctggagtgatttccacactagccttcgtggacttttttcataactttgcgagctgcttctttttctacgcaggtcattaaaggcccggataactcgctacttgaagagtttctcctcgaccagaacgaaacgcgcagcttgagcttttagcttccgagcttccaacttctccaagggcacttttccttcggatatgtagcttctgatgggttctattcattctgaatcacaacccaggtctggactgtcatccgaagcatcttcgcaatctgcgataacctggacggggaaggcatgttcctctttgtcgaactcgatgcttggcttttcgataaactccctagggataactctcctcaggttcgggtcggatgttgaggccagagcagctagggcgtcggtcgacgtattttccccttggggaatccttgttaactcgaactcgtcaaactgctcttgtacatgagccaaataggctttcatttgttcgtcccgagtagtgtattttctgttccactgattcgcgacgagctgagaatcgcaaaaagcttttatttttgcgatcttcagctcccaagctatatttagcccggccacgagtgcttcgtattcggccacgttgttggttgcctcgccagatacttcttgagttcctgaaaagcatcctcgcatcaggttgtccattcaaactttttgtttccccaaagcacatcgtaaaaagccaagcacttgtaagtggatcgggagatgaatcagttaagggttgcgactcttccagttagatgatctggagtaagcctcgatttgctttggatttgcctcgatgcagcgatgcgtgactaggtatcccatgaactcaccggatctcactctgaagcggcacttggccggataagcttgacattgtcgagggtaagctgctggaaacattcgcgtaagtgggatatgtgatctttttctgccatggattttactaacatgtcgtcgatgtaaactaccattgtcttcccgatctgtaatgcaaagattttgttgacgaagcgttgataagttgccccagcattcttgagtccgaatggcatctggttgtaaccagcaaaagcgtccatgaatgacagtagcttgtttccagaagttgattctacgaggcgatcgatgtgcggtaaggggaagctgtctttcgggcaggctttgttaaggtcggtgaaatctacgcagactctccatttgccgttttcattttttactacgaccgggttcgcgatccaatcgggatattttgcctcggtgatggagccgattctcagtaatttttctacttcggctttcacggcttttgctcgctcccgacccaattttcttcttttctgcttaataggtttgaacgtcgggtcgatgttgagctcgtgtgacacgatgtcaacacttactccaggcaaaacttctggggcccaggcgaacgtattgacattttccctgaggaaagcggtgagctcagctgttaattcttctcctagatctccgccgatttctacgcatcgctcgggttttttgtcgtcaaggcagatggagattaccggatcgggagttggtgttgtagattcccgagcctcctcgatctttagttgctataactgctcagaaattgctttttcttcagctcggccaagcttggccttcttatgattcgcgtcggccgtcgattcagtgacggggttcctgagtttgtgtgctgccatgaagaagattcgagcatttttctgatttccccagatggttttcacgctgtcgcttgtgggaaatttcaggcatagatgatacgtcgaagcgacagctcggaattgattttaccatggtgtgctgatgattgcgttgtaaacggtcggctggtcgggaagagaaaaatcgacgatttttgttacccctttggctcggactggtaacttgatggtcccgagagtcatagtggtttccccagaaaatccgagcacaggtcgtggggttggtacaatttgggtcatctcgattttcatttctcgcagcgttgtcagaaaaatgatgtccagtgtgcttccggtgtcgactaggactcgttcgacgttgaaatcaccgatggtcagtgtaatgactaaagggtcatgtgcggacggtttaagccgttggtatcgctttcgtgaaaagttacttcgtcatttcgtccgttaaatggccgcgtccagttatgatttgcgtcggccttcctttgatatgccttgattgatgctgccgtatcttgacataaagctgaatcccctaaaattgtgaagatccttccccgagcagcttctggttcatcgtcgtctgtttcgcgattaccctggcctcttttaggtccttcggggttcgccgcgggggcggtctgctcgggattggccacagcgttgacctgctcggtttgacccttttctgcctctaagtcctcgatggtcaagcctccaccaatttctcctggccagggaattttgctgccaatctcgctccgaggctacgacatctggacgtgtgatggccgtaactcttgtgca

SEQ ID NO: 656 - DNA, 860 bp, Arabidopsis thaliana landsberg
  unsure (1)..(860): unsure at all n locations
gagcgctaggattgttgcattgagccctttaggaaggaaacctttgatgtaaaaagatttgattgcagcgatgaagtcttgaccagtgattgaccaagtcgctttaaagaactcacttgtgtaaccgtcgggacccggagacttgttacttggcatcgcaaacaagactttttgaatttcttcggatgttacctctctagtcaacatattctgatctgttgcagagcatctaaaggacatcaagttttgcaactcttcaactgtcattccctgaaaatcacttggttgatgattgagaaactcctgaaaaaaacgctcagcctcacctttaatttcctcacttgtttgcagcacaacaccattcggtccctgtatctccctgattgagttctgcattcttctannnnnnnnnnnnnnnnnnnnnnnnnnnnnnnnnntgtcaccaactttcatccagtgaagtttcgatttttgtttcatatagccttcttccagatctgctaaatgctgccaagctgtataagcatgcagctcctctgcgatcatttgctgtgacgggttagcaagtgtgttggtttgctttgcacaaagtaactcgtgagcctctcgagtacgttatggcaaatctcctagcttctctttccccagtgctctcaagctcggtttctgaggtatactcgtcaagacattcacatatttaaacggccttcgaccccctatcgctgcaggctctagcattatccttcctcttgtatgatcggaacaaccaccagcctcaaaaacactatatgagtgcgggaaagtgatacaccacgagtcattaacaagaactttatcaaggttttgcatatcaacccgtc

SEQ ID NO: 657 - DNA, 564 bp, Arabidopsis thaliana landsberg
gaccgttgaacttaatagtctaatatggcatcgtacttgtccaatgggatggtagcatagaatacgacgatcgtgaaagggggctcatagcattatcaaagaaccttaataggcattataaattatactttaatcctcgaacaaaatttaagtttatacgaattgatcaccctatgatttgagtatctttattgttctcagtaaaactttgttcattgtacagacgagaaaagagctcgaatataggtacatcgatcatattggcaagaaaaaacattaaaaatgaaaccgacaagaaagatgtaaaatgcgcctaacttcctaggcctgaaaacgaaaaggccgtaaagtatttagtaagcccacattcgaagacaatttgtatggtaaataattaactattagaaaacaaaataaccacttgcactataagcgagttattaccacgcgccacaaatctgtaggtccttttgaaattggcatttttggatatttgagaaaattaagcgcgtcagcctaattatttttggatttcgattcgaatcgactaaaaaggacggacta

SEQ ID NO: 658 - DNA, 1055 bp, Arabidopsis thaliana landsberg
tcagagcacacagagcgagggatgactctaggtacgtccgatacatggccgaggctcgggctatgctcccgaggtaccctaggacatttctgagaccagcaggagtgattctgtaacggaatcccatcagagggaggcatcgagccctcggaccctaccaaacgggaccgggtccggcaaatcacctgtaggtacttttggagcgcacctctgggccactagctgacccttatcgaacggggcacatgcgtccactcggatcacccgctagcaactcactggtgacaccatgttcggcgcccttcgagggaacatggcgctttccccctccttgcagaaaggcgacgcaggggcatatggaaaaagccgagtctgtccttgaacatcctctcgctctgtgcggaggctcgggggctgctctcgcaaactcggctccagcaaaccgttgacagcatcaacataccagcccgagaacttgggacccgaccgggcacctgggctacggccagctcgcatgagggaacaaccagaccagccgaagtgtagcaaaacgcactaagacctcgaaggagtcaaaccactcctccgaggcctcggggctacacccaccggaaaaaaacgcaaccgagaaaggctggtccccttgcaaaaaagtgcgacaaaagcctccaagcgagtattaacactcccttcgaggctcgggggctactgtcggggaccatatatagggataccctcaagactcctaaatctcagctgtaacccccatcagcacaaagctgcaaaggcctgatgggtgcgattaagtcaaaggttggtccattcgagggacgcgatcacgcctcgcccgagcccagcctcgggcaagggcagccgaccccggaggatctacgtctcgcccgaggaccccctccagcaacgggcacaccttcggctcgcctgaggcccagtcttcgccaagaagcaaccttggccaagtcgccacgccaaccgaccaaatcgcaggggcatttaatgcaaaggtggcctgggggatcctctagagtcgacctgcg

SEQ ID NO: 659 - DNA, 1190 bp, Arabidopsis thaliana landsberg
aaagcctgttagcccaatattgtcatctatgcatattacccctttaaattttaggtgccatagcgaaagtttagccggactcccctcagcagcatagtgatgatctgagaaatcttcaacggtgtcaaatcttttaaagtctcgcagaaactcttccttaagtttcctaacattggaagaatcctgaactagagaaatataacctcggtaagtaagcttctgatttcacattacctaaaactgatctgttacaacttaacaaactttaatatgattcatcaatccgagggcaaagcgaaacagcagaagcatatatagtaacgtgagcaaacaaagaaacaagatcaataaccaaaccccacgtaaaccctaaatcaatacaaaaccccaaaattgttacatattaatctcctccaaaaccccactgaaattacagaacaaaaagaaaaagagaaaaatcgaacctttatctccaccatgtcaggctccttttgactaaattccgcaagatggattctttcggttgtgaaaagagaaatttctgttgtgcatatatctttatcttagtcctttagatatatatgtataatttccatatctttcgcacataaattctttcagggttctcttttttgtaactctataaataattacaaaaaaaaaagcactctataaatacctttatatattattcataaaattcacattggtatatgaaaacttcatgcatcgatgaaaaacctaatttgtttttctcttttcctcgcttcgtttcttttcatcggtgacgaggatcaaacactatcattctatcaactcaggtaacgattggtggtgtctccccacacagtaaatccacttcttgcttcgtggacacgacagtatcctatgttgtgtacttttgcaaaagaaatctttccagtttggtggtgacatagaggttcttagtgacttgataaaaaccaggttatggcattaggctcgacagaattggatacacttgatttagacagccactcgtgtagtcgtgtactgatggatcaaatgactccttccgacttgagattaatatcgtatcaaagattggttaaactatccattaaagctatggaaatgatagcattctccaaaggtcgtggactttggaaccgaggtggacattgctaactctaacttagtacaaaagaatc

SEQ ID NO: 660 - DNA, 1219 bp, Arabidopsis thaliana landsberg
taaccaccggagcgaacactggctcttggatatggaaaaagctcattaaatttagataggtggcaaaagagttttgctaagtggaagttggtaacggtgagctcacatccttttggtacgataattggtcgcatttgaatagattggtggacatcacaaacgctcgtggaattattgatatggggataagcaaaaatagtactctgcggctgcctggatgaatcgaagaagaagacgacatcgagcagacaatttaaatgtgatagaagaagtactgcagtcacaaagagaaaaaagaaacgatcaagaggacactgttttgtggcgaggaaggaatgatatttttgtaccaagcttctctacaaaggatacttggaatcacatccgaacaacaacaaccacagtctcttggcacaagggagtttggtttacacatgccacaccgaagttttctttttgtatgtggctcgcaagttagaacagactgtcaacaggggaccggcttctccaatggcaaggatgagtgaatggaacttgtgttttgtgtcaacaagatgtagaaaccagaaatcatattttctttgcttgtgattacagttcaacaatctgggcagctctgggtacacaacagattggcctactcttctagattatctttcgactcatcgtttcagccgggtggaggaatttctcacaaaatacatagtccaagctacagtctatgcgatttggagagaaagaaataatcgaagacatggagtgtaacgcccgtgaaccggaaaatcggttagggtttatttttaaatcatccagtttaattggttgggttaattggaaaccctaaagtgtacctataaaagaaggaaactcgaaattagggctttagttagccacatttcattttattaaggagaaaaagagagaaaaagagaaggagcagaatcgttagggtttgggagaaatcagtttcgtcatatcaaatcgtggtaaaaggtaacgaaatttagtagagttattcccaagtcctttatcgttattctccagtttacagaattgaatttggattaaaagtggttgagttattcgcagtttcgtgagacacgttttctcagacgcgaattaggaccagcggagattgaaactgagattgtggtctcgtctgttttccgatcagcacgagcttttgtggacagctttgtgacgtctgcagctaggattt

SEQ ID NO: 661 - DNA, 538 bp, Arabidopsis thaliana landsberg
  unsure (1)..(538): unsure at all n locations
cccttccaagaccaacccggggccgcccctgaaacttagaatgttcaaacagangattgcncattctctacccgganacangncgangccaaaaactgaggataaccacagcaagatcagacatcgagccgaaaaaggacaangaangancgccaaaactacctcgcttattcggctttgcaatgcaagagctaatagtttcggcccttcattccacagcttatgagcaaccctatgtccttgcaacgcatgataaccctgtagaacaatcaatgtttcttcatgatgttctgtctctaaaaattcaagtaaagaattaccttgagatgtaaaatagcagaactatacgacagacaagcaggatcattgagatacataagaaaagaacaaagatcatgtctttttacagtatcagatggaatgttttacctggagatcataggtgaatcgaactctgactacctttgtcatgcatcataacgccataaaatatattcaagagttgagtttccagaacaaaccctaatgtctcggcgaa

SEQ ID NO: 662 - DNA, 582 bp, Arabidopsis thaliana landsberg
tatgtatgcacactctttttatgaacataaccttatgtgttttcagaatctgagtatatctataaagacattgtcttagggatttttatgtgtaaaggtgaaatttctctcagacttgacaagttctgactgaatacttgaaatcacaagaatagctaatagtagaagttggccttgtctgctttgattggcttgatatctttttcatgttgacatctatgcttaattcaagtgcatttatatctagttgggattgtataacattcattggctccaagagattgtttgttcatattgaacctaaagatgaggaacacacatgtttttatgctgcatgcattttctggtacgcaaaatgtctctaatcaacacaaggaggaagcttggagagttaatgtccagatacagggaattgaccttgaacatggctatctttgtggcaccatggaggctctaaacgttcccatggcagacactcctgtaagaccttacactcttacttatttttcttcatcttgtctaatacctatttcttgaagatttgaaactgatgattctttatcgtgaataaatttttgaaag

SEQ ID NO: 663 - DNA, 439 bp, Arabidopsis thaliana landsberg
  unsure (1)..(439): unsure at all n locations
acaacgcatcgctttttcttttcatcgacccaacanncaaaccgggcagggttaaattaaaaaaccgggccgccccccaccggaagncatgaaagccgaggaagagaaattactgaggatcggatccatcaccgaggcgaaatatcccgattggatcgcaaacccggtcgtagtaaaaaagaaaaacggcaaatggagagtctgcgtagatttcacagaccttaacaaagcctgcccgaaagacagcttcccattaccacacatcgatcgcctcgtagaattaacttctggaaacaagctactatcattcatggacgcattcgctggttacaacccgcttttacacagaacaaggcattttttgttaccgagtgatgcccttcggactcaaaaacgtatgggcaacctatcaacgctttcgtaataaaatcttctcatt

SEQ ID NO: 664 - DNA, 600 bp, Arabidopsis thaliana landsberg
tcaaaataaaggacaagaaagcaataaaagagattgtagattcagattattaaaacgtcggggttagagaacttctcaggaaatatttgaatagtagatctagcagtaaattacgaatattatcgaaccattctagaactcaaatcattattacagtgtaaccggtggttcgccgcattactcactatgcttaatagtattgatcccaactctcttgtaaatccctagaactaagaaaacattataatcaggtttgataagttcacctaagtattaaaattaagttttagttaattactctacaactagcattaagaacaatgaaagatgaagaattctaaatatattatccagacagggtttttgatcgactaatttatctaaatccccaatgagaatctctaaacccaacaagagaactactcaaacatatttattcaatgtttaaaatagaaatcaatgtaagaaacaataagataatagagtttatattctctagaaggagctccacatggttttgactctcaaaaacaagtaaaataaagggtaaagaaaattataaaaaaatattcaggataagtctaaacatgaccataaaat

SEQ ID NO: 665 - DNA, 535 bp, Arabidopsis thaliana landsberg
gttgttgttctgcacaggtggaggcacgatgtctattactttgattgtggttgcgtggtgcatggggctggggtatgttgtttggttgcacttgctcatctacaacagcagccattgcgtctgtttctgtttgtgttctgagttggtgtgcaatacggtcgatgttatcgttgaacaagagattttgatttcctcgtgaccgtgtttgcatacaaagttagtaactttcagaaaaattgaaaaagaacttgatcttaagtattctgaaatctcaaatgtagcaaacaaacacccaattggcaacggcgccaaattgataataggcttttgctcaattaatcctatatcactatcatgtcgctgtagtattttagttgccagacactgcctgtggtcgagtcagttggtcgagttattgtaaaaacttagaaacagacaatgagaacgattaatcgataacgataaaacagagcaataatatagactagaatttctaaggatggggtcatcgagtagagtggtatcctaacctatt

SEQ ID NO: 666 - DNA, 589 bp, Arabidopsis thaliana landsberg
  unsure (1)..(589): unsure at all n locations
taggatttcaggttgggatcaggtcctgctgttcatctcttgttgaaactctttccaggaaaacnnnnnnnnnnnnnnnnnnnnnccttttgtatcactgaggtccgtccttatggagcagtcactctagctggtaagagtgaagacttcacggtaaatggtcaaagactcaagaaatacttagcagatcaaatccttccagaggtgacatcggttcatctccaggaacttcttgatgattaaaggagtaaaggagtcaagctaatgactttaaacaagctcacttgggaggaagtcccatgactatctctgtaaataaaatttttattttcttgttattttttatttgcgttggttgtgtttgtggttctcaggaacgaaggaacaatgtggagatagagtaaaaattaaaaacttttactctacagaagacctgtagatcgagtacaaaattttgaaaatcatctgttgcacctggacaccttgcactcgagtacattggtcgagtatgtgtgaaaatcatcatcttactcgacccacagaagctacataatcctacagggaggttatcacgtttatagtacatttt

SEQ ID NO: 667 - DNA, 595 bp, Arabidopsis thaliana landsberg
  unsure (1)..(595): unsure at all n locations
aggcaatggatatcgagcacctacgtcactgcgaattcctggagtttgcaatggttgactactttcacaggttcaggtttgagcattctacagacaagagagctagcatccttctccccagccctgaggttacacggataatagagggagataacattgatttttcggcctgaggttggacgcttctactatgagaacgctccgccattggatgaagatgatcttctagaagaagctgcttcggatgggatggatgaagacagagcagtggagttcgacactagcatgtatcactttggtgaacatgtacctccagcgagggagagcaagagcttgactgaagctcataagaacaacagtaaactgcagaagtggtgcaagaagcaggacaagctgctcgccaagtgtttcaagactatcaagcttctgacagataagctgagttgttcctcctccaccactgctattccatagggacaacctcctctggagatgccatcgaggagatttgatgagcctgagcacaggcctgagnnnnnnnnnnnnnnnnnntcacatgtcccggctaggcattcgtcattcgaatcccgggagc

SEQ ID NO: 668 - DNA, 635 bp, Arabidopsis thaliana landsberg
tcaaaaatatattagaaagatatttgtgtaaagctttgatgactctactcggctcacatgatctttatatggtgtcactaaacatcttcagatacgatgtagccataagaaaaattgtggatttaaatgctttacatggatatgatcaattgaaagtggaactagagaaaaattttgatcttaaaagcaagttacgaatccacaatcaatgagaaatgacctttaaaaccaatgcatgagatataatgcttgttgagatgatacatgactttatgtttcctttagttttctatatattaaaaatgtgttaaggaattgaaaaaaatatttgatgttgagggttttgttcatgcagtgagttttgtaatatgacgaagaaaatattcatattctcaaaagaagaggtaaagaaaatgaaatctagaacaagttctctcaaacatgttttttttctagttttgtcatattttggagttctgttaaatcgactgaaaaatacaaaaaattaaatatttacaaatggttcaaaaatggtcagaaagtgtaattgatgactctctattttttttgtccacaatgtcttcattgttttaaaaactattatgcatctcttcattgttttaagaaaatttgtt

SEQ ID NO: 669 - DNA, 1058 bp, Arabidopsis thaliana landsberg
atattttacacgaaaaacttatattttctcaaaacaatccagattttttaatgccatctacttgcacaattgtgggcagtgtggattttggatttaacaaacatccaaagtcctatatatgtgacttggtccctaccctgcgagtccaaattcaggtcttatttatatctcaatataggagaaagaaaaaaataagaaactgaaaagacccaattgtatggtacactcaaaaccttatagtgtaagaattaaaaccccataaattaataaaaataactgtttaaaattgtgttttatcacgtaatatctctattatttaataaattattatagtcgagatgctattaatttataaaggttttactgtggatatatattaatctttgagttttgttggatacaaagacaaacgattttttttttttgttaaactacaaagacaaatgataccaaactttaaagagacacaaagtgaaagaaaaagaaaaaaataagtagcttgatagttgataccacactattaacaagttgatatcagagacaagaatctataattatttatagtatcaatctgcaatgaaatctacatttttgtttttattaaggtgaatgaaatctactggtgaggaaaagttccatgtgacctgctgagcagaatttgtagtctctgatatcaacttgtttatttctcgttagtcctcatcattcataactgtatattgatattattgatactagggcgaaacgtgagccaagtcgcgggcttttttcttttaaatgtaattttgttaagttgtatgtaggtattgaatgttatttgtcatgattcatcaatgcatttgttaattttttttaagtaagatctatatagctttcataagttttggaagctattttttttgtattacgaacattattttagacgagtcattaagaaaaaaagtgaaaagagttaaaaacaccagatgttaattctagtgaggccaaagtcattgtagattcttaagaatatataatatggagttatcatctttgattttagtctttcacatgcatac

SEQ ID NO: 670 - DNA, 596 bp, Arabidopsis thaliana landsberg
ttgtttaacttcgatcttagctctatcgacttctataccatgctcaaaaattctatgaccgagaactatctcatcctacatcataaagtgacatttctcccaattcaaaaccagatgttttgcctcacatcttgctaatactttgcagagattctctaagcaatcctcaaacgatgatccataaactgaaaaatcatccatgaagacctccatgatatcctcaatcatgtctgtgaagatagacatcatacctctctgaaatgttgaaggagcataacaaagatcgaatagataatccctgcttccaacagctcctttcttaggaactacataaactggactaacccaactgctatctgaaatcggattaataatccctgcttccaacagcttcataatctctttcttaaccacttcataatcccatctgcattccttcgtcaaattcttactgaccattgtcttgacataccttcttattgtgggagagagatgatagcttcaactaaaggcatctcaacaatcagcttatcaatcatagcctttcatctgacatcatctaaggcttgtcttgacttttaggactcttgggaaaa

SEQ ID NO: 671 - DNA, 1164 bp, Arabidopsis thaliana landsberg
tatgctccatgacttgtagcatatttgctttgatttgattgattaggattaggttatatgatggtatgatttgacgattattgaactatatgcacgatgataaggtttgactataaaacgttatatatgagaatgcaagtataagtatgtatgtgtgatgtatgtatgactggtgagaatagagctatgggccgtactctctctaataatgtggacagtgatgggccgacgggttacatgctggtcaagaaaggctgacgagcccgaaatgcatgggagtgtctaagccacgagggccagcctccactcatgaggttctagtcgtcacgaggatgactggacctaacgatatttattatgtatgttattatgaataagatggttattatgaatatatattgtcagaatttaaagcatgttaggtggattatttgtatctaagattgtgtgttatgatgattgttgtatagcttaagaaattgttctatgtttcgctcactgagtattctgtactcaccccctttttccccttctttcccaggtgaaaatgatattgaatagctgctcaagtttgtctctcttcatggtgttctttgggatttaggtttattttcttaataaaacaaagacatggttttcttttaaatttctatagttatttttttacgagttttcaatataggaaaagtggcacgccttctcagtagtttgggaaaggggtgttacaattttggtatcagagccaggttaaagtcaaaccggtgctgacccgggaaactatgattgattatgctaggatgttttatgtagagtaaaattttttttaaaagtgattttaaaatgggaatgtgttatttttttataaaaaaaaaaaaaaaaagaaaaaaaaaaaaaaataaagccagaagaagcagacttgagcattacttatgttattaggaattgttgtgattgttctgatattgatgtttgtttggtcagaatggcacctttaaggaaaagaggacgtgttacaaaccaaagggctaaccgtgttgatgatgcacccgctaaggggcaagctcaaccaccagtagggaatgttccagttggagatcaggcagccatcaatgcatcactgttaggacagattcaggggatcagaggaatgtttgaagagttaat

SEQ ID NO: 672 - DNA, 1623 bp, Arabidopsis thaliana landsberg
tttccaccctctctcgcggactcgtttctttattactaacgctaacccggcttgtagttgtgtttatatttgtaaatttcagtttcgccctattcaccccccctctaggcgactatcagcacctcctgttgacgtggccggtctgcgccctaggttggacgatgtggaagctcctccgaagccgaggtcgagtctgtcttccgtagccgaggtcgagtccgagcccctgggtcgggcgaggcggagaccgccggctgaggccagggcagagtccgagccctggggtcgggcggagcgatgttcgtcgtcttccggggctgagcccaagtccgagccctgggtcgggcggagcggagttcaccatcttccggggtttagctcgagtccgagccctgggtcgggcggagcgaagttcaccgtcttcaggggcttagcccaagtccgagccctgggtcgggcggagcggagttcgccgtcttccggggcttagcccgagtccgagccctgggtcggccggagcggagttctccgtcttcaagggcatagcccaagtccgagccctgggtcgggcagagcggagttcgccgtcttccgggacttagcccgagtccgagccctgagtctggcggagcggagttcgacgacttccgggacttagcccgagtccgagccctgggtcgggcggagcggactttcctgtggtgccttttgcaggacctgactgcctgtcagactcactctatcgagtggcactgcagttggagtggcgcagacggcgctgtccttctgtcagaccggtcagtggagcagcggagtgacggcggtcacttcggctctgccggggggcgcgcgtcaggatagaggtgtcaggccacctttgcgttaaatgcccctgcaactcggtcagtcggtgcggcgatttagtcagggttgcttcttagcgaagccaaggcctcgggcgagccggagatgtgtccgccgttaaaaggggggcctcgggcgagacggaagtccctcgaggtcggctgcccgagtccgaggctaggctcgggtgaagcgtgatcgagtcactcgtatggactgatccctgacttaatcgcacccatcaggcctctgcagctttatgctgatgggggttaccagctgagaattaggcgtctcgagggtacccctaattatggtccccgacagtagcccccgagcctcgaagggagtgttagcactcgcttggaggctttcgtcgcacttttttgcaaggggaccagcctttctcggttgcattttgttccggtgggtgcgcgcgagcgcacccgccgggtgtagcccccaaggcctcggaggagtggtttcactcccccgaggtcttaatgccttgcgtaatgctttggctggtctggttgttccctcatgcgaactggtcgtagcccgggtgcacggtcggggcccaagctctcgggctggtatgttgacgctgtcaacggttcggccagagccgggtttgcgagagcagcccccgagcctccgcacaaggcgagagggcgatcatgggcagacttggcttttttacgtacgcccctacgtcgccttttcgcaggaggaggtgggggagagcgccatgttacc

SEQ ID NO: 673 - DNA, 1434 bp, Arabidopsis thaliana landsberg
  unsure (1)..(1434): unsure at all n locations
attaatgttatcggttttttagaaaacttaagctttcccatttatctctctattctgtgtttatagaaactaccctatgttcggtatcgagctgctaagtccctgcttcgagggacttggttccatcaaagcttgctgctgcatgttgggactgtatctcaaaatatagagccattcccaacttcccccagaccgaaacatgtgagctgctcattgtggatagatcagtggatcaggttttaaggctcatctactacatttactcctcaagtccatattgatagtttatttctctaaacgattgaggtgtaactgtagatcgctcctatcatacacgaatggacctatgatgctatgtgccatgatttgcttgacatggaggggaataaacatgtcattgaggtaattctatttttctttcttatccttcaacttttttccgtttctgaaaggccccgatccggactgcctaaagtccgggcgagttctctcgacccaagctactaagtgactcggccctaaccgtttatgaggttctttcctagggtaatccgtttcatatgattccgagattcaatatatgagacgaatagagtatgagtttcttatgagttttttgttttgaatcttataacatggaacctttaatttatctttcgggatcaggttgcggttataattcttatactcaattataagcctgagatctagtcatatttgacacataaatgcaaaccatgtttcttctttgcttctcaaagaattatggtgtagccaaaattcgtatgagttttggttttcaatcttctaaaaggtaaagactactttagcttccgatatctggttgcggttctagttcttatactccatcatacacacgactactgaccaaacttgatccaaaanatgctaagaaagcttattttgcttctcaaagctttgttgttgtggccgaagtccttatgataatttggttttggatcttttaacagggaaacacaacattagctttgaggatccagttgcggttctagcttatacttaaatcatttaccaaagctgtactcatatttgactcccaaataagcggttctagcttattttgcttcttaaagctttgatggtgtagccaaagtccgtaggaaacactactttatcttttgggatccagttgcgttactagttcttatactctatcatacacacaacatctagtcatatatcacaccaaaaacgctaactaagcttcttcttgcttctcaaagctttgatggtgtagtcgaagtccgtatgagtttttggatttgaatctttgatatgagtcaaattaccctaatgactactctctcaaaataaagaggttgttataccacttagggatcgaattccacaaagttctcggatcacacaatagattaacagttttcgttatac

SEQ ID NO: 674 - DNA, 1566 bp, Arabidopsis thaliana landsberg
gaagtttgtctttgtctctatttttaatacttggccgcacttacgatattagtataggatttgtattggtaaatgatgttatgtaagacttattttggttaatgtaatatttatattatgtatgttgatgatttatgaaatataattttcttctatatatatctaatttcataaattctgtaaatagggtaaaatagaaaattatattaattaaaatagcaaaatcaaagtgttgtgaaacaatataaagcaccactaaacatgtgctataagaaattatattaaagcattggattagtgttataatagaatgatctatcatagcatacgaacaaaatgctaccgtatgtaaggagtctatcataacaggggcataacatagcgtttatagcgtttatgaaaacgctattgataacatataatagctcttctatctcgttaataatgcagatatttcttgtagtgttgcctgcgtacaatggtcggagagttctcggtatggacgtgtaatgtgagcaagcggaacgagtggtcgtggatgggccatgatgtgagctggttgtgcagctatttgtgtaaggataaggatgggcgttttgatgaggataagaacaagattggataatgataagcttgaaagtggataagataaggataagccttatcctttgagtgacttgcactccaagtaaccgaaacttgctctccaagtttccctagcctatataaacccatgtgatcccattcattagttcttcacaccaaaacctttagcctaaaccgttagatagctagttagtccgtgggagtccgagtcgggtagaagttggtcgagtcgagagtcgtactcgggtaataaggtaagtagttccgcccttagtcatcttttattatttttagaattatttttcttaattttgttttcggtccgacgcttagatccatcgttagtacgcgttggagatagctcggtcggatcaaaattattaggcggtcaagggtagaattttattctctcgacattaaggctaaggtgagtaccgtagcgtgtgtagtagcacatgactaggttttaatttgggttatgattgttaggcatgaggttgcatttttatacttagtataactcatgcatttattgttgatagtcggatctacgattttacgtatgatcggcttggttgtttgattagatcttgcatttatactttatttaatttgggatgaagtattttgtgtgcttaggctagacattagtttagccattatgttgcttgattgtttgattgtggtaggatttattatcgtatttatttgcggtaattgttgtttgtttgtttgtttgttcgtaatttttattacgaattaaattcttagcaagcatgttaggttgtttgattgttgattgattgattgttgttggttaatcttgtttcagcttgattaacctttgtgtgttagttgcttgctattaggttttatacgagtagtattaggctatattaggctcgtaataagtaatgtgattagccatttttatgactaaggtgtgacgatgtccgtgat

SEQ ID NO: 675 - DNA, 365 bp, Arabidopsis thaliana landsberg
aacttgctccacgacaccatcttgacctcaatcttagttgtaatccgtatctcaaaactcagtatcatatttatcatggtgctgaaataaagctgcaatcttctcttctttaacacaagataaaaacgcttatacatatctatcatctgtaaaactagacgccaaatagggattccaaaaaatagtcgtaataacgtcttccaagatgcataaaattaaatcctcatagtggaaaatatgagatatatcgacttcattgttaaggaaactaagttgacctttatgctctatagatggatcaacgtcgtcgacgacaccactcattagataaagattatgaggcatcatcacgctaatcatagact

SEQ ID NO: 676 - DNA, 1248 bp, Arabidopsis thaliana landsberg
tttccattctttgcacattgatctgaatcttgcgaggctcttcaatggaagtcgcaccaaaacttcaaatgtcaattctggtggtatattcatttctgcatgcaaaaaaaaaaaagacacataaccaatgaaatgaaatgcgatactcaaattacaaattctttttgtttttcttaaaaaccacatttataagataaaaattaaattaaattaatcgaatctaaatataaatatatcaacgatataatatacgatacttttcccatgcggacaaaaaaaatgatcgcttgttttgtaaaatgcttatcgagaagaggttaaattgagtttgttgtgatgtctaactaatggtagcgagagagaaaatactagatctcttacctgattttcgtttttatgatgggcggcgatgacaaacaaactaggttaagttatcgagattatgaggttaaatgaaagaaagataacacatatttatagaataacaaaatggaaaacaataggttaaggtaactcaattaagtctttaatgtacatctttttatatcaaccactcatttgttttatccacaatttgattagccactgaagataaagaacaatctataatgatttgtatttttattttaatagtaagagattctggacctaggactggagaccagaacatttaatattatttcttcccgagtgatactcgaaccagagacctttttgcctaagactttgtaacaaagcttgataggctcttaagttcttatcataataataagaatcatgtgatcttaatttcgttatgttgtatgtggagatatattcatttttgtagattccatatacatcctcttgttgaatggctcatatactcttgtatttccctatcatagtttgatgaagtcttaacgagaagataaaatatccaaaaccatacaagattcttgcttttggtaattatatttgctaggaacaatttaactggtctatataatcaacaattacaaaatccagtcaaaaacacactcatataacaactatctctctctgtttaagcttccgagtctcctctatccatttggaactctctaagttcaaggtgtttctcactataccatttttttgctcaatccaatgaaagaaacataagaaagcttagatctgcatttctctctgctctttaccaatcaaagaaagatgacttcacattctgtagagcatcttgggattttgaggagtttcttgacaaagtca

SEQ ID NO: 677 - DNA, 515 bp, Arabidopsis thaliana landsberg
aaccgataactgaaaaactagggataatacattaaaaaaaaaatctaatttgaaaaaatgaaggatttttaccatattaaacttgtaaagcttgaaaagtaggaagacaagaacacaactgttcttcaagaaaaaatcaaagcggaatatcattccaaagaggaccaagaaaagtgaggagacaagggtaaggattccttcccaggttagccatgacaaccaatatgcagaatcataaacacccatcattgtcattgcctgccgaagttttagctctttctcggtgaccagggcaccgagttggagaacaaaaccaaacatggagaaagcaagaaagaacactggtcccatgactgagagtgcagaggtagtttcagttataatagctggtcttgcaaattccttaaatcccaaaccccaaccaaaatttggatcttcaagtaaagaccttgcgaattcacgctctgcagcgacttgaagaggaacaaggaacttaaacgtatgatcttcagtct

SEQ ID NO: 678 - DNA, 955 bp, Arabidopsis thaliana landsberg
catgatttcttgaatttaatgaatcgaacaaacattgataccaaatttagtcgataaaatgttagataagtttttccttagttctaatatatataacatatgctttaaaattattaccgctagtggatgaactggcatcctctttgtttgaagctagcagtaaattccttgtttaaattccttcttaacaaatctttcatgtcgaaaatatattttggtccaacaacctaatcgctcggtgaatctttgtccgactcatactcttcttgactactacagtcaaatatatgatcatcgaattcatgtggcctatctgtagacaggatatgacatgaaagtagcacaaactaatcaattttacactgatgaaataaagtggcaattttaaaaagtatgattaacattataccactatcagaatatattgcttcagaatgatcaagttcttcgtcagtgagcagattggcacataaaaagcttgcaaaattctccttggactgtaattgtgttgaatgtgggactcctaacaatcaacaaaccaaaatagtaatttttttaaaggaagtaatgatataatgtgtgttaaactattagaagttagccaaacatgctgggacataatataaatagctaattttcaaatataaatcgaaccttgcccatttgatactttttccttattattggacattaatctaatggtagagacgatggattctccagagatatttgttatatccgataagacatttccagagtaatctaccccaaacaattgattaggagttaagaagtccggtgatcctactgaaagctaacaaccaacttaagaaaaataataatattaactaatatgtattgcatctataattaaaaaattataaaattataacctgatgggaaattgatttttctggccattctttttaaagctttcaatcctttactagttgtt

SEQ ID NO: 679 - DNA, 3773 bp, Arabidopsis thaliana landsberg
gtgactttgttcttaacctgtctttctcacggattaatccctatgcttattctcacacgagggacggtgttaagtaagtctgggggattaatgaatccattactactaatggtactctctattttgttgacttgaaacatttttccactttttacaccgatatgttctaacaaagcaaaaagtttttctttattatcgagtaatgttttattgagtcaaaactagtagggaaccgagaccttgttatatgatgattattgaccattatgtgttgagaattgtttcttgaggaacacttacagggtcgcaaggaacgggcaaccttgaacactacgcccggaccgtcccccagaagcttaaccttgcagaaatttctgttggatccgacgtcaactctcccctatattggacgattaacttgaacttaattctttctcatgaatgggtgttagatcggtgaaacgagcatatacattcaggacttcttttcccttcttaccactctttgctgatcctgaatggccactcactcttagtggttcatacccttaaaccctatcctcttttcaagcctcatgcattctcatttccctttttcatttaacaaatatgtgcaaaaacgtcagagagaaaggaacaacacagtttcccgccacaaagacagaagaaggaagcaaaagaagagattctaacaaacgccctaagagtttattcttccttggaaccaattcaaaggtatgcccattagattcggtgtttaatagttctgtttccccttccaaaaataaattaatatatatataacacaaagagaagaaagaaaagaaaaggaaggaaaggaaacataacaaccaagagagtaacgcccccgaatcgcctatggccggacaagccatgggcgacccagttacgataactgtgaagatgaacgaccacgacttagtagaggttccaaatgaatccagtttcttaaccaaattataatcgactttcttcccactaggaacaccacttaggcttgccacaccacttaggcttgccaaccctcgtgatattctagtgttgagcgacccggactaggtcttatatcattaaccacccgactgcttttaagaaaacactttatacatagtatatagcttatgctttgcaaagagttacccaaaaatatatctttgtatcggatccttgttaaaatttacataataacaagtaattttgtagaagcaacgcaaaatatcctatttccggcatttcctagtgttcgtcttcccgctatggtcatcccactatggttacctgtaagacaataagaatcatgagtaatctagcagtacttagtgagctcggtctatgcacaaatatatctctagggtttaatcaacttaataagtaaacttagccatcagagatcacaaagcacgtaataaacgttttatcatatacttataataataccagaatatgcagccaaactagacacatgaatgaaccttgggcccagcatactaccaaccttaccaaaaaggtgcaccacaacatcaacacaaactcctgcatacgtgcatatgtgttctccacacgtatgctaccacacacacgtacgtgcacacccacaccacacgtacgtacacaattgtgaacacccgagctatagccacaaaggcttataaccagaacatcactttaatgcatcgtcatgcattactcggcatacgctccgagtcttgtgccatcatgtaagtgaccactcaggatcaagacttactatcacaattacaacacagaaggggagacagaagcttactctaaacatgatggtatcgggtaaaccttgaataccacttagacacaataacctcatgcagaactaaatataagtagtttaccacaccctaaacaagtatagacaatcaagtaccaaatcacgtattaatatatgtacataatataacaaggatctaatcacaacctcatagcatatatcatataagtataacaatataacaaggcaagtaagccctcgaatcatatctcaattcatcaagtaaacttagttaaatctgaattcacttagcctagtcaccagtccattccattccttagtgatattactatcaagttcatcaaatgcccatattgactttgagattcaagttctaacttaagccgaattccgattagttaagtctaagtgagtaagcatgcatatgatctaaagactagctctagaaaacatgcaaacaaacacacaattcgaccaaaactcacagattcgatagttcagaaagttttctaggtctcgagcgaaactcctcgatcacggtcgacaattccttactcacggtcaagttttctcgaccaccagcgatgattctctagtcacggacaatgtttcctcgaccatgtgcaaggttttatcgattcgggcaagtttttcttagtttcggtcgagtttttaatcggacagccttttagtctctctctcttgccttcaaaaatgaaactgggcggagagagctctatttataatccgcccaaggttggccatgcattaccgcccgctgccacaagtccggacagctgccgcgcccacaggcgacaggtgtctcgaacgacagcgtggtgacaggtggcaacgagtgtcactccaccacccatcaacttcggctccaagactcagctgacttcgtctccaagactcagctgacttcggctccaaggttggtaacttgagccgcaaggcaccgcgagtgaggtgtcctactcatgtcggttccgcggccggtggggcaaacttcaccgtggcacgcccttcttttcccatctttgcccattcgtacccattcttgccctttgatgttttggcaccgtttggacacacgcggtcaattggctttgcattcgggcaaaagtttctcatttggtcctttggccgtgcccgatgcccttatgggggtcactacataggccctagccatgaaatttataaatgtttggtaacatgttgtgtcgtaatgactgataatgacttaatcctagtcggcacaacacttaaatatcgcgagggttggcaagcataaacgatgtttaagtgggagagtggtcgtctatacactggccaagggttgggaattggttcccgaacctcggttggatattgatgatcaatctcaatgtggcattttcgaggcgcctctgacttgtccggtcatagagcgtctcgggggcgttacaatttgtggtatcagagcatggttaatgatgctagcaggactcatgttttttcaaatgttttatcgagtaaatgagtcgcaaaagacatttaggataatccggtctgttcaccattattaggtagatgggttaagtttaccttgactgaatggatgcagatgtctggtcaaagaatggaaaggagtgagtcgatgaatttctcaccagtttatcaaaactggagtcagcatttcggtccggaagactgggtaccgtacgctggaggggaaggagatgagggatactattaccccaatatgtatggagcgcttgattgggatgttcccggaactacaccggaatactccttaccaaggtctgtgcactatagcacatctgaagggtcacattcagggacgagaccacatgttcctgtgaatcaacccactacagacccaaatccgtcgctgccaagagaaataaatgaaggaaatggggaaggtcataatattctaagtgtgtcggtgactcaacagacgttgagaatgattaagacc

SEQ ID NO: 680 - DNA, 1243 bp, Arabidopsis thaliana landsberg
aatttaatacatttatatcaagttttaatatgtttttttaaattttttttttttttagaagatcaattaaaaaagaacataaggagtaataattattattagttaaatgttggagattttttacgaaacacacaaccgacttacctaggattaacgatgatcggtatcgatcaaagtaatttaaataattaccttaataacatgtaaaagttaagatgtatccaattactaatttttcgtaatattatagatgcaaataaggtaagcagacgattaactaaaaagttatgttcgaatgcgaaaagagacaaaaacattacaatgctagattcatttacatgtatatctcaattggttgaaatagagacataaaaccagtaagcattaaaatatatatatttatacatttgcaatgtactattcctaatgtattattatattgtataatattgtcatgtatcatgtataactttctataattagactatatatcgtacaacattttcctaactcctttgatatatttttgggtaaattgcgcacagtaaccgttgacccacttttaatttcagattttgacattgtgggttgggcattttattttttagccattcagccaaaaactgaccaaaatgcccgtgacgaaactgaaacccggtttgtacgtacggaccgcgtcgttggaatccaagtgaaccgggttcgtacgtacattgttcatcgacgagaaatgcattaaatgatttctgggtttcggcgaatttgacacttgagattggaattaaaaattttaaaattggttgggctcaaaagtttttaatgctaaaaagttttgacaagactaaaactcatgattacctattataatagagattatattgtaagattagaattctgggaaaaaaacgaaatttgaaattgtgttacggtgaagaatctgtagttttcagttgctgttttacaaagtttgaaagattgaaggggagacaatctgtgttctgggtaagaaattcgtgttaatcctattaattacacttgagaacgtgatatgaaagtaatgatacgtttttaaaaatttctgggttcataaattgttttgttggagattctttttgtatttgtaaacccaaaattacatttttatgatgtaactgtttagagcggtcgtatacgtgtacgtgtatctcaatattatcgtgtatgtttaagggtttagtttaaaatcttgtttattctcaacaat

SEQ ID NO: 681 - DNA, 543 bp, Arabidopsis thaliana landsberg
cttcctttttttaataccagtgaaaaagtatgtagtctatttatattcttctttgttttcttttataatcatgagtttgaacaaaggtatttttcaagtattaaattgtcaaattttataattaatttacatgttaataaaatacacgaaactgtacaaatacaatgtgtacaactacatatactaaatatacaattacgtacacaaaagtacatatcaatatattactgaggagactacatataataaacaaaatacaagctgaggagactaaatatatttaaatgataccattaagatatgatatacaactacatatttactgacaaaaaaaaatagtagattcgtaatatataccaaattcaaatttgatgattgagtaaaccaaggataccgcgtgcaatatttaacgaaaagtgtattttgagttgccataacatatcaacaatattttttcttatatttgccatatgatttcatcaggtatccacctctctccatgtcatctagatcattctcagaatttacgttgttgatatttgt

SEQ ID NO: 682 - DNA, 530 bp, Arabidopsis thaliana landsberg
tcccaaactgtcgcaaacaaagctgatacgactaacagaatgtaatgcaaaaaaagaaaattttaaaagcgtcacaaattggttgcaaaattggtcgataatgggtcacaaaactagtcaaaaaataatggcaaaatatgaatgtcgcttaaagtttacataaacgtcgcaaactgtgactcattagtgaccaaatttaaaacgccacaagacgaaatttagaattctacatcggaattgaagagtttggttatgttttttaactaatatcgatcaaataaaaatattaatgtatatgaatgcatataaacaagggctcagattaaaaatttcaaaatacataaatcgagcgttggtaagatgtagctaagatgttgcaattgcgaccaatattttttcatccaaacgtgtctatatttagtcgctaaattgcaacatttggcctacgctttttatccatcgttaatgagcgactgttttacatctatgatttatgtagtcggtatttcgttgcaagaacgtcacaatct

SEQ ID NO: 683 - DNA, 2115 bp, Arabidopsis thaliana landsberg
aaacaaaatcaagataactaatagtaattaattaaacatctgcaccaagcaagtgttcaatgcgcaaaaataaacatgaattacctcttttggatcaggttaacaagattcactgagggtgaagttcctgtatgtcttgttcctgaagtacctaatatatttagttccgttggtcgtccaagtggagaaatacgtgaagtatggttatcagaggaagactatcaatgcgcacatggatatgttatacggaattgtgattattttcaagtaattgagaggtatataacaaaagtcatactcccattttaagttaattataaatgtttgtttactaacccttatatgttgtttttgtctttataatatgttcgaagattttctttctattaaatatccaggattgaacgaaaaagaactcctcgtaaaaagaaatgaggaatatcatgtgtgggtgaaagattatgtatgtctaaatagtttatctatatatgatttacatttatttattgttattcttatctataatgatgtttatttctaaatttgcatacaggttacatattggaactctagtaatccttttccaacttgggttcaagagatagtcgatggacctttgcacaaagtcaaaacatggccaatgtattttacaagaggctatttgtaactatggtgtatgtgtgaaaggtgaaaattatacggatgcatttgacgctgcagatttttacgcaaacttaactgatatcatagaacttgagtatgagggggtggtcagtttgaatattacactttttaaatgttcgtggtatgaccctaagctcggaagaggtactcggaggagcaatagtggtgttgtcgacgttctttcatcaagaaaatactacaaatacgaaccctttattttaggtacgtatggtatatatatatggtcatttagtttttctagttaatatacaaatatctaattctccaaatatggtgcatttacaaacaacatctcaagcgtaacaagtgtgctttattccttatccatacatgaaaaaaccaaagcgggagtggctcaatattttaaaagtaaatccaaggggaaacatattaggagaatatgaaaacaatgatccgactcttttgcaaacagaaaatgatgatgctgttttactcatttcaattgaagatcttgtactagaaaatccgggagaaggcttaaacccaataatccttgattacgatgttggggatgctgaacaagaagacgaattccgatgtaatttatcgtcctcggacgaagatgaagtagaatatgaagagttataaatgtgtgaagtatatgtctaattatttgataaaacatttgaatgaattgtgttttataatatatcattgaacatttaatttgttcatgaatatttcctatgtaaaaatatttttattttaaaagtataaggtgactattatgctactacttggcgactaaattataatttggggggcttccacattacgaagtccataaccattagagatatgacaataatacgactactcaacgactatcccttgctgtggtgggttgtaaatatcgaaacccaaacccaataaaaacagggacctttttgcgattaataaacgattacagcttaatttgttgggctaccatatatcaaagcccaaatccaatatactatatgacaaaaatgcgactattaaatgattacgttttaaattgttgggcttccaaatatcgaagcccaaacccaaatcatttaggtgacagatttgcgactactctgcgactacagacgaagttgttgggcttctaaatctcgaagcccaaacctaataaaaacggtgacagatttgctactcttttgcgactacagacgaagttgttgggcttttgaatttcgaggcccaaaacccaaatcatttagtgacaataatacgactacaatgcgactactacagtgttaaaaaccctaaatcgaatcatttctcattcctaacacttagccaaaatatcgaatcaaatcgatctctcttcttcttcttcttcctctgaaaccctaataatcttcgatctgttcttcttcttcattcttcttcaatcttcttcct

SEQ ID NO: 684 - DNA, 908 bp, Arabidopsis thaliana landsberg
  unsure (1)..(908): unsure at all n locations
tatgagtgggtaagagtttctcatcacaactatagagtatagtcctttgacctgaattcgccatgatttcttattcatggattagttcgctttagccctaaaaggtgattatatagacagtgattgggcgcgttatgaattgtttaaggaacatggatggaacaagataggatttgtccctcccatataacgggagataaatatctttgggcctatcgaagatttgatactgagaaatacatggtcgcgctcaaacgaggtgaatgtcagtcgtttgttttatcagtataaatcggagttcgataaacatggtctagctgaataaggatgacaatctcttgatatagagacaaagggattatgggaatagatgattccagtacaagtgggagattgctcggaatatcctaaaatcgtttgtactttactctagttaaagttataatgtcgaggtttgacatattagatggttataatgttttgctagagaccgcttataatctatgagtttaattttgattaacctaatattagattaaaagattattttatatatatataatatataaattaaagtaaaagtatataatatatatgatatatagatatacttatatttgtatttgagcacttaaataaataatgttatatatgtatataagatatacatatgtgcactaatacgaatatgtggtttattctcgtagagaaagtgacattgcatggattgggcttggcccattgactttataggcattaggttacttgaacctattataaaagtgatgcattatgactcttgagatgcagcccgttttgataaaaccctaaaacaaagagacacattgtttttctaagcnttgagatacgatctgggtatcgttatctaatgaaacataaatcggaat

SEQ ID NO: 685 - DNA, 826 bp, Arabidopsis thaliana landsberg
gcgaaaaggggtaaccgttcgaccgcccaaccgcccaaccgtccaaccgctcgactgcccaaccgcctggccaaccgtcggcccaaccgtctcactcccttcctaggttggtcgagctggcagagctttccttcgagctagccgagctaaccttgagctggccgagcttcccctcgagttggccgagcttatattgagctgtagtacagcccaattctggacttgcccgaggttccaccttttccctcggaccaagtcccatccggcgatcctatcgaggatcgcatacgctacaagtctccccccttgaatgggattcgtccccgaatccgacccaagttcctttttacccatctccttgaaccactccggggaatctgccttcatcttgttttcagtttcccaagtatcttcttctctatctccgcaattccacacaacccttaccattttcatgattaacttctgagtccctttctcaaatctatccacaagtcgaataggttttgctttcatcgtcaagtttccttctaattcggcgggaacatcttccacagggccatctcgttcgcttaggcacttcttaagttgcgatacgtgaaaaaccttatgaaacgcctctaactttggtggtagatcgagcttgtaggccactgccccaatccgttcgagcaccttgtatggccccacgtatcttggactaagctttttcctcttaaaaaagcgtttgttccctttgtaagtcaccgcctttagatacaccagatctcctactccaaattctaactctttccgacgtttatccgtataacttttatgtcggtcc

SEQ ID NO: 686 - DNA, 2189 bp, Arabidopsis thaliana landsberg
ggactatagttttctctgcattcagattattgtgtccaccaaaagccccaagctaagggtatgtgtctctattatatcattttttgtttgattcattgaagatggagatctcttatagattatttgattttgtctttgatatacctcaaattgccttaagcttactccctcaaataagagatcgtcgttagcacttaagggtcactgagctcttgatgttcacacaatagacttatgatgttgtttaataacctaaatgaagtaattgaatgttaaagacaaataagcaagtaaatgagttgtaaattcaagtgatttaagcgttgggtctaaggaattgtctcgggagatagataaattgtagatctagctaatattaggattgttatcgcaccgttctcgaactcaaactatgattctagagtaaccgatggcgttccgcggaactctctatacttagataatcagagaagccgagaaatcctatgctaaagcatgcattgttaataagcttgattagttcacctagtatctaaactagagcccttctatgagcctaccagttctttcttaaatgcctaggctcatctatgatagttcaaataacaagtacgtatggcgggcatacctattatcgaatatcaagttctaggtgatcaatctaaaactagcaataagaataatgaagatgaagaactctaagaataatcttaaggggttttcgatctactaatccatctaaatccctaatgagactccctaaaccaaacaaggtgattactcagacatgataatagaaacataaatcatattctgaatagtttgctttgatgaattaagaataatagtaaaggagttcagaatcctctctaaaaggattggattattctctcaaaaatgtgtcacaagaactaaaacaaaacttaggtctaacaatgaccaaacaattaggtatattcgtgactaaaaacgtgcatggactactttacaaataaggaagacttcagggcttctcaaagacttggtagaaaacgagaattcccttgacagcaataagagtgtcaatcaacacaagtgtggtgtcgatcgacaccagcttctgaaaaacgtccttcaagatcttcgttgctgaaaagctttcaaaattccttattgtgctccatagttcccaaatgtgtaagtgtacctgaaatgactcaaaacctatgaaaaagactagaaacactctagaaaccattatgaaactatgttagaaatcagtaaaagccaggacataacaactcccccagacttagcttttgcttgccctcaagcaaaacaaaaggttgaatctgtgaaagaggtttgaaaaacatagaatctcccaatctctctagctaattaccttgatcatacaaaccaaatccatgcactaaacagttctaatcaaatcctgaccaccatgtaattctccactagcccacacaacatgttagattccataccaaagcactcacctatatccactagcctatcatcgttgggtctcatcaatcaagttaatgtttaagaaccttctatactcattcttgtactataccataacaaatcaatgataagcaggttttttaggcctacttatgtgatgaatgtgtgtgattcagatcaattcccctaaaacacaaacatgtcgatgcagctatagggggtgtcaatctagtccactgttattgctagcaatcaagatgtgcacaaaaagaactaagtcaagccagattataatgatggtgggtttctagtaacaatcctaggtcaggattcaaacaagtaaaaataagaacttaagagccctactggatcattgggtcgagtagaaccaaccggcagaactaaaatgtaatcaacaggggatgcaaatagaggatacaaataacaggtaaataaaagtgcaatcaacagcggatacagatagatctaatagaagtcctaaggatggattcattgataagggcaactctagggttcatcagatggctaataggcgaaacgtaggtacccttgacgatagattcaaaaaccgagtcaatccactctcgtgacagagacccccataactctaccacttcctaatatcaactctcgttgatgaaaaatagaagagcagggtttaagaaacaatctaccaaagccaataagcagacaagccaatc

SEQ ID NO: 687 - DNA, 704 bp, Arabidopsis thaliana landsberg
  unsure (1)..(704): unsure at all n locations
aatctctggaatacagattctcaagtactaccgatttttttttcagtcttggaggctctcgctttcagggcatggttatgttgtgctttagaactatattatagaaataatgctttttattgaaggttgttttcgatgttgtgcatggaacatccttgagaactctttcaaaaaatggagaaacgaaccttgtaaaatttggatattttatgtgtataacattatattttctcaagggaacaaaacacacagacaagtcgtaactttatgggtttgttgaaggcggcgtgaacggtctatggttttcatagaaatctaatatctccattgcaatagtcttcacctgccaatatgttcacaacgttccgatgaacaactaaacaagaccatgcctttttagtaataacagagtgcatggacttacaatgttcatgtcgacagaaagctcttcaaaccaagtccttatgtctttctctttgtgtacagaagcaatgtaaatgcaagcgagtgttatgagaaacggcggatgtataaggatgcggtccattctgtatgtctcgttgacaagaaccctacggtttccacacaaaactttaagcatcaacagagcatttacatttttgcatgcaaatcaaaacagttctaagattgactttttgttacaacaatattcatnccagactaataaagacaatttgatacta

SEQ ID NO: 688 - DNA, 815 bp, Arabidopsis thaliana landsberg
agttagtatcccattcggatattttgttttggatatttttagatatttcgggtattgttgggtatttttgaatatatttggatatttttttggttattttgagtatttttattttaattttttttatataattttcaagtatttttgactatttggtctttgaaaatttaatatgttgttaatatataattgtatttcaggtatttttgggtaccttaaatatttttgttcgataccgattaagttccgattctttctgttttagaattgattatttctgtttctgataacaacaaatcattcttccatgtgatctccaacgccagatcctttgtcatcaaccgagaaagagtactcttggtcacagcccaagtaagagtcacacataaagtatagtgtgtatgacttctctcctggttcactcggtactgtgaaatcaagttttaccttagctttctgttgcaatgagacacgtttgattgccagccactagtttgtcttggtgtcgcccacaaccagctcttggtcaagtcctttgtgaagtgaggaagctgctgaagcatggagtctagatcccacatgccttgagctaccatctggcttactttcataggtaaaagagcaagattcatacagccattgctcgatatcacatagaccattgcttgaagaagccttggtgctgataaaaggaccctacactgatccatgacaaggttccggctgattttttgccttgagaaaagcgcctgaagaagtgcgtcttgtctttacacgaggggctgagcattctgggatttgaaaagagaacctcc

SEQ ID NO: 689 - DNA, 584 bp, Arabidopsis thaliana landsberg
gaatggaagcgacccaaggtggaagaacatgaagatagtatactgcttgagctgcattatgcaaatgaagaatgtcaagagtggaatcaagaactacaaagacttatgggagttgtatcaattgtagctacaacagaagacgttgatgtcaagaggaagttgtttagtattaccacaatacaagagaacaagttgacgtcaagaagaagttttctaatactaccagagtaagaagaagagaaaggtctaagtttatttgataagaaaggtaattaccaagttctcgagaccaaaggaaccaggagaagaattgggaaggagtagggctacatcaagagatgaagacatgatgtagagactgaaccaaaaatgatattcagagaagatcagaaagcatcaaagaagaacggaaggattgaagcgggtgtacttatgatcttgtcaccaggacatgacctatacacaacaaggagcttttcaaagaagagaaacgtggaggagctattgacaaatggaggaagtcataggacagagatgcgaggtatgattaacccaaagtagagagttgttcagagtacctagcc

SEQ ID NO: 690 - DNA, 1053 bp, Arabidopsis thaliana landsberg
gttttaaaataatatactcaattcaatttatcaaaatgtggaggttactctatagaattaaaatatcatcattttagatattaatttgatttaagataaaatgactaaattaaatattaaaatggtatggattactatttagaattcaaagattatcaataaatatttatatttattttttatacctatctattttggcagactttatctaataaatatatctatattattaacttttgttatatgttgtgaatcatgtgggtggagataatctttgtcacttataatatcttaatcttgtttcacaattttgtttgcgtttgaccaaagttccaaagagaatgatgagagcacaatttcgagtttgttgatgagtcgatagggttttgtgggctttaaataattttgtatatgttagtgatttatatatagctaggtttgcaagtgtttcattggaattggatactactttgtatcatcctactatattatttgggaagtacattttaaatgtaaccttaatttttgtaattaattacatgacaatgctattagaaaaatttaatcaaaaacaaaatcttttaatgacatcattaagattaccaaaatcatttaacgacaatattcatctcttaattatagggcttattggatttaaagacaggtcatcaaagatttcctaaactgaagcaaaatatactgaatattcaaatatctatctgttaccaaattataaacaaataagttcgtaaaacaatttaatattttatatacaaaatcaattaaatcttaatcacataaaaattagcacaaaaaaaatatggtacattcgggtctatagtagttttgcaagacttttttggtggatttgggtaaaagtgcattcgggtcatatggtacattcccctattaaataaatatggtgcactcctatgttattagctaaaatgtttagattataattcagagtcatatcataaataaaattaatattaataaaataaatggctttttggcaagacgaatttggagggacgggtttttgaatctaca

SEQ ID NO: 691 - DNA, 900 bp, Arabidopsis thaliana landsberg
aaatctgatcaaaactaaagactagtgagattactcttatcaatatcctagtggtttcttctcgattgtgacttagaatggattgccatgagatctcacaatatttgttgtttctggcatcaaaatctacatcagatatagccttcacaaatgattaaaagtccttccacatcgaaatcttgttgaaagaggttcaaagagctgatttgttttgtgtcaagtggttcatcgtctgactcatccactttaagaagactctggttctgaatatacttgaatctgtaatatgataccagaactttgatcaaatagatagatccaaacgcataacaagccaagattatgccacaatttgtatataacaaccaaccttaaaacgatgcattagatttatgtttgcctactttttacaagccttgtttgcatctggctctatcacttgagtttccgatacacggcttcagctgttgtaacgtcacattcaaattcatcagttcattgatcaaaagaattcagaaatctaatcaaaactaaagactagtgagattaatcttaccaacatcctagaggtttccttctcgaccgtgacctgaaatttccggccatgagatctcgcaatttttgctggttttccattgaatgcttcttcttgatatatcatccaaagttgtagcttcaagagctcaacttgctcttctgttcttccacctttctgctcaaaattccgattcaattttgtcaattctacaatctaataacaaaaactgagagaaacgagaggatggtctcagttagagtttatttaccttataaagatcgatgagtacattttctaatgattcttgagcttgtctcagccaccaacacccacaacaaacataaaatttgcctgttttaaaa

SEQ ID NO: 692 - DNA, 503 bp, Arabidopsis thaliana landsberg
gttattgaaatctgaatgaatctctgtaaaacatggatgaatagcttatgtctctaaaagaaaacttggatgagaagaacatcttaggtctaaacaatgacttttaaaactatatatattacctaaaaacgttcatggactaataataaaaatagagaagtcttatgggcaaaattttcacttctttaaacttgaaatcgtcatggacttctctgggccgaaaccggtgtcgatcgacaccaagagtgtgtcgatcgacatcgttaactaaaaagactctaagaataacaaaaagactcaaaatcctatatctaaaacacagttaaaaatggtaaaaacagggttatatcaccgcaccggctaaaggattacttactagggttatatgaaaaataagaaagtagtgtcatgaataatctaagattactcagtaagcctgactaccaaacctataatttaccccaacccattcccgaaactaaaaggaagcaatcaattcacac

SEQ ID NO: 693 - DNA, 1382 bp, Arabidopsis thaliana landsberg
ggatcttttgctgtggtaatcacaaattcataaggaatattttatactccatcacccactactaatatccactatgaaaactctttaatatctttcgcttaactaacacttaaatagtgagaaaaagacgcatactctgtgtcagaggctatggcaatgactccaaaggtaagagtcatttactagtaaaacttatcaaaaatcaccttcaaagacaacatccttgccaccaaacgagtttgttctcaccatgcccacaaatatctgacaaactactatccaatgactcaaaacagtatttgctcatcattggagcttcatcccatattatcagagaagattcgttgactaaatttttcctatctgaaccagctttcatattacatgtagtaaactcataagaattgagaggaattccaaatctagagtgagctgtcctaccaccttctaaaagaagagaagcaataccactggaagaaacattaagaacaatgtcaccctttgacctaggtgcatcatagagtgttttccgaagaaaagttttacgtgttcctccaaatccagaaacaaaaattactcctccaacgttttcaatcactgcaacaataatgtcgtcgtaaatagacttctgctctagtaactgacgtagataccatccactgctccaaaatattgttctctttaaatcatcaatgtattccagattattatcgaataagcctaatgctttacaagcatctttcaactctttatataccacaccattaactctctagagctcttcaaaacatcttggtcgtggttgaacattgaggattattctcaaatagtattgatcttctatatcacgaggaacatagtttattatttctatagcaaaacctttgtttctgaggttaaacttcttttcttgtgcatcataggtaaatctagtggggatgtctgcataagtcagcttcctagcaatcttactaactttatttaattcgaaccaagcaaggaacatagagccatgtagatcagtccgattttaacactgtttttacttcttcatcatgtttgaaaacaataagttgttcccctggcaaatggaacgaaagcttcgaaacaaccgtacatctataatgtataggatattttaatattcttgaggctgctttggaagaagaaacatatctgaaattcaaaattatacaaccaaaaggaacatatatatatatatagtattaatactaataaccttttaataaaacataccaggaattcataaagtcttcacttcattcttcttctttatctctaatccatctgaatcagcattgtctttttgttaccccttctttatttttgactttgatccattcacaacatacacgatctgt

SEQ ID NO: 694 - DNA, 502 bp, Arabidopsis thaliana landsberg
ggacctaccaagattgccacgtagataaaaagtaatcccacaaggagtaaggcccgtcagattcctggtagaatggcattttacgggcgaagtgggggcaaagtcaaagtcaaggacggattgggctttatcggttaaagggcgaggcccatgaaggtcagagtcaattcaaatacgaacgtttaagcaatcaatttgaaagccaaaacggacacatttaagaaagaataattatgtgtaattaagaattaaatatcatttgtgagtattagtagtagggccaagagccatgaaagacacacgcatttttgtgcaaacttactatacgcatttttcatcaattcacagtcatcaagaataatctttctcactaaataattaaatatttgagtgtgcgaatccgacatccacaaagatgagatcacgaaaaatgagtatcaaattcggttgaatgctttcattgatgcttctagacacttattaccgacaggattaccttttt

SEQ ID NO: 695 - DNA, 1257 bp, Arabidopsis thaliana landsberg
aatttatgctaacaaaaatatgacggagttaacttttcgtaacgtttgaaaaataaataaaccgttaaagagagaaacaagcacaacatagagttacagaaagtttataaggtatttttctaaatacatataagggattgttctaaaccaaacgttacggaaaattaactcccttatttttttagtcaacaaaaatttaacagtatgcctaaaatgacttagtcaacaaaacttaaccattttattataaagttaaactaaactttgagatttaaatgacatttcgaaagttcatgtattttcgtcataagtttgaaagttaccgattttttcgacatcccccctccccatccaaaataacattaacacacatcatgttgttatttaagttaaggcaagaactccctgccgtttaggcccctcgcttctttgggtagaaaagaggcgggaaaaatagataaaccctaaaagagtgagagcaagaagtaaaattgagagagcgagagcgagctagaaaaaagatgactcataatcatcatcatcaagctgttgacaatctgctaaatgttttctcaagagcttctcatgatcttactgttgttcattccaagctcgacaaggagtttcagcagatgtatcctgctaatgtaagcaaaattcgattcaatactttgaatccaagatctatgtaatctaatggattcaaattaaccatctttaggcgaatccgatgaagctgattcagcgaatcaagaagttgcaggaagatgtgactcttcttaaacaccaatgccttgacctattgtctgctaaacaggttcgtatctcgaagataagcttcggtttagctcgatgaacgatgcatgtatgtaatttgaatcaaaggatgagttttaatctatcgcaaagaagaaaggttaaatttttcgtgttgagagttttttgcttaggctttgcaagatctgattcgactgtgactgttatagaaacgatttgtgtgtttttgttataatcaggatttgattgataaggcacagactacacttgttggaaactgtaaccttattcagaaaatgaatgcatcattaggagaatcaacgaatggcgataccgatgatgcattggctgattttaatcaggttcgtgctctcttcttcgttggtactgcaatggagtttcttattggcttgaaatgtttgtcacattgttcagagctttctctaactagtgcaatatctactgatactattggatagc

SEQ ID NO: 696 - DNA, 1286 bp, Arabidopsis thaliana landsberg
gaagtattttgatattggtggaaattcattttctggaaccattccctcttccctcttcatgctaccttcgttggttgaacttgacctgaggagaaaccacttccgcggacctcttgagattgggaatgtctcttcacaatctaatctctctctacaagatcaagtattgagctggatcgcagctgcaataggctacgtacctggtgttgtgtgtggactcaccattggtcacattctcacttcgtataaacgtgactggttcatgaaaagcatgacctcttaggaggatgatgcccccttgttataatgcgtgtactctaatgttttgagttgtataatgagtggtttgttcccaaatttttgttacatactatctatcatcactctcctcctcctctttctttcatttttcaataaatatataaatcttatgaaacttgatcaacctttatcgtcaagaaaaaatgtctcaagaaagcggagccagaacaggttctgattcattgagctatattactcaatggtcagtgtacttagcaacagtcctgttattctctaatgtgattctactgctgcattacgtaccgccaacattcatgattttcacgagggaacaaaacacaacgacatagattgtcaaaacacttcatgtatgcataagctcatttacttgcgggtgtgctcaccaaaccattttgtcatgtaggcacgtttataagggttcagtgtcgttggagccggtttagtagaaccgagtagttaagtgttgaccaaggtaaaccgaggtcaaagcatcattataattgtgagagttgtaaacttttatctgttacagttaaaagaattaacaaacttttccacaacttaacttcttcatcgaggttaatctctttactaaactttttgtttaattaattttgtctttttattgaacagaggtgaaatgataacaaataagtctggtcaagaacagagtgtttttttatcctctcttttttttttttttttgtaacgagaaaaaataaggtttaattgattgattcagttggtggatgataattgttaagccaaatggtcaagaaaattaatatcattcctttagctgtttttgtttgtttgttatatatacgtgaattagaagaaataagtcccaatttccgaaaataaaacagaggaggtcaagtttaaacgaaaacttgcaagtgaagaaatattaaagacaaagatttggagacgaaggaaatataattaatgatattagttgattaattaagaaaaatttgatt

SEQ ID NO: 697 - DNA, 2637 bp, Arabidopsis thaliana landsberg
gaactcctcatgagctcaggaatgactcaatctctcttattgtcgtgaaaaatatcctcacagctttagatacgttaggcatcgatggttcgaggtagcttgtttctgcatagcacaaaccacatgtagctttcaaatactcttacacatttcaattgcatcaaactacattgaagaatataacttgtggactcccgaacaaatgtaaaagtgaaaagaccaaccaataaaaaattgggtttatcgagtaagagagttacgtttctcctcgagacgaaacttcaggctttcgcttttgagtgtcagtgtgaacatcttctctagctctcttcatcttcagtcttcttccactttctcccgcagactgatttctggaagaacaaaaaaaagaggcttttaagaagccaaaccaaactaagaaccgtggaaatagtccaagccaagagaaatagctcggaatcgttgtcccaagtaatagatctctcatcggaaaatcttaagagaaatcacaaaaaacgaggaaaaattctgagcaagagattttgatttaaaacctttgtagaccggatcacgttactcaaacggtgaagagagcttcttcgttcctttgttagaagatgaaactcggaaagaagtcggaggatcggtggaaacgttggccgccggagttttaaagtagagagatttagacggaaacttggcaaaatgaaaagcaaaagaagcttccttttggtagaaaatagatgattcaatggtgagattgcttctgattaggagcaatctctctgtctctctatgtgtctccctctctcgctgattttggaagcggaggagggaagagggtaaggcaacggaacgaggaagaagaagaaaaagagaggagcttgttttgcttatatacccaaagaaatcttcatgtctgtatgtaatcagaaccttcggagctaaatggaaggttacgtacgaaattggtttatttttcaattccaaatcaaacttaccggtttaatattatgtaaatcaaaaaccaagtaaaaagcagagttagggttttttttctttcaactttcattacctatgcgtaagtgaggatttgatttaaggttataaaaacgaaacataatattccagtctattcaaactaaatctggtttattaatattcgtttgtagtaagtaaagtataatatcctaattttacctaaaaagctcggtcacattttcttacaagtgggaagaatatgcaagggaaaaatgtttggtctatgaattttcatactgtgttagatgataaactttaattaggtttgatttgcatcaatttaatagcaaaattaatggttcaaaatgttttctaaatataaatatgtattgtcagagctatcatcaatgggcgtttggtctagtggtatgattctcgcttagggtgcgagaggtcccgagttcaattctcggaatgccccaatttttttcccaccctactaaaacttcaagtttctacaacactagaatttagatgtaactatcttcttgatttgcttttacagattttgataggtttggtgaagaacatcaagcagaagattaacaagagcttcacacagaacaggttaaaatagcatagaagatcaatattagattctcagatctatcataaacaaaattgcgaccatagcaatagaaagttgttcagttagaaattggtcaggcaggtgaagagaaaaaggcttcacctggtgagtttgaagtacaagataaagataatggcgaggacaaggactgtgattatcgcaccgatggtccatttgtttctattcattctcctagtcattgttgtcaatattttcttgctctttccgacgttatcatcgactccatgaagcgtttcatgggcccgtaagagagactgtctctgcccgtgcaaatcctgaaggattgaaacaccaagctcttctgtctccagtatcgttctcctactgtccttgattctgtctgtggttcggcctaaatggtctgttgacatcatcaatcttgatctttgatcagctgaagcctaacacccatttgtatcatcagtcagagagatcaaaatatgttttaagaacacgatcaagattgagtctctacataccgtcaatgtgtcagccataccagcttctagtaactcatctcgagcagtagcgtttaagtttccagatgtgattctcttcacttccgtcttgaaattgttaagatcagatttgtattcccttaatttgacaaggagactggatttaacattgggtggaaggcttcttgcctcgaggtccattttcttaacctggaaagaacaaaaggtagatagaaagtaaccatcgaccgcatacaggacaacggtgaaacttccatattccattagagcaaacccaagatcacataccaaagcttctgcttcctcaaccccagattttatttcagatagcttctgcttcttttgttctggaaattggttaagtccaagcttatgatgaaaaagggaaaaaatcttggcacaagtaagcggtctatagtgatgatctattcatactagtgatctatcaactgcaacctatgaaacaaaagcaagcaccgtattctttacttacaatgcgtgaaggag

SEQ ID NO: 698 - DNA, 546 bp, Arabidopsis thaliana landsberg
agagaaaaaaaatggacctcaatagcatattgttcagcaggcaatccaaaagcatcccattccataggttgcaacacattgtaaccttgcatacgcctaagcctcgctagaatatcagttgctgtataacccaatggatgtcccacatgtaatcctgctgcactgaagaacaaaccacaaaacacacacaaaaatttcatcttttccacaaaacccaaaatctgaaaacctatcatctattcaaaatcctaataacgttgccacttgggctcaatttcgtgaaatggatagacccttgtcaattcaatcgatgtagtcgacggttacgacaccaaagcttctttattgctaccatgagactacagccgtgagctcctgactccgccgcgatacgagcggcgccaacggaaagggagacatgaaaagggtcgctttagaggagattgaagcgtaagatagctagtgaggcgtgtgtggcgtccacattgtgatataacacatgggtcagaacgaatttggaggatttgatgatgagagctcattctg

SEQ ID NO: 699 - DNA, 576 bp, Arabidopsis thaliana landsberg
aatctcagcacgagcgggggaacaccatccaaataacgacgttccgcgcgctcagccgcaacagggcgatctcagcacgagccctactcagctcgtctaatgcatggccctactcttgcatggctgcctcagctgagtcccgttcagagatagaatagtgctctgaacaggcctccgcaccctggagactgtcctcagggcagcgcaccaagcaagtcgcctcccagcggtccgggtagaccccgcgactgtgctggtagaccacacaacgatactcgacggaccaagtatgccggtcaaatgcccgacgtagcagggtgtcgagcgcatcgtggaagtgacacccgcgagcagcgtcgcgtagtgatgggtcgagcaacccatccttccggctcagggttagcagagaagtcggtgtcgtggctcgagctgtcgtcgccatctccgtcgtctgggtctcctccagcagctactccagaagctggggcgccagtggtggtgcagggggcggctccagaggaagcacaggagagcagctcctcacagactctatctcctggtggagcgagaaggaag

SEQ ID NO: 700 - DNA, 434 bp, Arabidopsis thaliana landsberg
tttcatggtgaatccaagggtggagaaagataaacacatgtatggttgttgatattaatttgaaatgtaatttgtttagtttaaatttatgggtatttattttggattgatgggatacaatcccacgcaaacttgcgacatcaaagttgaacatctggctatagctataacacagtgaaacgtgacaatatggaaccctacaaatatgaatatcaaatggtatttctttgtcgttagttaattacgtgctccgtcaatctcatcatcataactcataaaccaagattaaaactaagattaactaaattaaatttccattggtattcagtagtcttcacatgatttagtgatttaccattgatttctaaaaataattacaaaatcttaccagatgtttatttagttttaaaacatgtgtgaaacatctgataggt

SEQ ID NO: 701 - DNA, 545 bp, Arabidopsis thaliana landsberg
caaaacgctaatgcgacttcagataatgcttaagaagcacctcgagcaggagtacgatcttttactggaaagtgaaggcaccatatgtcaaatatcctatgatcaataaagataatgagatcatcaacaaagagtacatcactagatctctacttctctttctaaagtaacaggagctgtgcacaatgaagagcctatctcaagctcgaaggcaataaataagattgaatcaaacaagacttactctccaagcctcttatgctggcgaatgagccctaatccagttccatcgatccctgaaattttgaaaaactagttttcaacaacaattccccttcagcccaatcagaataacgaaatcaattaaaggaaatatctatttccagccctaaattgaaagaaacagaccaggtaagtagagaagaagaggagattcaggagcacgtgcgccacattccaacggtgagaaccaccgtggcggaccaccatctccgccgtctgaattaacgaaatctccagcttccgttaaaaaatccgtcaaactc

SEQ ID NO: 702 - DNA, 5995 bp, Arabidopsis thaliana landsberg
  unsure (1)..(5995): unsure at all n locations
ctataaagtaatgccctttggtttgaaaaatgacggagctacctaccaacgattggtgaacagaaagttcaccgaccagctcaggaacacgatggaagtttacatcgatgacatgttggtcaaattggcttacgaaaaggacgacatcccacgattaagagaatgctttaaaatcctaaacaaatttgaaatgaagctaaatcccgagaaatgctctttcgaggtcccatcaggagaattcctcggatacctggtaaccgaaagaggctttgaggccaatcgnnnnnnnnnnnnnnnnnnnnnnnnnnnnnnnnnnnnnnaaaaggcacgagaggtccaaaggctaaccggccgtatcgccaccctcaacagtttcatatcctggtccactgataaatgcgtcccgttctatcagctcctccgaaaggataagaagtttgactggaatgagaattgcggacaagccttcaagaaattgaaagcatacttgaccaaaccacctatactcgcaaaacccaaagaatgagaaccgttgtacctgtacacggcgtcttggtaagagaagatcacgaaggacaaaacccgatctattacgtgcgtaaaacgttgatagacgctaaaacctgttatctagcgatggaaaaactagcactagccatagtcatgtcagcgcgaaagctgagacaatatttccaatcacatcccataaggacgactcgcgaaaccattttgcaatatttccaatgacatcccaatatttctaatatttccaatgacatcccaaccaatcggaaccattttgcatagtccgactcaataaggacgactcgcgaaatgggccatagaactaagcgagtacgatatagaatatcgcaccagaaccagcttgaaagcacatgtcctagctgactttgtaatcgagctccctttagcagacctggatacaaccaactccaataagaagtggctcctccacgtgacggctcctgcaaccgataaggatccagagtaggaatacaactcacctcccccaccggggaagtcatcgaacaatcgttccgactcggattcaacgtatcaaacaacgagtttgagtacgaagccctcattgctggcattaagctaccttaaggaatgggtatccgcgatatacacgcccagagcgactcccaactcgtcaccagccagttccacagggaatacgaagctaaagacgagcgcatggaagcgtacctcgaactagtcaaaaccttgacccaacagttcgaatcgtttgaattaaccaggatccccagaagagaaaacacctctgcagacgccttggcatctctcgcttccacgtcagatcctttcgtcaaaagaattatcccggtcgaaggaatagcatacccgagcatcgacctaacggtcaaacatgctgggatggaaacctccgcaacttgcaacttcacgcgagtaacccgaagcaccaccgcggcagcgagagctctcgcagcagccgcagaggcaagtgcagcggaggaagagccatagctcgaaacccccgaacaacctgccccgtaccaacgtgccactggagtatctcaatcatcgattacatcgaacgagggatcacacctcccgacaagtggaaggccagaaaactcaaagcccagagtgcaaggtactgcatcatggaagggagacttatgaaacgcagcgtcgcaggtccctatatggtgtgtacctacgggcaaaaaacaaaagacctcatgaaaagcatgcacgaaggataatatggtagccactgtagtggacgtaccctcgccctcataatcaaaaagcaaggctacttctgaccaacaatggtagccgattgcataactcattcactcaggtgcgataggtgccaacggcatgcacctacactgcaccaacctcccgaggaaatgtcctcaatatcttctccttacccgttcatgaagtggtccatggacgtcgtaggtcccatggaagcctcaggtgggaagaagagattaaaaaacctgctggtcctcaccgactacaataccaaatggattgaggctaaagccttccaacaggtaaccgagaaacaagttgaggacttcctgtgggaaaatattgtatgccgacacggcataccgtatgagatcgtcactgataacgggactaacctcacctcgggaaaaattaaagcattctacgaaaagtggaagatccgtcttaccacatccaccccccgttacccacaaggtaacggacaggcagaagccgccaacgaagctatattgagcaacatcaagaaaatacttgatttcaaaaagtcaatgtggtccaacgtactccacgaagttctctgggcctaccgaactacaccttgcaaatcaacgcaagaaacatcgttctctctcgcctatggtttagaagcagtaatccgtgtcgaaaccatagtaccaagcgtaagaagaaccgccagtcctgctaacttggacctaaacacgcaaatgctacaggacaacatggacttcatcgatgaacgcagagatcaggcaatgatcagagttcaaaactatcaacaagctgccgcccgctactataactccaatatcaaaatttggagattttaagtgggagagctcgttctacgaaaagtgttcagcaacacgagagagctaaacgccgataaactgggaactaactgggaaggtccctatcgaatcatcgagatggtacgtgacggcgtctataagctcgaaaaagttatcaatggagtacctgagttacggccttggaatgccatgcatctcaaaaaataccacgaataggtactcaaaaacaaatgaactacgataaggcttgatcccttggcagggtacgtacgcagctcctcccaagagcgcagccaccaattcaatcaaatcaaaagggcttaatcccctaaccaggtattcaggcagtcacctccgtaaatgcaattaccatctcaacccttctatctgtaagacaaaattttaacaagggaaacggacatcgcatctctcatcaacgaagatcagctgctcacctgacagttcaatctcccttcagtatcgagcaggtccctgctcgatgaccaaacgccagatcgtcgcttgctttacctccttttgtacttaacaatttcgagataagaacaaaaggaaattttgatactcattatcatatttcgcaaaaaacaatcatttacactatgatttaaaactcattcgtaatcttttgatacctaaagcccaacacccgaacgttggcggatccattttgtgatctcgcttccaaaaagtcgacagtgaactaaaacttataagaacacatcattgcggcttcatcggagctcacctactacaaccaaatctaactctttcgctatcaatgcataacatagtaaccaaagaagaaacgaaggtttcattcgcgacctggcgataccacaagcccacctcccaaaatctggcaggtcccttgtgtgaccgcacttcaacaggttcccaagacaaaacaactcaaactcagtcaaaattttaaccttcgaggaacataccatatcacgtccaaaatgatttggacgcgaaacaagtccaatcattatccggaacatggacaaagcgaggtggtctcgcgccaaaatcaacgaagtgtcaacactcgaacgtaagacaaaaaatacttgttaaaaaggataaaagccttcccagtcattcgagtacttaaacgaagaaaggataaaagctttcccaggcaccaagttcaaaaggcaataaacgaaaggataaaagccttcccaagcattaagtctgaaacaaaacatgaaatcctaaaacaaacaaggagcaaaagtgatcactccctcgattctccagctggcgtagcgaagacagtaccagaaccctccgcgagacctcccggaaacgcatctttgttgctcccaaactcatccaagccaattggcgtcccttgtcgtcgacgtccatcggacgtaccaccgaaatctttaaaactgcgggagatccaacttgcttagagtaaagtctgatacctcctttgacttgcactacgcctctaagtcatccagctctgctcgcagccgaggtttctccacggtcagatcgatagcagccttggtgatctggtcgatcaaagccaggttcgattccacctcagccgcttgcccctccagtaccgtgtactcctttttggcgacccacttctccttgatcccagccagtagcttcgaatacgcagcagccagctcaaccttagcatcgtgaaccgccctcttcgccccttgtgcaatcgaagtcaggtccaccacctttttggagagctcttccctcttctgctccaagcaatggattaggctcctcgacgtctgcttgtcagcttgtaacccccagatctccatctccatgaacccgatcttctcagcaaaacctttctcgaggtcttttgaagtggacagctccattttcagcctctcgatctccgcctgaaataacaatcaggttagaatcatcaaatcaacgacgaattatttataaacaagtcaaaactgaggtgtacctggaacgagacttcgcgatcctaaccagccttcacactcgatgtcagctccaggatgagggcctttccttcttcatgctcgttcgccgaggggacctggctcagacgctgctcatagagagcaaccagcttgtttgtggcagctatcgcgtaccgaaagcaaaaccgaaagtcataactagcgtaaagatataaattagaaggagacagttatcgataattacctcgccctccttcgccatcatgtcagcataggccgccgcctcggccatgttcttcactccaggaacctggcagttcctccctttgatgtggcgaagcaagttcgctaacccagcctcgtcctcaacgattgggtgatcacggtcgtgagcccaggcgttgactcgttgaacacgaaggcttggacgcctcattcttctaatgagcgggagttctgaagtggagctggagtcaggaggaactgagcagatagagcacgacatttgttagtaaccaattcaagttgcgcaactgtctcaataactcatacttttaaaaaaaatatatatatatagcggaactcgtacctataggcaggttagcttcgggaaccggttcaatccgcgaaacctcttcgattggatctagctgtgcttctggaggaacgattgtgggaactgctggagctacgggaactgctggagctacggcaagagcagctacgatgcgatagctgctgaaagcggaccagtcagtctgaccacgtcggagaagggctaacagctcaagttcggtctccgagagagtaacttccttggtccttgctacaaatcatcaaaaacaagcaattagtttcagtactaacgattagcaaaagcattcaaggattcaacacaaacaacaaagaaaaatcaagaggctcaggtctccatctgacccaggttggtagaccaggtccttgttatcctcccgggatcaaaattgccaactgaatgacgatctactctgaaaaagaaatacttggatcgccaattggtgtctcggcaggatttcaaaccgccgaggaccagagatccgggacgtgcactaatgtagtacgtcccttggtcactcctaacattggtcctgacctggcagagctgaagcaggtcatggcaactgaattctctgtttacttcccgagcccgggtgaataatgccagcacatggcggacgaagttcggacactcatggtggtgtcgatcgacactctcttcgtttcctgcaagaacaataggagaaacaagctttcgaagaactctaggcttgttattttatgaagcagactttaaagaatcgaaagaattaatcgaaggtaaagcaagagaagagataatagagtcattatcacagagggctgcaagaggtgttggttgaa

SEQ ID NO: 703 - DNA, 1210 bp, Arabidopsis thaliana landsberg
tacctcacggaacttctacttgggctatatgtttcccgtcgaaagacgttatccaagccgatgacagaggcttgtgaggcgaacaagtcattccttcagtctgctgtcgacaagaaagaatacagtagaactctgctggtcgacgatggtagctgtcgacacctcaccgtgaaggtcatggcggccggtcacctcgtagagaccgatcaccacgtcgtgactcacctcggaccgcttcttggactaggctaagcaatgaaccgatagcagacttgcttcggaaaaagagagaaagaccaactcgcagcagttcctctcctaagagagataggacgagaccccgaactgatcgctctcctcgatcatctcacccacctcgatcaatgggtccccctcctccagtcatcgcatcttcttcttctagatctgggggtgaaaagactggtcggagtgcagattcgtgacaggaagaggctgaccccgagatgccaacctaagtctaaggccgttctagttcctcaaaccaaatcacttgcaggttagaaattaccatttatcctctttacttgctacatcgtttgattcatcggcctaacttctcatacacgggttcgaatctctttattactttgacagcgatggaaacagaggaaacttcttccaatgcttcaagactcggaaagacacaatcctgccaacctttgacaggtggcgtcctgcaattcgcgagcgattcctacttcacgcccatcactcatctcgggttagctctctttatttgtgacctttaagctccactctttcgcttatacgctaattcacctttgtaacccttggttcaggcaaacatcgaactcaatgacatgattaagtattatgagagattgttgcttgatagggaacaggatgttatggcctggaaagataagttttcttctcttgagtccgatctacgctcttccactgaagtcatgcaaaaattggaagatcaattggacaatctttccttcaaactcatgaaatcgaacggggagttgcaggatcagtatcagaggtatgacaagatccaggaggaactctcgaatgctcggggcagactctcagaatctgaatctagtgcttacgacttgtccaaccagctatccgaattgcaggccaagtacaaagcaatcgccaaacttcgagatgctgagttagccaggtcggcatc

SEQ ID NO: 704 - DNA, 1605 bp, Arabidopsis thaliana landsberg
cctggagtgttcgtgcagatgtactcaacaatgtccactggctgagccttctctttcttgaccttaggcagcttgatggcactgatgtcccgtgtcaacagcttagcttcatcggagctaataccattgtcaacaagtcgcttggcatacctgttgagtggagaagaacatgtctcagatgcatctttagggagagaagtgaggatcttctccatatagtatctccaatcaactcctctaaaaaaggtaccaagaagttgtacctcactgaaaccatgatgttggtaatcccgttgatactccttgaaacgaacccaagcagccttgaaagcttcagctggaccttgtgtgaaggtagacagcttgtttcttaactcctcagacttagcatcatcgtagaaattgttcaagaaggctatcttgatgcttctccaagtcttgagggaacctgctttaagttattttagccaagaagcgccttccccgacaagtgaataaggtaagagcttgcacagtaggtagtcctctgagactccattagctttgatgctcagaacaaggtcctcaaaacgctcgatatggtccattggctgctaatgagataagccatggaaaggatgatggccaactaaagcaaagtagccaggcttcagctcatagtcgctcctctggaatggtggggtacaatcgctgatcgattagcataaaacaagtctggccttttgaaatccccaagtgtacgacgcggttccgcaactgcaggaatctggtgttggtgtcgatcgacacctctgttgtgtcgttcgacaccgattgcattcacgtgttgctcctgatagtgtcgagcgactcccagttggtgtcgctcgacaccgagtcatgctgcatctcgagcagctaattcgcatttgaggcgcgcctgatcctcattggcgtcctcaggtaggatgagtccatgatcatccaatctctgacccgcttcattgttggtttgcccatcctcatctctcaaaactccttctacatcagctctgatgactttgtcagccattgctaatctctgagtttttcagttggtgcattcaaattttcccaagtccagaacagacaagtcgatcagcttcttctattgtgtgctccttgtttacctaggcatacacctgagacacagaaaagaagaaaacaagaaacgcgtgagtgacaaaataaaagtaaaaactagacgaaatctccaaacttaactcaatggtgattcccaagaactttggcaacagcgtcaaatttgataaggttcaaattaccctaagaactactctctcaaataagagatcaattgcagaatttaaggatcgatttctgaaaataaccgatctcagcacattcatcattctccccctcttggactggaatctttagagacgaagtgaacatgcttttgttgcacttggaggagcttgtttagtttgtcattgagagctttcatctctctatgatgcttgtcatcaatgttagagctggtgcagatgcctctgtcataatgctcaatttaattgccatccgactgagccaatttttcaactagctttcatccttcttccacatccg

SEQ ID NO: 705 - DNA, 1102 bp, Arabidopsis thaliana landsberg
  unsure (1)..(1102): unsure at all n locations
aattgtaatattttatttgttaatgtattttgaaaattaacacatatttttttatttttgaaatctagtcatatttaatcaatttttttaatattttagtaaaccatgaatcttgaatttggaactcttgatatcacaggagataactatttggcattggtactgaatgctgaaatttatctacattcaaaagatctccttgataccatcaaagatgggaatcaaactcaaagtaaagaaaaattagaagctatgatttttctgcgataccatctccataaggatctcaagaatgagtatttcagtgtgaaagatccgcagatcatttggaacaatctaaagcacagttatgatcatgagaagactatgatattatctaaggtccgatatgattggactcatctgagactccaggactttaaatatgtaagttagtacaactcagccttattcaaaataactttaaattggaattatgtggagagaaaatgacggatgcagataagttggagtagacattctctactttttaatgctaataacattgtcttgcagacacagtacggtgaaaagggattcgtgaagtattcccaacttatttcttgtctacttgtagctgagaaaaacaatgagttacttttgaaaaaccatggactatgcccatcaggttttgctctgttctctgaaacgaatgtgacatgctatggtcaaaaaagtgattacaaccgtggtcgtggccgtgtatacactagaggactaggcagtggagttcattttaagaactcaaactctcataagaagtgggaaaacaatgggacctcaaagaaggttgggagtatatgttggttatgatttcccatcaataatagtatctcgagccatccacatggaatttattcaaaagctcgattcgcagactgtcattgtaatgagtctgtttttccaacattagagggataaataaacagtaagaaaaagatatactttgggatgaattatcaatgtcttatcttgatcctcggactaaagagtgtgaattagaagtccanaagttaattcatttacagagcttagcanatcagttgccctatgcatttactga

SEQ ID NO: 706 - DNA, 766 bp, Arabidopsis thaliana landsberg
cagcgaattgtgcgattataactcagccaaaacgtacaatcggattaaatttataataactcggccgttacgttagactaactcatccacaactcaatactatctcaaccaaagttgaattaaaatataataactcagccgtaacgttagattcactcaaccatacatcaagttaatctacgataagtccgccttaacgttagaataacaatgattgagtcacatgtttaactcagccaaacatcaagttaatctacgataaatcaaagaaaaagtttttgaatcacacacacgagtataaaataaaaagtgaagtttgaaaattgaaaagacagagtttatgataacataggataaggagtactggaatccaacaacatacatataatataattgaaaataaaaaatgaagatacaatcacatcaatcgccatcttcattcttaatcggacttcgaatttggacgaccggtcgatccataccccagtttgtcccaatcaatactactcaccgggcgttcacgctgcgctctgtaggccttgccaacctgcgccagcactttctcgatctcctccttcacgttaaatccgtcccttaagaccttaagttccgcttccttctcatgcagtttgatatcaagcaagtgtgcttccgccgtctcccttatgttgctcctgatgtaagagatgacggatttgaaacgcttctcctgtttatacagctttagggtggggctggcatccacatacgaccacttgttgggacc

SEQ ID NO: 707 - DNA, 583 bp, Arabidopsis thaliana landsberg
tctggcgaagttgcagagtgaataatgctcttgatactctattaattctctgtctctctcattgttcttatggacttgtttatttgtttggttgattgggattcgtgtagatgtaaacctatggatgtagaagactcgtgcggagctcacggatgctaggttttgattcttctttcactttgttgatcaacttggcatcactgcgattcttatttggcttttattgattccaaactcaagcattcatcaacgaatgggtatagagaaaaactcatcactgatatatcttagctttaataggatatttgatttccttccctttgcgtgactccatagggtaatgtatccggattttatgctcattgcagctgaatctgtcgtatcgagctgtgagatgcgtcttccgatatgcagctggagcgcttgctagactgaaccgtaagctttctatttacgcttcacctagtattactgtcaggtattcttgttgacacatcaagaaagattatcattgtagaaattgggaagacattgtgtctgctgtagagtatggatcaaaacattattacctattgacggagat

SEQ ID NO: 708 - DNA, 686 bp, Arabidopsis thaliana landsberg
aagaacatgcctcgctgaactctccctcatacacaacccgcgaatcatcgagttgtatgtgaatacatttggtaattgccctattaccatcatctccctaaacatctcctttgccttctcgagctctccagatacaacataccctgttatcacggtgtaacacacaacatccggtctggacccagctttcaccatttcatctagaaagtacttgcacgcctccagattccctgcgcggctcagaccgtctatcaaagtagtgtaatggaggacactcgggtcgattcctacttccttcatatggttcaacgtagtaagagcagcgagcggtttattccctttccccaaattgtgcagcaaaatgataagaagtaactgtgtgcctgaaacactcttgttctccagaccacacaaagagtctataagctagcttcgcacatcttgtcttattatcgtaattcaagttccttaagataccatcaagaacccctatcactaaaatccctgagactcgaacattcaattcatctagaactgactttgtattaaatccagatttatatgagttttaatgttacatagtattatgaatgaagtagataacttatgtgactttgaactggcacttggatggaagtgaaactccaagcagcatcattagatcccttttgctttgcaatattttg

SEQ ID NO: 709 - DNA, 563 bp, Arabidopsis thaliana landsberg
  unsure (1)..(563): unsure at all n locations
ttcattagatgctaatatgttaattattgatgtggttgctcccgattggttgttttcaaaaatggtaattaattagatgttaaatatgttaattattgatgtggcagctcccgattgatcgttctaaatcatatgtggacggctttagaagcaaatagcctcaacttttatatagtactagatacagacccgcggtacactgtgggttgagtatttgcgtttaatcgtaatatgatggtttcattgacatgggtagtttgcattttcaacaatatatttatatctattgacatgagtgattatatttgtatgtttcggtgtggttttgtaaagttcaaccaacatgtataaaattctatttttatacatcgngtgtttgtactaattttatgattacatgattataagcatgaattcttttgtcaataacaatattattgtattacatgtaaacacatatgattcaattggcatgaaaattaatatttggattgtaactgtagattatcattgactgtaattttacacacccgaaaatgaacacaatatcatgtcatttatat

SEQ ID NO: 710 - DNA, 5544 bp, Arabidopsis thaliana landsberg
  unsure (1)..(5544): unsure at all n locations
ctcgtggtccgacgaactcgaaggtgttctatgatcgcaccggacaactcctcgccgagccataggagaaacccttttcaccttagtctacggaacagaatgcataattccagccgaaatgatagtaccgagcctacgccgaagtctatctcccgagaacgatcctgataatactcagaggctcctcgacgaactcgatctaatcgatgaacgaagagattcagacttggttcgcatacaaaattatcagaatgaaacggctcgtcattataactcaaacgttcgacagcggagattacacgaaggagatcgggttctccgaaaagtttttcagaacaccgccgaaccgaacggtggaaagctcgggacaaattgggaagggccatatctgatctctaaggtcatccgacccggagtatatgagctcgccgacctaaacggcaaagccgttccaagatcctggaacgcaatgcacctaaagaagtactacaactaaatccaaggtgacaaaacttgaactacgaggtggcttgatccctgaaaagagtacgtaggcagctcgtcctcggacgagtttagctaaccccccccccattaaaaagngggggagtaggtccgtataccaattctcccatttattattttgtaatttntaacttccgcataaacaataattcgattcactattttttgaacgcttcggctattacgatgagcgacggctcggagtatctcttacgcctgctcaacaacagcgcgctatataaatacaagataaaatctatcagataatttatgctcggaattctattatcttcacaaacccggtactactctaacaccggaaccccagcttgtttctaaacgcttggcaataagtgaatcggatctgattgcaaccgagaagtctcacttaataaacaagttcactcacgctggtcctaatcaataaaacggttcagagttaaagagaatccaaaccaagtacttcagatttcgaaatggataaagccatctaggcataggttctataaatcctcgaataaagccatccaggcataaatatcacaacaaaatataaaaacaaagagaatttcccgcttcgggtccatagtcaagctcttcggacgggcggctactctcagcaggcagaagcgacccgaattaatcggtaacccccgcctcatcggcgagagtgggtttgggaacaggagctttaagttcttctttcagctcggcaacaaaacggttgaggtcggcctcagcatcggcgaaatctttcagccattcttcaacctgatccttctcggtcgccagaaccccgcctttctcaaggacctcgatcagctgcgcgttagctcgcggttgagacaagtacatgaactgatcattaatcccgcttaggagcgataccttctgctcagcagccttgagtttcgcgacgaaaacctccgaaacttctcgcctagccgtttgagaagcccgagccacttcgctatcgcggagcccctcgcctcggctagcatgcgtttgagacgaacgacctcggagtccgccctcaaattcaactcggccatcttaatggcattcgccttgttcacaaaggcctccttttcggcctcctccttcgccatctttgccgcggcagcttaggagagcgcctcatctctttctcgctcggcagcttggatccgagcatctgcatcggccaacctgttggccgcctccatgttattcctcatggccgaattgtccgaatgcaccattcggttcattgaggcgacaacctagagaacatagaaagaaaattacggatcggagctccagactgatgaaaaatgaaaaagttgaataggcacttacccgcaggaaatgggacaccgtttcagcatacttccgcgactccaaaagagtatccagaggaggaagcaaaggaccagcacacaccccgaggaggtttccagaggctaccctatcttcaaaaatggggtgctcttttcccgcctcggtactcgagcccttcttcttcttgctcttcttcttggacgatgaatcatccgtccgaacgcgcttacccgccgccttgtcgctcgcaggtagcgcgataatcgcctcgggcaaaggcgcaacagcagtaggatcgacctcttgagcctcaccagacgtcgggtcaatcggggccgcaacatcgggagcaacgtcccggtcttgagtcgcatcgggagaggccaaccgcggcgaaatcagtcccgcctctgcggatttggaaacccgccggatctcaagaaaattctttagatgagcaagcgtaatttcagtttcaaattcataactccgaatcaaaatcccgagcagatgtctcaagggccgcatcgtgatctgggagagggcaatctagtacgatgtcacgtactccaaaaccagccttgggactggcagccacaagaatgcaaccataaaagaacccctcgtacaaagtatagaaacccgcatgggcattgtcggctcgctcatcagggctctacacacgcaaggttactgcaccaagaccgaatcgggccctaagatccgaaagagaccgctcggtgcataatgttgagccaggaggatccgcattatcgcctttttattcttcttcctcttcttcttctcggccttttcgaaagctttttgctcattaagacgcataatatcttctgtctcgttcgggccgaagtaaagaaaatcctcaatcttaaccgtcggcatgaagggctcaggcacttctcgccaatttggatgtctcggcttcgtcagccatcggggcaaaagagttgcgaacaagaggcggctcgggatcatcgggcaaatccagttcccgagcgatatcggcattggtatcttcccgagccgcgacgggagtcgcctgctcgggggcatccgaagaagaaacagtatactcttcagaagatgtccaaactgctctccgtttgtagatcgggggaagatcatctgggtgatttgagtcgctagaatcgacaagagaagcgctcgggatcgacggagactgtctaggactcattctcggctcgggaacgatagacgagaagggaaacaaccagaaaacaagaatttctatcccggagaaataaaaaataacaaaaagaacgacggagcttcgccggaaaagaaaaaacgatagaaatatcaagatcagagagaaggaagcaaacattgtttattttcttcgaaaacttcaaatgaaatctcgaaggagtggctcgccatatataaagagttttcaagagcgcgtcaggtccgcagcaaacattcaaaacgcgttcaagcgcgtgggctcggcagaaggaaaagatccgcgtgatcctcgggaataagcgagaaatgtttccacttctcaagaatagttggcaacacgcgacagaagtttgaccgtccgggaagatgaagcgacaaaactagaagacgaacagtcggctcgggaatccattcatgaagctcatcgtctctctgctaagtcaatgagctggggggcaaactgttggggtcggattccacccaggtaagcgagccaaccatgtttcaatgcctcgggagacgtcgaggagttatcccgaaccgggccataaaacacctcggagatcgcatcaagaatccataccgaggcgatatcgagaatgcttcagagcattctcgtgaaatggtcccccgacccgacctcgaaacaccttggacataaaacctgacaatacgttctgaggcgggctccaagacccctcgggaacgtatcctcaaaaaccgcggtccgagcatcctgagcacaacccgagaccagctaaattacggctcggaaaaacctcgggttggacgaagaaaccttcaaaaaaggacttatccggtataagttcaaacacatcattttcaaaaaccccggaagagataatctctgaggatattatcgaatatagatgctcccacaatcttcggaagataaagacaatctccttcgccgactctaagataaacagaaatcttccgagaatatcgcgagcgatctgccaaagccctatataaagaacctctaagcacaaacaaaaagaggatacgcactaaaacgctctcaacttgaggctatcaaaaacgctctgattttgaaggcaaaacacttatatttcatatctctaaacacttgtacaatcaaatcatcattatctcaataatataatcaagaacaccgtccgcggtaaccaacaattctgttgttctttgagaatctcacaaagatccgttctttgaagaaacccttagtacaatttctattgtgtgaatttcgactctacaacgacagtgaaggtttcatgaaggagatcgagttctccgaaaagtctttcaaaacaccgccgaaccgaacgctgggaagcttgggacgaattgggaaggaccatacgtaatctccagggtcgttcgacccggagtatacgaactcgccgatttaaacggcaaagccgttccaagatcctgtaacgcaatgcacctaagaaaatactacaactaaatccgaggtgactaaacttgaactacgaggtggcttgatccttgaaaagggtaaataggcagctcgtctccggccgagttcaccccaccccacccattaaaaacggggggagtggatccgtatattcatactcccatttttatcatcttgtaagtttttgaactttggcataaataaaatttcttcacatttttaaacgcttcggctaatacgatgagtgacagctctgagtatcctttacgcctgctcggctacaacgcgctatacaagtacgagatgaaatctatcagattacctctgagaagaaactttcatcttcagaaacccggctatactttaacaccggtaccctagctcgtttctaaacgctggtcgggaagtgaatctgatcggatcgcaaccgagaagtttcacttaaaaacccagtctctcacactggtcgataaaaccgttcggatctaaagaaagattctaaccaaaaaatatcgaactccaaaaacttattggataaagccatccaggcacatgttttacaaattattggataaagccaggcataagtgctacacccaaacatactaacaaaaaaaagggcaagaaaaatcccgcttcgggtccctagtcgagctcttcggacgggcggttactctcggcaggaaggagcgatccggattggtcggtaacccccgcatcgtcggcaagagtctcacccgacctatgaccacccagactcagaggagcgggctcgggagatggagctttaagatcctctttcagctcggcgataaagcggttgaggttagcctcggtgtcggcaaaatcctttaaccactcatcgacttgatcgttctctttatccagaaccccgccttcttcgagcaccttgattagctgcgcattggctcgcgcctgggacaggtacatgaattggtcattgacttcatcaaggagcgacactttgtgcttggcagctttcaacttggcgataaagg

SEQ ID NO: 711 - DNA, 5420 bp, Arabidopsis thaliana landsberg
aggcacacccgtactcgcgtgctcaaccaacggctttggcagattgagggaccaaaccatgtttgttgccaaatgggaacctgggctccgcccagttaagccagagctcacctctgccccgatctggctggagctccgaaacgttccttttcaatgcttcaatgatgacgggttggagcacattgctagtctcgttgtgaatgttcaattccagtctggagagattagaagagtggaagtgtcaagcccgtggatgcctcctatttgtgcccactgtaaagaggttggccacagcttgcggcggtgtaaagcagcaccgatcacctgtaaagcctgcaactctacacagcattctgctgatgcttgccccagggcaaagtcccaagcagagaagaaaactccaagacgtcggcgatctaaaacgccgaagccgatgctcaaagaaggtgactgggcggctgtagggttgggcaagcggacactgcaagacaagccagttcccttaattaaccctgatgctgccacctcctctcgggggaagcgggtgacagatgctcctaagcagaaaggctctgttcccaagcctattgggcgcgaaagcaagcagaagaagcaagttgcccgaactaaagatgtggcccctatttccgaggaggatgacgactcttctgatgtcccatcgtcgccctacgattcagatactgatttggaagatgaagagcagttcactgaagtgttgtctcagcgacaacaacgcagtgcgaggggcaaaggtcccaaatccctttagtttcttaatgtgtatagacattttttgttggaacgtctgcggctttaattcttcctcgcatcgtagtgggtttaagaagtggtttaaatgccaccaacccctttttggaagtctggtagagactcatgttaaacagccgaagcagcagaagtttatcaataagctgttgccaggttggtcttttgacaataattatgatttctcggagctgggaaagatttggattttatggcaccccagcgtaaagcttttggttctctctaagtccctgcaaatgatcagttgtgaagtgcaggttccggactacccagagacttttgtggtttcttttgtgtatgcttcaaatgacgagactgttaggcagactttatgggatgagcttgtggccctttcttcagacagtcgtgttgtgggaaaggcctgggctgtgatgggtgacttcaaccaaactctgcacccaagcgatcactctgccaccattagtcagaatgtggaccgggcaacaagggtcttcagggaaactctgcttgatgcctctcttgttgacctgaactttcgtggaagcacttttacctggtggaacaagagagccaactcacctatagcaaagaagattgatcgtgtgttagtaaacgatatgtgggctgatatttttccctctgctttgggcttctttgggaagccgcacttctctgaccatgcttggtgtgggatcctgtttgattcagctgcgccaaagacaaagaagccttttcgtttttacaactttctcctgaagaacccagactttgtgcctctcatcggtttcagctggctttctctaaacgtaactgggtctgcaatgttcagagtatcctgtaagctcaaagcgctgaagcatgtaataagagagtttagccgctataactattctgatctggaaaaaagaacgcaagagtccctggattgtcttttggaggcccaaggtagagtcctcgaaaacccaaccatccacaatgctgagcgggagatagaatggcaaaggaagtggcagactctctctctggccgaggagagtttcttcttacaaagatctcgtgtcacctggttaggagagggtgataggaacaccgcctactttcacaagatggcctcttcccgtcaggctgtgaatcacatacactacctctttgatgttaacgggtcccgtctggattccctaagcgccattcagaaccattgtgttgactattttgagaaccttctgggagggattcaaggtcctaccatgtttgctcaagaagatatttctgctttgcttagtgccagttcgcaagctcctattcagcatggtcttgactcccctttcacggctgaagagattaaggctgctttcttctctctgcccaagaacaaggcaagtggccccgatgggtactccgctgaattcttctgcagctgctggtcttttgttggcgttgagatcactgcagctgttgctgagttcttctcctctggccagttgctcaagcagtggaatgcaacctccctggttctgatcccaaagatcccaaatgcgtcttctgttgctgacttcagacccatttcctgccttaacaccgtctataaggttatctcctctctgttggctggtcgtctaaaagctgtcctcccatccatcattggccactctcagtctgcctttatgccaggtcgtctcctgttagagaatgttctcctggctacagagattattcagggctactctaagaagtccactgctcctagtgcaatgcttaaagttgacctgcgaaaagcgtttgattctattagatgggactttattattgcctgcctcagagcattgaacttccctagattactcatttgttggattgagcagtgtatctctacagcgagcttctctattgtggttaatgggcagtcaggaggctatttcagaagcacccagggcctaaggcaaggtgaccctatgtccccatatctttttgtcttagccatggaggtcttttctggtctgctgcagtccaggtattcttcggggtatatctcttaccaccctagaacttctgaattagaaatctcccatcttatgttcgccgatgatgtcatgatattctttgatggtgggggctcctctcttcaaggcatttatgaaacattggatgacttcgctggctggtcagggctccatatgaacagagacaagacgcagctcttctacgcaggtctgagccaaactgaatccaatgctttggcaagctatggattcactgttgggtcgttacctattagatacttggggctcccgttgatgagtagaaagctgaaagtttcagagtatgagcctctcatagggaaaattactgcaaggtttaacgcttgggctgtgaagtctctgtccttcgcggggagagctcagctgattggctcagttatttcaggcactgtcaacttctggatatctacttttgtgttgcctaagggatgcattagacggattgaatctctctgttcccgtttcctgtggtcggggggaactgaaaaaagaggtttggttaaagtggcttgggctcatgtctgtttacctaagaaagaaggtggtttgggtctgaggcggtttgcggattggaataggaccatgtgtttgcgtctggtttggctactcttctcaaacagtggctctctgtgggttgcttggcataagcatcataatatcagcacttctaccaacttttggaaccaagttgaaagtacaggtgactcatggagttggaaatctattctgaggttgagagaacctgcttcagttttcattaagtgcagtcttgggaatgggaggcgcgccagcttctggttcgatagctggactcctttgggaccgctctacaactgctttggctcctctggtcctagctccttgcgtgttccattaaatgcgacggtttcagatgtgtgcaaccatcagggctggattattgcaaacccgagatctgaccagggggtgtctctgcaaattcacttatccaccattgccttaccttcggatgacagtgggccggatgagttcgattgggtggtcgaaaacaagatctgcaaaggcttctcctctgctaaaacttgggcagtcactcggcctagagctgccatagttgattggtgggactcagtttggttcaaagaccacattcctaagcatgctttcaacatgtggatagctactttggaccgtctcccaaccaaaaccaggctctcttcttgggggcttcagattcaggatacttgtggcctctgctctctctccccggagagtagagatcacttatttctgtcttgtgatttcgccctctacttgtggaatgcggttagtttgaagttaaatatgcagggtatccacttcactttgtgggctgagcttctttcctggctgaagtcgggtaacagaaggtcgcctcctactctcagaaagctcattgcccaatcggtcatctatgcaatctggaagcaacggaacaatctgctacacaatcttgtctatgtccttccctcggtggtctttcgcgaagtggaccgcgaagtgaagaactgcatcactgcccggcgactcaacaagcgcttctccaggctaatgagtctttggttgcactaatccgttgcctctcataacctctcttttgctttcttgtttttaagcttttttgccaagaaaccaacctttaggtttgctctgtaaaccaactctttcattattatgatatttacaagttagcaaaaaaaaaaaaaaaatcaggaaatctccccaaaacctccgaagaataaggagaatatccttaggacgattatcctctagaaccgacctaaggataaataagaatcttccgaagaatatcgctagagaggcggtttaacgaccctatataaagtgtctcagggacttcacaaaaggggatctttggatactcagaagaaacacataactttatacctagtgagaactacgaatggcttgatcccttcacagggtacgtaggcaatctatcatggatgcagctatacctttttaaaaccctaatgtatttcataagagattagaacatcttttgtaatcgagtcttggatagaatacctaatgaagagaaattactagatttgttttccctctctaaacaaatctattgtgtgaatccttggttcaacaattggcgccgtctgtggggacgacaaagaactctcttcgcatatcattctacttgcggggggatttcccgtcaagatacaatgaaccagatgacgtacaaccattccacggattgccccggagatcagcgttccagggaatctaaccgtaactccatcggatatctctgctcagagttatcgccgtttttctgaagtcgatgctgtctgtttcttaacagatccgtccgaatagaccagttcgcctcggggccgatttcccggcaaatcacagggaatctcgtaagggttaatacatctacggatcgcccaaagagtcgtcttttcgaagaagttgacctcgccttaatcgaagatataaactgagagatataaacgtttacctcaagcaagcgcagccagtcataggacccaactctataaaccagtcagc

SEQ ID NO: 712 - DNA, 597 bp, Arabidopsis thaliana landsberg
  unsure (1)..(597): unsure at all n locations
tacaacaatgaattgatttatttataatcgagtaaggtaaattttaaaccacacaagtaacatggttaaaattatgaaaaaatattaacatcttataaataatcagctttatacatgaaaattagaaattgatatttcgaattacaaatgaatctaaccataaaaattataaatacaaattatggatctaatttcattaacaataaaaaaaaatataaattaacaaaaataataattaatataaatatttttttaacaattttcaaaacaaacccacgcgtagcgtagatactcatctattatcactaaaggtgggaagtgttttatctgcataaccctccctaaaggtcgacttcaaagacattttttaaaggccaatgaattatgtcaatcattgttacgtgctgcatcttctataaatagatgtatagacacgagactttactctttttggatgttttctatgaatacgacaacataaacctcatcaccacatataactaaatcaattattgngacagatgcagtaagatgtatgttattgatgtccacaactttttctggagtaaattatatatatattcagaattctttgag

SEQ ID NO: 713 - DNA, 563 bp, Arabidopsis thaliana landsberg
  unsure (1)..(563): unsure at all n locations
catcatttggcttattttcttcagcttatgctccaaaatgtcttcttatctccattgttgtccctttcaataaaatacttgaaaagactctaaaaggactctagaaataacaaaaagactcaaaaaccctatatctaaaacatagctaaaacagtaaaaatagggttatatcactaagcaacatgtaattctttgcaagcttacacaacattctagatttcatacctaaattccacaactatatccaacaggctttcatcgctgggtctcatcaaacaagctaatattcaagaaccttctagactcattcctctactataccatgataaatcatacattctatatatatatatatatacatttttatattctttctctccccatacttattcttttcagagataggacaaaggagtactagcttcatcagatagatatcctccgcatatttccaacttttgaaattgatcattccggagaatatataattataggatgaaaggaacattattaaccctttatactacangaaacttctctcttttttttttattatagagggg

SEQ ID NO: 714 - DNA, 611 bp, Arabidopsis thaliana landsberg
  unsure (1)..(611): unsure at all n locations
aatccccttttcgaaaactcaaaccctaaatcttcatcttccccaaatcgatttcttatttccaacttctttttatctaacgtctcaggattttgggtaggtcaacgttttgtttctgttaaaatggctggtcaacgtgttttttatgtttaatttggcagatgtcaaaatttacgtattgattgactactttttaaaagttcgcgtataaaataatatttttccctaattataaaacanacaattagttttagatataggagtattacacgacgtataagaaagaagtaggacttaaaatggccagctgtgaagggaacaatcgaaagctggctttcacgttaacgtgccgcacaaatcacagctcatcatcttccttctttctcttttttccacttacctttttgtcgttttccctgtccgaaattaaagtgttttattttgtcgaggcatatagtcccaataatcagttcacaattttattaagaagttgacattctatagacctttttggtttaaatatttatatatagacctttttattagtcttcaaaacttgcttcaaaatagtaacccaaaactcanaagaagactctaggcttaacatcatc

SEQ ID NO: 715 - DNA, 737 bp, Arabidopsis thaliana landsberg
ttgtttatacagaacagataaatagacaggagaatatttaggattaaatttttaaaaattaccttttcatcaagtaggaggaattttattcctatgagctctttttttttttctaatttatttcttcccattatcttgttacacgtaccactgttcgacgattgcatcgtttttgttaagttgttatattgttatataatttttgttggtttttttaacttgtgtcttcatgatgatagctattctgaaaaagaaaaatcgaacataagtaaatgtaaacaacaacgaataataattttttcaaacgtaagcatgatatactacgtattatagtcaacgtaacaaccaagaatagtatttctaatgcatgcatgatataataatactctaatagcaatgtgtctggtcatgcgcgtctaaagtagaaaataaatatgacagtgtacgtattatatagtcaacagcccagaaagaagttttacgtaccaagagaccctctgcgtaaaagagcttcccgtcagttgctagcaattattcaagaccggagccgccaatagtgattttgaggtttatttgttttgtgtgaaaatagccaataagtcaatttcaaaggaaaaaagtaaaaattctctcaggcactagtatttgagaagctatttttaggctaaaacttttgaaaagtagaacctaaaatttcttttggactcccttttttccttaaaaaagcaagttttcca

SEQ ID NO: 716 - DNA, 712 bp, Arabidopsis thaliana landsberg
acaatagataaatgagtgcttcagacatttgctttataaattaagcaattcaagagcataccacaacagatcaaccaactagttgtcaatcaaaggctagacaaatgatcgaacactttatctgcctaaaactagttgataaatttggtttgttatacaagagtcagactaatccacggacaaacgagctacatatctattaatcaaacatttgctttctagtttaagcgatacaagaacatgtcacaatcaattgcacaaaagatcaaccaatttcaaaatgctagaacagatgatcaacacctgagcttcgtctagctatatctacttgttaaattgtctcacacattccatcaaaacaacgttagggaaacaaaaaaacaaactacaagaatcatcactcttaacgaatccatatagccaaaatatgaatttttttctgcaatcccaaataaatgaactaaagtgaggctgcaccaccaatcgatgaaagtgaaaaacggtcaccaacatcaccaccgtgacggagagattttttttttcgtttcacagtacacccaatcaaacacgtcagcgcctcttaaaggctctttaaaacctcttagttaagagcgggtttttgtaataaagccccatattgatttaattttaatcaatccaaaggtaagaaccatcactaaaacccaccgttaaggatgctctaagcgactca

SEQ ID NO: 717 - DNA, 1018 bp, Arabidopsis thaliana landsberg
caagagctaggcattcaattctagacacacccaaagagatcaaatcctctccaattcctaagtgactagtgagagtgatttgccgtgttcatttgagctcttgcgcttggatcgctttctttctttctcacttgctcttgtgatcaacactcaattgtaatcaaggcaagaggcaccaattgtgtggtggcccttgcggggaagttttgttcccggctttgatttgagaagagaaagctcactcggtccgcgggacgtttgagagagggaagggttgaaagagacccggcctttgtggcctcctcaacggggagtaggtttgagagaaccgaacctcggtaaaacaaatcctcgtgtctcacttcattattcgcttgcgatttgttttgcgccctctctcgtggactcttttatatttctaacgctaacccggcttgtagttgtgtttatatttgtaaatttcagtttcgccctattcaccccccctctaggcgactatcacctcctctaccctgaaaggctcaatagaagagacaaaggagtaatgctcacaaaagttagctaatcttgagcaagtagttactcccttgcttatgtcacccagaatctggtcaacggggtgatgtcgttggatctttgctcggacttgagttggagggcacgtggtgcttcttcctctatcacttgttcttcctgtgctcccccttgatcctgtccctcttcttgaggtacttgttcaccgtcttgagttggaggatgcactattgtggaggaagatggctgatcttgctcctgttgttccggtaaggagttcgtaggaggtcttcttgagaaggcgatgcagatagagctggtttatggcgtggcatgctgtgttcacagcttccgaccaaaaccgctcgagcgtcttgaactctccaagcatcattctcgccatgtcgataagcgtcctgttcttcctctctaccacaccgttttgctgtggtgtgtagggagcagagaactcgtgcttgacgcc

SEQ ID NO: 718 - DNA, 762 bp, Arabidopsis thaliana landsberg
atctaatacctcgtcgctcactgcctcataaaattcttcttcccctccagtttcttcacttctccccagacaaagcaaagcagagatctatctcagatctgaatccttcatctcctatccctaaaggcggcaccaccagcatcatctctctattctctcatatatgaatccttcatctcctatctctaatggcggcaccaccagcatcatctctctattctctcagatctgaatccttcgtctccgttttctaatggcggcaccaccactggattttgtcgacaaagacgaactcaccgtcgaggaacgtaacctcctctctatcactttcaaattcgttatcttcgtggctgagtttaagactctcaccgcctataaagctgctcaggtaaatcttcaaagccttcgacctgaaatcgaaatctggaatttggcatgattttgttagatctgtggttttagtttctaggttcatgatttgtaaatctgttgttattacttccattatttttttactgatttgtattctcaaatgttttctagctattactgaatttcacaattgaacgtatgctttataaaaggaatgttctttatcctagtcaagcatgaacaactacttatgccttgtatattattttttcccttttcataatttgccgtgtaaagcatatcaacgtctcatgtatgactttgttgctaatggtcgaaatgagaatgatgtggacaagtaattctatatattctttatttggatattcg

SEQ ID NO: 719 - DNA, 436 bp, Arabidopsis thaliana landsberg
atcaaaacctcataaaacatatccatgtgcgcattgatagtcttcctctgatagccatacttcacgagcgacgaaagtaaatatattaggtacttcaggaacatgatatacatgaacttcaccctcattgaatattgttaacctgatcccaatgaggtaattcatggttagttctgcgcattgaaaacttgcttttgtaaagatattcaattactattatttaccttgattttgtatgtatattatcaacaaagtaatgctctatgatattagaaagctcgccattgatacaagactcatcaattgatccgaccgcatagcgttgattctggatgatcttcctttgaacttatagaacaccctcctcacagggatatatttcgacctatatcttgacacagtacctcccagtgctgcttcgtaaggaagcagttta

SEQ ID NO: 720 - DNA, 838 bp, Arabidopsis thaliana landsberg
cgatcctttgatcacgggactgttcagttttacttcaacgagatctgtttaaggcaaatgaaaggcatggttagcactgcaagaactagtcgaaagaaacctaaatggatcggaaaaactctatggaaggaaatgattgcgtactgggacactgaagaagcttaggaaataagtcaaatctattcaaatgcccgtatgtctgaccgtaacgatctaggtcctcacatacatttctcagggtcgaagtcatatcatcaaatccgagacgaattggtaagtcttctctttgtttactcctttcaactttaatctgatgtttttctacttttctatgacttgtttttttttttcattacaggaagagcaattgggcaaaactgtcaatattggtgacgttttcatcaaaacacatacaaaacttgatgggacgtatgttgatcgaaaggcggagaagattgcagagttatatcagaagaattttcagctgaggcagtttgagctcgaggcagaagcttctactgtttcagatggcacttcgtgggcacttctactgttttatgtttcccaatttagtgttttcgagttgtctttttcattctctaatctcagcttttatcatactttgcagtccactgagagggatttgagaggcgttccttatggagtaggaagcctcaaagagtctcttgtcaatggcaagcggaagcaagcaggtgactcaacttcttttgtggctttgcaagaacaattactggaagctcaacgcaagataaaagagcaggtctcttacaatcagaggcgtgaatctgagattgctttgcgtgaagctgagaagtcc

SEQ ID NO: 721 - DNA, 1745 bp, Arabidopsis thaliana landsberg
aaaaaaatggtactgtaattttgacaactttgaatgaatcttatgcagctcttgtatctggaatcgatctcttctttgagatttttagaattggtaaaagaacaaaaaagctttagatgtgctgcgtagagctgcaactaaagatggtggtcattgctttggatgctaaatgatgtggagaagaatcaatttccttcggattgttcttgaaaagggtttagtagtctgtttatgcggtatgtttcttacactcttggcagtgaaagcaagaacttatcagttcttctattgagtgattcattgtcttccttttttggtctccaggatgctgatgtgatgtggttcatgaactaatttgcttctcaatgctttcaatatttaatgctttcttatgatttctttgttgagttgcatttgactgagaactctcgtgagatgcttcacatacttacaaagtctcagtctgcgcgcatggaatggtattgtatatcagaagaccattcaatatggagatgctgtagtaattgtcgcgtaggcttctttcttatgcttgtgtcttttctatattgatgtgtaatctgctagttttccagtatatggcaattataatattgtatagttaggtattagcatgagaaattcagctgaccatcggttgattaaggtatttatcaatgggatggagcccatcacaacaaatatgatatgactcaaaatttgttgtccttattgtctctctcttctttctggaatatttttgtatgcctatgttgatttttaaatctcccataatactcattttgttgcaggtgaaaaagttttagcaagcacaaagttgcagctcttcaatggagattattaatttagaaatgccaaaagatagatttgctagatatatgtataattgttcagttatattcattgtaaaacagatttctttttgggcggcaattgattttatatataatatagtgatcttttctgaattttggttagtttgaatttttattgtattgagaaatacagaaataatagaaaacagaaaaaatagaaaataaatacactgaatattccgaaaattcacggccgatgaatgctctacttatagtaaaattatatcacatgctgatacactgtgctgacatgccatgcagaatgcaataagcaaggatcccctatatgaccaacgtgtaaaatttaatatgaaactattatttttggtaactgtttttgatttataatgtaatcaattgaaaaaattcatattattcatgaaaatattctcaaagttttagtcatcaagtacatataataatcccataaaaaaagaattaaattgatgatgttatgactaatgagtgcgggtatgattatttattgaaaatattcaattagttagtgttaaagttattcaaaatattatatgccatatcacaaaatttattgtccgaaacattattaacctttaaaaagatgaattaatttactctttaaatttttatttttaatggcatacctatgtaattacttacaaaaaataaggttattttttattatgtataggattgactgtccaaatcttttatatgatatgaaggaaaagccacacaaggtgaaaagtttgttacatattgtttaagttatgagtcatgtgtggtgatcttattaatgactggactaactttgaaaataaaatttatacaataagatatcagtatgttttgtgctagtttttctaatatttt

SEQ ID NO: 722 - DNA, 1033 bp, Arabidopsis thaliana landsberg
atcacaccactgaattaatatttactttctaaatgattcatagattcagaataagtacccaagctcagaaagcttcatgtgggcctcagcgtaatcagcgaaaaaggcatcttcatcctgttcacattgtcacaagaaaccatgagttctcttctctctctctctaccaagtgaaaaacagaaaaaagggaatgaaagacatacagcagcgtatttctcgaccaaaggacggaaaacagggtcgtccaatagtgctttgtcagagacaagctgaagaaggccttccttctctccgctcaagagttccctgcccatatataatttgattagtaaccatataagccactgaatcctcctacaagggaacttgggatactcacttgaagtaagagttgtcgaagattagagggtttgatgtccatgcaccttcgaagccagacctatccttgtggcatcgtccctgcgatatcatattttgctagcactcatcagaatttgtaagcttggagcaaacaaattttaaagttttaagcagttggagagaaacgaaccagagtgtgggatccagataaagcgacaatgtccttgtcagacaagcccatccgcttagcaaatacatctctcaacagatcaaaaccttttgtagcatcagggagacgaccctcaggaggtgtatggggcttgtcctgaaagcaagatatgcatgttagaaacagacaatcaagtcccacagcgtttcagtattacaagtattgagagaatgtctaaattatcaatcaaccatgtcaacaaagaaagcagaacacacactctcaggaatgattaacctctcttcaagggtggaaatgaattttagggccaccagtaacttcaacggccacagcacctgaaagatcaatttctcaccaaaaagacattgtaagttagaatccaaaccctaaagttatcaccgtcaacaaattagaacttttcaaaaatctaaaatcaatcagcaagagagatagtagggaatgctacctgatggggtccagca

SEQ ID NO: 723 - DNA, 1144 bp, Arabidopsis thaliana landsberg
aaagacaccacatcatcatcattctgaccacttgtttgttgtttgcttgcagccaagtaactccttacaaacttgttcacgacgtcattcacttttgaccacctttatttacaacatatgtggcctctcttttccacacctttgagcttgggacttgagttgtagtacgctgctatacgttcctagaacgctgcccctttttgctcattgcccaccaccggatccttggaagtgttcagccacccacttatgagaacaatatcttcagttgatgaccaattcctccttggtttcttggctttcttccctttcttcccagcaattggtgcttcatcttcacttggatcatcatcagaccactcagtgctaaacacagggacatttgctgatccaagttccatggatttggtgggagaatgtgaatgtcatcttgactgttcaaaaggtttataaagcttgaagtatgaaaccaagttcaaaaggtttataaagcttgtggttgtgtgttttaaaaattaaaggttatggttctgtattttaaaggcaaattatggcttggttagacagctcacatacaattatcacaattatacaggtttaaatgctataagaagtagcattcgacgtttacctacaaaagcaaattgacgtttatctaactatagttttatatcaaaccaagaaatattcatcacagtaaataacagcaaagcattgatcacataaataaatacaaattgataaattaccttgcattcgatctcaagccaacaaccacctttgtatgttgcattatatccaatcaagaagcagccacctttgttgcaaatcctccaaataacctcaaataaaataaagaaaaacaaaaactttattaaaacaatctaccaaaggatcaaattcataatgcaaatccatttcaaattctgtgcaaaaacgtcctaatcatattcatatcaaattcgtttcaaaatcattatcaaattcatagcaaaatcatatcaaatttgcttcaaaatcatagtcaaattcatagcaaaatcatatcaaagatcatatcatatcaaagatcaaaatacattgaaccctaaaatcgtatcatatcaaagatcatatgatatcacagatcgaaaatcataatcct

SEQ ID NO: 724 - DNA, 601 bp, Arabidopsis thaliana landsberg
aggagccaaatcctttaacgtaaatcgtttgaacactaccaccaccagtgagatcagtccaattttttttagagagatacattatctacgtacacaagaacatctaacaaaaacatggaaaaatcaatttacctgcctctctcagcaaccacttcatcattagaatctttatctgctggatctagcttctgtcgtagcatgtttacattttcataaacaagtaattagagaaccgtttgatatttatataggtacaaaaacacaaaaagtagcttgatcatagtaaaaaaaactatatatacaaagttagtgattaaaaaaatatacataactcaagacatgacaagaatgagatataaagtatatcaccttctcatcatgagaatcatcttctaattctttctcatcagaagattaatcattctcagaggaactgctcgctacgagattcttggtttcaggaacttcctgatcaatttaaaagtaaaagcaaagtcatatttacataattatgaagtaagaaggccgcaattgtataacaagtttgattaggaaacggaaacaaagctctatatcatctgaagacgaactgtcagatgag

SEQ ID NO: 725 - DNA, 957 bp, Arabidopsis thaliana landsberg
ggtttcctgtaactcatgagctatcctatcaatgttgtctttgaaaggaagttggtttgcaattcctttggaacgagtgtgcatgcatgaagattagtacctacaccacaaagacaagtagaagaaaagctgagttagtaaccagagtaatgtaaaaaaacttgatcttaaaagtttctgagatcttgaatgtaacaagcgatctttactcagatgtcatataaattaggtatatttacgagaaccttataaattttttttttttattactgtcatattttggtccattttgtatacccatcgtgcccctactaaacgttacaggaaataacgtaattataaagaatgccactgccacatcagcaaaaccgtgtcgccacgacagaaattgctgacagccgtaaggcgataaagaggcagttacggctaagttacgctatgttgcagctgacaaaatgactgagttatgagaaaacaacggacttatgagtataactcagcctatagttatggctgatttataaaatttgtctgagttatgagataatctagcttacattacggctgacttaatgaaatttgtctgagttatgagaatttcaagaataacccagcctaagttacggctgagtattaacctaatggttgattgtcaaaacttggctgagttatttcctcgacacgactgagttatctttttctggatggctgggttatcaaagacggcttagttatgggatgtcgttacggctggattaaccaataactcacgcttgttacggctgacttagttggaaaagattaattactaaaatagcatagagttacgaccgagttaataaacgatatggctgaggtattgattgtcggttgagttacgattctatacggctgtattaattaacttggcgtttttttcgtttttcaatttattgtaatagtaatcatgttgcgact

SEQ ID NO: 726 - DNA, 470 bp, Arabidopsis thaliana landsberg
tccactttcttctagagttgtgccatcatgcttctcagttctgctaggactgcaggagcggcaacctcaggagcgttcgtctggactggatgattcgggtttccctccacgtcgacagtgttagcgaggacctggttgttggtcattgcttcttggttcgatggttttgtgttcttggagtaggagaaatctaaatcccccctccttctagcgccaaattgttagagtcaaactcgcaaagaaacagtcttcgcgagaatctcaaagatcaacaatcgataagtaaccacggatggtgtttttgatattattaattggaaacgatgatttgatcatgcaagtgtttagaaatgtgattagaaaagtgtttagccttcaaagtcagagcctttttgatagtctgaagttgagagcattttttgtgtcccttttgcgaagtccttgaggtcccttttataggccaagtgacc

SEQ ID NO: 727 - DNA, 598 bp, Arabidopsis thaliana landsberg
  unsure (1)..(598): unsure at all n locations
cgtaaattcacctccaccatcagagaagagaccacgattagttcaaagaacggcttctcaaagccaacttacaccgcttaatggatctaatgctataggtggtcttccttaatgatatcactaatttgccaatcagttgtgatgataataatcaaacaactacttttactcatcctttggggtatgcaaattctatacaaaattcacatggtaacgtcattttctaacttaacagaatccatcttttatattttatcatcttttacaggacatcaaaatgctgtcaaagttatttactaatactttaactaatcgcaggttcattagaaagatcatgacttacctcgatttacaaagaaacttgcttaagcatcaaacaacttctactattccatttaattatctcaccaaaacaaatcttcacccatatccccaatatagagatgcatcgatgacaccaactactgcatatacaaagaacacaggttacttattgtatatgtgtgttttagttctatatagtcatctntatgtattggagaacttttataattatcatcatcaataatctaaaactaaatttattatttcttacaag

SEQ ID NO: 728 - DNA, 546 bp, Arabidopsis thaliana landsberg
ttggatatccacgggtttacgaaaacggtacccagtaagaaaatttcctaaaattttaacctgtcctaacccggttttttgtttcaggtattgggttgattatcgggtccgttttttcgttagccgtatcaaaaataatctaatatatggctcaattaggtccacaaatataagcaaaatactatataaagactaaaaactacatatgttgtatttattataaaaataacatttttaaacaaagtcaatccaatgcagcattatatccaaatagtaaaaatattaaaaaatattatagcatcacttttttactatactattttttatgtaattcaaataaaatatacaatttaatttatacaaaatattaatgtccgtggtgtatagcacaggttatatctagttactgattgtaaaagactaatcaactcttctttgtaagacaatactcgtcaattctgttttcgagtaatgcatttattgtatgtcaaatgtcaatcctcgtaattctttcatactatgagtagaaaaagaagcaaataatta

SEQ ID NO: 729 - DNA, 706 bp, Arabidopsis thaliana landsberg
  unsure (1)..(706): unsure at all n locations
gtcaataccctggtaagatcaccggttactcaagattctgggggtttttcaggaagaacaaggtaccaagattccaaaaaccatgtagcgtttttaagagcctatcgtttctatactaaccatctaacattcattgaacattacagagccttggctcagcatcttaaagaacgttgttctggatatctaagtttgaacaagatcttggaaggaaagacaagaaaaatagctgctcgaatgttctacgagacactggtgattgattctcaatagatttctattcattttatctctctatgcattgcctctaattgagatttgaagatgtagctgctgctgatggagttgttgaatgatacaagaagtaatacgtgattttatctgatggaatttctgaatgattcaagaagtaattcaggatgcgacagttttgtgtgagtgtcggtttctagaagatttgagaagagcgtgtttagagaatgaaacaaaaaggaaaaaggacttaaagagatttgtaagacttgatgaaagtggagtttgatgagaaaaaggaaaagagtaaaaaggaaatttactttttcttacagaaaaaggaaatcttctcctatggtgattaagcaatcgttttgactatataaagaggtgctaggacgtctgggagaggcangagagctgaggcataaagacaaatcattgagagctttct

SEQ ID NO: 730 - DNA, 1108 bp, Arabidopsis thaliana landsberg
ttgacctttaactgagctagctgcagactcggttttgtcgacggactcaaactcatcaggcacttttttccaacagattaaagtcaaaaagccttccaaagagccatctttgggatagagaaactaatctctagaattagtagatcaggtataccattagaacatcttttggatgctgaaatgcctcagggcaaattctaattgatcagaaagaaataagcatgaagcataactaatccagaagggatcttacctaatcttaaccagcttacaaaactagatattaccctaatctaattcattctcaagaaccctaattactactcaagcaacgtaatcaagaacacaaacccagaaatatctatagacatatcaaattgtagatctaagcaaaataaacaactttctttaaagaattaaatgcaaaaacaaaatagattaagagtaattaaggtttcaagattctaaatcacaaagacaaactaagagataaaagcttggtcctttgagaaaatcccaaagtgacctatatatactaaagtctcaaaaacccttgattcactagaaaacaagagacttgaggtggtttggatggatggtggatcttggggatggagtaaagagggtgttgcaaagtctgcatctttgcctccatgctccgagtgatcaattggtcgagtagatgcttcttcctcgcttatctatatgctcagatgtctggttgagtggggaatgaggaggatccgaagacgctttgaatgatcaacaagtcttgtagagtaggtcgcccttgatcgagtaaaggggtcgagtaaaggatcgagtaggagggtcgagtagtgtctgctgcctcatcttcttgcttctcaaagctttgatggtgtacccgaattccgtatgagtcgttggctttgtatcttctaacaaggatttaatacttaggcatttaagatccggttgcggttctagtttttatactcaatcatacacgtgacatctagtcatatttgactccaaaacactaaccaagcttcttcttgcgtcataaagatttgatggtgtagcggaagtcattatgagtgtttggctttgtatcttgtatcaagca

SEQ ID NO: 731 - DNA, 378 bp, Arabidopsis thaliana landsberg
aggagcaggccaaaaacatttgtgtgtgttgtaatgcaagctaagctccgatcccaccgaaatcagctgggtcagctcgcccaaagctcaagctcagctggaaggagtgacggttactcaagtcgagtgacggttgagctcgaggtagctggatgagtaacggatgagctcgaggtagctggacgagtgacggactatctgggcggttatgggcgcaaagatacaactcttcggaaaggtgcaactcttcggaaggacgcaactctttggaaaggtgcaactctttggaaaggtgcaaggaacggatgtgttgacacaaccgaaacacaagaaactcgccatttaaactctcttcctcttgggagaataaatagtctt

SEQ ID NO: 732 - DNA, 811 bp, Arabidopsis thaliana landsberg
tactgattagaatcatgtattttattgtgtttaaagttgtgtatcaattactaaatatgtatttgatataagtaaaatggtgacaaaaatataatataatgatagatggtgtaattattttgttgattataagatctttaaaaaccaaagttggtatgttttatcttttatttttggcaaaacaaagacaataacatttatgaggagaccttttttctaaatcatacagaatatttatactaaagagtattttgaagctgtattaatgatcccattacccaaattatatgatacaataaaagaatatacccccaaaagaaaacaatgcaaagtaaatcatcttaacacctaattcttctttctaaagattgattagattcactattcatgtttttcatctcttcattgtcttgtccgtagcagccgatcaccaatcgttctcaactcgaacgttctcacagcaaggccaacatcacggattgtagtgtctagcacataaggagtgcgtgctcgcggcgctgagagatcgaaccatggtaatggaagtaacggattttgctctcagccttgtgctatgtcttcccttgtagattctgagacatgtgtacgcctatcgcgaatacattctccggctggaccgcgtatttccgatcccgtcttggaaccttcttgacgtctctatatgccagttttctcaattccccattttctggaaacacaagaacccaaaataccatttaagattagtcccctgaaactaaaaccaaatcaaataacccgatatgtttcccctccttaaaaaacaggaaaa

SEQ ID NO: 733 - DNA, 781 bp, Arabidopsis thaliana landsberg
ccttggcgacctcctttattgtagactttgttcgttgtattgttttccaagaggaagtggtgtgatcgttaaatgctactcatctctccagttatatagagaatctcttgataacaagtagggctacagtatattaagatatttttgggcaacaatgctgacatgcttttaagccacataattttgaataattatgatttccctccaaagcctcgcagggctgctaatcgacggaatgtcgcctcaaacttataactgaattgtattaaaattgcaagcataacaacaataattcatgtttattaacactagcacagacgtcatacgcgacgtgtcgtcaatttggtggatgcttagtcgttatactgtgttatatttatatgaaacatgttgtttataccctttgttccaccccttcccccaatgcaacattggaacccgtatataacactgtcgccgcatttaatgcaatagatacgtatcaaatattttcctacggactcttcatattgtcaaatcgcaaagcaagttgcatagtaatgattactggtataaccaaacatttcatataatgtataatctctacaagttgatactctcgcgacgtgtcgtcaatccaatacacaatttccagctaaagcccattgtctgcatagagaaataacatgtgttgttcttatataacgttctatttaacaattaccaatgaattttttatccgttagtcttcactgaataacgagttccataccaagcaaacatttggatatatagtttgatg

SEQ ID NO: 734 - DNA, 787 bp, Arabidopsis thaliana landsberg
tttctttccctagaaactgtttcaacattaagcaaattttgtcaaaaggaataatgaaacagtttaaatactatacacttataaatcaataaagattatatacctttgaaaagatttgatatgatttcagaaaccacagcaacttcaaccatgttcttgggactatctccatcaccaaactcttcttttccacgtccaacattgataaaagaaaatgagccaaacatgtttccttgaagaaacgtcttttgataaatactttcttgaacatttgcagcatctttgattctcccaccataaaactctttattagggaaacgactaatcgaaggatgcattcggtactgaacatcaagcaaatgctttttatgaccaagcagaaccaatctctcgaacaagcttcttccgaatttcgccttctcgcattgatcgttatgaaccattgcaggtaactgaaactcatctcctattagaatggcgtgacgtagtccaggaagttgcaatgcagcaactgattcacattctttaagctgagctgcctcatcaaccacaagaacttctatatttccagtcctttcctcatttatttctgcagcacctgaggctgtgcatatgattatgtctgcatttttctatttgacgaacatattgctggtacttagtctctgtgttctcaagaagatctatgattgactccaaactctgcttccatccacaagtagataaaaacagtttacgaagtttgcttatacgatgatcaagaaagacattacgaagataatcagta

SEQ ID NO: 735 - DNA, 520 bp, Arabidopsis thaliana landsberg
cgcatatctaattaaatacatgatcaaactcaattataaactaacaatcccccttaattgagttttggtcttacaccaaacttgttcaatagtttttcaaactttgacgttgtgtacttcttcttcacttgcaagtaaaacacttgtgtccgactttctctatctcaatggaaaactcttatggttcatcttaatatccaatatctttcttatggatcgtttgtcttcaaataagactctgtatccattgcatatcatttgaaaaacactcaacagatttctcgctaaaccgagcactagaaacacctctttgatgatcttctctccttggcttctcatcacttggatatttccttttcctgtcgtgttatatgtttaccattccctactttgatcgaaagctactttcctccttaattgaatttctgttttacttcaagggtttttctttgatcttctctttgttacacaatttgacactctttggcaattgtttcttcttcaagacaatggaactcgt

SEQ ID NO: 736 - DNA, 671 bp, Arabidopsis thaliana landsberg
ttcgaatgaaccaaaattgatgtagacttacatattctttaacccatagatgatattcttccgctcttctcgcgtagagttctttttcgggcaagcatggatatttcgcagaaagataatcttcgaacatactacatttacaaaactgagtagtccatcctgataacatgctatacgccggaaagtcgctaatcgtccacagtagtactgcttttagattaaaattctgactcaatgaaacatcgtacgcatcgactccagtagaccacaactcttttaactcctcaataagaggttggaggaagacatcaagactagctcgaggatgatttggaccagaattcagaatggtaagaaataagtactctgtattcatgcacataccagggggtaaattataaggagttaggatcacaggccacaacgaatgattacgagacatgccaaatggattgaacccatcagtacacaacccgagataaaccttacggggttcttcagcaaactggggatgtaacccttggaaatatctccactcagctgcatctgaaggatgattcatttctccctcctttgattggtgctcagcatgccatcgcattgccgcagctgtcttatgtctctgatacattctcttcaaccggcccatagtagatacacatacgactatt

SEQ ID NO: 737 - DNA, 1070 bp, Arabidopsis thaliana landsberg
ggctaggggtaatttattggggctggccaatcacttgtaaactgaggaatcgaacctactcaattaccccatcctcggaaattctttatcttattgaattctttgtttactctattgttgtttactgcatcttgccatctgttgtttagtttctgcatttctttactgttactcgacctcatactcgaccacccagttgtctggcaacagactgtgcagtcgagtatctgtgttttattttctgtctgttactcgacctgtcactcgatcacacccagtgctctgcaaagagctgtgttggtcgagtgttttattgtttctgcttgaatttttgttttctgcatgttcacttaggattgctagaactcaccaaaacttgttattgcttggcttgacttagtgacttttgatcacatcttgattgttagcatcacacatatttggattgacaaccttcagtactacaacgacatgatagtgctttaggttcaattgattaaaaacctattatcaatttggcgccgttgccaattgggtgtttgtttgttacatttgagatttcagacttgcttagatcaagttttttttcaatttttcttttcggttactaactgtgtgtttttcttgttgtcttcttgatccaggtacacctctgctgtatgcgaactcgatcaaaaggcaatcagaacctccttttcaacaacaacatcgaccgcatagctcgcgaactcagagaaaggagaaacacagtcaaccttgtacgacaaagcacacatctgggagaagaatctgccccatgactcaatcaccacctgggatgattgcaagaaggcttttctatcaaagttcttttccaatgccagaactgcaagactcagaaatgagatttgtggtttctcacagaaaactggtgaaagcttctgtgaagcatgggagcatttcaagggttacacaaaccaatgccctcatcatggcttcactaaagcctctaagatcagcactctttacagaggagtcctaccacgcatcagaatgcttctggataccgccagcaatggaaatttccagaa

SEQ ID NO: 738 - DNA, 3852 bp, Arabidopsis thaliana landsberg
  unsure (1)..(3852): unsure at all n locations
gaggatttataagtttgcgtaatattttgtcaaaaagtgtatctttctgcctttttgggtaagattgatttactgctgttgctgggttcacattttcatttagttttaaaaagcctgttttctgtcgtggtcaatgcattcagttgtgattcaatgtaccatgagatgatcctaaccaaaaaaaatgtaccatgagaaaatccggttatgaattcgggtcaggtcaggtcatgcaatggtttagctggtctcaactttttttttttttttcgtcagacatggtatttgctggtattagtgggaacgaaacaaatggtttatacgcagtgctgatttgattattttttgttatgagcattttataattttactcaatgtattatgaagtcttttgaataaagattttagatactctatatttcagataacaattttgctagaatcattgcaaccaaattactctggtgaataggaaagtattgtcactactctcgtttttgaaatactaaatgtgtctcataacaagatcataatctacaagacgatgaataggacgaattgttgagctagaaaagcagtgacggcgatagcgtatgctcctaggatgttgttgtttggcagtttgagtatcgaactcgtaaacttatataactaatggaagcaccaaccattaaactacaaggcttttatatgattgtgatgataaagcatcagcttgctgggctttagatttgggtcggccctgcttattgaacatttttagttttatggaagatattgtccctttgcgttagcaacatcggctgatttcttaggtatttcgaacagctccaatatctcggttgagtttttcttcaaggcatgacaaattttagggtattcgatacttaaagnnnnnnnnnnnnnnnnnnnnnagcgacattgatgttggtgaagcaaacttgcaaaagtcagacttactcaaattttgcttaatcactcttgtttcacaagccccggatctaggtttcttatatttttttttatttgcaaaattacaaatgatatagtaatataaaaaaatcatacttttgtcaattacaaattatgtagtaaaaacaaaaaaaaatcatgcaaaaatctgataaaacagcttttaaatccataagcagtttgtaagaaaattaaaaatagtaaaaaaaaaattttctttcaaatatattcttcaaagtaatagtaaaaatctggttgtatatatgtcggttgaatgtcccaccaaggccaagtccccactctattcacacctcaaattagatcaggtttttacaggtgaaatgctatgcgttggatgtgtttttgcaatttcccccctttatgacaacattaaaatctctcaatgtgaaggctggtgcgaaaaaaacagacctcccatcagaaaactcatggagaaacagattgaaaatatataggcacaagaacaagctgatacaaccactgacctcacaatacaaatgttcagaatgaatgcaaaatttcttacctaacgcaacccgcccgctttggataaacggcacaaatataatcaaaactagcttttttctctcccttggctctacatttactctcccatcattccatattttcgccattacattctacaataaccgaaaacaaacttttcgacatgtgcaagtaatctcttatcccaatgaatttaaagtaagccagcaagcatagctcctggatcatcagctaaagccggtgggctaggcggttgaactgctggtgatggtgctggacctgctgctggaactagagctcgagatcccattggaatagtaattaattgttccttgatgaattcttttaacctgtagataaaaggggtcaacaattgcaaatgaagaaaatctgtgatcgaggttgggtttgtgattaagaggcagatatatcatactcaaatgtaagggtaggatctcccgagcctactgtcaatcgtagttgggttctgtccgctgggtctgtttcaattcttgcctgaaaatcgcaaaccaaggaaaatgtcacacgtcattactataagtcttaagaaattttagaaattggagtggcaagtgccaaaaccaggaagtgaaacttggtgaaatctcaccaaacagagcatggctcctgtagtttcagagtagaaggttgtgcttgccactagattattagggtttggatcctacgacaaaaaacaatacaaattaagtttgaagtatacatgtgtgcatgaggaatgaaggtttgagatcgtaaacaactacttacaagcccagggcatatcgtcacatgaaaactgttgaacagatttgccatttccggaagagctagaggtcttacacctcttacctgaaagagattgcagtatcagattatataacgcataaaagtaatgctgcattaacgagcatgtgtagaagtgttggaagttctctataagtgttgtagcgaaagctaattcactaatttcattgaaaagaaaattcttagaagcctttgactactatcctgcgctactcaaatacttttagtttgatatttgatcagagaagctgtggagatacataccacttcctgaagtttcaagggtggccctgagattgctctccattgagggaagaactcttcagatgtcaattgtagaggttgaagaaacttattcaaggttgccgggatgcgtaatttggcactgacctataaaagatccagcatatcaggtagagtcacagatactaaatataccattcaccaaaacaagctaagtactgttgcagtacgtaccacgtttgtaccaaacttgtaggagaaatccaaaactgcaacatccctactagggcggatgttcatcacttcaagcggagattgtacctataaccatgaaaaaattgcaacacttagtaaattatgcataaatgagtagaaaatgacggattgagtagtcaaacttaaataaatcaacaaacaaaagtacctgtgctcgaggaggaattgtatcaggtactggagacagatccagtcttaagtgggcagggggtagtatcagagcttgaactgatgtaagtggagaagtattcttgtttcccatgaagagaacaagtctcccatggtgtcctctccattcagctttgatgccaatctgaggaatacaaacaatcaacaaaatgggaacataagaaagctcggaggcttgtctgctgcatacttgaataaataaaagcagaaactagaaaaaaacaaacctggatatgaggatcctcgtataagacaccactgtctttcaaacataaagcatgaaatctctcagcaatatttccgataagctgtataagaaaacaaaacagtataagaaaaaaattcaagcatgcaaatataaaaatggtacggtttcttttattatggatcttgaattgtgaaacagaacatctcaggtagattccacctaagtaaacgttatataccatttccaactaataaatacaaaaagacgaaacagaaaaaaatatggctataggtaaaaaaaaaaaaagggaaataatgagctagcaaaagtagaagtataatgctaaaacctactatgccaaagaaagtaaaggaataggaaaagattacctccactgtatttgtttgctcttcaacaggtacaatggcggaaccatcaacttcatctggaactccttctgcccctacgggaccatgttgttcatatgagacagctccaggtggagcctctattgcaagaggaccgagtaggtcactaaggagatcaggtgatggagtttgtggatctatattacttaaagttccattgggatgtgagagagatcgagccac

SEQ ID NO: 739 - DNA, 710 bp, Arabidopsis thaliana landsberg
gaagatcaacctacgaaaaacaaacaaaaacttcaatttagtagaagatttagtggttagtttctttcttatttttgtgtacttaaagacttcaatgtcaagttaaggaggcagacttgaaaattgacaattcagagtttatctctttggttactttgtgtgttcttgtgttaagacaaaacacatctctttggctttgaccgtgtaagacaaaacacatctctgtttacctaattctttgttaatctacgtttgaggattgaatccattcagttaaaacgatgctagattccagaaaccctaactatgcagattaacaaataattagggtaataataaagactttgggcagaagcatacaggtttcgtggtgtagttggttatcacgtcagtttaacacaccaaaggtttccggttcgaacccggtcaaaaccattatctttagaccaattttgtttagtttcctttgttactgctttgaacttaatttcatctcttttgttcattatgtgatcatgctctcgtataacaatgatcatgatgatagtatctacttttttgataaataagcatcttctattagaaaacaaaaataaatctatattacatatcttttcttggaaataaaaatagaaacgctaatgaaataatacagtcatgatatctagaaccactcattatatcattaaacataagttcaaattttttga

SEQ ID NO: 740 - DNA, 581 bp, Arabidopsis thaliana landsberg
gcttgacgtcgtcatgcacgcgtacgtaagcttggatcctctagagcggccgccctttttttttttttttgtttttttaaaaaacttttaatttatatttaaagcatcttctcctttagttaaccactcactattcgaaacacaagtaggaatctcaaatcaatcctttcaaaaaattacatgtttgtaacatctcattggaaatccatgcgagattcggcggatgaggtagtagcatttgcagaagcaggttctttgtaccattcattagcctcacgcgtcataaagtttgcttcagacaagaacacgttcttgtattcttcatcatcatatataaattgaggaggatctggtgaaccaataccgataatagtgcttccactcccagacataaacacagcatcgtattccccacgtccagatgctattatccgttgcttcaagcgttttagagatggaagaactgaaaacgctggcggttccaaatcgtttacgcatatgctttgagacacaccattgctggtcacattctctagtaatgtcaagggattaatattgctcgtctgatctaaacgaaaacg

SEQ ID NO: 741 - DNA, 525 bp, Arabidopsis thaliana landsberg
ttcagcagtcgtccgcacgatcaacgcacgacacgtggccagctccaacggtcggctgggtgcaccggacagtgtctggtggccaaccggccctgaggagcaatggtcggctgcgcccgatatggaaggagatcgcgcaccggacatgaacagtggttgtccggtgcaccactcgacagaaggcaagattggccttccaagttgatctccaatggctcctagcacaacaccaagcttacaagaaacattctaagactcccagactccgcctccacgcatttggtcaattgtgttagtgatttgagctctgtttgagttgcgtactccctgtgctatgttttgagctcaagtcttagcatgtgtgcgtgtgtgtgctgcggatttgagtcttgcatgtgttgctctccctctcttactactgtgcttctcttgtgacaaacttgtaagggcaataggcccaatttgtggagatcctcgcaaacaggcagtagactataacgaagatagccacggtaatcaagttga

SEQ ID NO: 742 - DNA, 507 bp, Arabidopsis thaliana landsberg
catactgtaagttttatcgcattcaagtaacgaacaaataaaatcatattcaaatatacgtcattgtataacaaaaagtataaaacacacttgaacatatcgataattgtagtaatgcatttatacattttaaaacagcatcatcatctaattttaaatatttttctccatatattagtttagtttccagtaacgttttcataaccgtagataatatgagcatttatcatctagctaaaattttcacggtaaatgtagctgtcgagtagcctattcaccaagttttctgaaagatctaaaacatggtactcacttgccaaataaaaggataagactatttcgtttatactatcaatttcttttatagtaatatttctgattcattaagcaaccatcgaccagttctacccctcaacagtagttcatctactacgaagacatcaatgagttaactaccaccttaatcaaatgtttacatccgggaaaatacccaacgcatatgatcac

SEQ ID NO: 743 - DNA, 908 bp, Arabidopsis thaliana landsberg
tatagttatattcccttggttcttttgctaatggatcagtttcactattggttgaactttcgtgcagtattcgtagacgcgctcttgatttgctatatgggatgtgcgatgtgtcaaatgcaaaggatatagttgaagagttgttggaggtaagtctttgaccttccctcatgatttgtgaagtttaacagaaaggaaggattaagttgtgtagtgtttaagcttacatggaacccaaaaatacattgcagtatcttagcacagcagaattttctatgcgggaggaattatcacttaaagctgctattcttgctgagaagtttgctcctgatctttcatggtaaagagaactcgacaagaagtatatgtacattttttcatgcacactatagagacatgtgctgtgccctttagatccttacacaagcaattggtcaaagatgttaattttgatattctcaggtatgtagatgtgatccttcagttgatcgacaaggctggggattttgttagcgatgacatttggtttcgtgtggttcagtttgtaacaaataatgaagacctgcaggttcttaaaattgttaggataaatatattgtttatcctatttatgacattcaaaagttgcttacaaatttctttgatccgacagccttatgcggcatcaaaagcaagagaatatatggacaaaattgcaatccatgagaccatggtgaaggttgtacagtctcgcttcccataacaaattttctattaattataatataattaaattgtggaagtggagttactaccttgctacacattctgatttatccatattgttggcaaagtacaatattaacagtgcttagtatcaacaataaatataatttctttcggaatttcaggtcagtgcttatattttg

SEQ ID NO: 744 - DNA, 471 bp, Arabidopsis thaliana landsberg
cctgatcatgacaaaccactcgacccagaggtcgagtagtgtctgcaagatctcaagagatcactcgaccaccagacactcgagcacaaggaagaaaagaagactccagctattcactcgacctctcactcgaccacgtgggtcgagtacagttcttaacccgtccaaatacttcgtcgttttgagtattagggtttcgggatatttggctataagtagcatgtacttctcatttttcgcaaacaagaagttttttatctacttttatttccgcagaccttgtgttctagactttttgtaatccagatttctctttatctattcagtattcagcttttgttcttgattttcgtttactgctgttcattctgttatcatcctgctgttacactgctgttatcatgtctttaacttcgtcaacgttcatgctttctggtatgaatgctgagtagcgaatagatttctgaggat

SEQ ID NO: 745 - DNA, 621 bp, Arabidopsis thaliana landsberg
atgatcagaatccgatggtggttcctgatcacatgagatacatttataagatctttagacccgtgttgttctacaaagaaacttaattgaaaacgtacgaagagagcttaccaagaagaactgtagtccatcctaagtacttaggctcttctttaggtttgttaatgcagctcatagtagtggtatttaaatcagaaccagatgggcactgacaatggaagcttccaagcgtgttttcacatatgctggtatccgaacagttatgtctacgggttgtacactcattgatgtctggtccaaggaaatatatgtatgaggaaaagattcaactctcaatagaagaaagaaagaaaaaaaaaaagaatatgaagtaccttggcaaccgtctgaaaggtatggattcccatcaaaaccttgtaaacacttgcagttataacccttttcacgagtagaatcaaaacatgtgctgttcccaccacatatgtttctacctacaacttgctcacatgtctggtttccaatagaccattctagtaacacagggaacctcgtgacatttcgcagatccttaagatcttctaaagaactgagttaaacataccatcttcaacaaaaaagcgt

SEQ ID NO: 746 - DNA, 526 bp, Arabidopsis thaliana landsberg
gttttgtgccatcactgaggtgaccactcaggatcaagacttactatcacaatcacaatacataaagggagacagaagcttactctaaacatgatggtatcgggtaaaccttgaataccacttagacacaataacctcatgcagtactatatataagtagtttaccatgccccaaactagtatagacaatcaagcatcaaatcatgtatcaatatatattcataatatagcaaggatttattcacaacctcatagcatatctcatttaagtataacaatctcacaaggtaagtaagccctcgaatcatatctcaattcatcaagtaaacttatttaagtccatattcatttaatctagtcatgtagcctttcagtcgagtttttaatcagacagcttttcagtctctctctctcttgccttcaaaaatgaaactaggcggagagagctctatttctaatccgccaaggtcggccatgcagcaccgcccgctgccacatgtccggacagctgccgcgcccataggcg

SEQ ID NO: 747 - DNA, 677 bp, Arabidopsis thaliana landsberg
tgagagccgcaatgaaaacatcaacacagaagccagagatcatcccgttgcttttgactgagacaacctcttcggaacgatttggaactccactcctcaaatgccttccattgttcaaattctgtcatggccagacaacactatgaagcttctgtcccgaaaaggatgtgttctccagctcgtcagtcggcgtcacagacaagcctaaattattataccagtaaccaatggtcctgtaaccagtgccaatgacattaagcaaatcaaaagctggatttacaagattcctgtctctagtaaactttatcctagcggttaagccgattctgtcaacctgtaagatgctgtcaaaatcatcaatggcgtaagcaagcagccatacagtgtcataagcatacagtccataactcgttcacagattcaactctcactcactcatatccttgtgtctcagtggaaccatcaattcatatctccccaacttactatcaatctcatatgattacttccacatcaaaatcagaagctccttcaaataccaaaaagaccactcagatgatagatacttgaaaaaaaactcagcttttacacaatcgagttagtgcgcataaacaaacatttcaagtcaacactttttttgctatctaatacccctacaaatgcgagcttttgcattg

SEQ ID NO: 748 - DNA, 1407 bp, Arabidopsis thaliana landsberg
gtgtgaaaggtgaaaattatacggatgcatctgacgcagcagatttttacggcaacttaactgatatcatagaacttgagtatgagggggtggtcagtttgaaaatcacaatttttaaatgttcgtggtatgaccctaagctcggaagaggtactcggaaatataacaaatacaaaccttttattttaggtacttatggtatatatatattgtcatttagtttttctagttcatatacaaatatctaattctccaaatatggtgcatttacaaacagcatctcaggcggaacaagtgtgctttattccttatccatacacgaaaaaaataaagttggagtggctcaatgttttaaaagtaaatccaaggggaaacatattaggagaatatgaaaataaagactcgagtttattgcaaacagaaaatgatgatgctgttttaataacaacaatagaagatcttgtactcgacaatttaacaatcaatcgcaaccccataaacctcgatttagatgccggagatgccgatccagaagatgaattcctatgtaatttatcgtcttctgatgatgaagaacatgaagacgaagaacaatattagttttgtgtaatatattgatgtcaaattaagtaatattattatataatatgattttaattatatataatgatgcaaacattttaaataaattttactaagtacaaaaaaaaatagatttgacaaagtatattaactataattaaatttattgtaagtataaatacaattaatattaacatttaacttttaacttggcccaaaaaacagttaagcccaaatccaattacaagaatttaaatttagtgactatatactgacatttttatgactaatacctaatttattgggtctaaaatctcgcggcccaaacccaattacaagaatttaacattagtgactatttactaacacttttgcgactaattacaaacttattgggcccgaaaactcgaggcccaaacacatcttaaaagaattgaaatttagtgatgattcagtgacagttttgcgactaatcaaacttattgggccaacaactcgagacccaaacaatgtcgcgacaattgagcgactaaaactcgaaattcaggcccaaacgcgaggcccaaaccctacttcaaccacacgaaaccctacccttctaagggttgttttcttcccgcaactgacttcgaaaccctaagaaattctcttcgatctctcttcctctctttgattcatcattttcgatccttcttctcttcgattcctcaaatcttttcgattcaaactcacaaagtattttcgaaatcaaacccataatctctcttcgatttcacactctcaatctctcttcgatttcatactcacaaactctctcagtttccg

SEQ ID NO: 749 - DNA, 1346 bp, Arabidopsis thaliana landsberg
ttgtaatatcatattaaagctactatatgtgacacaacaaagattacaaaaggttcttttttcctacgtttaactgcacctaactctctttattcttaataaatattaaatttattttttatgttaaagattaatctgttcactcatttttactcaaatatgtaaaaatgtttccaaaacttttaatgatttgttatgaagaatttgaacaattatagatggaaataatgtagctcattgtttagcttcatccattacattatgccattgaaaattataatcaagcattaaaaaaagcctctgccttcaactatgtttttatatcactccctttaccggactgtgacccaattccctcctacagaccaatcaaggctcgaaccactaactaaactcccaaatctctctaccggagaatccaatgacgtgtgtgaatccgatgtaaaagattcccaatcatgaaactcaaaaggacactttggacatgaatactttttcatcttccttaaccttcacaacgaagtcttctcggtgattatcttcaagatcaacggctacaaacgaatggtttaaaagcatctcagttgtccatacttccttaggatctttaacaaaactcttcgatacaaaatctttgcattcttctaacaacatctctggaatcttcggtaaactcatcaccaacagtactgatttgtataaaaaaaatttgcctccttctttcacactcaatgttgtttcgccactaagcatctcaaatacagcacattctaacgcccacacgtcagccacttatccatactggtttacattaatagattatagcaccatatataacggcgtctctctaatctcaacacctttttctgacggcgttaaatctctatcaactctcctcgccaatacaaaatcagcaacataatattcccaagttttatatcacagtgagcaatcctttagcgtggatgtgaagtaaccctcaaagcactgatcctgtgtgatcaagtacctcataaacaattgtagtaaccggattatcaccattagacaaagcttaaggtgaataatgagcatccgtgaaatcgaactgtggcaatggataaactgatgatctcgtagcaaaattttgttgaatcggagacggaattggtggaatcggcggaatcggtgaaggttgagtacgatctggagtcttctcagctgagatcttgcttggattccttgtgcgacgtcgtaacttttcaagggaaaccatcgcgaaatctgagcttgatctagctgatttgtgaagaagaaaacgaatcaccgagcttggatgaacaaaaactcgaagatctgaagagact

SEQ ID NO: 750 - DNA, 449 bp, Arabidopsis thaliana landsberg
cgttcaatctttctccccacaagaggccaacttttgagcaagggagacatcaagagagttttgacaaaccaaaagctctaaaaatttctcaagtggtagctgatccatttattgctttggccttattttctccccctatggcatcaagcaccaaaacgggatcaatcttggccctttaaccccattgcctcaccaaaatcttcaattaagagtacaaaggcaataagagtacatgagatgaacttggaataagttaccctctcatcggagtgcagtggaagtctttcatggtccaagtccaagcacatggttagtctcaaagggtcaagttgtagcacatcttcccctaaatatgtgcatcacttgcaaaaggacttgtgagggttcggggagtgtttgtacaacttgagcaccacacgtaaacaacaaaatgcataatgaacatgatc

SEQ ID NO: 751 - DNA, 2455 bp, Arabidopsis thaliana landsberg
acagatttcattattactaccatgaggatgtgcaacaaaaccggcagctaagagtaaggctaagttgaagaacttgaattccttgatccctagccttttagttgtagagagaggcataaggctaacagatgctcccaaatcacaaaggcacctattaaatgtcaatggtcctagagagcatgacagggtgaatgaaccgggatcatcaagcttttcttggatgactttcttcttgtatgtttcttgagtgttggcactgctaatcatctcttgattctgctcttgcttgagttgttcaattttgaacttttttctagaatgttcagcattcaccaaagatgtgtgctctattttccagataaattgctaggtggcaggtgcagcaatttgagttgaattccccccttcttgaatcatactgtcctcagtattgggagtctgatgacttggtggagattcatcttcttggtggatagtgatagaattagcagtagcatagtccttttgattctggactgctttccttggaagttgctgaggatgctttggagcagaggttgatgcaaattgactctccacatacttgatttttgaattcagagtttcaaacttgacattcagatcattgtaggaacaatcgatcttattgtgtaattcagctatcttcttttcaaaagccatggctccagtagcttgtccttggatgatctgttgaatgagttgcttaatttcaggatcttgagctgctgaggcttgttgtggttgttgagtgaaccctggtggtggattctgctgttggtagcctccattaaactgttgtttagggacataaccttggttgtactgaacaaatgcttagactgattatgttgaggtggatacacttgatcttgggggttagcaacattagtgcttctgtaggagaggtttgggttgggcttgtagttgttgtagcccttgttaaatcctccttggttctgaatgtagcacaactcttcagtttaatcattccccccttcttgcatttggaagtgctcttcatcagtgatgtagtgtatctgcttctgctgagccaacaaccttaatggttggtttctagtaaccattctaggttaggattcaatcaacaaagataagaccttaagagcccgacttgatcattgggtcgagtagaaccaacatgcatcgaatttcaagaactaaaatgcaattagcaggtaacacaaataacaggtaaataaaagtgcaatcacgggtgaatacaaataaatctaagaagaatagaagtcctgaggatggattcattgataagcacaactctagggttcatcaggtggctaaaaggtgaaaggaagataccctagacgataaattcagaaaccgggtcaatccactctcgtgacagagacccccataactctaacacttcctaatctcaactctcgttgatgaaacataatagagcaaggtttaagcaacaatctaccaaagccaataagtagtctagctaatctcttggtctatagtctacaaatatctggaattcgtagatcatgcaaccattgaacgtcttttggacgctggatacctatggtcgaatttgcacattagccaacgaaaaccgcatatgggccaacgaatccagaagggatctaacctaatcttaaccacctgactaacctagagattacccttatctaatccatcctcaagaaccctaatcactactcaagcaacataactaagaacacaaacccagaaattactgaaatcatactaaaatgtagatctaaacaagctaaacaactttactcaaagaactaaatgcaaaaacgaaatagattaagattaaagaagttttaaagattcaagaacgcaaagaaaaactaaaggatttaagctaaatcctttggacaaacctcaaagtgatctatttatactaaaatgttgaaaaccctagattcactagaatacaagagacttgaggcggtttgggcgaatactcgaccttggggatcgagtaaagagggtgctgcaaagtctgcgcctttgtgtctatgctccgagtgatcaattggtccaaaagatgcttcatcctctcttatccgtatgctcagatgtctggttgagtgggaaatgaggaggatccgaagacgctttgatagctcaacaagtcttgtagagatggtcacccttggtcgagtaaatggatcgagtagtggatcgagtgggaggggcgagtagatcaatctgatgcttcatctgaggttgccttgatcgagtaggagggtcgagtaaactgcagcctcctttgtagcatcctggatcgagtaaagaggttgagtagaatgatgcctcttctgtagctgcctggatcgagtgaatggatcgagtagagtccttttaagctccttttgcacctgaaaagacaccaaaacatgcgatgcgaatgcaa

SEQ ID NO: 752 - DNA, 615 bp, Arabidopsis thaliana landsberg
  unsure (1)..(615): unsure at all n locations
aagcgtcttggttttctcgaaagctggtgtaaacttcaagataagacttttttcagcactcaacatgaagnttaacgcggggcatctcaagttccgctgctcttcttctactacggngatgccactggacatgccttttaggagaaccggatccactcgacatgaacctatacaatatgatccgccttcgccaccaagacagtcttcatatgagccaagagaacaccatgttgcaccttcaccaccgaggcaatcatcttttcaacctagggagaaggagaagaggagtaagtcaaagaagcgtataaggattgtatataatgtgtttgcatttaggattgctcatttgcataggggataattatgattttaaaccgttaagcatgttttgagtcaatgaagtaagttcaatgcccaggtagttagttctttgttgcataatcaattgtttctgtgaagcaagaccgcaccctgctttgaatttacaacttgactatactgctttgattggaaactcgcttatctgatgtcattccctatctattagaacctgaactgaatttgcaattatcatgtctatgcattatttgtgaactcatggctaccatatacata

SEQ ID NO: 753 - DNA, 961 bp, Arabidopsis thaliana landsberg
atgcaaataaggaagtcttttggggcaatttttctctttgtaaactcgaaagcgtctaggactttgttgggccgaaactggtgtcgatcgacactcctcgctgatttctgaatccaaattcgtccttagcttcctttcctttggctcttcctccaaaatgtctccttatcttcattgttgtcccaatgcataagatacctgaaaagacactaaaaagactcgagaaataacataaagactcataatcataaacctaaaacatagaagaaatcagtgaaaataaggatatatcaacctccattatctcctcaatgaaatccgagaatattgaagtcatgcttctctgaaaattgggtactatcggaaattgggtagatgatatcaacatcaagtaatttaagaatctcctttttaactacatctttcaaattcggattgaatctcctatgtggttcaatactagtatatgattcattttcaagatggatcctatgagtacataaactaggtgaaattcctttaatatcagctaaagaatacccaattgccctcctatactttctaagttcattcaacaactggttcacttgttcatcacttagtccatcattaataatgacgggataaatatcatttggaccgaaaaatgcgtacctcagaccttttggaagaggcttaaggtcaacctttggagctttgagttctgaacagtcatctgaactttattctcccctccatggtcgagcatctcagtagagtttgttttttcagcgattaggctcatggtgcatcctgatactgcttcttctgagggaacgatcaattcctcaaactcttctggtccttccattggtatgtgggcgtcaaggtactctttgtacccttgggtttctaggtgtaggtacccttcttctccatcgttggttaaggcacttgccaggtgatcctcttctgtaagttc

SEQ ID NO: 754 - DNA, 1697 bp, Arabidopsis thaliana landsberg
ttgggtattatatgaacactgaagaaaaatacaggttttttttggtcatttacccaaaaaagtgtactgagtttcttaaaggtagtaaataaaattaatttattcatataaagatggtttaatagtgaagatataatcatataactttaaatcatttcattgtataatcttttatatatcataacatttaattactagatatagataaaaaatacaaacttcatttttagacaaataatgagcttataaccctttctatgacattttaggtgggacaaacttcaaaggaggaaagaaaaagaacagcttgccactcattctaggcgttacattctcctccgtattcgtacttgtctggtcagcgtttgtggttaatattttgagaaagcgtcaaaatgcgaagccactgtccaacacagcaccaactatttccacaggtatatgggtgattaatcgttatatacatgttcctagatttaacattggaatataattgacaagtagttaataatggtttttggtctctcctatgtcctcaagagcgtgggataggcacagggacgtcacctctatttggacaagaaatggccagtgacacgaatgattggtacgttgttcaaaatgaacaacattaacatggaaactatgttggattaagcttgaaggataagtgacttgaagagcaagttactaatgaagaaaaaggaaattaggcttattattttaggagttatctaaaatatgtgtattaggagttatctaatacaaatcctagttatgtccagattatcttctccccagaaagccgactctcttgatttttatcagttttgatttgtttttattgtcattaaacaagagaatccaacaattttttgattacatcctcctattggagatggtctgaaactcttttttgagctcaagagagagaaacgattgattcttcgtagtggattgatggattgaatctggccccagacgtagattcatcataccgatgattcgaattggataaacaatcgcgtgttgtcttgtgtggtcgcttatctctttatgcgttttattttggattgaaatcttggaaagttcttaagtttgagctgaattgtgttgagtatcaaggttatttgagtcatcggttgtaacatatcatacaaaaatttcggttttgttttacggtttcaaatcccaatagaaaactactaagtttcgaatgtctttcatacgatttactataggtttttatgattaaactagaccacttgaatataatagggcttctaaacttattagaaaaggaaacaaaaaacattttatttcccactagagtacgtatttaatcattgtatttctctttgcatcttaataataagtcatgttctcacgtaactttgtggcttcatttgggaaattattttcttgaagtgtcgagaaatagttgtgtgctcccacttgtgtatatatatcttacatatccttgatttatagtagtacttgtcttgattttgctccttgagttagaaaatatggagagtgggctcttgttgctcgcatttatatcaactttggttacagctcaccaattccacattattcaagctcaagaaggtacgtacacacatttataaattccatttacgagtttttttttgttgtatatcacgtagttttttttttttttttgttaaaagata

SEQ ID NO: 755 - DNA, 3347 bp, Arabidopsis thaliana landsberg
  unsure (1)..(3347): unsure at all n locations
ctcccccaaacttaaatcacacagtccactgttgaccaaatttggaagagagtactcaggacaaaacacatcacaaaaacaaaataaaaacaagagatgtatattacaatggtggagtgagtgcatacctcagtggaagaaggagcggagttggtcgtcaatagctgcctgtgattgctcccaggccatcgaagaatctccgtgttgtgtctcagcttccccctgggggtactcgacctctactccttcgtcgcggccagcaccgctccgattatactcgacctctcttcttctgctgcggccagcaccgcggtcacgtaagctacgggactagagaagtcatgactgcagcattcgctatactcgaccacatcgtcattcgctatactcgaccacatcgctatactggagtgtattgttgttccttcaaagccagaatctatttccatcagctcttcatacttatctcctgaaaacactaacaagatgcatcaaaaacaacaagcaaaattaaagatatgtacaaagataggcttgggacttcctcccaagtgagcttgtttttaggtctctagcttgactcctcatactcattaggcgtttaaaggctcctccaaaggaacagaggttccttctggaataaactgatctatcatgtatttcttgagccgctggccattgactgtgaagtctccattctttccagccagagtgatagcaccataaggtcggactgcagtaacagagaaaggaccagaccatctagacttgagcttgcctggaaaaagcctcaggcgagagttgaacagcagcacttgatcaccaaccttaaaatctcttgaaattatcttcttatcatggaaagatttggttcgctccttgtagattttggaactctcataagcttctaagcgaatcttgttgagatcgtttagttggatcaaccgcttctcctcagcggttttaatatcgaagttccagagtttagttgcccacatggctttatactcgagatcaacatgtaggtgacaggattttccatagagaagggtgaaaggagttgtgccaataggggtcttaaaagctgttatgtaagcccatagtgcgttatcgagctttgtagaccaatctttctttgtaatccccacagttttttagaattgtttttaccttcctgtcggagatttccccatgcccgcttgtttgtggatgataaggagtggctaccttgtgctctaatccatgcttcttcaaaagattttcaaaaaccttgttgatgaaatgtttccctccttcactgattccaactctcgggactccaaatctcgggaatataacggtcttaaacaacttcagcacaactctagcatcattggtgggactggctatcgcttccacccacttatgatacgtagtatcgggcgaccagtatatgcttgttaccatataaagatgggaaaggacccacataatcaatcgtccatacatcaaagatctcaacttccaagattggattctgaggcatctcatttcttctgctgatgttgtcttttctctggcatgaatcacaatttgaaacaaactcctgagcgtccttaaacattgttggccaccaaaagcctgcttgaagaatcttggacactgtcttgaacgtcgcgaagtgaccaccatatgctgagccatggcaatgcagcaggataccttccacttcatcttctgagacacatctcctgtagacgttccaacgttcaagacatatgcagttgttgcatatcttccctgaacgtcatccaacgttcgactggcgtaatatatgacatgaagcttcttgtctattttctggcctaaaacagctcnnnnnnnnnnnnnnnnnnnatcatacatgatctcaaatggatagtcccaattaggcgctcgaacaaccggagcagataccaaagcatccttgatggtttaaaaggatttgaggcagtcctcatcgaattcaaattcggtttccttgcacaatagtctggttaacgatctgactatcttggagaagtctttaataaatcttctgtagaacccagcatgaccaaggaaacttctaatgtccttcaccgtttttggtggctgcaactgcatcatcacttcaatttttcctttgtcaacctctatacccttttctgatatcttgtgaccaaacattatgccttccttcaccatgaaatgacacttttcccaattgagaacaagattcatctcctcgcacttggtctataccctgccaagattcaacaaacatgaggagaaagaggggccatagaccgaaaaatcgtccatgaagacctccaccatctcctcgattaaatctgaaaatatagaggtcatacacctctgaaatgttgtaggagcattgcataaaccaaannnnnnnnnnnnnnnnnnnnnnnntccataaggacatgtgaaagtagttttctcttgatcattagggtgaattggtatttgaaagaaatcactatctccatcaagaaagcaatagtatgggtgattagctaagcgtctaagcatttgatcaatgaatggtaaaggaaaatgatctttcctagatgtagcatttaactttctataatcaatatacattctatgaccagttatagttctaatagggatcaattcatccttttcatttttaacaacagtcattccgccctttttagggacgcaatgcactggagaaacccaagtactatcagagatagggtagatgacaccagcatcaagcagtttcaaaatttcttttttcactacttctttcaagttgggatttaacctcctatgtggttcaatgctaaagtaggatttgttttcaaggtggatcctaaggttacataaactaggtgaaatccccttaatgtcagataatgaataaccatttgctttcctgtactttctaagttcagctaatagcaggttcacttcatcatcatttaactcagcattaatgatcacagggtaagtagagtttggaccaaggaatgcgtaccttagacctttagggaatggtttgagatcaaccttcggtgccttgagttcagaccagtcatctgaagttagaatgattagctctccagagtcgctggcattcgaggtcgagtcattggtcgagtatgctctcgagtgtgcaggttgaactcgtgttgacccttcttcgctcattaccattacctcttttgctggtccattcaattcctcaaagggttctgattcttccatcgctttatgggagtctaacagcttttggtatcccaatgtttccaattgcagaaacccatctccaccacttttggttaaagcactgtaag

SEQ ID NO: 756 - DNA, 4383 bp, Arabidopsis thaliana landsberg
gttcttaaacactaaccgtgagattagctccagccttaatggattgtgttgcaaagtaggatatcctcaagtctgtcggtttgccatcttttccaatagtcaaattgagttgaatctgcagcattaatcaaccaggcaataaactaaagaatagagatcattattcctaactagattttgactcagtaaaacgattcaaaaataagaaaataagaggaagaataagactcaaaagaaaaacgtagttagtaactacctttcctagacttaaacgtcactgtccccagtggcatttaaatctgaagttagcggaaaaaacgtaaataaaggaaaaagaaaaagaaaaaaatcataccagtgggttgcctcccactaagcgcttatttatagtcaataacttgactttgctgggattcaagcatcaggtggatcagaaggtggcagtaaatgcttcttagaagaacatcgcatcatccatggtggtataggagcagttagcgcttgagattgaccatggaaatgaggaacatcagtagggtgacacttaggtatgggtggtatactcctctttccttcacaatcatcaaaagaagaaacaagcactcgacgagaaactcgtggcttgcttaaccgtgaaacagtcttggaaaatttaaaagtcttacagatgaaatcaggaggtgtaggtggaggagatgagtaccttagccgtttaggaggtggattgagtagtagaggtgcagtgcttgatttgacagtctgtcttggacttgcagcatcgactacagccgtgataaacgattcgagtgcagtctgttgtgggtgtcgatcgacactattcagctctacaatctgttctgagacaaccactgtctttcttttgtcctcctatttctgtggagtcttgttttaaataatgccagttacttgtgcagagaacatcatcacaccatgctcattattcaaatccttagtaaccattctcttaacataatgtctgactatagaagaagacttcacaacatctataagtggcatctctacaataagcttatccatcatagctttgcatctagcatcatccagctcctgtttggacttcctaggactcttgggaaaagaaaccttgggttttgttacattttctgcagcacatatcgggttttggagaatttgcatgtttggacttggttggtgtcgatcgacacccagttcgtgtcggtcgacactgtcgggttctgtagtgtctgcgttggctggtgtcgatcgacacccagcagtgacggtcgacactggtgtctggtttgcaaaaactgcatcatcattttcttccaaattgacgattttggctgtaggaagttccctttgaagtactggatttagttgttttccactccttaactggataacactaatatctgctatatttgtagtcaaatgctcggtccgactgtttaataattgaatcatcccattcatatcttctgataatgcaaccagtttgtgatcaaaatctgttgtctggatctcttgacttttgagaatctgtttgaacattgattcaatcatcctagtggtctcgggtggagggtgtgcttgtagtttgctgaaccggtttctaatgtgtagattgttgattgtagctcatgtatcccttttgatccatcttctctgaagtggctaaactgttaacctgtgaaacatactgaacttgcgttttccttgcaatgtcaacgatgttggtactaatgctggaagataagctttatatcaacattgttgcatcctatggatatcttgacatgaaatttccgttactagctgcatccaaagccatctgataatgccaatcaactcctctgaaaaaaatacctaacagctgaacctcactgaaaccatgatgcgggcaatctctctgatatcctctgaatctgatccaaacggctttaaatgcttcagttgcttcttgagagaaggtagagatcttcattctcagctcctcagaccttgcatcattataaaagttgttgagaaaagcaacctttatttctttccaagttgtcaaagatccaggcttcaactgcttaagccaagaagatgctttcccaacaagagaatatgggaagagcttgcagggaagatagtcataagaaacaccttctgccttattgctagaaatcaagtcttcaaaccgctcaatatgatccataggatgttcttgggaaagaccatggaaaggatgcatgctcacaagagtatataatgtagggtttatctcgaaatcgcttctttcgaaggtaggtggtcggattgtagaccgattggaatagaatagatccagtctgttgtagtcaccaagagtcatccgtcgtccatctgctctgatttcttcttggtgtcgatcgacaccctcggcgatttatagtatcaggtttccctgttcatctattttctgaccctcttcgttgtatgcctgaccagctctgtcgcgtaacactccagcagcatcaggtattactatcagcatcttgagttgcgtttgaattccttaaactcttgaaacacaagaagaaaaagaaataaaaacgcgtaagtatcaaaagaaaagaaaagcttagactaaattctacacctaatctaatggtgaatcgaagagaactttggcaacggcgccaaatttgatatgagtcaaattaccctaatgactactctctcaaataaagaggttgttatagcacttagggatcgaattccacaaagttctcggatcacacaatagattaacagttttgaataaagctaaacagaaaatattataaaagtaaaagacaagaaagcaattaaaattggttgtagattcagatgattaagacgtcaggtttagggaaattctcaggagatatcagaatagtagatttagcagtaaattgagattattatcgaaccattgtagaacacaaatcactaatataaagtaaccggtggtgttccgcgaaactcactatgcttaatagtattgatcccaactctcttgtaagtccctagaactaagaaagcattataatcatgtttgataagttcacctaagtaatggacgctaacacgcatctaaatactaggctcatctaagatagttccagtattagatacctaatgtggggcatacctaataacctaaaatcaagttctagctacttactctaaaactagcattaagaacaatccaagataaagaattctaaatttattatcctaacagggtcttctatctacaaattcatccaaatccctaatgagaatccctaaacccaacaagagaactactcaagcatgatcatagaagaacaaaacatgactgaataagaaatcaataatgaaattaagaagagaaaagtgtatagaaagatcttctctaaagagagtctccacagggttttgctcccaagaataaaagagataataagagttaggtctaaacaatgacgtttaaaacgatatatatatgacctaaaacgtgcagggacttctttagaaataggagaaagttctgggccgaatttggaaatcttccaaacatcaataagttgcgcaattcaattgccgtcagatattggtgtcgctcgacaccaggggttgtgtcaatcgagacctacgtcaatttttgtctccggattgcttttgcagcttaagttgtctgttttgcaccagaatgctccataatctccaaatgcatcccaaacatgtaaagacctgaaaaagactagaaaagactcaacaaataacaaaaggactctaaaacttatacctaaatcataggtaaaacatgtaaaaataggtttatatcaactcctctggacttagcttttgcttgccctcaagcaaaacactaaagccgaacccgtggaagaggtttgaaaacacaaagaaacctccaacattctctagtccattgccatgatcattctaaccaaatccatatgcctagcaagtttaatcaaatcctaaccaacctgtacttctccgcaagtttgcacaacattctagattccatacctaagttccacaactatatccaccaggctttcatcgttgggtctcatcaagcaagctaacattcaaaaaccttctacactcattcatgtactataccatgataaaatgaccattctttatatatattttttttcttttggtatcctttctctcccagacttattctttttgaagagtaaccaaggggaactcggatcttgattgacacccttggcatatttccaacatttgtaattgatcattcctaacaatgtataataattgggtcatgggaaacattcctacccctatacactaccgaaaatcatatcaatctttttttttttttta

SEQ ID NO: 757 - DNA, 495 bp, Arabidopsis thaliana landsberg
ggtagatgacttgagtttccatacagaagattgaaaggagttgtacctatgggggtcttgaaggctgtcttgttagcccataatgcatcatctagctttggggaggagtctttccttgtaatcccaacagtcttttccagaattgtttttatctccctattggagatctcaacctgcccgcttgtctgtggatgataaggagtggcgaccttgtgctttacctttgatccaaccaaatagcttctgaacttctcaaatgcgaatacaacaactagaagctccttctcagttggtgcatatcttccctgagcgtcatccaacgttcggctggcgtaatatatgacatgaagctttttgtctattttctggcctaaaatagctcctactgcgcaatctgatgcatcacaacttgatctcaaatggatagtcccaattaggcgctcgaacaaccggagcagataccaaaagctccttgatgggttgaaaggatttgag

SEQ ID NO: 758 - DNA, 637 bp, Arabidopsis thaliana landsberg
  unsure (1)..(637): unsure at all n locations
tgccgctcaccactctttcaggttgtttcatgaaaatgtgaagagcgctttcctcaacgggccaatcaaggaggaggtgtatgtggaacaaccccttgtctttgaggatgacaggtatcccgaccatgtatttaagctctctaaggcgctctatggacttaagcaagccccaagagcatggtatgaatgccatagagacttcttaattgctaatgctttcaaggttgggaaagccgatcccactcttttcactaagtcttgtgaggagtttagcagggtgatgactcaaaagtttgagatgtcgatgatgggcgagttgaactacttccttgagatgtcaaaagtacactcaagatgttctcaaaaggtttgggatgaaggacgccaagcccgtgaagacaccgatgggaagcgacgggcatgtcgacctcaacaaaggaggtaagtccgttgatcaaaaggcataccggtctgaaagggaaatagggtcaaaccttttccaatatgaattttggtggttgaattgccaacacaaattattggactaactagtttgctctagagtgtatgttctacaggtgccaaaggttcaactcaaacgaatacaaagatcaaaaagggttcaaaaganagaagc

SEQ ID NO: 759 - DNA, 707 bp, Arabidopsis thaliana landsberg
ttctttttttttaaccattttttggtgtataaattcaattggctctgtcgactcgggaaaaaccatctctggtcggctcatccatttcggcagccgtcgattctcaggtgatgtgtcttcctccatcgatattgttggatcgaaatctagatcgatatctcgatatttactttgtccactctggaaacgttcctcctttagagataccatctccggtcgactcatatatttcatcggtcgctttttcttccgtcgcaacgtcttcttttctttacaagcgctttgtttgttctactctatctatagatctcgattgaagaaagtgaatgaacgaaacaaaaatggctgtttagatatttgcaatggtaatcagtacaatgtagtaactgaatcgcgttgctccccaaaccaatccattgttgcataataaaatggtataactgaaattggttcaattgatctagttcaaatggttcaactgatctagttcaaatagttcaactgatctagttcatctggttcaatcggacgagttcaacttatatagttcaaattgttcaattgaataagttccaatcgatttttcgggcgtatgatatgagtaaatttggaaaatgccttttttatgagtttttatttgaaaaatactatatcatactttataataaaaattataaaataaccccattataatttaatataattaa

SEQ ID NO: 760 - DNA, 2618 bp, Arabidopsis thaliana landsberg
aatccatttcattctgattgctaggtggtcaagatgtgtacaaaagcaactaattcaagccaaaatacaatgatggtgggtttctagtaacagtcttaactcaagtttcaaacaataaaaaatacaaactaaagtgccctactcgatcacagggttgagtagaaccatgaaggcaacatattcaagtactaaaatgcaataacagataaatgaacaagttaaaggaaaatacacaaataaattaaagaagaatagaagtcctaaggacggattcatggataagggcaaactgtgagatctataaggtggctacaggcgaaagacaaataccctaaagaaaatgttttaaaacaaatcaaagcactctcgtatcattgaccctcaaactaagctaggtccagactcgggttttgtcgacataatctaattcaataggcactaaacaccaacagagtaaagccaaaagagccctctaaagggccatctctcggatagatgaactaatctctagaattagtagatcaggcataccatagaccatctttggattctggaatgcctaagggcaaattccaattgatcagaaagaaataagcatgatgcataattaatcgagaagggatctaacctaatcttaaccacatgataaacctagatattaccctaatctaattcatcctcaagaaccctaatcactactcaagcaacataatcaagaacacaaacccagaaattacaaaaatcatatcaaaatgtagatctaaacaagctaaacaactgtactcaaggaactaagtgcaaaaacaaaatatattaagagtaattaagttttgaagattcaagaacacaaagaaaaactaagagataaaagctagatccattgggcaaatcccaaagttatctatttatactaagatgttgaaaaccctagattcatttgaagacaagagagttgaggcggtttggatgagtgctcgatcttggggatcgagtaaacagggtgctgcaaagtctacgcctttgcctccatgctccgagtgatcaattggtcgagtagatgcttcttcctctcctatctgtatgcttagaggtttggttgagtggggaatcaggaggatccgaagacgccttgaatgatcaacaagtcatgtagagtaggtcgcccttgatcgagcaaacgggtcgagtagaggatccagtaggggggtcgagtagggtctgttgcctcctctgtggctgcctggatcgagtgaattggtcgagtagaatgctctgctacttccctcctagtttgatagagtagagggtcgagtagaaatccttgtaagctccttctacacctgaaaacataccaaaacatgcaatatgtatacaagatgatcctaaatgcctaagtgtgcaaaataagctaaatgtgatgcaaaatgctatgatacaatgagtgatcactaagctacatgatgataaatacatgcctaaaatgagtaaaatatagtgttatcatggttgtaaagcgagagatcccgggagtttgtgtttttggtgtgggggtgtttgaacgcagcatatcgggccctgtttaaaaaaagaacttaataaaactggagtcttaattgcatttgcatgtttttgctagatgcttcggtaagctgccttttgtagttattgtctattgcgtgttttgtgttatgattatgggatggggaactaatgtctgttgtaggtagaccaagctcactaagtaatcttagattacttatgattcgattttgttttgcaggaaaccttagtgggaaccattagaggcatgcttaggacgtaggaaagcgggtacagagtttgttgctttttgcaaaacttaatgattttgatttttgttggatttgaatgtgtatgctcaagggcccattgttgaaacgttttggatacttggttgtccgagaatttatatgttataaaagatataacatatcgtccaggctaacacaattcacgatcatggcaagggttgaaaagcctaaaccgcgttcgtgagggatggtttatgtgggtaatccggctaaaggtctaaatctgtttgaaccctaagttgtgttgtctggttagctatcatcgtagcgtttccgggttgcctttggtttgtccggccatagagcgattagggggcgttacaatttgtggtagatatttagactttagcccaagagattggttgttagactgcttattgactttggtagattgtttcttataccatgctctactatgtttcatcaacgagagttgagattaggaagtagtagagttatgagggtctctgtcacgagagtggattgacccggtttttgaatctatcgtctagggtatctacctttcacctgttagcacctgatgaaccctagagttgcccttatcaatgattccatccttaggacttctattcttcttagatttatttgtattcaccccctgattgcacttttatttacctgttatttgtatcccctgttgattgcattttagctcttaatactgtcacttgttggttatactagacccaatgatcgagtatggctcctaaagttctcatttttgttgtttaaatcctgacttaggat

SEQ ID NO: 761 - DNA, 630 bp, Arabidopsis thaliana landsberg
cggtcgatgtcgactctagaggatccccgtatcctttgatctagccggttccatctccattagcttggttttcacgtcttcacgtctaattaccccggttttgaagtacctgttggcgaagttcatattaccagcactctgataattagctggataggccttgcagttgcacttcttcttaatagatgccgttcgaagaaaaagcatccacatccccattaacttgtgggtatatccggaaggcaggtggtagatgtgcttgaaactcggatgctccataaaataattattttcaacattcgttagaggatgttccaagtcagcgaaggtcttcaacacctccgagatataacatctcgttgctaacttcatcttcttggtatactccgacgccgggaagtacataccaagtggctgcattgccatcgcttcctccatatcctgaaagaaacaaacattcattcatatatcactcaattgtaaatagtactgccacattattactctgtatttccaaaaagtattcccgaaattccagtattaccaaatcctctatcatatatcactcaattgtaatagtctacatattattatctgtattccaaaacgattcccgtaattacagtatac

SEQ ID NO: 762 - DNA, 546 bp, Arabidopsis thaliana landsberg
tgctcgcaactactttggatgaggcaaacccttcggtactttggctacaatctgagcaaagtcctactcctatgtgataatgagagtgcaatctgcttggcagataatcctattgaacacagccgcactaagcacatagacatccggcatcacttttcgagagaccaccagcaaagggaagatatcaatgtttgccatattagcatcgagaaccagttagccgatatcttcaccaaggctttagatgagaaaaggttttgttggttgcgtagtgagctaaatgtcttagattcgcggaacttggattgatctatagcacacatgtgttgtatgcctttgatcacgttcttgtaagcatttctgtctatacttgttttggtgctcaagttgtacaagtcatcttcagatctcacatgatgcacatgcttaggggggagtatgtactacaacttgaccctttgagactaatgtgtttgcttgagtgactttgatatagtctcatagatggattgaaagggaaaaggtggacttgggcacaaaagaggc

SEQ ID NO: 763 - DNA, 11866 bp, Arabidopsis thaliana landsberg
  unsure (1)..(11866): unsure at all n locations
gtgttataagataagagaaagagaagatcatagaatcaaagattcttgggatggaaagagaagggatgcgaagacatgtaggagagaatataagaaaacttgagaaaggagaaactagctaagaagctagaagaatcggcaagcaaagagaaaacgccataaagaggaaaaggtatttacagataaactttatagtacatgaagaatatataagaagctcgttccttgtttcttggtgggaaagttcaaatctcttctcctatgtagtattaagagatttattgaactagttatgtttctactttataatgacatatggagatcatattatatatcacaagatacttatttaatcaaggctaatatttggagcattcgaagattgtttttgttttaaagattggagatgtacaacttttgtaaactgttgtcgtactaaatcgaacaagacaaagttgaaagacttgtaggtaactgaaaacaacggaaacatgaggaatctgcgtattaagcccagttgcgattctctctttatttgtttcttctcttctcttgtaaataagtgtatcttattggttcattcgtctctaaccttttttgtaatacattcttcttttacctagaaagttcatgtgcttaactctgtccaaagttgtaatccaaactagtagtaatctttcatcggaagcgatataaacccaaatcaatcgtcctttattatcatgtgtgtatgtcttctttttttaaccttgggcaatgtggttttggttcggtttaatttagcactgctggtttaaacgagagaaccggttcagtaattttacaaatttaaaaaggcaaagaggaaaaaaaaaggaaaagaaaagttgttttttttctataaggtgaagaaaaaatctggagagggtttcgttttctacagagagagatatatcttcccttgagcttccttggtgttcttcgtattgtcgtcgcgactgagagaaggccacaaaagcttcgtttatttccttcagatccgatatagtgagagagagagagagagaggcagcttacggcggataaatatgagcagcagcaaggtcggcggcggagcaaggaaaggaattcaggatattccgtcagggtctagaaaaatagtacaaagcttgacggaaattgtaaactctcctgaggctgagatctatgctatgcttaaagagtgcaatatggatcctaacgaaaccgttagtcgcctcctctctcaaggttcctcctttttcctcctcctctatttgtttgagctgctgtgtctttggattgttaatttgggcctggggttttcatgtatcccgaggaggatttctcgaaatcgacttaattactaagggtttctattagggtttgattggggtttttattctgaacagaccaatactttcgtttttgttagtttctagaatttagtcattgtgcaattctaaagctgtcgcctttaatatggttccccttgtaattgtccaactttctagctggttcggttttatagagaagaaagatgttgttaatggtttgctttcttagttcttgattcaaggcttgtctttgttctattattaatgatattgatacttgttttttccttattcagatccatttcacgaggtaaagagcaagaaagaaaagaagaaagaggtgagtccatgttacaaatcgtattcttatggataatagacccaggggtgttttgttttgtgcttttggtgtccagtgttggcgttttatgtgcaaacttatggcacaatctctgtatcattacatgcttcaaccatgtgtgatacaatcaacttctctttctagtacacaatttctatgttgacacatctggcaatgatattttttattactagctgtcatcaatcatcatgctgtacctgactctagatgttttgctggaatcaaatgaagtctaggtctagctagttattatgtagtacctgactttcgatgttttgttggagtgaaatgaattctagttttagctagttatcgttttaatttactagaattttggtgattttaaaagtttttttttgtctattcagactagggatatatcagattctcggccgcgtggtgctaataacacctacaaccgtggtgctagaggtggttctgctcgttacgccggacgaagtggatctacccatttcagctctactggtataagcatgatctcttgtatacacaaatatatttagttttaaccgtaagattcatgcttatgtgcttctgttgttcagattctggaaacttccagggaaaatctacaaataagaaagaaagtggaacgcagggttatacaagttcttggtcttctgcttctggagtggcgaacacctatcaaacaccacacaggtttccccttgagcgattctttattttttttagatgggaattgggatgctgttgaaatatttagtggaagttctgtgctgcgtattgaatcaattaattgatttcatattttactcatatggttactcattgtattagtaggatccattttgtagtgtttcagaattcccagtttatgacgtgcttaagggatatcaccaaataggaaaactctgtgattatttgtttgatcttttttttagcctttttaatttgacatttttttcccttggattatgtttttgtacatgtttctatttgggttgtacaagtttctcatgtatcctacttacctttggcagtgaacccattgctatggaaaacaaattgcctcctgttaccttgggagatggaatatcatcatcaaagtcagcttctggacatcaaactgcatggtttggagctccaggccagaggtctatggctgaagttgtgaagatgggtagaccacagaacaagacaacaaagcaaaatgtcaatgtgggttctgagataaatcatgaacacgaagttagtgcaaatcagcaggcccctgttaaagatgaatggccgtcgattgagaagccgctggctcctagtacatcttctttatcagtagcaccagcagaatcagaagtacgcaatggtccagctgatttccaatccgatagaggagatcaatatctgaaggaccggttagaaaatattcatatagcagaaagtggcccgtctgaaagtcgtggggtcgatcatgtgcaagccgactctgttcaagaagatgaatctgtagtttcgtcagaaattgatgataatccatatcagacacagagccatccagtagagcaccacaaaggtaatattttgaatctttataaaatgtttcccatttattgctagtgtgtgccattatgttcaaattctttttcctgtttcattttggagtgggcttgtgtttattgatcatgtgaatacagatgggattatagttctgctggggggtaatgaaagcttctttgctgttttgtttgtcataaaactatactatactttgcctgctctgttttctttctcaactatcttttggcggtagagtgattctcattatgtgatgttttgttacaaaatatagtattcgaaaatcaataccttatgaggatcttttggtgtttctgatgttttttttttattcactgtctcattattacttttcagatgaagatgatgtttcatctggttcagccagttttcaacaactagatagtcatgatcaagaagtctcacatgaagaggatagacctgcggttgtaattccaaaccatttgctaattcacacagaagaatgcgcgcaattaagttttggaagctttggaggttttggatcaaggcctttgagcaacagcgtagaagcgacttctgatgtagctccacaaatcgaacattcagatgcaaggtatatttcgtgtttactgattactttttccaaactttttatggacttcatttatatcatacttaccaactgatcatacttgtttgcagaaatactgagttctatggagatgaacatctgggaagtacaaccaatggaaatatggtccacacacctgctactggaaattatgatgattctttagaaacgaggcgagaggtgttgaagcaagaaaactctgagggcgctcaggagcaccagtacacatttacccagtctgagcaagggtatgcgtatgaaaatgctaagcagcagcagatgaattctgcatatgatgcctcacacacaaattcacagaatcagatgcataatcttgattcattatcaaatgtgatggtaagctacatgtttatttttttataacagaaccatgtttcaaagggttttgaaaatcatagttgtttgtgatagcttctaagatactcaattttctttttaaaatgcaatcaggctttttatatttttgctggaagagtagcttagtaatctctgaagtgattcccatgaaattcttgaatgttaacattagttcttgtatgtttttatctcagcaggggtattcacactcagttcccaacactttattggcacaaacagcacaaaatgcgagggaacttgacttccagtattcacctttctcagctcaacagtctatgcaatcaagaactagcaacaatgcctcatcacttggtggccaaagcatttcaatgccagaggtaaataattctttctccttgagaaacacgggactgaaatagttctttctcttagcttgttttcagaagtagtagttactggttagttgtcacatgggtactgttttgcttacttagccaaaggcagtagtttcttcagattcgaaatctgaatcttcttttacaagtgaaacgtgtgtgattttgattttatattcttttacattgcaggcgctccgaggcagtggaattccggcaacacagccaacccagcaaacactacctggtgctaatatcgctactggacctgctcttcctcagcagcttccaatgcattactctcaacccacattacctctaacacactatgcaaacatgatcggttatcctctaatgcctcagaattatccatacatgccatctgctttccagcaaacatttgctggtaatagtgcataccaccagcaactagctgcattgcttccgcagtacaaaaccaatgtctctcccggtaatttgcctcagtctgcaacagcgcctgcctctgcttatggatttggaaactcgaccaatgtcggatctgccggaaacttccctcttaaccaacagtctgctactaccggtacaacgcttggttatgacgatgttcttagttctcaatacaaagagaatcatctgttggcacttcagcagcagcagcaacaacagcaacatcaacaacaggtactttctcgttttggtcacttccttgccactttcgtttggtttcaggcatgaaccattttggtgacgttcttcctctttttgacttaaatatacagaacgaaaactcggcgatgtggcatcagggtcatggttccagaaccatgtcaggtgtcccgactaacacgtattacaacctccaagcacaacaacaactgcaactacaacaccagcaacaacaacagcaggctcagcaagcagcgggagggtatcgccaagctcagcaacaacagcattatggatctcatggatacccaaattattatcagtctcagaccgaaatgtcactcgagcgccagcagcaaaaccctagggatggtgctgggtctcaggctggtcaaccgtcgaatcaatctcagcagcagctctggcaaaactcttactaaataaagaaagagagtggtttttttcagcttctttctctcgcttatagaggtttgtgtggcgagtctgaagaggaaatatggtcgtgttctaaaatgtaacttatcatcatcttttgtctcctctgttaacttagggaacatgcaactctgatttcatcaatgcaacttcagaaatgaaacttttttttttaactcttgcctcttcttacttctcttgtctaagggctcaacgtgatttttgaagcatgttcttctcttgtttatacatctgtggaaagaaaaaattatttataattttcttaggttacaaacttctctccagctgtataagtcaatggaggaattgtggacacaacgtctggattgattgatctaatctattttcagtctaagttttctaggtagcaaacatgtgtgagcttcgagtcaagtcaatgttttgaatgtagttcgtttactattagtgttatcagaatttgtttagtgtttgaataatcttcttattgattagacatcagattacatcacacttaacgttgtcacaatagagatgtgaacaaaaaaaaacaaagagaaagggaaaaaaattattaactcaaacactctctatggattttacgtacctcttatcgacaaagctagaaggattttgcaatgaaatgattacacatttttttaaaagtttcaatgtcaataaactatacacataaaaaaaaactcaaatattttccaaaattccaagttcgttatgtggaaaatgtcaatacacacaaactttcagtcggatttaaataacaatctgtgcgttggataatttttatgtagtttaaccttaatattgacataatgaaaagacatataaagattgtatgaaatatgatataattgtattgttgattgtcgggtggtaatgcgtatacgcacatgatacataactccaaaaagccaaaaacacaataagatcacatccacttcaataaagaacaaaacatagtggacggctttatcttatatcaattaatttgtaatcataattttttttatatatcatgaaatcctctaaatatgatttatcattgatgatgacattttccatttttacggaataataatatagtgtctatacaataacattttcacgaattatcatatcttaatagatgcttgaaatctataggagtttgaaatgtaaatattttgttttaatcaactttgaaattgaaatttgttgattagatgttgttataatgtacaaactactttaaatttacattttaaatcataaaattgtaacacataatgacgagatccacttagtaagcttttacaataacaaaatagaagaagcaaaaaccaaatcctaaaaagaataagaagttgccccaactcaccacttcactagagattctctcttcctctctaccttttgcaatgaatatctttaactctcttttttatttgtaatattcttctatcaatttcacaagtggagagaccatccaaatcatactacaactctcactttttttctttggtgtgtaataattctttttgttgaatgttttcttcttaaaggcttctccattagtcaacactttgaagtcttcttacttagcttttttcttatgtagattttattatatctttgaatctaagtataagtcaccattattagattcctgatccaaaactagatacattatttcttgggatatatgctttaactaaatttttttttttcattaattagataaattatctattttttttagtcaaaccacattaaaaaaaaaatggttctccattcttactatttcttttgataaccttccaagcaaatcttctcttcaatttgattctctagatatatatttcaaatagtttactacaaaaacgcaagctccttagtaacgaacgatcacaatgcaggacgtttcatagcttatacatcaaatacaatacacataaagatcatcatacaccaaaactcttttttgttctccctggaagatacatatacacacatatcttctctaaaatattacttgtattatacctcccaaccaataaatgtatataatatagacaaacaatgaaacaaacaccaccaacaacaaaaaagtaccacttttagagttcttttagactaaacatagatcacaacactggtacggagattgagattgatatcggaactgagacatccgttgtaaaaccaccgtctctattcccatttgtattccctacaaacccgtaaacgccagaccgcatcgctgcattttcccgcctctgaaaaacccgagcaagcgaagccgctttccgtctagcccgctttgtccccgtaaacaaaagcgtctgtagcaaccccgcaatggcaggtgctctcaacactttctccgccacagcagctccaccactcctacaaagctcgagcaacgcagcaacagcattctctttccctctcggtgttccacatctcatcattcccataagccccgccacagcggagtcttctttccctatagcctcagcgccaagagattgtctaactaacaaagccaaagctcctgctgcttcctctgctacaccttcgttctttaaagctccaacaagactagacacacctcctccttcaatcatcctactgcagttatctggatgtgtcgataagttatacaacgcagtaaccgcatctttcttccctctcggcgtcccgttttgaagcagcaacgctaatgcctcaacgcactgatccacaatcgctatccgtttcttatactcgtgtactgcagagagactgaacaatgtagccgctgcattttcttgcgcttccactgtgagaccagaaacaagaacacttactatagactccaaacaatcaccttcttccatgatccgactcttgttcttctcatatatcgagagattcagcatcgcggtcactgaattctcttgcgcaatagcattttcggatgtaagaaggcggcacaagtgcggtatcgcgcctgcttcagcaatatatgctctgttttcttttccagtcttagctaaaagacgaatctcccgtgctgcaacagtctgagctgcttgagaaccatcagctagatacttaataagtatcgacaccgtcgctttgttcgcttcaaccgcagctttcgtgggaagagcagaagcaaaagactcattcggagaatccgtaaactctgactcataagatataccactcgcagtacaccattgcacaatcaaattcttcaacgccctattaggaacaatcctcgaatccattagcatttgtcctgttttcggacaagtacaatgcccttcttcaatccacctagctatagagttccgatcataagtctgcccagtggaaataatcacaggatctgtcatcaaatcaagagagattggacaaacaaaatcctttggcacagttataaacgtgtctccaatctcctgtgcaacgaacccttttcgaggcttcttcggattattctcaatccaccactccattccatcttcttcaaatccaaacaacaagaacctacagtatcttgtaatcgccacaaaaccattaataaccgatcccgttggctccaaatcaccatcatgattcacaatctgttcttccaaaaactcgatctcgctacgacaactcttcgaatctctaatccccaatttctcaacaaagaacattctcagatcaacagaactcggaatcttaccgttctcaaacccatcaagaaacgaatagaatgattcacgtaatgactcatcgttcttatcgatatacaatctcgctttccttgactgtctctgcaacaactcgatttgctctctaatgtcatcgcttagaccaagatcattgacaggtaaaacatccaaaagagtcgaaatttcttgattcaaatcatggaaatacccagaaatcgaagggttttgtaacaagagccataacttactagattgagcgcagtaatcaacaaggatcttggaacgatagagaagaagataaagctctttgagacaaagcaaagctgttgattcagaaacagagcttttgcttcttcttcttgctcttgttcttgttgttgttgagccccaatttgaatctacgagaaattcgaataatacgacaaagatctcgatcttacgaatcaaagaacgagcgttcttgcgttgaaacgagaatcgaacagaggtgaaacaagaaacaacctccgaagagattgaagctagggtttgaacaagtgcgacgccggaaaggtcaacgggggctaagaatgcttccaaagacggcgatctcctccgtcgtaacgatgagaatatcgccgctgaggccatggaaagggttttctcttgctctcagatcgaaaaaatcaaacctttattatatatacgaagaaaccagaatctataaacgaaaactaaagattcgaagaagaaaaaagtcagaggagaagaaaagtgaaaaaagggttatctttcgatgatactttctgggaaagagagaaggaagaagaagaagaacgcgtaatcgtatatgaatgaatcgaaaggctgagaatttttcagatttgtcttcgttgtcagattttttttttatttttttctctctctcgaaagtttttttgtttttcccagtaaaagtcaatactactggcaatatgtaacggattagaatctaatctttttattaccagatttgtctttttttttggtttagttgtgtcggaaaaatatgctatcgtatttatttaaattagtcgcacttgtaatttaatgctcttctgcaaaatatttatgagtatctcgtgtattttaatacgtatcgttagattcgatgttacgatatgtattatttgtatgtataattcattgccccttatttaggtttgtttgaccaaccggtgattcacttactatttaggtcggcaaaacgttacatgaaataaaaacagcatttaattctgttatttttttgggtataattctcttattagagtcgttaattaatattgcgacaaaagaaaattcgtgagttgattaatagtagaaagtgtagaaaacgagtcaaggatttaaaggtcaatggcctcagccatttgattggtttagagcttggctatctctgaatttgaactatatcttacccacatataataaaattaggccggccacatagacaaacataaatactaacaaaacaagttcaaaaatctcaagatcaccaacgatttatgtagtttgacaagtattcacgaaatatttttgctactaacgtctcgatcaccactggttgtggattttaaatcttctctcagtctctatgttcgttattatgggaggctttaaagatttacaaaatacaagaattcactttccaatagatcactcatttataaattgcttcaaatcaaacacatttaattataaaattgtttaaaaagtttgacctaaaaaaaaagtgtattttagtatcaaatcaattattttaaacttttcttattcaccaccacatttctagattttggaatgattaaaaacatgcatacttgatgtttttataagatttttacggtgttggttctattttgtttttcttattgccattttttcgattattagtgttttgtatgttaaacttgccgattgttccaattactataatataacaaaaacaagttttagctatcgatttttccaaagttttacaacgaagtttttataagttaacatgaagtaataatagtatatgttttaaaattatacgtttttttgtatgaaattaaatgttacattacactattaaagattccaataattaaaacacatgttacaatgagtaaattttattatcagacaataaacatctctttgctctaagaagaaacctatgctagtgaagcgttgactctggaaagatgcaagtnnnnnnnnnnnnnnnnnnnnnnnnngcgcgtgtagaaaaatgttaagctaaagggaagttcactttctttaaccaagttttgcgtttgcaaattacaactaaacaatcccctaaagctaacccaactaaattcaaacattaaactatgtgatcagtttaccatcaaactatttcatatgtttgc

SEQ ID NO: 764 - DNA, 513 bp, Arabidopsis thaliana landsberg
ggttttggggttaaaagcccgaatgccccaaatggtgattttagagggcccggagtggattcaaattaaaacgttcaaataattaattcgaagattggaaccggatgcttttaaaatagactgattgaaattaaataagaattaaatgtgttctttgggaataatcatctatttatttcctctataatcatctattcatttgctaggatatttgtcctcaagaataatccttcccactgagtaaataaatacttgagtgtgaatccgacatccacatcaaccagatcctgaaaagtaaagtagagcttccttgttaaatgattcaaaaccaaaaactcataagaatttggcttcactatcaaagctttgagaatcaagaataagcttggatagcggatttgttgtcaaatatgactatatgttttgtgtatcattgagcataataactaaaaccgcaaccgaattctggaagcctaaagtaggatttaggttttaatgcttgggatctatggt

SEQ ID NO: 765 - DNA, 492 bp, Arabidopsis thaliana landsberg
  unsure (1)..(492): unsure at all n locations
agtccatattgttgtgttgtacattaatctccaaaatatttatagaaattacataacatatacacacttagcaaacatgttagacaatattgttgtgttgtacattaatccccaaaatgtttatagaaatggcacaaggcatatttgtcacaccccaggctttaagtaacaaaaccgggtgcatctcatacatgcgccaaagaagacaacacatataataacagagtgtatagagataaatgtcacaataatcagagtacttattacatagcggaagacttacaaaaataaaatataaatataacaggatctaaaatctatccttggcgccagaaagtcaactgggagacgtacaacaagtaaataccaccgtgttcatctcctgtgggggtgtgagacagcaagagtgagctcacacatgttcatcgctcnacaagttgtgggggataatgtggcatgaactcaccanaggtgggcagtcatgtgatgtgt

SEQ ID NO: 766 - DNA, 579 bp, Arabidopsis thaliana landsberg
  unsure (1)..(579): unsure at all n locations
cagttgatcagaaagaaataagcagtaaacacaactagtcctgaagggattcaatcaattctaaaacttaaccattctacagactacggattccacaactactctatcccatccttaagaattctaagtcactactcagacaacatgctcaaagacataaacgcagataaatgataatattgcataagtaagagataaagagtagagaaacaagatgacagatgaaatcaaatgcggaatctgaataacttggaaaaatctcgaattacaggttgcaaaagcaaaagcggtgcagcagagtaaaacagaaaataaaactgaagcaaaaaaactcaatgtcgactagatcacctgaaaacaactaagaaatgcaatatgtatgcaaagctatcctaatcatgcaaagtatgcaagactgatgagaaatgatatacaaaagtgatgaatgatacgatactggactcaaaacgatgatgaatggacactgaaaacatgcanattatagacatatttctaatgtctcttcgtaaaagggttttgtagacaacttgataatgaaagctggatgacagacttgat

SEQ ID NO: 767 - DNA, 634 bp, Arabidopsis thaliana landsberg
ccttgcaactgcaagtgttcaagagcaagttgaccaaattaatagttgatgcctatgatattccagctgaaatgtgtttagctctgtcacttttagtttttcagcgtcaacccataaatcatgcaagttgttctccactaaaggcacaaacttattatcattagatcctgaagcggcttctttggccaagatggcatctaacatgagtattaaagaatactttcttgcattaagaaaaacagaattcaacgattccacacagttgctggtgtccaaattgtatcggttcactgggaaacaacacctagcccatttttctttcacggttgtatcctccaaacaatagggcgctttaggaaatctcacccttaaaagtatcatactccctctcaaattcagccatggtgaatttctgacttaactccaaaaattttcatgcgagtacgtctctgttgatgtcaataacatgagctatcacttttagggataaatgccaagtacaatacctgtgatgagccgcagaatacacattacgtatgcccttgatgaggcttgaatttctgtcactaataaacaccaattatggagtattgggtacaacacttaacaacttcttgaagagccattcccaact

SEQ ID NO: 768 - DNA, 606 bp, Arabidopsis thaliana landsberg
gagagcgacggatcgaatggagacggaggcggatttcgactgatcgaatggaggcggagagcgacggatcgacggattcaatcgagattttttttttttttaggtctaaacaatgactttaaatatatatatatgacctaaaaacgtgaagggactaataatctggggcaaatttccttttcttcaaactctaaaccatcttggacttttctgaccgcaactagtgtcaatcgatagcaagagtgtctcgatcgacactctcgacttgatctgaaagtgaattcgtcctttgacttggtttcttcagtttttgctccaaaatatctccttatctccattcttgtctcaatacatagaatacttgaaaagactctaaaaggactagaaataacaaaaagactctaaaacttgtatctaaaacatagccaaaaacattaataatagggttatatcataatccctcatcatgagcattataaaaatttggtgttctatttttcggttacccgaagcgttgctttgaaatcattggtagtttgtgcaatgttttcttatggtcacacaaccgatgacacaaaaaacgaaagtacttgggaggaagtgtgt

SEQ ID NO: 769 - DNA, 585 bp, Arabidopsis thaliana landsberg
gaacctgttttagaggaaataactctttgatatcatccttgatagtggatgatatgaaagaaaaaatatcctcatggaaaatgacatgtcttgaaatagaaacggcatgtgtctctatatctaatagcttataccctttgtaacctagaggatatcctagaaagacacaggctctagccctaggctcaaacttatgtctatgtttaggagaagatgaactataacacaaacaaccaaaggtctttaaagattcataagtaggaggtatgttcttaagcttctcataaggagacttattatataagacatgggtaggtaatttattgattagaaacactgcggttaatacataatctccccaaaattctaaaacagtaaggctctagcaacattcaagatgtgttgatgctttctctccaccacagaattttgttcaggagtttcaggacatgaatgatatgcaacaataccatgtgcagcaaacaaatcagtaaatttcaattcatgtgcattggctgatctaactgattttagcttagtctgatattgagtgtgaaccatattaatgaaaaatcggaaagcatg

SEQ ID NO: 770 - DNA, 5505 bp, Arabidopsis thaliana landsberg
gaatccctttattgtatctcaaccaaatgtgacattattatattgagaattataagttttctagcacttcacgttatcttattgatcaaaatgttccccttactgaaatgcatttttcaaatggcacagagtagcaagacgttcaagatttgaaatagccatatacctgcggaataatgtttttctccatgacatctttgaaaagaggaggcggtggcaaatctagaccgagcatcagaaaagacatcctggagatttctttgttttcattgccttgaaactctttcacaacctccaactcaccctataatggttagaaggttacatgaagatgcagctttttgtaagcaattatatcaaactgcatttaggttgacatgtcaaaggactgacacatacctggaagcacttgtggatgatactgctggagtcctttgaagttctaagatccatgtgcaaagtgttgaggagccacgacataaactctactggatctgattgttggccaatccgaaagcgtttcttgctggctttcatgacagcttgcaagaactcatgtggactcacctgttgatgcaaggtaacttaaattagtgaggtcttcaataggtgagggcataacaaaaactaaaaaagtaagaggcaaaattgagtcagacctgtcctttaaagtttcgagcatgccaaatcttgcgagttagttccccaaaacagtgaacaagaggagacttgcagtgctgataattttcaggaatgtggaagaaattccttaaaggagtaactctcatcaacgacgggattgtaacattcacaaactctgtcttttgtatgttgttcaaccccacctacatatttacaagctaaaccgttaggagacaaattaatttaaagatcaagtgtaatcaaagagaaaggattaccattcctggaagatagtcggagccatcaagagccctagaccactgcctattcttgtcaagctcgtttacttgtgctctactaaacctgtaaatggatagcaccgaagccttcataaaaaggaactgaaaaatcaaagaaaaattgagaaaacatgaaagaagagtaatatgaaaaaatataaatagatggtagatgatatagagaactagcaagaagaaactgattgagattatagtcaaagcaattttgttgtttttaactacgtgcaaaggctcacatgttcacaaatcaatacccaaaatgcagtaagaactatgatgtagttagtcacaagatctaatataccttgggtttaaaacatggcgaatgtcatccaaagaagggtcattgatctcgtaactatcaggaagacaataaaccttctctgtcagaagattgatgtaaacgtggtgtcctgcttccaagctatgtgtataagcatgagacttctggcttcttccttggaagtacttcccacaaacaagacacgcatacacattcagatttgacaaggacacagagcaaaacctctcaaaatcaaaatccaacacctgaaattcaacatacaacatgagtttagatactcaacaccaaaaacgattatacaatgaagacagcagaaacataaccatcgatcaaagattacaatcaacaaatttaattacctgacgattaacggtatcaagataaggacaatcacgacgaacttcaacatggcgtgaatgctttcccttacccttcgaggcatcatcttcgtcgtcatccacctcttcttgagcttctcctttcactttgttaccatttccctcccttttcgcaactccattaccacgagcttgcgatttcttcagctcgttctcctcttcctcatcatcatcatcataagcattagccaacggcagaagaggattgttgaaacctagtggtggaggtggtgaatcagaccgttccatcactctcttcctcttcacttctctctcttcctcagaaacaccactcttgacttctctttcacctttcattcttaaaattttccttacactaaagcttgcttcaaaaaccctagaacacaaaatcccagcgattcaccaagatcctcaaccaaagaagcaatgattcttccaaataaacgccctagaattcaaatcagaactcagaagagatctgatagaccgttgatcctatccatccttttgccaaatcttaataaacctttcaggcgtgatcaatatgaacaagatatctccagcatcaacaacagcaaagtaatcacacactgcaaacaaaacaaaacaaaaccaaaaagccactgtgagataagtaagcatgagtaaaactgaaagatatataaataacttccatcagaaaaagaatgaaacttggacaaaccaaccagctgaaatcaatgcagaatctatttaagtacactcctttacaaagaaacaatggatcctagctcagaaccataaatctcaattcattacagtaaaaaaaagagtgaaatttggacaaacccaacagctaacattaatgaaagcagatgcagaatctaaaataaagtgttgtggtttactaaaaaaccaaaaaattctccccccaaacccataattgataattcaattcattactatcaaaacatgtgagcctataagggggatgagatcaaccaatactcgatgatttgagatcggaagaaaagagaattaatcggtcatatggtaagcataaaactgaccaagaggggacgagagactcgagagtggagggagacagagaagcgtgcctccgccttcgtagagggagtttggggttttgtgttttcgcttctcacaagcagagtgagagaccgtaaattaaatgggtaagttttgggctgtcttttattttccacttttgggctttaagttttaagtttccactatggaaaccaatcaaaggcttctacatgggctttgttgtcatcagcttctctgcggctttcatgcttactgtttactagcacacaacgttgcatgcacctattgaagagatgcctaaggtttccttggtggataagaatagtggatatgacataataattattttaacagaaaatagcatttacactttggggctctatgtacacaaacataaaccccatacaaggggcaaaaaaaaaacagaattaagaaagaaaaataaaaactaataaggcaaaaggcaaagcctatttggttttctttttgaaccaatttggctgtcctctcttctcttccttccttcagtctcgtgagcctaactctttaagcatttttatatttgaatatcgggcaaaagaagcattacatacatattggtttcagacaggaatgacatcagcgttttgattatcgtcgcaggttatgattaagccatctgcgtaggttgggaagaggcagtgccaccaccggcacccactggagactgcttctgccggagtaactatcatcagaacgttgtcgtgccttcttaccatccccatcacgctcactgtgcttccttcttttatgtatctgttgcatcacacacaatcaaatatgattttaaatcagtaacaaagggattctctttgacagcaaaagtgaaaccaatgagctttcttgtgtactaaaaacgatcatttgtactagaaacggtgacttttgggtctcattagctttagacttaattcaaacttctaagccctttaacttcagacttatcatgcactgatgtgagatgtttaagccgttaacgttgacaatagttgctggatttcttcctacaatacatgtctcatcacatctttttccattactgtgacttttaatgtggaagaataaccaacggtaccagtcaaagtaaacgcctacatcaacagtttaatacttcccattctactaaagaaatcagggtttaaaaggttgtaatttgggtaaaataaggatccaaggtttggatagtgactctaataacgttatttttagattttggctaagatacttcgtgcaacccgaagaacagtttaagatgcgtgttgaatataacatacccttctttgagacgcataacacggtcatcagctgagaggttgcgatctgacagccactttaagaagctgggagataaatctttgttctgcgttgttacattagccactgtcgccggtttgacaaaaggagaaacttttgatccatatcctgcttttactagtgctcgcaatccagattggaaatccgagatgtaaaaatccgacacatatttctgccaaagaaatataaccacaacaagaatcatcaaacttcaccatcttttcttgtcatataagatctgaaaactttgaccaaatcactgagacaaatggtccttttgcaagaggagaaaaagaaactaacctctgcatgtctagatccccaagaaaagcatcgatgttttgggtttgcggatttcccaccaaaacctttgtattcatacaactccgtggatacataaacgcatcttggtgttctttggaacgaagattccaaaggaatgcttccacatgtcacaacctacaaaaacataacaaaagttttaacatttccagcaaataaaagacacaccagtgaccacactaccatatctacatcaacattgttaattcagacaagataaatggtctgtccaacgcattaagctagctgttgacgactgtaatccaatcgacaatacaaaaatacccgtgactccaatttgtcgaattataaatggtctaatttcactaaagactcttataaaatctatactaaacacaagcagcaaactttagtttggtgagataatataaaatgtcaaagacagacaaaagcaaaaatcatcataaagcacccagaaacataatgaagcaaaactaaatgaagttaattaacactaaaacagagagatccaagagtataacatccataagaaaagccaatgatgataatgacattctaacttcaccaaagttgaaaatgatcaaaagctaaatatggaagcaatttactttaatcagaacaattaaagttacttactaaaactggaaatattaacatctgaaaattaggttttaacttacccctgtaaccttaacgaattgtccatcaatggcacctctaagctcagcatctggatactttttgataaaactcaacaacccttttcttctccaaacgcaattccaaaccaaaaccacgattgcaggacaaactgctgctaaaaccgcagcaatcaccaccggtttcttcaccgccacggtaagaaaagctcccacaagcaatcccatcgccgccactatcaaaaccgcccaaaccattgcttttggtactttaaacccgacccgaaccgggtctacgttaagactcgtcaccgacgacccgtatttaggcttgctcgacgctagattactcaattggtgatccaattgacccgaccttctagacccggacataattggacccgaagaaccaagagaaccgtagtaattaaaccggtggctgaagctgagagatggacctgagaattcttaac

SEQ ID NO: 771 - DNA, 1963 bp, Arabidopsis thaliana landsberg
  unsure (1)..(1963): unsure at all n locations
tgcaggcgtgatcaatctgaataagagatctccagcatcaacaacaccaaagtagataatcacacactgcaaaaaaaacaaaacaaaataagccactgtgagataagtaaacctgagtgaaactgaaaagatacttccatcagaaaaagaacgaaacttggacaaaccaaccagctgaaatcaatgcagaatctaagataaagtatactcctctacaaagaaaggatggatcctagctcagaaccataattctcaattcattacagaaaaaaaaaaagagtgaaatttggacaaacacatcagctaacatcaatggaagcagatgcataatctaaaataaagtgttgtgctttaccaaaaaaaccaaaaaattctctcccaaacccataattgataattcaattcattactatcaaaacatgtgagcctataagggggatgagatcaaccaatactcgataatttgagatcggaagtaaaaaaaagaatgaatcggtcaaatggtgagcataaaactgaccaagaggggacgagactcgagagtggagggagacagagaagcgtgcctccgccttcgtagaaagagagtttggggttttgtgttttcgctattcacaagcagagtgagagaccgtaaattaaatgggtaagttttgggctgtcttttattttccacttttgggccttaagatttaagtttccactatgttaaccaatcaaaggcttatacatggtctttgttgtcatcagcttctctgcggctttcatgcttacttgtttacttctttttagattttggctaagatacttggtgcaacccgaagaacagtttaagatgcgtgttgaatatagcatacccttctttgagacaaataaattagaaaaacaacagccacttctcttttaaggtatttttggaaatggaaactcaaaagttcaaatgtgtattttactacaaaatttcaaaagtttcagaattggaagactttttaccaaaagctcttcccaaaactcatacaatatgcggttttttaccaaagttattcattatgataaatcactagcaacaacaggctctctctcttttttgagttctaatctcattcctcctcaatccaagataaaactggtcacttttgctcttaaaatcagatggagtcagtttgtttccagtgctctattcctcctgctgctcatatatctgcatgtatgcttccgatagttctaccatctggggaagtgtcnnnnnnnnnnnnnnnnnnnnnnnntcgtacctgcaatggacattatcccccaaatgaatttatgtctttcttatgcacagatctagatcatgcatttgtgaacatgaaacacaataatagttaatgattgagaaagcttaccatagttcttgtgacttgcgctgcacaaagactctgaagtacccgtcctcaggcttaccatcatgtacaatgttagcgattagattatactttgaacacacattctccccttctggtgctctaggcaatgatggtatgtaatccctcagctccatgtccttcactgggaagttaactgtggcataggaaaaaattggcattagggatccttatacaacatgaacgtcacaaaaaattccaaatagactcacccaaggtagggttcttctctttgaagaagttattcttcttgaaccgaaccatatggaacatcaagtaacgaggagatttaattacacggtatctcattctggccagcttagggcgaaccacctctgtcacagtttctccatcaaacttcttcaataaatcgaatagagcaacctgacccaaacatcaaagatattagtttcggctaacctcactttgcaaactaaaaactcaaagacataaatacgaggtagcaagccataaaggctacaggagctccaaacaaacaaggactcagaatttctaccctttcgcaagtcatttctaga

SEQ ID NO: 772 - DNA, 554 bp, Arabidopsis thaliana landsberg
gaggcttatataatctcaatatctaatataataaagtttgtttttctcctaacttatgatttaaaaattgggcacgggacatctctccttttgacatgtatccctattttattttttaaaatttaatgcatcattatcaatgatttaatcatattaaaaaaaaatggaaatttgacacaaaagaactcaatgaggcccaactcttctttctttgtcatattcgaggggatcccgttgaactgctaattatcgtgtttttgaaaatgaacttaactaaattagtatattatgaacatatagtatttcttaatctttcaaagatagaataaaaaagggaatcacttaattcacttttcctgcttccccggcttatacaatagtttttatcattagatctatcattaaaattgaaaatttggtctatactataaaagaatcaaaatagaatttctgattttatttatttatcagtgattcaaaataattatgaaaatagacaaatagcaatgaataaaagataaactaactgtaaacaaaagacaaacatacaacac

SEQ ID NO: 773 - DNA, 364 bp, Arabidopsis thaliana landsberg
tctttaccaatgagtcaattcactcgtgttcaggtgtgcacatcagcgaaggaagctagggacgtgaagcggaccagattggatatcctagcatctgaatttgaaaacttgacaatggagaatgaagagtccattgaggagttcagcagttggctgagttcaatttctcaggaggctgttatcttgggaaaaaggtacaaggacaagaagctagtcaagaagtttctcagaagtctgcttgacaagtttcaatctcacaagtcagcaatagatgtgtgacttgattctgatactctaaaagtttgaccaagtggtgggaatgatgcaagcgtatgaattgtatatgaagaagaaggaatgctca

SEQ ID NO: 774 - DNA, 670 bp, Arabidopsis thaliana landsberg
  unsure (1)..(670): unsure at all n locations
cgattttagtttanaagtccctatcactgggcggtcagcaacggttatagttatacacgcaattatacaagtttttacctcattataaaatacctaaaaacatgtactaggtgacgttccggacatacaactagaaagaacagtgtaaacgatcaaacaaaaccatagaaaccgccaacctaaacttgatctaaaagtcccatgagtgccttttgaaatgctcctaaaacctaactacagatctactgacagatactcaaaaaacacaacatcatataaataagacattccataaaaagagtatgagattagaaaagggcttagagatcgtattcggaaattcatagcttgataaatcttctttcttttacaagtagagaagagagaagagaacatgaatgaagaacaagaggagaacggcttggaggcgagagaggcgcatgaggcagtctaatttcgtgggttgcgattagggattgccctaatcttaatatttagagggcttcattacatcaaagggtagaaacgtctttccgttgattagtaagtgatgggccaagtttctgggcttcttagggaggctagaggtccggggtcatacgataggaaggagtggttgtgcgccctactggtcggtggaaaacttgaggggccgcctgtaacgcccctg

SEQ ID NO: 775 - DNA, 557 bp, Arabidopsis thaliana landsberg
catgggtcctccattggcagtccatgaaacttgttgctttgaatcatggagataagaccactcttgatctcaaagttgttgttctgaataggaggtgggacaataccagctctctaatggtggtttctaggtgcatcaccagcaccaatgttgcctggcaactcattagcattcacctcattagcattcacctcattagcctgtcgatgtcgtctctgtaccgcaggagattaccagaaccttgagaacgagtttacatacgttttgatcttactcggttgatgtactcgacgtgctagtcgagtaagagtacctgcaagacaaaaacaagcaaatgaagaaacaagtgagtaaccagaaagaaagaaatagaacttgatcttaataacttagaaatcctaaatgtaacaagaaaaacacccaaatagcaacggcgccaaattgatacaagggtttttcggggtgtcaattccctaaatgcatcttatgtcattgcagcatttaaggtgtcaatccaaatgggtgtaattgctatcaatctggatatgatcagagaa

SEQ ID NO: 776 - DNA, 638 bp, Arabidopsis thaliana landsberg
tatctaacaaaaaaagcataggagaccattctcctccactcatccaaatcgaaaccaaagataagatatcactctctctcattttcttctttgtccgccaaggtcctagctcgtgataggagaagagcggaaattgcaagaggtaagagagctatggcagaagagaaaagcctcgtggatgaagaccttggtggagatgaagactatttccctgaaataactccaagaaccactaaatccttgatgaacaagactaagctatcaccggatggatactatgagcttttggcggctcacgaattccatggcactcgatacccccactccgaaaccatgaacgagcttggcataacagaggatgttgagtacctctttgaaaagagtggtcttttgggtctcatgaccaaccctcactcagcctacaaaacagaggcgcttcagtttcttgcttcgctggaagtagagttgtttcagggtctatctagccatgaagcaagagaagaagggcttgggtatatcacattcgcagtctatgaaaaagactatgttttcgctatcaaaactcttgaggatatgttcggattctctagagggactatgttaaacccaaggtcaagaaagaggactttttggatctt

SEQ ID NO: 777 - DNA, 726 bp, Arabidopsis thaliana landsberg
tttaaagaccgcaacctcgccgcaatggtggatcagcagagacgcgactccactcgcatggcacatgagatagagcgcgatgacgcgggtaaggactcgtctagacttcgcctcgatagaagtcttacctcctatcaaccggcaggtcgcctttttacaggcacctgcaaacactctcgtcgaaaacccagcaacagggattgggacacacacaacgcctgccttcccaaggctaccgctcccacctttgctaccgctaggctattcgccccttaggtacacgtggacgagaaaccaaacaactgcgtccagttcccgcgttcccgggaactcaacgcaacaacggacctctatcgctaatccatcatccattccccggatacaaggaagcgacctccttaacggtccgaccgatccccgagcaccggtcgatccgcgtaacggcctggacatggaaacattccgcaattatgcagctcaaacaaatgcgaacatggctcaaatgcattcacgaatgtatctagcagtgagcgatgctcccgacatagatcgagtgatcgaagaaacaggcgtaccccgttcacggataggatcgctcattttaggcaaccagtctctttagacgatgcccttcacaaagctctccacttcgccaaagctgaagaggagcttgctgtgctggccttaagattcaaagaatccaaaatacaaaacgctccccttgca

SEQ ID NO: 778 - DNA, 1586 bp, Arabidopsis thaliana landsberg
  unsure (1)..(1586): unsure at all n locations
ctaccaaaaagctttcaactgcctcgagcaagcgcttttttttagttttaagcaatgataagccaaaatatattgcttccattgaggagctaattagtgtgggtaaaagaggaaatatttcatttcactttaacctacttcaatcagattatgttaggaaatgccctagaaaccattgacaatattgtacaaactcattttttttcttttcttatatctcttttgtnnnnnnnnnnnnnnnnnnnnnnnagatttgaatatatttagttgatctcatctgttttcccaattcactgtccttttttacaccacaatataacaaaagaagaataatacagagaaaaaaaacatgtaccatgggaataaaatataagtaatgagtacataagaccatttcataatcttgatcttagaaaatttgagacccattatctcaatcttcccctgagagaagaaaccatcaataaatctccaggaggaggaacaaaaataaatcaaagatgaacaaaaacaatcttaatatattagtataagaatccaattatattgttaatcaacagtgatggcgaatcatctacaaaaaaaaaaatattactgaaggacgataaattatctactaattatgccgctcaattttgttgtatagactaagttactgaatagggctactgtgcctcattgtaacttgtaagccaagaaatagtgattaaatataagagccagattcaatattgaaacttgtaaattcaaactaaaaataacacaaatcttgacttggtaatttttaattatttcagagtcatgtctctgtgttactctctctgataataacaaaacagacaacatatatgtggttcgttgttacttttcgtataagtagtaccatgacacttcttttgacatgtaatttggtgcaaaagaaaactatttattaaggaaaactgatgaaatcggctaagtatattaatttctttctcgtttctacaatagaaaccaaaaagcaaaatacaatgaaaataagaattgagtttgtacaaacaatattgtcagtctctactaggttctctcctaacattccctgattgaaacaggtgaaaatagaaatgatatatttctttttccaccatgcactaattagtagctcctccgtttattgctcatcctcgtttagcgctttctcgagacagttgaaagctttctggtagctcacgaatcccatgaaccagaagtcatagttatcgactgtgactacttctaggtacctctgagatggtttcttcgtgttctgactctggttcactccattgatcttgcacaaggggattgagactttgtagtgaaccctagtgagatctccttgaggagaagtcaccttgatcgatctttcgctacagaaggcaatcttctttgatgagatgaagagcaggcccgcaatggaaccttctgttgtcgataggtaacattggtacgccttgaagagtttctctttatcgcagaccttgaagagtcgcttatagatcttctctaagcatcccatttgaaggatcttagctcccaaggatagctttctctttgctgtttccgtt

SEQ ID NO: 779 - DNA, 1176 bp, Arabidopsis thaliana landsberg
catgtaagtatggacctttaatcaatatactaattttcaggaattattttatttacactaatcaaattaacgcggcaaaatggtgagaagttataatcaccaaactaatattttttttgtaaatccaatattgttatcaacatttttcacatcaatgtttagatcatttttttgctaaaactaatctaatggttctctaccaaaccattaatttatgggtttgctatttacaattccgtataaatgattaggaatgattgtgaaagaggagagcaatatcgagttatctaaaatgtttgaggaaagatttgaggaaaaaattagcaaatgggttgtgatgattataaccaaaaagcaaaagatggtttcattgtgtatacatacaactgtttgacccaacgaaggaaacaaactcatatgcaccattggcttttgtagttattgttgtttgtcttacttgattaatgtaatgagcgtttgattacaaagcgtcactaattctattctattgttttgaacttctcatttatgcaaggcacaatttgtttttgacgtttgagacggttactcactcactcttttgtatttttgattttagagtaggaaacatatacttgatttttagattgttatgcttctaaggttaaaatgtttgaatcgacaggtaatattttcatttctttgagatttataactgcaatttaaatatatgttctttctgatatctgtaaattttgtaaaacaaatatccacatcatagcgtgggtttcgatcttagtggattataaatcctatagtcatttgtttttataaacggtgggagattgggagtaataattaagaaaaaatacatctagatataagacaataaatgatcataagaacaagcacgttcacttataatataatcattaagtacaaatttaaagtcagcactaaaattagtgatttgtggtaaattaattgcctagtaaaaaatttaattccataactattaaagtctaattggcatgtttatccataaaaacaaaagtgtgtgtatttgtaataatattttccttaatttctttcatgtatattggcaatatagttgtcatgattatatttagtatttttttctagtcaaaataagaaatattatattattttaaaattatgaattactttgtttgataa

SEQ ID NO: 780 - DNA, 557 bp, Arabidopsis thaliana landsberg
gccgtatccatgcatgcgatggtcaatggttatttttggacctatgcatccctcgaagcagagaagggagttctcgtcttgaccgattatttctctaagtggatagaagccaaatcttacgccagcataaaggacgctcaaatcgagaacttcgtgtggaaacatatcctatgccgccacgggataccttatgagatcgttacggataacggcttgcagtttatatcaacccgcttccaaggcttctgtgataaatgcggaattcgacttagcaagtcaacaccacgatatccccaaggaaacggccaagccgaggccgctaacaaaacaatcctcgacggattgaaaaaacggctcgatgctaaaaagggctcgtggtccgacgaactcgaaggtgttctatggtcgcatcggacaactcctcgccttagtctacggaacggaatgcgtaattctagccgaaatgatagtaccgagcctacgccggagtctatctcccgagaccatccctgataatactcggaggctcccttgacgaactcgatctgatcgatgaa

SEQ ID NO: 781 - DNA, 668 bp, Arabidopsis thaliana landsberg
  unsure (1)..(668): unsure at all n locations
ctagatcacttcggttaacactgtttctacttcttcatcgcctttgaaataaataaattgttcccctagcaaatggaacgaaagcttcatcacagccatagatctataatgtataggatattttaatactctctaggatgcttcgcaagcagaaacatatctgaaattcaaaattatacaatcataaagaacacaaatatatgtattttatagtaataatactattaacgttttcattaaacatacctgcaattgaaatagtcttcgacttcattcttcttctttgtctctgatccatctcgatcagcattgtccttctgtttaccctttcctgtacttttcgaatttaaagacgattcaacgacaacagtaacacgatatggtcctttatgaatatacttgaatatgtatttcacagaacctgattggttacaccattttatgttgatgtgagctatgtatctcagtgataaggatctattataaggaatgacatatctgttatcgcatttaaagtctttcttctcaacaaagttatttgttcttctccttctgtattttggaaatccttctttatcaataatggttttttgaacactttctgtttccatacatggacattcgggttcccacaccacanggccatgaaccataattctttatcactt

SEQ ID NO: 782 - DNA, 579 bp, Arabidopsis thaliana landsberg
gagctgcaaccttgttgtctccattgatgggctttcttttgagttgggcattcgctaataactggtctctgaaacttcgagtaatgggtcgattaatcggaggttgagcctttcctccttgaactccgggaacagaaacaagatttccgatgtcaccgaaggcacgccgattcatcacagcaccgtttttgttctgaatcttcaaaccatcaacgagaggagcacctgtttcacagaattcaaaagaaacccatcaagatcttatctttgtttctaaagattcactagattaacaaaaaatcgatcccaaagaaagaccgttacaagatacttcatattcaaattggatctgtatcgtcgacgagtaatcataacaatgcccaaatcggaccgagttagggcaaacgagttatattcaaacccagattttagatcggcgaaatacaaaaagcaatgatttcacacgcggatcgttacatatcaaacacaacccagaaaaaataacgataaccagtgaaactcaaatcgattcatagaattaagaacgacgatatcaacgattaacaaaggattaagaac

SEQ ID NO: 783 - DNA, 614 bp, Arabidopsis thaliana landsberg
caagagaggaggacgccaattaagagtttggacttgggaatttcattgtactaaatttctgtcttctccacttccaaaagttattttgaccgttttcattgtatcctctatctaaaccaccatcatattacatcgaaaaatatacattacattataaatatggcaactccaaccaacaaagagcatttctcgggtggacttgcaaaggttttggcagaaaaatggcaagttgacgtaatgctcaaggcaaagaatagtgatgagggttcagctatctctgcccacaaacttattctggtctcttctttcatcttctctctttattgatatcatcatctgattcaagaatcactatgatttttttatatttttgctttgtgtggttaatgaagttttctcaacgtatatgttcggaatttgaataggcatcaagatcggaggtttttaagaatatgttcgaattagacgagttcaagacttcgactaaacatgtggaaacaattactctttcagagatgaaacatgaagagttagaagctttccttgagtttatatgcagtgatggctcaatgaaatctgacaacgtaaaacaaaatgaacgctcactctatctt

SEQ ID NO: 784 - DNA, 1017 bp, Arabidopsis thaliana landsberg
aatttacctttatctgggtataatgattaaacatggaacatgactttaccctatgcttaacgcgatggctaaattaatactattatgttacgagtattttaatttataatcatgtaacgtgatcgctcttcgaccgtagcctcgaccgttactttctctttctcgcttagtcgtaagtgtgagccctgcgtcgaacgtctgtttatttattgcattccattgtatggtgtactattcttttgtattaaatgtgtggaatgtatgtttaaactcgtatagataacagttagttggtgtagtccgaatgagttgcaggtgaagaccctgagcagcagctggttggtgaaggcctatgtcctactcattcttataattcactacccgcatttacacagtttatacctaaggattgactagcttttgtgatccatatccttgtttacctatttgggttggattattactgtttagtcttatgctattgcttaaactctaatcaatgaacatgatgagattatctatgatacgctgttttctctcttcttattacgatgtgatacttgtggtcattaagggggctcgagcggtttctcgagtgcctctccgtaaggacctgttctatggatgaccgcccgggaaaacagtgcaaccatgagggtggaatggggtgcccttagctgaataattagaggatccggggtgtagttcacttagccgacgtgccgtcaatggggctcggtgtatgcggctcgctctgccaagtttgggttcgccccttggggaggagcgcggtgcatttaggaaacctaacgggtggctacagccccggggaatctttgtaaaggctacgtagtgatgccctgctgggtcaccttggtagtgatcaatggagagtcatgatctccgggcagaatgggaatcacggcttgtgggtaaagtgcacaacctctgcagagtgtttgaaaactgatatatcagccgcgctcacgtttatgagcggtcaagggagctacaatg

SEQ ID NO: 785 - DNA, 438 bp, Arabidopsis thaliana landsberg
aatcgggagcattatacagttcagttacgatgctttatgtgacgaagataaatatctatttctttatatagcctgtctttttaacgacgaatcaacaaccaaagtgaaagggcttcttggaaagttcttggatgtgaaacaaggtcttcacgtattagctcaagaatacatatgcatactctgctagaacaatttggaagagaaacttcctgtaagcaattcgttcatcatggctataggaaacatcaacttttggtaggtgaaagggatatatgtgaagtgctcgacgatgatacaacagtaagttttgccattgcatctccccctgttaattgagtttatttgataacacatcatcattactaatatttgttttggctcatgtttcaggataatagacgttttatagggataaatttggatttatataagaatgag

SEQ ID NO: 786 - DNA, 1201 bp, Arabidopsis thaliana landsberg
aaccctcatttcaagaaacaaaaacgacattatttggggatatttggggatattacataataatacaaccaacccaggtctccttaataagtaatgacttagttagtgagtaaataaaaatgattaaattgggaaaaaaacaagaacaaaaaaaaactagtctccacttcatttactgtccattctgtatcgctctcagtttggtataatttgaaaatagtagagcaaaccacagcctgggcttagctataacttttgtgctttatcatctagctacttttctttttgcgcgcaccaattcatcttgctactttagtcatcattatttaaagtttgcatcacattttcttcccggttattatgtgaagatatatactaataatatactgtatatagtgagcgcagcccgtgtgagtttccgctatcaaaggtctagtgtgtacagccagatcattaagccttaagactagacccactccgaggcctgtgatcctaaatttatctttccctattagaagatccaaaaccaaaaatcatacgaacttaggcttcccgaaaggtaaagtattgtttccctattgtatgattcaaaaccaaaaactcttaagaacttcggcttcaccatcaaagctttgacaatcaagaatcttggttagcggatttgtagtcaaatatgactagatgctttgtgtatcattgagcataagaactagaaccgcaaccggattccaaaatctaaagtaggattttggttttaaagtttggggtctatggttttgaggtttagtgtttaggtttaagggtttagggttaagagattagggtttaggggtctacaagaaaacagctaactacccactacaactggcgactacataaatagtcgttatatttggtgactatttggctacatttatacgactaatttacaactaataacactatagtcgttagttagtcgccaaattaccactatagaggtgtgacgccttagtagtcgctaaagggcgactactatatgacacgctgcaattagttgccaaaattagtcgtaaattagtcacaattttgcgactaatatacgacacgccgtaatagtcgttaactagcgactattgtatgattactccggcgtgtcattaaatatagtcgcaaaatagacgtaattattcgattaaaaaagcacatgtattttcatttt

SEQ ID NO: 787 - DNA, 1087 bp, Arabidopsis thaliana landsberg
gccaagcagaatttggttggttttctaacagtcctactgttgatgtagaaaacaataaaaagtcacagaaatgactgatatactctatcgcagggtcgactggcagaagggaccctgtgatcgagtacaacaggatgagagagtgtgaaaatgcagaaatggaccagtttactctatcacgaagtctcattgttagtagactggtgtgatctactagaatggttgaaaacagaaaaatactaaaattcaatagcgtggtctccctgatcaattcagttggttaacaaatctcaattaagctatccctagacaacatgttcaacaacagattaattcactcccgtgatagaaatcctcaagcatagctagacacagacctaattcccattaacgatctctaactaagcaggcaataagaaccgactgttaaagccaataaccgctctaaacggacaatcccttgggatagagacgattatcactggaattagtagatccaacgttccattaaacgccttctgggcgctggaacgtttgggatcggattccagttgatcagaaaggaataagcagtaaacacaactaatccagaagggattcaataaatctacacttaaccaacatattcgaccaggggttccataactagtctatcccatcctcagaaatcctaatcactactcagacaacatgcttaaagacaataacatagaaacgaaagatgaacaagcaaatgaaagcaaaatttgaataacttagaagaaaaatcgaaatacaaagttgcaggaatgaaaaacggctgccgataaaaggatgtgtaaaacatgcaaattatagacctactaatattttggcccgtactatgcacggcttcttatgtttcagttaattaaaaatatagaaattaagtcacaaatacattcatgtgagcgcagaagcaaaataattattttcattgttcacacattggctctgcaatagaaaacaaaaaggtaagagaagagctcagaaacaatactacattgatggtatatgatggaatggggcaggttgctcatagttatggacttggacgtagaaagcaatg

SEQ ID NO: 788 - DNA, 1298 bp, Arabidopsis thaliana landsberg
cagaaaacatattctttctccatctattaacttcagaatctgaatttgatatcttactcattgtcttcttgctatgtctcagaatgattaccttcggaaactcagtgaaaagctgcattatatactgagaacttacactcgagttccaggtaataagtttttggtttcaaaattacactattttagcttaataacaaacaaattacttactaactttttttttcgatgtctttatctaaactaaacatcagcttctcaagtagttatgaatcaagcgcaatctcttcccacctcgttgccatatacgcagactacaacaaaccaccaatggatacagcaaaatacacacagaaatctcaacattcctgtgtcatcttctttgccaagtcaggtacatggtaggcaacagcttcttcctccgcagcaacagcctcaacagcctcaaatgaatcaaatccgccatgggaatctacgaccttcgcacatgcagcaacaagctcagccaccgcagccgcagcatcatccgcaaagtctgttgaaacaacctattcaacagtcctttccacaatcaagttcaagccaacaaaactctcaatcactgccaagaaatcagtttccgacacaacgggtcagttctagtcatcaaaaacagatggttctgccgtcccaaagacaagaacaagagcaagtcattaatcaactgatgaatgttccaacatcacgacctaacaacagagaccaacaaggagcttttcgggtatcatcgtctcagcagaacaatactgttggcttacatgcaatggctcaacagaagaataacctccaaagtatgactagaggtcaacaatctcaaccaatgatgtcacaacaataccgccagcaatatcccatgcagcagcagcagcctcagaacagaaacaataccaatctgtttcaagcagcatattcgttgcgccaaacacaaaacataacagatcaacagaatcagccacaacaattacagagagcaaatccatctagtatgtttcctctcttactaacttgtagatgtgatattgtttttagttctaataatgaatatctttgtagcttctcaagattctacgggaaagacggtaaatgccaatcccggggactggcaggaggagacctatcagaaggtatcttcacttgccttgctcttcgcttcttaacatcacaattaggttttgattttgttttcaaacatctcaacattttcctgtgtcctgcagaatataaaactgaaagagatgcattttcctgttctgagtttaatg

SEQ ID NO: 789 - DNA, 3164 bp, Arabidopsis thaliana landsberg
  unsure (1)..(3164): unsure at all n locations
gcccgtagactctagaccctcccttgctcttaccccaagtcttttggaatgtaggtttaggagtgtagcctgaggaactctggttccctctatccttgaccatctgtgtagaagacttcttcctttgactcattctcaggctcaggcgcaatggtctcttcctcagctgcaaaatggacatgattcttccctatgagtaagttatgaaccgaatcgagcttagcattcacctctgccatttgatttcctgaaacagctccaccaatcttctttctctcgacgtcagcattcttggtactgttgctgcaagcaaggttctctatcagggctgtagcatcagctgggtaacgtgtattgaagttaccattgctcactgcatctagagccatctagtatcttcaatcaacttctctgaaaaaggtacctagaagttgtacctcactgaaaccatgatgtggacaaatctcgttggtagtccttgaaacgaacccaagcagccttgaatgcttcagctttttcttgtgtgaaggtagacaacttgtttctcaattcctcagacttagcatcatcgtagaaattgttcaagaaggctatcttgatgcttctccaagtcttgagggaacctgctttaagttgcttcagccaagaagctgcttccccagcaagtgaataagggaagagcttgcacagtaggtagtcctctgagactccattagccttcatgctcaaaacaagatcttcaaatcgctcgatatgatccattggctgctcatgagataagccatggaaaggatgctggccaactaaagcaaagtagccaggcttcatcttatagtcgtttctctggaatagtgggggtacaatcggtgatcaattagcagagaacaggtctggcctgttgaaatccccaagagtacgacgtggttccgcagcagcaggaatagctgcaggaatctggtgttggtgtcgatcgacacctctgttgtgtcgttcgacactgattgcatccgcgtgctgctccgatgttgtcgatcgacaccctgttggtgtcgctcgacaccgacccctgctgcatctctagcagctaattgcgcattgaggcgcgcctgatcctcattggcgttctcaggtatgatgagtccatgatcatccaatctctgaccagccttattgtaggcttgcccctcctcatctctcaaaactccttctgcatcagctttgatgactctatcagccattgctaatttatgagtttttcggttggtacgttcaagttttcccaagtccagaacagacaagttgataagctccttctgtcttgtgctccttgtttgcctaggcatacacctgaaacacagaaaagaagaaaacaagaaacgcgtgagtaacaaaatagaagtaaaaactagacgaaatctctaaacaaaactcaatgatgattcccaagaatttcggcaacggcgccaaatttggtatggttcaaattacctagaactactctcttaaataagagatcaattgtagtattttaggatcgaattcacggagttcttttgttcaaacagtgagttaaatgtcgagattaagctagcaaggtatgagttaaaataaaagagaacaaagtaagaaaacagcagattgattgtgttgtaaacgatttaataaagagctaggaacaaggtattctcaggaaactattggttagtagatctaatgaaagctaggttgttatcgaaccattcttaaactcagactctaattatggaataaccggtgggcgtgctgcaaaactccatatatctattgctaatagtaaccggagaagccgagaaactatcaacctaaatatgcattcttaacgagttcaattgttcatcttagtagataagctgattcttattacacacctataaaccagactcatcaaataatagatccaactacagatacctatggcgggcatatctattgtctagattcaagatctagttaattactctagatctagcattaagcataattaaagatgaagaattctacagaaaacctagcaaaaggggcaatctactaaaccatatgaatccctaatgagaaaccctattcctaacaagcagattactcagacatattggatgaagcaaacaacatatttgagtatgaaacaaaaacacagtgatataaccctatttttactggtttttgctatgatttaagtatatgttttaagtctatttgttttttttagagtcttttctagtcctgttcaggtctttacatgtttgggattcatttggagataatggagcattctagaggaaaacatagaattcatgctggtgaagaaatccggaaactaaaaagcgcgtaggtgtcgaacgacaccacccctggtgtcgagcgacaccaatacctgacggcaattggaagacgcaacttattgaagtttagaagattttcaaatccgtcccaaaactttctcctatgtttaatgaaggcccaacacgtttttcagacatatatatatagtttttagatcaatttttaggcactaagtttggagaggctattctccttatctcttttgtatttttgggagcaaaaccctgtggagactcctttggagagatcttctttacactttctcttgttattattgatttcttattgagattatgatttgtgtttctgttatcatgtctaagtaatcaccttgttgggtttaaggagtctcaatagggatttagatggattagtagatcgaaaaccccttaagattattcttagaattcttcatcttgattgatcacctacaactcgatattagataataggttacccaccataggtacttgttagtttagatactaggtgaacttatcaaacttgataataatgcatgctttagtatagcatttctcggcttctccggttatcttagctctaagtatagagagttttacggaacaccaacggttactctaaaatcatagtttgagttcgagaacgttgcgataacaatcctaatattagctagatctacaatttatctatctccctagataattccttagacccgactctttaatcacttgaatctacaactcatttacttgctttatngnctntacattaatataccttgtctagcttaattaaaatcatca

SEQ ID NO: 790 - DNA, 487 bp, Arabidopsis thaliana landsberg
cttattaatcgttcacaaccaaatcaacctgccgtctttttactttgtgtacttattatttcactcataccctgctagcttaatttcgacatttaactcattgtttgaacaaaagaactccgtgaattcgaaccaaatctcttatttgagagagtagttctaggttgtttgaaccatatcaccagacattaggtgtggtcgagtatgccttgtcgagtgacagacaggaagtgagacatctgtactcgactgcaaaaactaaaaaacaggcaatgagaacgattaagcgataacgataaaacagagaaataagattgacgataaaaaagagaaattaaagcttgcccagactaattccattaacagaatctaactatgcaggttataagaaccgactgataaagtcaataaacgctctaaacggccaatcccttgggattgagacgcatatctcaggaactagtggatcaagcattcatcaaacacc

SEQ ID NO: 791 - DNA, 2142 bp, Arabidopsis thaliana landsberg
cttttgctttagaaaccttgttcaagcattgaagcttatgtgtataattgcagggtcttattcaataaaatgtgaatcttcctttccatcttttacttgtgttttctgtaatcaccagaagtcactgcaagaacactttccttgacgaatgaaatgaaaccggttgttgtctcttagaacgatttctctgttgtatacttcggatgcaaatttgtgcctttgtttgagctaatgagcccaaagaccattgcaagtttctcgctgtggctgctaagcataaagatcttctcatctacatccatcagaagttcaaaacattaccaagatcaggaacatgacctaagttgcttgctctatggtgagcattgctccaatttttggcatttcagggtgagactcatctcctgaagtgaactcatgggtcttacctcgaatctgtattaaacccttagcgtttgctcgctcagcgtttcctgccatagccattgctcctatagccgctgtccaagctgagacatctctgtttgtcaaactattgaaaatcgacattgcttaactctgcaataagctttcatctctcacatgtaataagctttacactgtagcttaacacacaatcattcacaaaatggtatatggcacagagtataatcatattgcatcacactcagttaatagacacagttagataagttacctccgcagaaccatgaccagttaaataagaggaatgctctcataaggtgaagactccagctattaagatgtcagatgttaagctgtagatgctgagaccatcatgtaaatgcggaaaaaaattgatgtttttattcactgataccttttaattccgttcataaaaatcattagactagatactactactacacatacatggaaattaagtgagaatcattgttgatgttcagttaaattcagaccttccaatgcctttctgaaatctcctcctccgctaacaatgcccgagagagattgttcatacactagtattcctgagtcagacgtgacaatgattcattcagctgcacaattggacagtacaggcaacggcttgtgcccagcatttgagtctagctttcacatcatccggattatcacctgtaacaacaacaaactgataacatttagacttcatatatcacagtccattccaatcactgaaattcttgtttaacactagcactcagcaacaaaccaattacataattgaaatcagagtagatcaaacttagatcacctaatcaatcgacggaaaatatgagatatttacacacgacgggactagagatcttccaattggcaattggagtggtggtgtatgcttatcgtctaaatttttttggctcattgaatagcaaagctctaaagcaggtaaagtcttgcagagcgcagggatctcgtcgtagttgaaaccaaagcctagatctaaacaacctttgagaacttcgagatcgtcatccgtcaaactctaggatctcgtcagatcgtccttttgatcatccaccgaggaagctgcagtctcaacataatcttcctattattcttttagttctgtttctgctatcaccagaagtcaccgcaagaacacttcccttgacggatataatgaaaccggttattgtctcttagaatgatttctctgttgtatactttggatgcaaattttgcaaatgaatgacaatcagagcatactcttaggttcttgactattcggattgttgtgcctttgtttgagctaatgagtccataggccattgcaagtttctcgctgtgtctgctaagcataaagatcttctctttctcatcaacatccataagaacattactaagatcaggtacatggcctaagtgactcgctctttgactaacttcatctagcattgcttctatgtttggcatttcagggtgtgactcgtcccctgatgtgaactcatgggttttacctcgaatctgtattgaactagtccctggcggtttacgtaaccctttctccttcatactcagtctcactttcgccatgtcgttccatcttccagctgatgcataaacatttgacagaagaacataactcccagttctctctggagccaagacttgtatcttctcggctgcataagctgc

SEQ ID NO: 792 - DNA, 1094 bp, Arabidopsis thaliana landsberg
aacacgagattttcagctgatgctcccgctctgatagagaaactcgcttgcagtaacaacaccaagaatgctaactctgagaggaagaagattgttggagctgtttcgggcaatcagatggcagaggtgaatgctaagttggattcggttcacaacttgcttacaaggaagaagcatgtccactttgcagctgaggatgagactattgagcctgagactgagtcaaagagggagtcttctacatagatggtctaggctacatcaagtttagacagccacatggcaacttcagtggcaacaggtttacaggaaaccagagttcctcgaactacactcaaaagcctgccttccagaagacatttccttagagcaacttccagaggacctatggtaacacagcaccaagaatgctgactttgagaggaagaagattgttggagctgtttcgggcaatcagatggcagaggtgaatgctaagttggatttggttcacaacttgcttacaaggaagaagcatgtccactttgcagatgaggatgagactattgagcctgagactgagtctgaagaaggagtattctacatagatggttagggctacatgaagtgtggacagcaacaaggtaactatagtggcaacaggtttacagggaaccagatttcctccaactacactctaaagcatgctttccagaagacctttcctcagagcaacttccaaaggacctacggtaatccttaaagatgttcctgttaaggttggtaactctgttatcccttctgattttgtggtcctggactacgagaaggaacccaaagatcctcttatccttggaagagcattcctagctataactggtgcgaggtttgatgtcaagagagggagaatctctctcaaggtttgtgatttggagatggagtttggcatggatggttcagagcttactaaacctatcaattgcattgcttccagcacagacatacctcctcagacagatcataatcccaccacaaagccacacacaatgctccaacacgttcaactcgccaatgagagttacagaggaccggtgtcgaccgacaccactacccct

SEQ ID NO: 793 - DNA, 1692 bp, Arabidopsis thaliana landsberg
gggtctctattgcggtggcacttagatttggttaatgaacgtgttgtctagggataatttattgagcatgtcaatcacctgtaaactgaggaaacgaaattactcaattaccccatccttgggaattctttatctttatcttgtcagatgttgcttagttcctgcaattctttactgttactcgacctgatactcgaccacccagttgtttggcaacagactgtgcagtcgagtatccttgctacattttctgtctgttactcgacctgtcactcgaccacacctagtgctctgcaacgagctgtgttggtcgagtgctttattgtttctgcttgattttctgttttctgcatgttcacttagggctgctagaacacaccaaaacccgttattgcttggcttgacttagtgacttctgatcacatcttgattgttagcatcacacccatttggattgacaatctaaaatactacatcgacatgatagtgctttaggataattgatcttaaaaacctattatcaatttggcgctgttgccaattgggtgttttattgttacattcaagatttctgacttgctcagatcaagttctttttcaattttcatttcagttactgactgtgtattttcttgttgtctcatttatccaagtacacctcttctgtatgccaactcgatcaacaggcaaccagaacctgctttccaacaacaacaatgggaatttccagaacaaagatgttgaagaaggctgggaattggttgagaaccttgctcaatcagatggtaattacaacgaggactgcgataggaccgtcagaagcacagctgactctgatgacaaacacaggaaggagatcaaagcgctgtatgacaagctggacaggattcttcttagccagcaaaagcatgtgcacttccttgttgatgacgaaaaatatcaggtccaagatgggagggtaaccagttggaagaagtcagctacaaagggtataacaacttcaaaaccaacaaccccaacctctcctaccgcagcacaaacgttgctaatcctcaagatcaagtgtatcctccacaacaacaacaaggtcagaacaaaccttttgttctttacaatcaaggttttgctcctaagcagcaatttcaggggaattaccagccgcaaccaccacctgggtttgcacctcagcaaaaccaaggtcctgctactcctaaggctgacatgaaacaaatggtacaacaactgcttcacgggcaagcctctggctccatggatttggcaaagaagatatctaagttacataacaagctggactgtagctacaatgatctcaatgtcaagatggaaacactgaataccaaagtccgttacttagagggacattctgcatcttcttcagctccaaaacagacaggccaactaccaggcaaagcaattcagaatccaaaagaatatgctcatgctatcaccttgcgtagtggaaaagcacttccaactagggaggaacccaacacggtcactgaggacagtgaagatcaagatggggaggatttaagtctcgagaaagatcaagctgacaaaccactcgaccagccactcgagcaaccactcgaccagccacccgagcaatcactcgaccagtcactcgagcaacctctcgagcggccactcgacaacgttactcgaccggcc

SEQ ID NO: 794 - DNA, 1941 bp, Arabidopsis thaliana landsberg
agatccaattcctaacaaaggtttgactcaataaaacgactcattttgaaaaattagaataaaaataagactcaaaaagaaaaacgtagttagtaagcgcctcctccagacttaaacaacaatgtcccaagtggcattcaaatccggagtaagcgagaaaaataaaagaaaaacgtaaaataaaagaaaaagaaaaagaaaaccataccagtgggttgcctcccactaagcgcttgtttatagtcaatagcttgacttgccagagttcaggacttggatggaggaacatgagacttatgctgcaatctcgccttccaagggggtgtgtaaacagatcggctccgtgcagcatcatttgtcgatcgatactctttctgttatctgcaagatcagcagaagaaacatgctctcgagaatctcgattcttgtttacatgtgaagcacatttcaaagagtctaaagaaataatcaaagtaacagttggataagagatagaggagtacctatcacagggaactaaagcagttgtgggctgtggaagaggtgcagaagcatctgtctgtgaagcgcgatggtatcgatcgacatgagggtgtggtgtcgatcgacattgtctctctgtaatgctcatctgtgggctgagctgtagcagcctctatagttggcgttggagttgaaatctgagcagccttagaggtgtgtctttgtttgttgcaatgctactgacaagcaatttatattccgaaccatccatgccaaactccatctccacatcgcatatattgagagatatccttcccttcttcacatcaatcctagcaccagctgtagctagtgaagctctaccaaggataagagaatccttgggttcttcatcatatgccaggaccacgaaatcagaaatcactactctcttggacttgcccttcttgaccttcttcaatatgatggaactgatatctctggtgagaagattggcttcctcggagttgattccattcttgaccaagggcttgacatatctcataagttgagcagatgagttctctaaagcatctttaataatggtggtcaagatcttctccattattcttttgcattttgcatcatgaatctcgtgcttagaatgacgctttctcagatatggaaccttaggagcataaacagactcgagctgcatagggatatgaacctcataaggtgcagtgcgtaccaattgttgatcgacgcttcgagtgtgtcgatcgacacgatgttcatgacttgtttctgtagatggatgaccatacagtgtcgatcaaaactagtatgtgtcaattgacactagttctgcagctgtgagctccaactcatcctctgtgtcgagctcctcccatacattgtcttcatctctgaccaagatagcattgctgctcttcctaggattaatatctggattgccaagaagaaaaccatcttgtcttttgatggactgagcagtttgaggtacctatacatctagcttcttcaagtgagagctcagattgtcgatctttccattaagatctgtgtagacagcatcaaacttgccattaaactctacaacaagctttgtttggctctccagaatctgctcaagcattgattccattcttgtctctgttgagggtggagggggggcttggtaggttgaattaccgtagttcctctgaaagcttctttgaggaaaggtcttttagaaagcaggctttagagtgtagttggaggaaccttggttccctgtaaacctgttaccactaaagttgccctgtggctgcccaaacttcctctatccctgaccatctatgtagaagactccttcctttgactcaggctcaggctcaatagtctcttcctcagctgcaaagtggacatgcttcttctctgtgagtaagttatgaaccgaatccagcttagcattca

SEQ ID NO: 795 - DNA, 967 bp, Arabidopsis thaliana landsberg
ttttttttttttagtgtgagatttctttcatgtttcaggggaactcaaaaaagtgagacttttagatttattacagagacaacaagatcaaaagttttactctgccattgttactcaagagaatggagaaaacattcacttcataaaccaaacagagtattcctttcttgaatccggataagaggggagaatttcaatttttctcataggcacttgctctgctttagtctggactttttttaatgcctatcatgtgttcgatgaaattcttagctgaaaactcttgacccttgcaataatagtatattaaccttttgtttcttccttgcacaccaacaactttttgctctggaagtacgaagtttgacgatttttgttaccttatgattcagggttgttcttgcaccattgacgaggcagagatcgtatggtgttatatattattcagaaagaatgactccaggagggtttctcattactgaagctactaatgtttcagatacagctcaagggttatgctcgttttgacttaaagtatacgtttttattaatgggttttgattaaagctagctttttgctcatctcccacatatctgacttgtttcaggaagctatgaatacactcctggaatatggactaaacagcaagtgaaagcttggaagccaatcgtagatgctgttcatgacaaaggccatatcttcttctgtcaaatctggcatgttggagtttctaatcgaggttttgcctaaacttaccatctttaacctggttaaatccttaatcaaacatggtcaaccagatggggaagctcctatttcttgtaccgacaaggcaatgatgcacaccaaagatctgtttacgcctccaagacgactaaattccgaggaattttcccgcattggcaatgaaatgctttggaagaatgtaaagcataacacatttaattgaaagaagcttttcaagac

SEQ ID NO: 796 - DNA, 5754 bp, Arabidopsis thaliana landsberg
  unsure (1)..(5754): unsure at all n locations
gaagaatcccaaagtatcatcatgcttaggtcaaaatgcaaaatatataacatctcatgaattttttccatgccttcaaataacccttgtagttttgatagtagtgataagatattaccagaaaggcagaaacgatttaacacacaaaggaaatagataatagagagataacatggctacgaaaagatagagaagtaggttttaaaacacacacgattaaagactcccaagagttttgagcccattctcacaagacgagattatagagaaacccacacaaatccaaagtttttagaaacattcttcttagtattcctctccttcatcatcttcatcgtcaccaccttcagcaccgacctcttcataatccttctccaatgctgcaagatcctcacgtgcctctgagaattctccttcttccataccctcacccacataccagtgaacgaaagcacgtttggcgtacataagatcaaactnnnnnnnnnnnnnnnnnnnnnnnncagcaacactggtcgagtttgagatcatgcaaacagctctctggactttagcaagatcacctcctggaacaactgttggtggctggtagttgataccacacttgaatccagtaggacaccagtcaacaaactgaatagtacgcttggtcttgatggtgccaacagctgcgttcacatccttggggacgacatcaccacggtacatcaaacagcaagccatgtactttccgtgacgagggtcacactttgccatcatggatgctggctcaaaagcactgtttgtgatctcagcaaccgagagctgctcatggaaggccttctctgcggagatgactggggcataggaggaaagcatgaagtggattcttgggtatgggaccaagttggtttggaactcagtcacatcaacattcaaggcaccatcgaacctcagagaagcagtcaaggatgagataacctgaaaccatcaagagagagttaaacataagaaacgaaacagcaaaaagactgactgatgtaaatgattgaagctggctctatacctgagagacgagacggttgaggttggtgtaggtgggtctctcaatgcttagggaacgtctgcagatgtcatagatagcttcattgtcgaggaggatagagacatcagtgtgttccaagagtgagtgagtggagaggacactgttgtaaggctcaacaacagaggtggagacctgtggagatgggtaaactgtgaaacccagcttggactttttcccgtagtcaacagaaagtctctcaaggaggagagatccaagaccagatccagtccctccaccaacagcgttgaagacgaggaatccttggagaccagtacagttatcagcgagctttctgatacggtccaagcacagatcaacaatctctttcccaactgaaataagatttcaaaagtaaatcagtcaatgaacagtaaattcaacaagatatggttgatgatgaagaaacaagggaaggagtaacttactggtgtaatgcccacgggcgaaattgttagctgcgtcttctttaccgctgatgagttgctcagggtggaaaagctgacggtaagtaccagtcctgacctcatcgatcacagttggctcaagatcaacaaagacagcacgtgggacgtgcttccctgcaccggtctcactgaagaaggtgttgaaagcatcgtcacctccgccaacagtcttgtcactcggcatctggccatcaggctgtaacattccacatccaagacaacacatcaatacaaagagacatataaaacgaaaagatctacacatatagaagcaacgatgaaaagagaaaatcacaacgagatgcttcaactatatcgcaaatatcaatcgccatctctttaagcaaataaagcaaagttttccttcacccaatattataaaacaaatacggatatggcatcagcaaaagcaatctgacatgaaatccaattcaaacacagatctatccaggttcatcgaataatttagaaatgagaaacggatttcgcatcaaccacagaaatttcataagacgtcgaaatcaaacacagatctaaacgattacgtacaatagatctacgaggtcaatgctgcgcaaaaatatctcagatttgatcttttaaaatacgaaaaatatagaagaaaaacacagatcaagatagaagaggaagagacgaacctgaatgccatgttcaagacagtaaagctcccagcaagcatttccgacctggataccggcctgaccaatgtggatcgaaatgcactctctcattttcgtttcgcggaagaaagaaaagatctagaaactagatttgcagggaagaagacgaagaagaagaagggcgtttatgaagacgctcttcttttagatctagatctgattttttcgatttctaggtttttacagagctgtttgatgctatatttataagcgaaagtatccatctgtatgtaacggcacgtatgatacacgtgtagtgatgtaattgggttgtcgttaaaaccacgatttgttgatatcctcgtgagttgcgtattttctaattttgaattttgattccttagattctgtttggcaatcgctttctgaccgtttctctttatttttgaaatagcaaaattccttgaattgcgtggaaatgaaccggaatttaattagaattgaaccggatcagaccaatatttaaagtaaaccgaaacgataagaaactagtattaaccaaaatcttcgaaatgggaaccaaaaattcaaagctttgagtaaatgatgagagcgctagcggcggcttcacggccactgttttccgatttgccgagtctcgttcgttcatggcttccgacttctagcttcaaatcgtttgctactgtatcttcgtctcctccgtcggatttgaatctccggaatcaatctcgcggtggccttcctcgattcttttccgatgatcttccatctcgcaaggcacacaccctatctatctctatctttatctcatataatttttgttccctttaaatctgtgtaagaatccaatcgaaatgagagtgagggtaatcactgagaagtttagaaattactgtaattcactgtaatctctaagaaatttctggtaaaatcatggtgaaatgataatattaaatgttcttgttgtttgaaatgataagctcctctttgtgtaaatcgttttatgattgtttatagggtggagttgttcgtgttcaaggctctgagttttggcatatggctaaagttcttagactgaaacaggaggacaggtaattactacattcatatatgttattgtcattttccagtgttgcattcatgaaaggcccttttaaaaattgatttgttcatgttttgtttgcttgtatccatgttgctaaaagttttatcctatctgaattatgtttgtaatgtatctggatccatcctttcatttttatgcatctttatcatgaggaattcagttgtttaagtaatgatagcatcaaaagtaaccctgaggtgagaggaggccaaccttttctttagtttaagatcactaaaccttcagtgaatgtaagtaatgacttgcacccattttctttgcaagggtagaactctttaatggcaaagggggtctagtagaaggctgtatacaaagtatagacaaaactggagttgattttatcgcacaagaagatcagaaggtgattcttcctcagggcatgcagtggcaggtgtttgcagcttttggtatgatatttgggactgctcttaattttacaatatcgccggatgttatagtctctggctctgctcgagtcatgatttctttgaaaatgtcttgtcaggaactttgaagggtggtcgagcagattggctaattgagaaatgtacagtatgtatctacttttagtatgtaactgtctaaatcacctgtgaatattgtgtcactgaatatgtgtatatgctcgtcttaggaactcggagcgagcagtgtcacaccacttttaacggaaagatcacccataatctctgaaaaccgggtcgatagattggaacgcgttagttttgctgcagctaagcaatgtaagtagcaatagtgaaagaaaacaattggttggttaatcttgctcttctttttccttggcattatagttgtttgatcagaaactatttgccttatttttcactgtcacaggccaaagacttcatcaaatggtactgaaccctccaatcaaatttgataccctcttggatcatgtatgtttgaacatttctctacgcaaactctaagatccttggtttataaaatttctgactttttgttcttctaaacttgttttgacaccttttggggttttctagattttgaagtcaaagttatgtttggttgctacagccgaagctacacctcttcttaatgcagtaaactcctcagcaaaagaatccagcggactattaatcgttggaccagaaggcggtaagaaatcttctcttcaatacatttctgatgtagttctcttttaaaatttctactgacttgctacactttcacattgtcgaaaatgaaatcatgggttaacgctcgagtagacacaaaatgaacagtagctaatggctcgtgttaatatgacttgtctcagtgatataaaaaatatgtttgttatctaacggtcaacaatgaaattgaagcagactttacgaagaaagaggtggagatgatgttggaagcaggcggcacagcagttggactggggccacaccggttgcgagttgagaccgcaaccattgctcttttggcaactctagtgatgtggtctgactctcaagagatgatctaaaagcttgttaggctttagtttttggtgcctttaggctttgtcttgtgttcagagattttgcttagttgagtctggacatcattgataagaaaacaaagaagatgtttgaatattatagcctcataataaacaaggaatcaaggatacataaaaatacataaacaccgaagaacaagctaaccgaagaaggataatcaatttggcggtcggggtaccgagtccatccaagatgggagcacaaactgtgataacataaggattcgatcgcatctctcttccaggaacccttcaggacccgacgtgtttacgggacagcaatcaccttcactagtactcccatcctatgactcttgatgaacaataaactcttgtgcctgcaagtaacccgataccaaacaaccgtgttgacgatcccacagatagacaatatcagtatcaaacggattcattgccaggggaaaacagttgacatcagatatgaaagacggcatgacgacttcccaaatcagttgccacctttcactcttttcgttatgcagcctccatgctttcaatattcgatgtattacttcaatgaagataacatcttctcctgaagtagtcaagcatctccgaacatgttcatgttcatcatcatgttcatgttcatgttcatgttcatcattcgcgccagggagaggtataacctgacattgatcatcagctccataaaagtcatgagctacaaggacaccaggtccatttgaaaacagatacctatcccacagataaagaaccccgttgagattcaccggagaatcaactctaccaccgtggacgggtcgagatgagaaaacatgcttgaaagtccataaacctgtctcagaagaatatacacaaactctccataaatacattcc

SEQ ID NO: 797 - DNA, 628 bp, Arabidopsis thaliana landsberg
  unsure (1)..(628): unsure at all n locations
agataactatcgagtcatacacacgtatgagtattatagatgttcaggccaaattatttgaagttgaggttaaatggtaaagaaagactcaatcatgcttactctgagtttacgactaaagaatcaaagattctttaacannnnnnnnnnnnnnnnnnagctgtttcaggttagagcacaaaacctttcatagttcttgagatgttatgtgagcaattcttgtgtgttagtattagaaatttagaaaatacagactgtttaaagatgtttttgttactgatttgtcttttgttctttagcacttaaacgtcaacttgaatctgtaacactctaaaagctgcagataagagtgaccagaagctgcaagatgtgactcttgctaagaccactcactggggaaagatcaaagctatgcttgaagaaaagatcgatgaattgagccaaggacttcaccgagtagcttctgacaatgcagcactcactagatcgttgcaagaacgatctgagatgatagtaaagattagtgaggagaggtctaaagctgaagctgatgtggaaaagctgaaagactaatcttcagtttgctgagagagaaaatgagatccgcaacaatgaagagaaaaacatg

SEQ ID NO: 798 - DNA, 1100 bp, Arabidopsis thaliana landsberg
tcctagctcgtgatgggagaagagcggagattgcaagaggtaagagagccatggcggaagagagaagcctcgtggatgaagatcttggtggggatgaagactatgtccctgaaataactccaagagccaccaaatccttgatgaagaagactaagctatcgtcggatggatactatgagctttttgcggctcacgaattatatggcactggataccctcactcccaaaccatgaatgagcttggcataacagaagatgtcgagtacctctttgaaaagattggtcttttgggtctcatgaccaatcctcactcagcctacaaaacagaagctcagtttcttgcttcacaggaagttgagttgtttcaggggctatccagccatgaagcgcgagaagaaggacttgggtatatcaccttcccagtctatggaaaagactatgttttggccatcaaaactcttgaggatatgttcggattctctagagggactatgttaaacccaaggtcaagaaagaggactttttggatctttgggtaacaataggtgatgacgcacaattctcgtccgcaaaggccaagagcaacacaatccgaaacccctgcattcggtacttccagaaagcaatggctaacgtcctctacgcaagggagaagaccggaccgactaacaatggcgagatagagctgctagatattgccctaaaggatatcttagtctacaccaagaacaaagtgcctatgaagggtgacacaaacgatgcttcaccatcaatgcgtttattgaatcatctttgtggtttcaggaaatgagcactagcgaataagcacaagagaaccatttctataggagggacgataacacctatactaatggcttgtggagtgccacttcagtcgactccctttgcccctagatggatcgacattcctcacctgagatgggctttgtttactgagcatgagagtcatgaggggatgcagtctaactgttgcgcataagaatagtggttcgatgagtgcttggaataagtttcaagacaagatgttggaaaaatgtggcaaggccataaccccaattaatgctgtactgagctgttca

SEQ ID NO: 799 - DNA, 3817 bp, Arabidopsis thaliana landsberg
aaacccattaacttttaaatcatcattttactcgaccaacagaagctacagagttttatagggagtttatgttgtttacaatagatttcctgcagttttcccagtcaatagagtgtggaccacgcgctgaggataagttggagacagaatctcaaaactcaatctcatccactccttttgaaatttcactcgaccatactctcttctgttttccaccactcgatcaagacaatctactcgaccacataatcccaagccgcactcgacctccgccgcctcagccgatttcaacgattcactcgaccaccaaaaagcactcaacctccgcgccgccgtcaccagttcatttcccatgtcactcgacctctaagcttcaccgaagaagtactcgacctctgcaaccattcactcgacttcagagagtttactcaaccaacggttaccactcgaatcgattcaattcgagggaatcatgagcaattacagtggcagttcttctgttgatcctgactacaacatggatgagacagagtcgtcatcttcaaagccagagagagaacagagagaatatgaaaacttcagaagaaaagctgagatagcccgagggaaaagagcgatgatagagaggaaaaagcttatagatgaggatctggaagacgagtacatgcctgaacagactcgcagagctaccaaacttctgcacaagcccgacatattgcctgctgaggaatatgttaggcttttcaagctgaatgagttctgtagcatgaggtatccttgctcgacctcacttgcacaactcgaattgttggaagatgttcagcacctgtaccaaagttatcatctggacactctgatggcttatccgtatgtagcatatgaagatgagacaatacaattcctctccacactgcaagtagagctctaccaaggtatgacctctaatgagtatgattgtgaaggattgggattcttgcgattttctgtgaatggtcatgagtataggttatcaatcaagcgattggaaggattgtttggcttccccagtggaacgggatctaagccaaagtatgaaagagaagagctgaaagacttgtggatcaccattggcagctctgtaccgttgaatgcttccaggtcaaagagtaatcagatacgcagccctgtcatcaggtacttcgagcgttctgtagccaacgtactctactcccgagagattacaaggactgtcactaactctgatatggagatgatcgcaatggccctcaagggaactcttcgccaaactaagaatggtatgcccctccagggtgaaatcaatgacacacccctagctgtacttcttctgatccatttgtgtggatacaagagttgggctttcaccaataaccgcaagagagcacgaggcgctctgtgcataggtggcgttgtgacaccgattctgatagcttgtggagtcccactcatttctgctggactcgagccgcgagcaatggatatcgagcacctacgtcactgcgaattcctggagtttgcaatggttgacgatctccacaggttcaggtttgagcactctatagacaggagagctaacatccttctccctagccctgaggtcacacggataatagagggagataacattgattttaggcctgagattggacacctctactatgagaacgctccgccattggatgaggatgatcttcttgaagaagctgcctcgaatgggatggatgaagatagggcagtgaagttcgacactagcatgtatcactttgctgaacatgtacctccagcgaggcagagcaagagcttgactgaagctcataagaataacagtaaattgcagaagtggtgcaagaaccaggacaagctgatcgccaagtgtttcaagcttctgacagataagctgagttgctcttcctccaccactgctattccacaggtacagcgtactatggagatgccatcgaggagaattaatgcacctacgcacaggcctgagcttagcgagcagagagtcccacatgtccaggctaggcattcgtcagtcgaatcccgggaacacaagagaagaaggaaggctacactcactcgatctagcagcagatcacgcctcattcactcgttatggtcactcgaccgcggtgctggccgcagtagaaggagagaggtcgagtaccctcagagcagtgctggccgccataaagctgatgaggtcgagtacccacatgttggagctgatatggaacaaggcggttcgtctatggcctgggagcaattacaggcagccattgacgagcaactacgttcattcttcgactgaggtaagcgcctcacttcaccattgtgttatatcatctgttgtgatttgtttcttcattttgtttctgtgattggatttgtcctgagtactctcttccaagtttattcgcacactggactgtgtgatttaagtttgggggagggctcaggaagtgtgtgttgcattgcgtatatttttgagtctgcattcatctaatgcatagaaaaaccaaaaaaaattgaaaattttcagaaaatgatttcacaaaaaaaaaaaagagtgttcatgtagttgcattacatttaggatcgagtctagagtgtttcatttatgattgttgcatatgcataggggataatgatgagatagccttgtaagcattttggttcaccggataaacttagtgccctcgttgctagttgtctgttgcgtagtcaatgaatttgaaataaaactgaaccatgcctagattgctctactcgaccacactgtcatgatctgataccattccctatcaatttgaacctgaatctgatctttaattatcatgtctgcatcaaatttgaactcatggataccctaaaatacttggattttcttattcattttgatcactcttgttaattcaagtagctgactctccttattagagcagttaacccaaacccgaacccaaacctagactttctttcaagccctatatcacttgtgagtgtttgtgaggtcttattccgagtaagcttggtagaaagtgttaggttcgtaatgacagagatagtgtctcatgtagttctagttcgcatttttcggactagataggactaggtgggcgtttatactttgggttgagatgtgtttaaaagaaaagaaaaaaaaaagggggttgattcattgataagaaaaggtaaaagactctaggtgaagtaagctaaagaagcagaaaaagtctagtaaaggttttgggatttgtaaagaaaagaaagagttcttgttagctattgaagatgggcaaaagcccttggttttaaaatgtcaaaaacaggaaccttagttgttaaagaaacttaaatccgctagatgtatctaagtaatgagaaagcttctcctaaaagtcaagagaaaagaaaagaatgattagaaaaagggcttaaaggattcatgaatgcaaagggtagagttaagttcttatactgggattggagatgggattaccattagagcttcatttgatatactctgggtagatgggattttatctctgtatgcatagcttgggacttacctttaacattctactaaagcataatcagtttttgagagatcccctgttactaaagcctattctgtaagggaccatctttgtctcttgacctttaacttagccaaatgagttcattgatgatgcattgcttgattcacgttcccaaaataatgcccgcaaaaggattgatagatttgatggcatgaataagacgagcataagagttggtttgattgataacaagg

SEQ ID NO: 800 - DNA, 558 bp, Arabidopsis thaliana landsberg
aaggggataatcctaatttttatgtttatatatacgatacggaacacacatgttctgtgacggaacgttctgatcgatcccgacaaacaacacctgttgttaaaccaaaaacagtcggaataatcatcactaagcatttttgagtaaaggtaattacaatgttttggctgacttattttttatttgttggctgactatagatattttacggttgacttattgatatagtatggctgacatataattacatttcggttgagttatgaccctttaaaggctgacttaagatcactttgtggctgagttgtggtatagtttgactgtgctgtaaatatattatagttgacttatcgattaatatgtctgtgttaacagatgagttattcaaagtcatacaagacgctgaggtttgcaagggagctcactctggggacccatgatagtagttttgaagaactgtcttcttacctatacatgataagacgggcaaatcccggtacactcgcgcgtcttcaaattgatgagagtggaagattcaactatatgttcattgcattg

SEQ ID NO: 801 - DNA, 1011 bp, Arabidopsis thaliana landsberg
tcatcatccccggtttcattggtggccggatggttaaatggttaaaacgaatcattgtcacaactaaagaatccgacaatttctaccatttcaaggacaacagagttttaccttctttggtagacgccgaactcgccgacgaagaaggtacataaaatctttttgcttcaataaatctcattaagatgaactaattgatatgtttaaaaagtctccgaacctataggagaaaaacaaaaacagaaatcatattaaaaaatgaaaaactaatgttggtggatgatgtcagcttctgtgacttacataaattcaaattcaatggttttgttttaggttggtggtataagccagagtacataatcaacgagctaaacataaactccgtgattacgacgccatgtcacgaggagattcttcccatcaacgctttcacaacccaaagaccttatactttaaagggttacgcatattccggtacttgtccttttaacattttaatttaataaatacgttatttcataggatgatttaatttaatagtaacaataatctttatacaaaaaaaaacaggaggtggaaaaaaagtgacccgtgtggaggtcacggtagatggtggagagacatggaacgtatgtgcacttgaccatcaagagaagccaaacaagtatgggaagttctggtgttggtgtttttggtcacttgaggttgaggttttggacttgcttagtgccaaagagattgctgttcgtgcatgggacgagactctcaacacgcagcccgagaaaatgatatggaatctcatggggatgatgaataactgctggtttagagtgaagactaacgtgtgcaagccacacaagggagagattgggattgtgttcgagcatccaacgcttcctggtaatgaatctggtggatggatggcgaaggaacgtcacctcgaaaaatcggctgacgcgcctcctagtcttaagaaagtctgtctcgaacccgtttattgaacacaacttg

SEQ ID NO: 802 - DNA, 6194 bp, Arabidopsis thaliana landsberg
aacgaatgactatccacaagaatccaggtttttagggttcaatgtaaataagtaggatatatacacttcaaagcctggcgcagggcctaccagattctacacacttgcgtagatgacgtgacacttacacatgttacaattacacataaggcattgtatcgtaaatctaacaacactaatcacagacgagctctaatgaggttaacaaccattttccaaagttttcttttccagaggttgtttctctctctcaacatcatttgcgttgcttctttgcttgagattctgtttgtagctctccctgcaaatgcaagatacagttagatactctataagacaatacatagaccaagtaatagttcaggaacaattataggtcgatatgaacctaattgattgctgttactattactaattcaactatcattggccttgtaattatttaataactactacttggaaaaagaaaaagaaaaagggagtgtgcctacaacgattgagagctgctcacggatataggccattgatctcaacatggcacctagtgtatctcgggacacctgaaacttgacctctgattctcctgttgttgtctcggtatcttgaagctggagtaaggaaaacaaaagaagattttttcacactgttgaaaccttctagttcaattaagagtccctaatatggagtaaaacattgattttggtaatcaaacgtatggcagcttaacatgaatgagagaatcagcttaaacaagtcaaacaacacagaagtttcacacactaacggtagatggaatctatgttagaacaaaccaaagacaatcaataaattaaaaggagtttagtcaagtcaagaagactacatgagaagctacgagcctagagtctaaaagacataccttcaaattgatgacagctactctattggctggagatgaaagttgctcgctaatgtaagccatggaccttaacatgggttcaagtgtgacgctagacagctgaaatttgacatccatgtctgctgagggaaactttctgtaatcgtgcaactgaaaacatcatgaaaaataatcctcagtaaagcggtcaactactattttgcaggaacgagcaagactattaatggcaacaactttgattttcctacactatagccagtaacttttccgaaaaggcgaatgtcaattgttcaaatcttcaagatcattattcttacaaatctaatctcttttagataaagcatcccatcagaccaactttcagtaaaagttactgcaaaaccctacagaaaagatttactggttcatataatgcacacctttaaattgataactgcaactctaccacccggcattgtatttttactctccatcccccaagtcaatgacttaagacaaggaagagccacctgtaagacaaagtaaatcaagttactgaccaacaccaatagaatcaaagaaataagtctgtgaaaggtttcctctgggtaccatattctcaggagcagtatcatctcggtgaagtgacactggtgccatacgcggcagattcagatcagaaacagattgagctctggccccaccatcgttaaggttaaatctgcgtatcatttcatcctggcgcggccacagcaaaggggttgtgtcagcagctgatagagaggtcttgtcaccactaccaattccaccaccatgtgagctaggaggcgcagctctacctatccttttcctgacaactgaaaccttctttccaccttctctgagttgccctaaagcaatattataagcttcagctgtaattgccccttcctcagcatacttgatggcttcgcgacataaatgattatagcggtgtatcgagctatcatgcccattttcactgacatgctcatctaactctaccatgctcttggcatttcttgtccaccgtctcaaaatataatgtggtggcaaagtgagtatattagtgacagtaaacaccgtcaaaacatgtcggcagagtatgccggagtgctcaaacatttgacagctgcagtttgctctcatttcagggtagcaaaacgttactatataagctttgttgtcattttcaaaatttgcaaccctaaatgtgctggtagtaccatcatcttcaattctgtttgccgtgtgagcgaatgtctctaccaactcttcctggaactttccaaatattttccttgtaaagagatttgcagcctgattctccatgggtgatggcgtcttcaagactggaggtgtgttgacagtgtcaagatctgcttcaatctccatctcgaaccagctctccatagccctttcgtacagcctaaagaacatcggaagggttgtctgctgattcacatatccatcgaaaaaggaacccgaataaccttggctaggaaacactgcagcaaaaaacgaatcccggaaataaacaggtacccactgagctcgagcattatataaagaattaagccattcatgtcttcctaagtcatatttgtcaatgacagaactccaggacgattcaaactcctcaatcgtttcagtaaagttgatacaattatatagctccacctgaaaactaggatacgcaagacacacatgagccagcttttcctgaccttctcttagcacatcccacttattaatacagtgacgagcacctggaaatacctgaccagcagcaatctgtatggctctatcttgatcagtcaccaaagaaaccggcggttgatctctcattgctgttagaaaagtcttgaacagccagataaatgaagtgtctgactcgtccaaaataagtgcacagccaaataagatagcctgaccatgatgattcacaccagtaaatggcgcaaaaggaacacgaaactgattgcacctgtacctcgtatctaaggtaaccgtgtcaccaaaatgagtataagcaaccctagatctcgaatcagcccaaaacacatttgacatctgattatcttcatcaagctgaaccgcatagaaaaagccaggattctctgcctgcatcctcttaaaatactccaacagattatgcgcatcccgtccaatcgttctcttcgtgtttgtagccatagacgcatttctagctcctctgctattagcatccatagaaacatacatcataccactaggcacattaaccccttcttgataactagatttctccgagttagcaaaatgcctacgaggacgaagacaatgaagcaaattagaacttgctaatccatgagtatgctctttaacaaactttgtaacaacccatttctcatgaccttgcaactctatcctaaccattgcatcacaactctcagaaagccttctctttgaccttttactactactactacacacaaattctcgaacactaacagacccatcagttctaggaagaagcttagaagtaaaaccaagctgcctcgagtactcatcatagaaagatttagcttctttttctgaactaaactccataccaacacatggctctgcaattccaatctcatcttgcacccctaacgagttatccatgttgttctgtccactgcaatcactaggttcaacatctccttcatctcctatctcatgattccccattgacacattctcttccaccaaatgaacatccataaccttcacttagtagagaagttctaatttcacacaaatgtttctcatcttcatagtctacaaaaaagtactattagtgtttggagatcttcttccgaacatataaatatgaggactttttgcatctatcactctccgattgtttgttgagagagagagaaacccagaaagaggagaaagcaaaagagagaaagaggagcttacgtcagtcagtgatgcgaagaactcagaactcagaagaatcgaaagtcgtgaaattagggagaagggcaacaacaattggggaaaattgagaagaagctatggcagctatttcgttttcagattcgaccggaggaaattaaactcctgcttcttctcagtcgttcgcgaggaagaagagattcaagcacgaaaccgacgtcgtttcgtgcttttgttgggttttttttttcaatttaaatagcgagacctcgttttaatctaaacccaacaacagaaagccctcataaaaagtgaggcctcatttgaaccgaacccaacaaccaggaaagcccttgatacaagagacaacgcgcgcgaaagcatttcatcttcttcatctgtcttttttagttgagccctaattcattttcggatgacaacttcatttccttgtattgtcgtcataagaatctcaggttctagatgattctctcttctcttatttgatctggttccatctcttcaccgtaccagtgtcaatcacgaatccctttgttttgaaccctaatttatttaatacgcaacacaagcaatcgatacaagagtctcttagcatcatcggcgtgggccaaatatgagcggaaggagatgtgatcggaggttgaatgtgcagaaagtttcagcggcagatgaactcgaaactaaacttggatttgggcttttctcccaaggggaaacgcggctcgggtggctactcacgtttgcatcagtaagtcacgttttgtgacttccctagtagttagttctctgaatactgaaaacttctaagtacactcactgattggttattatactacgttgttggcagtcatcttgggaagatgccgatactgggaaaacctttagttgtgtggaccttttctttgtcactcaggtcagctgtggtcattgctactatattagctgctttcttcgtatcacttgctcaaccctttttcgtttctttccaggacggctcttcttttaagactaagtacaagttccgcccttacttgtatgccgccaccaaagtatgtatggtttctctctgtactcgagtgtttcatcctatatgtcaactaaactgcaatgccctttttacaggacaatatggaactggaagttgaagcctacttgagacgccgatatgaaagacaagttgctgatattcagattgttcacaaagaagatctttatcttgtaagtcactaaagcataactccttttacgcagtttgcaactacctgttgattactcgtttctttctctctatatagaggactcatgtcaattacatttgctacaacttttagttattttcctcttcttgcaacttcaaattgagcagctctagtaataagtccaaaactgatcttgcttccatgtgctcaaatcatctatctagcctgccaaaaacgttcttgtaactcaaaaaacgtttgctagtaaatgtttaagtgtttaatgcttcttctttagtggcaacattatgcaagatatgaacgttttcagtacctcttgtttggttgtcacttttgctgaccttttctttgacctaccataccaatttgagtttcttgatttcttatgttcatgagcagaaaaatcatctatctggcctgcaaaaaaaatatctcaaagtatcatttgacactgtgcaacaattggtggaagtaaagagggatctgttgcatattgtcgaacgaaacctcgcaaaatttaatgcacttgaagcttacgaatccatcttgtctggaaaacggtaaggcaatgtatttttgttcttataaatttccagagttcttacaaatttatcccttaaaactatgttgttccttagttataatttccaagtcttggaatgtagagaacaacgtcctcaagactgcttagactctgtggtggacctccgcgagtacgatgttccttatcatgtccgatttgcaattgataatggtaacctatttagtcaaacttttaatcctagtttagccctcaaggttgtcaaaatcatgatgtgttctcgctgtccagatgtgcgtagtgggcaatggtacaatgtcagtatttccagcactgatgtcatactagagaagaggacggatcttctccaacgcgcagaagttcgcgtttgtgcattcgatatagagacagtaaagcttccattgaagttcccggatgctgaatatgatcaaattatgatgatatcctacatggttgatgggcaaggttttctaattactaacagaaaggtaaaagctgcatacatttgtattgcattggatttgatctaatcaatgatgatatattacatgatggatgatgaccc

SEQ ID NO: 803 - DNA, 625 bp, Arabidopsis thaliana landsberg
  unsure (1)..(625): unsure at all n locations
acataccatgaaagaagtatgtgaaagattttttcagaagaaggttaagtgtttagttattaaggtatatgtttggtccgtgaagcatttgagtttggaaggacatggttttgatggtggtgttcctaatcatatcaatttgaatcaagatccagactagtttgggaagcatgatggtgaagagaatctaaactgcaacatcaaaggagaaaattgatagagttaagaaccaatttagaagctaaaccactttattagaattagggaaaattactagagtgacccatattttatacataatgacccaaaaggaatgctaaaaatatgagttatttgagtaataattataccaaaatatccctgtctttctttgcagaaaaaaaaatattacagacatgccattactatttaattccaacattgcaataaaactacatttattaacgaaaatgccatcgtcgcttttggtaaatctgtggctctctgtgcgacatatttgttatcgatcacagattttttggtcaaccacagattttttaccatagactngtttcgtaccacagactttactgtgttatgttacgccagattttatttcttctagattttttaccatgactgattg

SEQ ID NO: 804 - DNA, 475 bp, Arabidopsis thaliana landsberg
tgaatttgcggagagtgttaagattttaagatctgagaatctaaatcttgggaaggggatcagggtcgtgcaatctgtcaagtcttataggtccagaccgtctactcgtcatccatccaagaaagtacgcttacaaacacagctttccagagtctctcaatctcctgtcaaccctggtgtagatgcgacaaacatcacaactcccccttcaccaccattaacttcattggaaggggggggacaatgttttatctgattcagtgcatgatgatgacgaaacagtatcagaaaaaaattctgaaaagattgttgatgatcagttatggcgtgagatatccatggagacctgcaaggattcagtttgttccccacaaaagcatctggtaattgtttattaagttcattcatattgttcgtacataacattggtcatatattctcaggtggttcttttcaggatgaaactcatccatga

SEQ ID NO: 805 - DNA, 961 bp, Arabidopsis thaliana landsberg
tgttacatagttgcacaacgcgaataaggtttacaatgattaaaatcaaatactatgggtgtcaaataacaaccattgcagcgactgcctcggcctccttttgttctgagtcctttgacgttttggacgtctttctccggtggatggaaacctaagtacttttgttctacccttcttctttttccgaggcagaggtaataccttcaacactttgatgtcatccgggatatcccactgtgatctatccgggactaaataaatagtcctataatacgccaatgcccacaattccgcccaataatactttaaaaccaattcatgtaatttcatacctcgagttcttgttgtatcgctctcgaatgcaatgaaagcggctaacgcgtgaatacatggatactttcttcaaatgtgttgcatccagaattatcactttcctcatcgcttgaaagccttcaatgctagctcccaaagctatgaataggtattggaatttcccgctctcatccaacttcagatatgttactgtaccttcatttaccttcttcaacatgtacaaataacaattgatatccttgtagctatcttccgcgctaccttttaaatcacaagcggcttgccttttccctttcaatgcggtggagtatgatatcttcacacctaattttgtttgaacaagcttcatgataaccttaggagctggagtttccaacagtccaggaaaagtatcatgaagaagagctgctactaattcaggggtacctttcctcttcctcatccttgtattactcttactaatccgggtacaagtatgcatcttgttgtaccttctaatagagtaaatacttgtatcttgaatacatgaagctcatatacgccagtcataatttacttttgaacacgttaggacataccgctccttatcagactttttaataacataaccaaaactgttagcaaatgc

SEQ ID NO: 806 - DNA, 1036 bp, Arabidopsis thaliana landsberg
ataccacccatcaatattcaagaaaatgaaactaaagaatatgctaacacaagttcaggaaagtatcgtccgaatacttcctatatttccaaggtacacgttcgtaaagaaaaaattgatggaaaaatgaaagcatgttataattactgcaataaaagttttatttggaaatcgggttcaggatatgaatcatatagatatcatttggttaacaatcatcctgaaaaattaggcggagaaactcaaaaggctacatctcctagcaaaatgtgttgatgttgaccacctttcatttagctttggtgagaaactgggttttaataaattattgtcaaaaaacattaaattctcaagctaagagagttcctcgaattactcttactcgtacattaaaatcactttatcgaaatccaaaaaaagatttagaatgtttgttttccggtttacctaataatgtttcatatttggagggatcagtggcaaattcatcattatataggtattacttctcattggcttgatagtgattagattattcaaaagagaattattgcttttcgagtttttgatgaaagacatacatccaataatatttttaaattaataaaaataattttagaagaatataatttaacaaacaaaatattttctatttcttttgataatgcatccgtgaatacttcttccattgatgaattaataaataattgtaatcctattttatgaggaaaatatgttcatgttcgatgcatttgtcatgtcttaaatttatgtgttcaagatggtttatttgtttctcaaaataatcttatttctccaattaaaactactttgaattatttatggggtcatccacaattaatgaaaaaatggtttcgattttgtaaattgcataatgtatccccaaaaggttttctcgagatgttcctactcgttggaattcaacatatgatatgcttgttgattctattgatcctcgaactaaatttgatggtttatatgattatctcgtcgcatattatgatctattacattt

SEQ ID NO: 807 - DNA, 510 bp, Arabidopsis thaliana landsberg
ttttgagtatttgcaaggggaggctgagtcaggtttggagaggctccacgaatgcatagagaatgatattgaggtgtttgaatttggtgagggcccttcagaggaattcaatcatttccggacaaaattaactgatttaaccagcataacaaaaaccttcttccaaaatctggtcaaagctctggagaatggtcttgctgacgtggattcacatgctgctagcagcaaaccagcaaactgtaaaccttctagcaatacaaaagacggtgggaaaggtaaaaaggaagctctaacgatggcgggttcagcagaaacctagatggcaattgagatcagcaaattggagaaaggtttggagtttagaatacttttgagtacactcctgagagtttgaaggctattaaagtatactcctgtgaagtttcttatctgaaaaaaaagaatactaattatgtttacaacaatttcttttatttctttcaaaatttttgcattgtaacactttatttt

SEQ ID NO: 808 - DNA, 4445 bp, Arabidopsis thaliana landsberg
gatgtggtccagtgatgatcgggttctggaggtgaagacactcgacctcggggtcgagtgatgtggtcgaatgatgatcaagtgatgggggtgaggacactcgacctcgtgatcaagtgctgtggtgaaatcgagaagtcctctactcgaccacggggtcgagtggtctcttgagatcttgaagctcctaatcgacctcagggtcgagtggtttgacatgatcaaggctgcttcttcctgttagctcgtcaacagctccaaattacctgaaatcaacacaaatatgcaacatgcatgcaaacctatcctaaacatgtaaagtgatgacaaatgatgagaaatggtctaaaacagtgatgatatgatggtaaagtgatgacaaatggatgcttaaaacatgaaaaatacacacttatcagcaatcttctatcatttctatgttattgtgtttaagcatgttgtctgagaagtgattaggatatctgaggatgggatagagtagttgtggaacccctggtcgaatatgtctctatcccaagggattagccgtttagagcggttattggctttaacagtcggttcttattggctgcttagttagagatcgctaatgggaattaggtcagtgtctagctatgcttgaggatttctatcacgggagtgaattaatctgtttttgaacttgttgtctagggataacttaattgagctttgttaaccaactgaattgattagggagaccacactattcgattaccccatccttaggaatttctcatccaattgatttttctgtttacttacctccttcattcacttgctattgaattttagtattttttctgttttcaaccattatactcgatcacaccagtctactaacagtgagactgcgtgatagagtaaactggtccatttctgcattttcactctcagtcatcctattatactcgatcacagggtcccttcaggaagtcgaccctgcgatctagtatattagtcgtttctgtgactttttattgttttctgcatcaacactaggactgttagaaaaccaaccaaattctgctttggcttgacttagcaacttctgatcatatctcatctgtctacatcacacccatttggattgacacctaaaatactacaacgacatgatagtgttttaggattaattgactaaaatcctgttatcaatttggcgccgttgccaattgggtgttggtttgttcatttgagatttcagacttgtttagatcaagttctttttcaattttcatttcggttactaactgtgtgtttttcttgttgtcttcttgatccggtacacctctgctgtatgtaaacttgatcaacagcaaccagagcctccttttcaacgataacatcgaccgcatcgctcgcgaatcagagaaaggagaaacatagtcagccttttacccagcaaccactcgaagaggctgacaaacaaaatcaacagaatggccctgctaacattggtgctggagatgcaccacaggaccaccgtcagaggaaaggaattgcgcctcctactatccagaacaacaacttcgagattaagagtggtctcatctcgatggtttgccaatggaggatccactcgaccacttggatgaatttgataggctctgcaacctaccaaaaatcaatagtgtcagtgaagacggattcaagctccggttgtttctattctccttgggcgacaaagcacacatcagggaaaagaatctgccccatgactcaaacaccacctgggatgattgcaagaaggcttttctggcaaagttcttttccaatgccagaactgcaagactcagaaatgagatttctggtttttcacagaagactggtgaaagcttttgtgaagcatgggagcgtttcaagggttacaccaaccaatgccctcatcatggcttcactaaagcctgtctgctcagcactctttacagaggagttctaccacgcatcagaatgcttctggataccgccagcaatgggaatttccagaacaaggatgttgaagaaggatgggaattggttgagaacttagctcaatcagatggtaattacaacgaggactatgataggaccatcagaagcacagctgactctgatgacaaacacaggaaggacaggattctttcttcgccagcagaagcatgtgtacttccttgttgatgacgagcagtatcaagtccaagatgggaagggcaaccagttggaagaagtcagctacatcaacaaccagagtggctacaaagggtacaacaacttcaaaaccaacaaccccaacctctcctaccgcagtgataagtgtgtattttgcatgttttgagaatccatttgtcatcactttagcatcatatcatcactgttttataccatttcacatcatttgtcatcactttgcatgtttaggatagttttgcatgcatgttgcatatttgcgttgatttcaggtgatttggagctgttgacgagctatctggaagaagcggacctgatcatgacaaaccactcgaccaagaggtcgagtaggagcttcaagatctcaagagaccactcgacccctaggttgagcagaggacatcaccacttcacttcaccactcgaccacgaggtcgagtgccctcatctccatcaccagaccatcactcgatcacatcactcgaccatgaggtcgagtgtcttcacctccatcatcagaccaccactcgacctcatcactcaacctggaagtcgagtatcttctgacaccactcgatcatataactcgacccccaggccgagtgacttcatcccattgccaaacctctactcgagctcatcactctacctggatgtcgagtatcaccatcaccaccacttgactgcatactcgatgaaaagcttcagagccttcttcattccgcacttaaccagacactcgagcacaaggaagaaaagaagactccagctattcacttgacctctcactcgaccacgtgggtcgagtacagttcttaacccgtcccaatacttcgtcgttttgagtattatggtttcgggatatttggctataagtagcatgtacttcacattttcgcagacaagaagtttttatctagttttatttccgcagaacttgtgttctagactttttgtaatccggatttctctttaccccatccttattgagcatgtcaatcacctgtaaactgaggaaacgaaactactcaattaccccatccttaggaattctttatctgattgattttattgtttactctactgctgtgtactgcatcctgtcatctgttgcttagtttctgcaattctttactgttactcgacctcatactcgacctcatactagaccacccagttgtctggcaatagactatgcagtcgagtatcgctgttacattatccgactgttactcgacctgtcactcgaccacacccagcgctctgcaaagagctgtgttggtcgagtgtttatttgtttctgcttgatttgctgttttctgcatgttcacttaggactgttagaacgcaccaaaacctgttattgcttggcgtgacctactgactcctgatcacatcttgattcttagcatcacactcatttggattgacaacctaaactactacaacgacatgattggtgttttaggataattgactaaaaacttattatcaatttggcgctgttgccaattgggtgtttgtttgttacatttgagatttcagacttgcttagatcaagttctttttcaattttctttttagttactaactgtgtgtttttcttgttgacttcttgatccaggtacacctctactgtatgcgaactcgatcaacaggcaaccagaacctccttttcaacgacaatatcaaccacacagcccgcgaaatcagaaaaaggagaaccacagtcaaccctgtacctcagcaaccactcgttatggctgaagaacagaatcagcaaaatggccatgccaacattggtgctggagatgcaccacgtgatcaccgtcagaggaagggaatttcacctcctgctatccagaacaacaacttcgagattaagagtggtcttatctcgatgattcaggggaacaaattccatggtctgccaatggaggatccagtcgaccaccttgatgaattcgataggctctgcaacctaacgaagaatcaatggtgtcagtgaagacggattcaagctccgtttgttcccattctccttgggcgacaaagcacatatctgggagaagaatctgccccatgactcaatcaccacctgggatgattgcaagaaagcttttctatcaaagttcttctccaatgccagaactgcaagactcagaaatgagatttctggtttctcacagaaaattgggtaaaggcttctggtaaacatgggagcgtttcaagggtac

SEQ ID NO: 809 - DNA, 3402 bp, Arabidopsis thaliana landsberg
agagagtggtaaaaagggataagaagtcccgaatgtatatgctcgtttccccgatctaacaccttttcatgagaaagaattaagttcaggttaatcgtccaatatagggtagagttgacgttggatccaacagaaatttccgcagggttaagcttcagggggacggtccgggcgtagtgttcaaggttgcccgttcctagtaaccttgtaagtgttcctcaagaaacactcagcacataatggtcaataatcatcatataacaagatcacggttccctactggttttaactcaataaaacattactcgataataaagaaaaacgttttgctttgttagaatatatcggtgtaaaaagtgaaaaaaggtttcaagtcaacaaagtagagagtagcattagtagtaacagattcattaaccccccagacttacttcaccccgtcccctgtgtcagaataagcatagggatgaatccgtgaaaaagataggttaagaacaatgtaacattgtttgtggtgactaaccggattatttctctccttgcttaacttggccttactcggcttagtatggtcaaattccatgatattaatctctattcgcatcttccttgaaacaaaaacctaaaaccaccaataggttttaacaaaacaaaaaaataaaaacataactaagatagattgatcttgttgttgtcaatacgacaacaaataagatcaaatttgtggtgacagatggtgtgaatggatgtttgggcagttgcgttgcttggccgaaagggtggagtgggtgggaattagacagtcgggtgttggatggtgtcgccggtctatcgcgggttaaacgaatccatttgcaaactgatctactgtggtggtgcaacttcccttatccattaacgtgttggccgtcgttggccattgttggccgtcgttggccgtcattggccgcgtcttggcaagctgagtttgtgttcgaccggaccggtgggcaagatgttgcccgggccgccagatgccgccagatggggcagatccggcgagggtgtggcacagtcaggcggactcagccaaattttggtgcacattggctggctccggccaaggtttggcatggctgggcggactatggccaaaggtcggtgcacatcggcgggcttcgaccgagatttggtacggccaggccgacttctccaggcagcgtcggttactcaatgagtagctgggccggttatcacggcgcctagtgatgggtccaggtgactgtaacacccctatccagtcctaggcccatgacggatcaggagcgtcacatggacgcccgtagtcagccaacctaggctcgcggaacgaatcagtttgcccaggttgtccgaccgcgagtgcctttcctcacaaacgcggcctaaagctttgcaacccgtactgcgatacgtgagttgtgatagtccggacagaactaattataccttgggagacacggggttttataaaatcagagctttattactattaataaaaatatcgagtcttacatactatacgcaaaactatatcttgcaaaggcaaaacaaatctacaccggttggcctcaagtccttcgccccctaaggtctccctactaaaggttgcctgcaaaagagagtaagggatgagcgctaatcgctcagtgaattcgggttcccctaaacatgcaataattccccacccaaacccaaaataacaagcaacaagcaaccaagcaatgcaacaatcaaagttgtatatactccacggagtatacacaaataatgcgcaacgaaagtaaatatgcatgcaactaactacttaaccactaaacctagggccccgcgtattgatcttcccttcccttagtcgtgaacacctatacacgtagccacaaaggctaaacgagtatagaacatcactaagttccgagtcccatattgtggtggaaactcaggctacatcgtcatgcagcagcactcggccataggttgcgagcccgtcatctccgagtcttcgtaccattcatgtgtagggaactagccactatgcacacactactaggatacggccttagggaagcatcacatacgcaaactagactaacatgcatgaaactaattcatgcaacaatcaatcatgcacaagcaaatataaaccatggggacttaacctcacatagtttatccacgatcaaccataataaatcaagcaatcatacaagcaagatctaacaataacccgattatatgacttaacgtataaccgaggatccaagcaatcaatgcataattagcacctaatccattctagttatcaaacaattaaacaaacaagttggtttacatgcgttcctcgaacaacatgcaaccacatgcaacacacataacctgaactcaccttggcttagctctcaggaaaacgactactctcgactccctatacggactacgatccgaccaagctttctccgacggaatggatctaagcattggaccgaaccaacctcttaagaaatattctaaaactaagagctaaactacctaatcatgattagtctctctaatcatggtttacctaaccctaattatacttaggaaatactaatcctaattaactattactaatcctacttaaccaatactaatcctacttaacctcctaattaattacttatatagtaattaactaaacctagttcctaatcataggaaacttaccttggctaagcgactaaggactatcggacgcctagactctcaactactcgctcaacgactcactcgggaactctctcggacaactctcgggttttagagcggtttggtgatttttgggtgtgaaggaacaaatgaaacgaaatggggtatttataggatgggtaggtcggtttggaagctagaggtggcgagataggcatgatcgttcttatccggaacgttatccaaacgcacggatagacacgatcggtcttatcctcatgcagataggatcagacgtacttatctgttagcaacagataggcttgaatgattttatcctaatggatatgcatgaacgtgcttatccataacggataggcttaaacgtccttatccactcgttcgttcacgggtaacgtccgtactgacccgtgaactgccgttaactgctccgtcggtcgtctactgtactttcgtaccaaaactgattttctccgtccatctttaattttccttgatcacaactttggtatttgtcctagaatactttggatcagctccaaaattatttctcatcgctcctgatcaagttttcctcgatagccattcctcggccaagccgtcgtcttgaacaggggcaaaacattcttccctcaaaagaattcgtcctcgaattctaaggattaagagacaact

SEQ ID NO: 810 - DNA, 754 bp, Arabidopsis thaliana landsberg
acttgcaccagcttggagaattaccacatcaatctctatgtaagctctcaaagaagtatggtcctgtaatgttactgaaacttggaagagttccaacagttatagtttctactcctgaaacagcaaaacaagttcttaaagactatgacctccactgttgtagccgtccaagcttggaaggtacaagaaagctttcttacaactatctagacattgctttctctagatttgatgattattggaaagaattaaggaagctttgtgttgaagaactcttttgtaataaacgaattaactcgattcaaccaatcaaggaggcggagatggagaaactgattgactcaattgctgaatctgcttctcagaaaactctggttaacttgagtgatacgtttctttctttaaacgttaacgtaatttgcaaggcagtatttggtgtgaatttccaaggaactgtgcttaacaatgataagttccaagatttagtccacgaggcacttgagatgttggggagcttctctgcttcggatttcttcccgtatgtcggttggattgtcgattggttcacgggtttacacgctcggagggagagaagcgtacgagatcttgatgctttctatgaacaaatgattgatttacatctacagaaaaacagagaagaaagtgaagatgattttgtggacttgctcttgaggtaggaaatgaaagagcctgtcttggattggcaaactacaagaaaccacattaagcatct

SEQ ID NO: 811 - DNA, 520 bp, Arabidopsis thaliana landsberg
cagaacgatgaagaacatcatagaacaaaactcaaaaaatcataaaaactagaaatcattataaacttagcaaatgatagatctcaataagataaacaagtttgcagaagaaatgaaattcagattctcaacacaacaatcaaaaaatgcaaaagaaatctaagaaccctaatatccagcagacaaagcaaagatatgaaactaagttaaatgcatatgaaaaacaagggcttaaaatggttaaaatctagtgttatcaacacccctaaacttagctttttgcttgtcctcaagcaacaaatagaactaggctaggagtgaggtttgaaggtggggattcagagccaaaatatgcatgtaaaataaatggtttcaatgtccatgttgctagttctagagtgttaagttgaatgatctctacttgaaaactttagccatcttcttcacaacacaacctaacctttaacttagtctattcaagctttcaaatcagcatattccctttacattcattaagcaa

SEQ ID NO: 812 - DNA, 748 bp, Arabidopsis thaliana landsberg
ttttatttatatgcgacagtaaaacatctggtgtagaatgtaacagagtgtaatgttaaagaaataacacaaaacacaaagagactgatctgaaagaatgtgtgagtattatccatgacttgtatctaagcagaaaaatgaggacctttacaaagacataagagagaaatgtaagcagaacaaggtacactaactatgtatgtaggttcccatgtttctcttgctctctctgtttggttaaaaacagttcaagtgtgtggctagaaatgcagagaagctaactttagtcatcggcaaagattatctaaaaaaacatcttaacataaaacatatgaatagccatcagattgtttgctgttacttagaccgaaaaagatgcatttgatactaattagccgttacaacaaaatccaaaagaagataaaccaaaaagtcataaaggttccaacacaaaaccaaaaagataaacataggcaaatgcatctctaaatagatatagactaaacatatttagccatcaaagagctcacctcatgcaaaacgtcaatcttctgcaaaacgtcaccacttttctttttcacaatatacttactcttcaaagacggattttgttaacgaaatgattcacacgagatcgtgtttcttcaagggtgtgaatcatttagttaacaaaatccgttccttggaaagtaagaatagatgatgatgattgatgaattgaggaaaataagagacgtgatgatgatta

SEQ ID NO: 813 - DNA, 641 bp, Arabidopsis thaliana landsberg
caaacccaaaaatatgatgctgtttcgtttgtgtgttagattcgcaccacaatcttgttctttctcttagaatgtatgaacctttagtgataactctaggaatgagccaatgttgtatcacatgttggaatcaatcttgaacttaaagctcattgattcttgagagtgttttggctaatgatgttcttttcttccttttgattctttgagcaggcgaaaaagtgaggaagttgaatgaggagcggttttcaccaaagttcaaacaccttaaaatcttgaactaatgttatgattgtataatatataatttaccttcttccaataggaaccaaagttcaactagttgaataatctaataatgttgatgatacaagatatacttatatatcttattttccatattggattttttattataagcttccttattctttttcagtttttgtaagtttgctccttgttttcttcttaggtgtcatggtgttatggaatttctatacaaatctcttatcctcataagaaatttgttttccatttaatgttagatcttactttttaatgtgtcctactaagttgacttcacaagtcaataagagtctttcactctggcataaagaattaaatatgaagaaattgatcaa

SEQ ID NO: 814 - DNA, 1285 bp, Arabidopsis thaliana landsberg
aatatatcaattatcaaagatatcaatttgtaaagatatgtttcttctaaattaaaaaatgtttatcaatctgggaataagtattaacaattagcaaattagagtattaaaagaaacccattttgacactagtataaataattttacacaaccaacaaaaatggccctatctgccacctcattatctcctggtgttttcatgaacgtcttcgtttcactctgtcagattagcaaaagaaaattctaaatcgttgcatatacacttccatcagcaaaaaagctttagagactcccaagtgttttacttacacgttttgatttcactcttactcagattaacaaaagaaaattctaaatcgatgcacatacacgtgcatcagcaaaaaagctttagagactcccaagtgttttacttaaacgtcttgatttcactcttactcggattaccaaaagaaaattctaaatcgttgcacatacacatcatgacacgtccatcacccaatcagcaaaaaagctttagagactaccaagtgtttttgtttaatgtcttcatttcactctaactcggattagtaaaagtatttctaaattgatcccacatacacatgactcctccttactcaatgagcactagaaaaggacaaccaaagcaagctaaaaccaaaaaattagttggatttgaattcttaaacgtgtgtgctactagaaaccacttcttgtatattctttgtatagtaaaaataattctaaatcgttccacatacacaagactcctccttactcaatcaacaaaaagctagagcgaatgtgatggtgacagaaaactgcaaaagctctatccaaaaatggataaatcaagctcttaagcgtgtggggttggatgaagaagatgttgacgtaaaggaaaaagcagagcagagaagtcatctctcggctataaaaacagagagggggtcacagcataaatcactacacaagaacaaacagagcaagagaatcaaatagcaaaaactttgtattcttcaagagaccaagctttttttttcatcaatgtggttattggccatctctcttgtgggtcttcttgttgttgtggtctgtgtcttcctgaggttttcgaaagacaaaggtttggatggtattgtaaatgagaagaagagagataaaaattcagctcctcgtgtctcagcatcaggagaggatggtactaaaaatgagcaggtagagaaagagtcagatcctagtggaggattaggagaggaaaacgagaaaacaattcagagtc

SEQ ID NO: 815 - DNA, 582 bp, Arabidopsis thaliana landsberg
tgggtaatcggtcttgattggcagaaaatgagaaattttcgtaagccgatcaacaataacccagatagagtcataccctgttgtagtcctgggtaatcccatgataaagtccatacaatatcttcccatttccacgtgtgcaacttgctttttctgatgacactgtactatctgagtctgttgggtggcaattatgcaactttacccaaatagaatcagatgcaccatcttgggtaaaacacacaagaagaggtttaccaacaagtggttacagtaagttcatagcacacgagacgagtgtgaatgtcgagtaacatcacggtcaactcgtgttagccagggaatccaaattcacgaaaggtgatattgattcaagaaaaatcaccagtggagggatctaaaaatgcggactttgcaactagtccattttatcgggcactagacatggctcgacccaatcacttatgccggaaaagcatacatgaggcaatcgaggcacgactagagcgatggttaggtggttattgaccgacttaatctcgattcttgaaaattcttccttaagaggggttgtcaaaagtg

SEQ ID NO: 816 - DNA, 4652 bp, Arabidopsis thaliana landsberg
gagtggattcttcagtaatacgaaacctcgaagtctagacatttcccagtatgtcagggataaatagtatatatccttacgggtttaaattgttcggaagctaaaagccctcaatcctgtcagtcgaagcggagctacatgcatcgcctagcgcagctctagcagcagaatatgccacaaactcatagctagtaactaaagatttcaccctaccaggaaggggacgaaacaggtggtgcatgagttgtgttgtatatataagccttctctttgatctgattggtgggccatcctcaagtaaagtcgcaaattccacctgtgagaacataaagccatcagcgtattcaacaacattgtacaaagagaccctgcaagaaaatgtgtaatgaggaaactcactttttcagcaaatcgattagttgctctggcccaatcaacctcggcctcactgtaaagaatacagaaaggttaaaatagtaatggatatgaaatcttttctaacaatagaactcataagccacacacccgagagtcttaagcctctggggacgttgcataacttctttactccaagataaaagttctgatgtgacgtttttgcgcttctttggtttataaacctttagaagttggtcagtagcaccacaaggcaatgaggcagatgagagagtctccactcctggtgtggagcctgatatttgctgcatatgaacaatgtaaccaggatccgcagtatttaattgctttgacgattgaacagaatgtaaaccatcatcagaattcccaaggttagaatatcgttctcctatcttcaagagagtgaatctccctgtatcattcacgggttgcaccagtccgttcttaaaagcctcatattgactaaacctggatggagctatttgaggactgatttgttgatgatctggtccagccgagactgcatgattcttgttgaagaaactctgagaaatagttgggccaaactgcagcatgcaattcgctgaatctttgtgattcaatccatccctaattaaaccatcagatcttgaaggtgattgtgtttctttcccaccaggtaacacagacaaatcacgggtatttaccatttcatttgatccagcattattactcgaatatgactcaagaatctgactgccgtctctagaattcagatgagggatagccttctccaaagagttattatccaaatgcctagaatcgtttcctgcaccagcaatgccaaatccatagcttgtgctttgcattgaaggattttgttccttcagagcagctacatttggattggaagcagccttccaaataccaaatctatcttcaatgccctcattctgtcgaatagaacacaaattattctgttcatcaatacttgaagaatgaattatattaccagccatttgactaagttgagccataggcttctcaaacaggccatgatctgaaactttatttaccttgtcaggcaaatgttgaacagctgccccagtggaatcactgtggaatctctcacttagtggatttgaagcctttgcacccaaatcctgggctctactatcagtgtgcgaattcgcatgtgggacagtattgctgttaacccatccatgtacaccggcgtcatcgctggttgtttctgctacagcagattgcataagggcactccaactcccactttgcaaagaggggcatgcatcgaataggtcagaattactggacataagatttccttgcaagctcatatcagtgctgcttccaaatgcatcccacaaattgtcatcagaaccaaacaaaatcttttcttcagtaggatctaatgctgacgacttctgcaatgcattcatattttcaggcactttcataaatgatttttctgctggaccagaatcctccatctgacaaaatttatcctgcgctgaaatgttcctctcacgggaattatcttgctggaaattttcaaaattgggcctattatttgaatctggcactgatgtctgggagaacaacgctttctcctggtatgtggatcgagggtgcatttgactatcctgaacatcaccttggttaagaaatgaagttggctgattggtcagagagtaactcctgtttgcagaaccatgcggtgcagctaatctgttcatctgaacggaagaaaaagcattttgaggtgcatttgtcccactaacaggcataccgtacaaggaaggtccaaactgttgagccattaagttcgactgcccatgctcaggggtaatcatgagcccactggatgaaccttgaacagctggtgagatgccgcgatgcatccagtttgtatttcctgtcatgagatctggctgaaaccagttactagacgcattctgaagagggatgccattaatcatacgtgattgggtatcacttgcgcaacttccattgactgcatttctattcaaagaattgagctgcctggcctctagctgttgcttttgaagttgttgttgcatttgatattcatgcatttgcttaaccataacttgctgcttcagtagttgcatatcattgaatgtcatctgctgccttggcaaaggctggagcatgccagagagctgtgtgtttgattgttgttgaccaccaaagaaatcataattaaccggagattctcccatatcaagcctcataggaacattatgaagttctggagtaaatccccttgctgataacctatccctactagaatctacattcactcccacacaactttcctcatttggagatgcctgcatcataaggattccatgcatgtaaccagttgcggatggctggagtactcgcaatacactgctggagaactcggaccttataggctgctgagtatagtttaaaccatgctgtgaatttgaagcttgatgacctctctcatgatcaactgacataagaaaaaaaaaaaagctccatttagaaaactagcaatatatgtagctattaatgattgcaagttgtggaattcagtgtcaaaaggagacaaaatcagtaccagattgttgtgtgttataactcttcagattggcaatgagggatgggtcaatctgcctctggttaccgactagaccattattaaaactggaccagcttctgtcaacaacctgagactgatgttgctggtcttgggataggccttcttgtccaaaaaaattgtggatcttctccccaaattcgtttccaggcatagaaaaagaaactctaaattatttgtaattatctgagcctttgaaaaaaacacagaaacaagttcaacattgtgcgttcgttgatctaaattccgaatgtgtaagaaaaaagggaacatataaacacctctttccccagaattcatgagctacctccaattggcatgctttgaatactcataggttctcctgctaaacaaacaaaacagatactgcaaaatttagagttgaacacaacaagtgaaacaaaaacactagacagaagaaagccaatacaagtgttgtttctgcaaagaggaaacaaaaaccacagggcagcaaagtgagacactagagaattgatgcagagcccacatggtacaaggaaacagaataagcattgtttccttagattggaacttagggtacactgacgcctaagttccagtcaacatcagaaactcttaacacctaatcaagtaaacttggagagctcatttcagtaaacagcatcaacttcattaaacaaaaaccagctgaaaatttccgatttcacagctataaacactcttatggcagctgaaaattaagctaatttcgaaaaaaatacagaatttgattggaaaactcgagaacacacttgagatcaaaattgccgcaaacacaatctcactgcaaatcgaagctatggttaataataacatgaacattacagtaaccgagaattcaacctcaaacaataacactacctatcgacacggtacaataattgggtaaaaaaaaaaatcatttctttttaggatatatagcaagaattagggtttccacagagggaaacagagatgtgaacttacacacttgtgtcacgtttagctttacaacaaatggaaacctgaagatgaaaaaaagctttcctttgcttgctcaatttctaggaacaagttgtttagggttttcgaattcaagaattaacgaaaccaggagaagaagagaaagagagagagaagggagagagataaagtgatcgatatcagtgcggaaatttttcaacggcgagcggaggagccaaacagaggttcgggtccggaggcaaatacgaggttcgggtccacagcagatggctcgtagatccaaaactctctagtagagacggaggatttagatgagagttgttgttgtagtgtgggccagtgataagacaattataactaaacaaatacgacgccgtatcgatacgtttcaccatacgattaaattgcaataattcatgaatcattgttatttagatagtcagattaagatatggattcacattttttcaacgaattcatgttttgcatttcaatattatcttctttacataaactagggttgggcatatgcataatataatgcattacaaaagtcagatacgctttgttacctgaaagtaggatacagaggtgatgatgt

SEQ ID NO: 817 - DNA, 1024 bp, Arabidopsis thaliana landsberg
cctgtgtgaagagacttgtgacagcgttgttgataagaactagtgcttcggttggagtctttgtcatgaaattgctattacttgcaccataaaaaaccacatataatgtttatcgattccacggaagaatatgttgatgagctagctttcctggaaaccatgttgtgggcaatccctctgataggatttgaatctgatccaagctgccttcaaaccttcggttggagcttgagaaaccgaagagatcttctcctgcagtaattctgtcactgaatcatcaaggaagtggatcatgaatgcgttcttcgtatcagtccaattggtcaataaacctgcttctagttgtcgcaaccatgattttcctttgcccgcaaaagagtgtgggaagagtttgcaaagaagataatcagctggtacaccatgtgctttgattgaggacactaagtcttcgaagacctctagatgatctagtggtgattcatcataatagcaaagtcttctcttgcaaaaggaggtagctggatcgctgatcgattggagtagaaaagatcagctatgttgaattcgcctatggtagttggtttattctacagatggtgtcaatcgacaccctggtggtgtcgttcgacactgtcgaaatctgccggcagtttgctgcgttccatcttgtaattcccctatcacaggaaaaagaagaaagtaaacgcgtgagaaacaaaagaaagaaaaattaaaacttagtctaaaaattctacacctagtctaatggtgaatcacatagaacttcggcaacggcgccaaatttgatataggtcaaattaatcctatgaccactctctcaaataaagaggtcagttgcagcatttagggatcgaattcacaagttctcggatcacacaataaactaatggctaatcgaattaagctaagtgaaacagtcaagaaaataaagagaaacaaaacgtgagcaatagcagattgttagttgtgaaaacaaaataataaaagcgtcatgcttagggta

SEQ ID NO: 818 - DNA, 696 bp, Arabidopsis thaliana landsberg
gcgagtatggctatcagaggaagactatcaatgcgcacatggaattgtgattattttcaagtaattgagaggtatataacaaaagtcatactcccattttaagttaattataaatgtttgtttactaacccttatatgttgtttttgtctttatagtatgttcgaagattttctttctattaaatatccaggattgaacaaaaaagaactcttcgtgaaaagaaatgaggcatatcatgtgtgggtgacagattatgtatgtctaaatagtttatctatatatgatttgcaaagggaaacatattaggagaatatgaaaataaagacccgagtttattgcaaacagaaaatgatgatgctgttttaataacaacaatagaagatcttgtactcaacaatttgacaatcaatcgcaaccccataaacctcgatttagatgccggagatgccgatccggaagatgaatttcgatgtaatttatcatcttctgatgatgaagaacaagaaggcgaagaacagtattagttttgtgtttatgatatgtacttaagttatttctattaattttgatatgtacttaagttattttcaaaagttatgcaaacaattttaaattattttgaaaaactatattgactaagtatgttatgtttaattatatttatatatataattactatttttgaatatctaaga

SEQ ID NO: 819 - DNA, 633 bp, Arabidopsis thaliana landsberg
agaaggaaaatgagtgtgttggctgttcacagtagcgtcttgctcaattgctcttctacgaactgcatgatagccagattagacagagtacctaccatcttttgaataaatccaagatatactatcactgacctccactaaagatggtctaataacctttattagatttctgacttccaaagctatgaccttatctatcaactcctcattccaccgagtggtacatggtattaaaagatccttaaccagttttagcgaggcacgaacattttcctggcatttacgggcacgcagtgggtgcgatggaagccatttatcttgccatatatttattctgtgcccattaccaactacccattttagtccatcagctagaagtgtattaccttgcattatgcttctccaagcatggctagattgccacttgacaccagcttacaacaaacttgagtggggataatatttagctttgtaaagccttgctagtagtgagtgaggttgttggagaagcctccagctttgtttggcaatcatagcaaggataaagtcctttaagtctgtgacgccaagtccacccatcttctatgtgtcattgaatctgctccaagctacccaggaaattttattatgatg

SEQ ID NO: 820 - DNA, 670 bp, Arabidopsis thaliana landsberg
tttgcatatatgttacttgcgcacctttatggaagtaagagttatttctgtcaccaactttcatccagtgaagttttgtatttttgtttcatgtagccttcttccagatctgctcaatgctgccaagcggtataggcctgcaactcttctgcgataatttgctgcgtcgggttaactagtgtgttactttgcttttcacagagcaattcatgagcctcacgagtgcgctttggcaagtcccctaatttctctttccccataattctcaagctcggctttaaggtctttagcttctttaagaatctatgcaaagctgaagtagaaataaacaaaggagcagaagcattctagtggctctctaccgcaggcaaaaactgaggtaatgtcgtgaggacattaacaaatttaaacggcttgcgaccccctatcgcttcagcctcaagcattatccttccccttgtatgatcaaaacaacctccagactcaaaaacactataagagtgcgggaaagtagtacaccatgaatcattaacaagaactcgatcaagttttttgcatatcaaaccatcctcccgcttgttacaccaggtaaagcgaggaccatggtatccatcgagaatctcgttaaaatcaccacaaagcatccacggtttgttgcgaaacatgggtg

SEQ ID NO: 821 - DNA, 702 bp, Arabidopsis thaliana landsberg
cttagttatggactttgatggcaagtttgatgctatctacacatatcttaatgggaagatccaaaatctgagatttctcatgaataagctagatgttcaaatacctcaaactgcataatccattaagagacaagaagctccacgatcttggtagctttgttcttgactactccatatctactagcagattcagccactccttgtgcgatctgggatcaagcattaacctcatgcccaagtttgttgttgagagactaggcatgaccatctacaagcatacaaggattactctcctcttttcagatcgttccaaacaaatccatgaaggtatcctcgaggatgtccctgtgaaagttggtaactgcctcatccttgttgtttcgtggtcttggcatatgatgaagaacttaaggatcctctcatccttggtagagctttcctagctacagctggtgctaggattgaggtgaagaagggtaggatatctctccacatatgtgataaggagatggagttgggtatggatggttcaaaattcacatcgcctattagtggcattggcaccaacaaggacaagtcttctctggctgctcagacttcacttttagagccaacaacagagaccccttacagtttagccccgcattattgagaattttgtaggagaaacccaggtggtcaaaatttggacaccccaccacc

SEQ ID NO: 822 - DNA, 1413 bp, Arabidopsis thaliana landsberg
tggacgagcagcaagtctgaacttgctttcactggcaagacccgtgagcgaggtacattaacaccgatagcgttgtcaaagaactgttttgagacagaatcacacgaaaaaggagttaagaaaagattagagtttgcattctatatttcaaaacgtgccactaggacaggcatgtatacccttatcgcagcaccggctgcagtttccagttgaagaactttgactccatcaacttcctgaatagaatttgcagtttttctttggttagataataatgaatgaaaaaattgcagaaataaaaaactgtgcattagccacgcaggcacctttgggtttggaatgatctccattttaagtgcatcagcttccacaagctttttgatggccttcaagttaacccatctgtaaacttacacagttagtgtgtatcaaataagtttattttgttttactatcattagggacgtgatctacttacaggttgtttgtgttgaatatcttgaacttctcaattgatttgaactcattgacctaccacaaggatcaaaacacgaatgcaacaactcttttaagcagatgatacaagttgaagcaaacagaaagacgacacaaacaaaagtctacagttcacattctattgttctttaacaaatttggcatttactatactcccatcataaagaagggctttgcaaagcatccatgaaatgattttctaaactaagctcgtttataccaactttcgccgaatctctaatgaatatgctacaacagtttcaaacaatctctaaagacattgaaacccaaggaagtatagacttacatgttcatcaggaacctgagcaatctccagaagctggactttgccttcataagaaatgagagttcccccctttacatcagctaaggttttgggtgtaacctccatgcagtattcgttcttgttctggatcaaatgcttcaggattgctacagcaatttgacgaaagacgaggtaagcaagagagttagtatgggaatttcatgtaaaaatatctgattaaccatataaaactatgtgtaaacaagaacgagaaaaaatgcaaagaagacatacttaagtcaacgatggcacccaagttgtctgaattggcaacaaacacatattccttaccctgagagacacagaaaacagaattttcaataaacatggacatccattttgtgtggtggtaaagtcggtagttgaatacacgagagaaacaacctgtgataagaaagtatcgagcttgccgatgttcatgagggcgtggtaatacatcaccatgaccggtaggataccttcacaaagacaatttattagaaggctgatctgataaacaacataagctattgtttagacgctgaagtaatgtcaggatcactcgcaaaccc

SEQ ID NO: 823 - DNA, 638 bp, Arabidopsis thaliana landsberg
atatagctcttggatccatcaactgccgaacaaaaactaaaacattataaccaaaacaagttttcaataaaatataataaaaagtcaaaatttcttacttatgcctgataattcaggttgtgcattcacaatgttgccacttttcataagctcgtatctaaagatcggtataccaaaatatgttatctcaacaattattatacaactttctctctttcctcaacttctctcgcgaccatgagagcacaaaatatcacatttataggtaagaagtattaaaatacattaaaatactttcttagatttgaatactaaatttaataaggttaccaaaaattaataaaagtaatttagagaaatgtcattaatattttgacgacatataagaaaatcattaacttaccaaaatcaacatatgctttattcatatataagttgagtaatataatacagttttaatacttacaccgtgatcagacctttcatatgggatctatggtacatctcatgttagatttttcttttcgcttcctctataagtttataaggattccttataaaaccgggttctataagaatatattgtcgatatttggagaaaatttccaagggcattgttccccttttccattttaatt

SEQ ID NO: 824 - DNA, 576 bp, Arabidopsis thaliana landsberg
gaattagtagtttatcgagaatttgttgtggtcactctcactgaccacgaaatttttgagtaatatgttgtagtaatgttgaatttatatctaacgggaaaaaaagattcgagcaatttctgataagttttaaaataaaaatgataagtcgcaatgcacttcacagaaaggaagtttgtttggaaaaactaaagagctccttaagctgagagacttgtaccaccaacagagtttttatccatcttaatcttcttagttggaggttcggattcttcttctccttcttcttccgaaatgtttgatgactccgcaacttcagcctcttcctcactcttcttaaaattctctattatctccatcatctctctgttcacctgttttattggacatttgtgattagccaaagttaatcacaacaaaactgggaagaactagaatgtaagaagaagagttggtttctgttttttacctgcgggttttggagaaactcggagagatcggttgtgcagcaagggcaggtcatgatgtttttctttgcacgtagtttacgcacgccattgcttctgtctctcagtg

SEQ ID NO: 825 - DNA, 592 bp, Arabidopsis thaliana landsberg
  unsure (1)..(592): unsure at all n locations
ggttcggcgcctcgacgctcgcggcgactcgcagcttgtcatttaccaagtcatgaagaactcccactgccacgaccagaagatggcggcctactgcgacgaagttcgacgccttccgacaaggtttctactggccgaccgtggtggttgacaccactaggattgtacgctcttgccaagggtgtcaattctacgcaagacagacgcacctgcccgctcaggccctgcaaacaatacccatcacttggtcgtttgctgtgtggggtctggacctcgtcggtcccttgcagaaggcacccgagggcttctcgcaccagctggttgccatcgacaaattctccaagtggatcgaggtccgacccctaaccagcatcagnnnnnnnnnnnnnnnnnnnnnnnnnnnnnnnnnnnnnnnnnnnnnnnnnnnnnnnnntccatcatcaccgacaacggcacgcagttcactgggaagaagtcctggattctgcgaggacaccacatccgtgtggactgggccgccgtagctcacccatgaggaatgggcaggatgagcgtgcaacagtatgantctgcgaggacttaaccaaggagg

SEQ ID NO: 826 - DNA, 615 bp, Arabidopsis thaliana landsberg
attcagtgtctatcatcagttctgagacaatatttttcttactctcgttcatgtttctctctagtttctggttctgtgattagacaaacacctgaaacacacaagaaaaagaaaagagaaagactaagtaaataaatagaaaaagaaaaatagaagcttagacaaaatttaatggtgaatcgtagagaacttcggcaacggcgccaaatttgatatggttcaaattgccataagaccactctctcaaataagagatcgattgtagcacttaatggttgaattccacaaagctctcagatcacaaaatagaccaaggttttgaattaagctaagtaaaatagtagtgaaaataaaaagaaatagaagaaagcaatagcagattgtgaggttgtaagacaagaaagtaaaaacggctatatatcatgagaaagagtaagaaagatcttctctaaagggagtctccaaagggttttgcttccaagaacaaaagagataaggggaatagcctctccaagcttaggtctaaacaatgacctttaaatctatatatatgacctaaaaacgtgatgggcattctttaaaaataagggaaagttctggacctaatttgaaaat

SEQ ID NO: 827 - DNA, 6424 bp, Arabidopsis thaliana landsberg
ggggggggcaatcatttgtgctcttgtgaccaattttgcagattggtgaccttaaggggtttttcggattgctaatggtcaatatccaacagctgcgaacgaagctcaaaatattggacaacacttatggaaatggaactgggtaactacttcatctacttttctattcttcctctgctctactagctagtatcgtaaaatcgcactctctttttccatgcaccagccaatacagcactcgtatatcaccatggaaaacttctagcattacaggaggcagataagccgtgtaagcctatatgacctcttcgtttttctttttggctacattggtccaatgtgagtaagtatgtgaaccggatctatctagaaaccgaatcttctgttatgttggcagtgtttctcttcacccatttccttgtttgaaattttgatatataagatatgcatggtatgaagatttatgtttcgtttcgtaaaagtcaaagcctctctctctctcttggtctgtagacgtcatcaaagttttggaagatggagacctgcaaactcttggtataatagattatgacaagagattgacccactccttcactgctcacccaaaagttgacccggttacgggtaagacttcacttttccctggaagaacaagttactatctctgttgacatgattaaccgtcatgggctctctgtgtaggtgaaatgtttacattcggctattcgcatacgccaccttatctcacatacagagttatctcgaaagatggcattatgcatgacccagtcccaattactatatcagagcctatcatgatgcatgattttgctattactgagacttatgcaatcttcatggatcttcctatgcacttcaggccaaaggtatgttactcatcaagtttaatggttactcaagcgtttattgcctcccatatgcttttctttaaatagtgtaagagtgtaaggaaattaaggttgcctgttttgaatttcctttgattcccaggaaatggtgaaagagaagaaaatgatatactcatttgatcccacaaaaaaggctcgttttggtgttcttccgcgctatgccaaggatgaacttatgattagatggtttgagcttcccaactgctttattttccacaacggtgtgtgctttttaatgtctgtttaagttttcatatcatcaaattttatattctatatataccaatcaaacatctgtgaatgacttcgtatattcagccaatgcttgggaagaagaggatgaagtcgtcctcatcacttgtcgtcttgagaatccagatcttgacatggtcagtgggaaagtgaaagaaaaactcgaaaattttggcaacgaactgtaagaatccctgacgtgttacatctgtcctgctctctcataaccgtaaaccctcctcaactattacctgtgcaggtacgaaatgagattcaacatgaaaacgggctcagcttctcaaaaaaaactatccgcatctgcggttgatttccccagaatcaatgagtgctacaccggaaagtatgagttcacccgtgtcctttgtgttgatatgcactgtgttcccagcaaggaaacctcatcatgcccaacgtttttttttgttgttgtttggtgcgtttaggaaacagagatacgtatatggaacaattctggacagtatcgcaaaggttaccggaatcatcaagtttgatctgcatgcagaagctgagacagggaaaagaatgctggaagtaggaggtaatatcaaaggaatatatgacctgggagaaggcagatatggttcagaggctatctatgttccgcgtgagacagcagaagaagacgacggttacttgatattctttgttcatgatgaaaacacagggtagttatagctctcctgctagttccttatcagtcatgacttgtagcttttgtttccttctggtaaaataacatgatggttggaaatggacaggaaatcatgcgtgactgtgatagacgcaaaaacaatgtcggctgaaccggtggcagtggtggagctgccgcacagggtcccatatggcttccatgccttgtttgttacagaggtaccaaactctaccacccatatatttctttattacgagcgatgcatctctaaccaccagtgggtctggtattcacaggaacaactccaggagcaaactcttatataagccaagctgtgtgcatatacacataatacttctgagtcagagatgtgaaactcggtgatactgaaggctcaaattttctttcttacatgataaatattgcaaagttggaaccggaagtcgacaaaaaaaaaagttggaaccggaaacatctcaaaacagttatcgggggatctaacggctgctaatagccctcattaggacccacaaaatactgggagtagacgaagtcgcaccggccaagtctccaaagtcccaattgaaaacttacacttgaaaaaaaagtcagacatcattcgacacgtgtccccatttcattagaagtcgcgctgcgtttctttctctgtactagttataattccttctattatcctctctctctcgtcttcttcgtctgctcttcttttttatctctcgaaattcctctctctttctctctgcatcaaaacagcaactttacttctgcgtttttgtttatctctctgtattatccgattaatttaaaggagttctttgaaggcagctgcttctatgccatattgcagaggtttggatctaaatttcatcatcatctttgtttctccgtttatcttcaatttcccttcatcttttcaatataattgacttatttcgttaaaagtctttttgattagcttcctcggatcttatgcttattcatggatcttagacctacataatggattaaatccgattgtttctcttattgttcttgttgaattgaggttaattttgatctgaaaattagtttctgcggcagatctggtgtctgtatttgtgtaatttgtatccattagtcttaattgagttattagctgagaattaagagagatcctgaaatttgccgtggaattaactctttctgtggatggatggataccctttgtattcttcaactttgctcctactctgggaaattagggtttgagtaatcattaggttttactctttggctgttgttgactatcttcaatctaattggtggctgattttgtttgacttctttaggacttttggtgtctttcgaggtcattagaacaattgtgtctgcttggttggtggtctatctacaactgttagcttttacaagtttgaatgctattgttttggctttcagattttgatgttatggatttctgtgttactactcctctgcaacttgaaactaatcaagtaattgtcaatgccgaaaatgggcgagtctaaggggtgcgggaatgttggacgaatgatttcgaagaataagtctgcgaattcgtataacctctctcttcagttgtctcctgttgtttctttctgggattgtattgtccgcaccatgaggtattcctatataccagagtgggtgtagttcttgagttcctctacaacatcatcgagtttagtgcagttttttagttagaaatttatagtcaagcaataatggatctcacggtgtgcaagcaagttcagccagtcgttaggaaagcgaagaagaagcatggtaaagatgaatttgatcgtatcaaacaagctgagaagaaaaagagacgtttggagaaagctcttgctacttctgcagccatccgggctgagcttgaaaagaagaagcagaagagattggaagaacaacaaaggttagatgaagaaggagctgcaattgcagaagctgttgctctgcacgtcctactgggcgaagattctgatgattcatctcgagtcaagtttggtgaagaaaagggtttcacaatggatctgtttagagatgaaagaactaactacgttcctcgccaaagctgtgctagctatgcggttcaagggattgggtttgtgtcaaatggctatggactaggagatagtaactggtcgccattcacgaggaggggtgcttgggataacaacatgggaatatcagctgatttgattgctgctcaggctgtctcggcgctacagatatctgaaaatgctgatgggaacgcctttgtgttcaatgggatgttccggggatgacagatgccacgactcgtcctcattcggtttttaaaataaacatttgccttctgcttgctttggtgtcaatgctctgtttttttctcttgacgttagaccttatactctgttttcgttcgctgtaatattaaagacgcattttgagttgtatctattatacatgttgaagtctcttcatactgcattgttgcttatcttatatcacattcttttaacaaaccctctaataggtgtgcaatgcatatgctaagacttgcttggtctttgccagtaacgtgttgaaaatatcttcttaacaaaatcacacgttctgctgtgaaaaggggaaaaaaaaagagaggtgtgttcgaatcgtgatacaaagtaatggatacaaacgaatacattttggataggtggatatacagtaagtgaatacattggggtggatcagtacagttgctactgaaatagtagaacatcagagtcacggttctgctttttctgattggtgattgtatgatttgtatcttcctctttgttccctatctctgtacttgtggagggtttggcagtgttaagtatacctttcaaccaactaccttgcaatctaaagctcccattgtctgaattgttgagagttcctggccgctgtggagagccattggagccatttgaaccattggttatgtttgaggtaacattcgaaaggaagcgataagccactttactggctgaaacaagttcagttttggcttgctttacctgcaaaagtcacagttcacaaggacttaacatccacatgcattcaggtgtaaaaaaagaaacagcgtgggcagagcaaaatgagagagaacccacccgcattgctgtgtttcctgctacttccaaggctgtgtcgccagcatgagcaaaacgattcacccaacctgttaagagacagaacccaagccgtcacataatataaacacacacacaaaccctgattcccacaataatggttttacctgggatctttggcacaccaaggcggtcacataatacatcgcagaagtgattgcaatttttggacagcaaatcataagtgtgtcctggccattccctgctgagctcacgcatgatctgatttaccatgaagattgtacaatctgtcttcccaagaacaattttctcacgatatgtgtacattggattcttgccactaggacagctgaacacaccagttccttgttcacaatacccataagaccattcatcgtttccatatacctgcacaaagttcatacaagattctattcaatcactcttccctgcgaatcaatagcaacatgtaaacctaaagttcatcgcacccataatcccataacacgtttctaaaattacttgaagaaccgagtattgagatcctcagtacagacgaaaagggagcttaagctcaagatcttacagagacctttacgaccatatgccattagattagagcctcacagataaaaccaaaaatatcattccttcaaattcttcatttccacatacagacacacaaacaacaactcaaaagagagacatcatcgatacatgtgcagatgtagattgatagactaaagacgaagaagatcgaggcagtggagtagtagtacctgaatagcgctgtggaatataccgccaagaccgatcccgtctttgaagaacctattgatctgaactatggtgttgttagtcttctctgatccactgttcgtcacatcgtatatgtgcagaacaacctccgccattgattctatctttaccaagaaacacgaaccctaatttactacgaaattgagctcgcagattctctctatagtagcttcagagaagaaggaaacctatagaatcgtaccaaatccacttttcttcaacaaatccaaattctctaatctactagatctctaagaaaccactgcacgaaactcttgtttttagattttgatctaaagctgaggtattttgagtttgtttatcttctcccaaacttttcaatctcagacgtgggagattgaagaaactgatgctgtggtgtctggaaaggacccttataccctcactttgccgacgccggtttcacactcaaccgacactttctctttcaattaaccggtttagttttcattaaaccagaaaaatgattatcaattggtttaaatacatcctgagatattttaatttgaaccgttggattataaatttgtcaaaagaga

SEQ ID NO: 828 - DNA, 605 bp, Arabidopsis thaliana landsberg
tgggcagtcagagttatataaccttcaccagcaattgctgtccaacaatcgaaagctaagcatatcctactctgaatctttgccaaatccatcttctccgagccttaaatgagattccacggtaagttgtttgtgatatattcgtttgttttagtttcttagccatttgttcttgagtagcgcagatggttagaggagctggagttcgtggtcgtggtcatggtcgtggtcgcggtaggggacgagtcctcgagggtatcggcgagagtgatggccacagtgccacagttgagcagagtgtgggttcgcagcctgagtttgtggagcccggggttaggaacggtcttggtgccgatatagctggtgcagccggagtggggctggtggagctggtgtcggtaccggtgtgcatgccgttggtgctgagggcccaggagcccaggttccagaggttggtttggcgggcctgttgaggcagttgttggagcggttaccaggtgtggtacagtggaggctcagttctccacgagtgcggaggtgcagcacgggctcagttgctgaggaggttgatcttatttgaggatgatggagcagtgcagaggatt

SEQ ID NO: 829 - DNA, 580 bp, Arabidopsis thaliana landsberg
tgactctgatgacaaacacaggaaggagatcaaagcgcggatcactcgaccagtcactcgagcaaccactcaaccagtcactcgagcaaccactcgaccagtcactcgaccagtcactcgagcaaccactcgatctgccacttaacaacgttactcgactaacaactcgacctatcttcccaacagcatcaccaactgctccaaaaccagttgctgtcaaaaacaaagaaaaggtctttgtccctcctccctacaaaccacagcttccatttcctggccgtcacaagaaagcgttcggcagataaatatagagctatgtttgccaagaatattaaggaggttgagttgcggatacctcttgttgacgctctagcgttaatcccagactctcacaagtttctgaaagacttgatcgtggagagaattcaagaagtgcaagggatggtggtattgagtcatgaatgcagtgctatcatacagaagaagatcattcctaagaagcttagtgatcctggttcattcactctaccatgctctttagatccgttggctttcaatagatgcctatgcgatttaggag

SEQ ID NO: 830 - DNA, 501 bp, Arabidopsis thaliana landsberg
  unsure (1)..(501): unsure at all n locations
nnnnnnnnnnnnnnnnnnnnnnnnnnnnnnnnnnnnnnnnnnnnnnnnnnnnnnnnnnnnnnnnnntatttgtggtgttttcgggtgatttggagctgttggcgagctaattggaagaagccgacctgatcacagcagaacactcgacccactggtcgagtagatggctccactccttcaacannnnnnnnnnnnnnnnnnnnnnnnnnnnnnnnnnnnnnnntccacatcaccactcgaccccatggtcgagtaccaccaagataaccactcaatctcatcactcgaccacgtggtcgagtatcatcacctccgcgcccaaatggtgttcgatgaaatgtctgaaccactaattctagagattcgtgactctgtaccaaggtattggttgcagggagcgttttggctttaacttgttgattcgtaatgcttgttagattagctctcgtcaatagtaattgagtctgtgactggtttaacttgagggtctatgttgcgggg

SEQ ID NO: 831 - DNA, 905 bp, Arabidopsis thaliana landsberg
ggttaaacatatactctgtttctatataaatgtagtttaagagtttttatttttttcaaaataagtgttgttttcaactttctatacaaataataaatatttaatattttaatcaattatatttaattaataatatttttatataaaagaggtagattaaatgagactttcatgatttttttaatatgtgtataaaaaccttaaactaatatgaaacaaaggaagtagttgttaattattaaattcatatacagtatattcttagaataaaatatcaacataaaattgatcacaagtatgaaaaaaatactttttattaaaaggtttatcagataaatatatttttccttttgtaacagacaaaaaattatactaattttgaatatttattattatatttcttaataaatttcgatacaagttttctatttaaataatattttttacatgactgaaaaatgttgaacgcattagaagtgaccaaatcgtgaattttaacttgttcgtcagccagaagtttccgtttctctttagtttcttcatcgcgatttttgctacttggctccaaaatccctcctttttcttctttctcacttgcatcattagctcacgatttcgagtatcgattcaaccattttgatcttcaatctatcttagggtttctccttaattcttctctcggattttagctcttctcgactattactcacctctctcatggcgatgagaggtgtcgatttcaagtggggagctctctctctctctctcttcaatcttcattcacttgggtcgatctaaaggggacggattgcgaatttaattatcgattcccatttttttttgagttttggggttttctgatttttgtaaattgtgcaggtacgatgggttcttcttgtcgatgc

SEQ ID NO: 832 - DNA, 507 bp, Arabidopsis thaliana landsberg
  unsure (1)..(507): unsure at all n locations
tggcaataccacaagacccgtccgcagaacggcaccggaaatcggacgggaccgaaccgagccggcaatttcgggaaatcgggaagcagatcgaaacgaaccacaactccagaaagcaggaaataagctccatcaaactatccctagccaaggcggaaaactagatgaagctcgtaagaacccaaatgcataacgcagtttcctcggtatcgaacatcgaccgcattctggaagaatcccacaacacgccgttcacacataagaactccaatgcgataatctcggatccagggaaactaagaannnnnnnnnnnnnnnnnnnnnnnnnnnnnnnnnnnnnnnnnnnnnnnnnnnnnnnntctgtggcccgagccaaattcaagccagaagaaagaagcgctggtctctgtcacctgttcgtcgagcacttgaaagggccagccctggactggttctcgagactcgaaggaaattctgtggatagttttcaggagctatcgactcttt

SEQ ID NO: 833 - DNA, 1414 bp, Arabidopsis thaliana landsberg
aaccacacaactcaaggtggaaacttagatacacatccacatatgagcaacatcaaaactcaatttatcaagttgtagaaacagaagccacaaatgttcaacactccaaacactactagaactagaaatgtgaagattttatcttaatcaagcaggttctagtaccatagaaaacaaaggccttctcaagcaagaagaagccacaaatgttctaacacactaaacactagtataaacagaaataaagaaacctgatcggaagcagcaccatcaatggcagatccaagccaaccagtagcacaaatcttgaaaacacccaaaaacaaacaaacaccacaaaacgcaaaaaacatccaatgaccaagtttcttcctctctctcaaactaaaatccgagacaacagatcccatcggcttcctcaacaagcctttcacaactctctctcgcaactgaccataagtctgatgttttctattgagagcagaatcaaatccaccactcggatctgaaccggaagagccagaaacaatctctgatctaggtgaattaagcggtagatcgatctcgtgatgaactctcaaggtcgaggaagtgttgttgttgttgttgccatcaccgccactaacaccgacgtgagtattattattattgctactactaccagcggaaccgccgtgtttgaatgattgagcacgacgagtcattggaccggaaaatcgaggactgttgacgtgatgttgaggtacgccatcgccaccgtcgtggtggtggcccatttcaagctcttcttcttcgattgttgctatcttttttgtgaagaagacgaagaattggtttttgcgtttatcttcaataatgatttttcaatttatcgaattgttttgttgcttcctctctttcaagtgggaaactgagattttgcgttttgttagtgtttttactgtttctctctgttatattttgtgtcgacaatttttttattattatttgtgttattacatagtacacttatggattggtgaataaacaaaaaaaaaatgtgaatagtacgaatttgtcgagttgggaccaagggaaattaaacgagtatcagctgtcaagctgttcaaataaatacactcctctagtttctatactacaagaaattatagcatattaccataaacaaaagcgttggaaattctggacgaaatatgtcggaaattcgttgaaaaaactagggtggacgtactgtgaatttcagtttgatctcgattcgcctttttagttttacggtttttcaattttaaaaaaacttaaaccatataaaaacttttgtaatttggtttgattacggttcggttttatagtttttactgatttttcggttttataaaaattgaaattatatgaatcttagtttcgggtttttcgg

SEQ ID NO: 834 - DNA, 1015 bp, Arabidopsis thaliana landsberg
cgttatagttaggtgtcattcaatttttctccttttcttgagaggtctctcaggttggtctagcaacattcctctcttcctctttccctccaaattgatcttatccgactctgttttttgcgggctatcatctactttaaccctagttacagcctcatcttttctatcaccgtagacaatttttacgaaccgttgataaagattcttgtacttgtcaatcaaacattgaagagacttactaagcccattactcgaattaactattgggcctctagaaatttacaaattcggttcctatagaaaactacaatattgtccctcatggcattgtataaatttacaaaacatgtcacgctgataggcctactaagcccattactcgattaactattgggcctaggttcattatattcgaaaccaatgaggaagatgatttaccaaaaaacaatcttctactgataacaatcaacaagagaaaacttcttattaatgatgatattacgacaccagaaccacaacaaacaagagattggtcacaagaccacaattctcattatgtgcttgatgcaaaaaggctaaaacagccttcgctttcttctctaagaaaaaaaaaagacttggcttcaacaaaaggactaaagagattgtttcttaaacaaagattcagaggagaagctttggtttagagaacaacgttgtcaaccaaggcttgtgtgatcttcctctacagttctttttgctcgatccatagtgaactctgttcacgcagtagcttctctctctctatgatcttctattacctctattggcccatcatcttccacatctctagctatactgctctttctttgatctacagcgtattaaacacataaaccagtcagtgaatcaagcttgaatcagttttacaactttaagaagaaaagcactatgaccattactgctctgaggctgtgaccaagaaacatgatgaactcaaactagaaatagaaacctaggagtggcactactcttc

SEQ ID NO: 835 - DNA, 833 bp, Arabidopsis thaliana landsberg
ggcatcgtatatggttgagactaggacggattctgttggttttcgagccaaaaaccttcgtttttgtctaatgcaaacatccttggcaattgcagtttcagctgtccgtctcggttttcccccacattatacccctccatcatattcagtagatgttcgtcacatgatacagacaccaaggcatcaagatcttcaccaggaagttgatacttgacaacatgagtccgatagtagatttcaagaactttttgcctgagctcctgccaagaaatgtcctttcttatggaaataatgtgtgtttcacctccaacatatctaagctttgaatcacctggacgtggaagtattttcccaccaaagctacaaaggactttaacctttgctgttaaactacctgaggctgaagaagatgcatatccatggaaatttcctaaacttctatcttgacataatgaagcttctggtgctgaatggatatgcccgagtttatttccaaactcgtgaaccggggggtttgttctctcatactgcctgatgccatttcccaccatgctcatcctggaaacatctgaaccaaattcagaccctgcgtgcccgttataacctgtgggataattgatatctccagctgcaatgggatttgcagacctttgagaaatgacacgatcacgcagaaactcaagagaaaattcctctcctgtttgtatggagtaatgaagccccggcttaacatctgcaggattaggtcggacatttgcattcgagagacccgtttgatcaggcgtaaatccttgtgggacagagtcattcacatatccaggttccatagcatg

SEQ ID NO: 836 - DNA, 500 bp, Arabidopsis thaliana landsberg
  unsure (1)..(500): unsure at all n locations
tctcctctgcgacaaaaaaaatctctcgaaattacccctaccaaatctaaatagcttagcctccaataacagtttagagtgttaatgcccaaaatataatcgaagatttatctagtcggtattggaaacataaaagatattctgaattattgctgatatttatagggttgcgagtatatcgcttatatacgtttggctatttattagcactgtattctcttccctgcatcaaactaaaaactatcacactaaagagtttagcttccgacaactttaatgcaaaaggagctaaacacaccgagaaatcaagactgaaaggtaaaggtaaaagctttgggtattacgtatattattgttaagttccgtaagagtgagtttttactttagggtttcatatcgagtgaaacaaaaggacactaacaagtttgttattgcgnnnnnnnnnnnnnnnnnnnnnnnnnnnnnnnnnggcattgggaaggacaacaacatgggcgtaa

SEQ ID NO: 837 - DNA, 582 bp, Arabidopsis thaliana landsberg
tgaatgtcgccgaggatggtgtcgacggggtgatctcgttggattgcttggtggactcttgggtgtggcggtcttggttcttcctcatcctccatttcttgatcatttgcatctcccccttgatcattgccatcatcttgaggtggctcatcttcttgattttgcccttcatcaacgtgagcctcatcctcattttgagttggtggagatgcttgcattgaggaggatggttgatcttgtgcacttggaggcctttcggattccctaggacacacatccccaatggacatgttccttagcgcgatgcacggagcctcttcattacctatttcatcaagatcaacttgctctatttgagagccgttagtttcatcaaacacaacgtcacaagagacttcaactagtccagtggacttgttaaagaccctatatgcccggttaggagttcatatgatgtcttcttgaggattcggtgaagatataaccgattgatggcgtacgaggcggtgttgaccgctttggcccaaaccaggccggtgtcttgtattcacaagcatggtcattgccaggtacgagctcgaa

SEQ ID NO: 838 - DNA, 523 bp, Arabidopsis thaliana landsberg
agtcatctgttgtgagctgccgaggtcgtgattccccgtctgaaacatttgaagtctctgcctccatttcagaaactttaacctgcaatttctgctcatagttctttgcaatcttctcagccttcttattgacataagtgccatctggttttgtatgcgtcttgacaaagaccttaccaatacccactgtccttcctaattccttttcctgcaatgttaaaaatgaacaaggactaagacaacatctaaacttgcaatatcttttatccgtctttaacatatatcttcaaaatagtactgaactgttcctgtaatcaaaggatcccaatggtgtgtttattgaagataattaacagctaaacattttagtgaatgcaagagaaaaacactataccgcaaactcgaggaagtatctttctcatcgttcccgtggaacacatgaccagctatagaagacaccatcaaatttgtttgtccatactctagtaatctttcgaaccagcctcaaagatgtgtcacgagt

SEQ ID NO: 839 - DNA, 611 bp, Arabidopsis thaliana landsberg
aaggcgaccgtagataataggagatataaaaccattacaaaaaaaaggagtaaaaaacattacgactgagttcataggaatgagataaagggaagacaagtaagagatacaaaagcattcaagacgtgaaaccgacatcatctggaccaaattcagtaaacatgtccaccaaatcattccaaacagttgtcgtcatccaccacggcttatctaaaccacacgcccatcctcgtttcagcgcccgcatattgtcccaatacaacgtaacagtggttttgtcaatccatgtacccaagctagggtttagaactaggagattcgcccaatcaggagtggtaagtacggcttcgacatctttgataaactgtccgtcaatgtgagtgacaccatgtcgttcggaagagaggatgagacctgtaaatgatgagatgaagtaacatatagtaaaaaaaaaacaagtaaaggaatacaaaaggttccgtgtcttacagtttggcgggaaaggtttctaggttacatttgagtttggcggcaaaatatattgttacggctgagttacctcaagacatgtaacaatgttacgactgagttgtcaagattataaataagca

SEQ ID NO: 840 - DNA, 600 bp, Arabidopsis thaliana landsberg
cggggtctgccagtttcgattaggcatgaccccattccgctctccctcgacgcgcggtgcctcaccctcggcggctgaggatgcctagggctgggtcgaggcctcctcgggctcgggcgtgtcgtcggtcttgatggagggttgatgtatgtctctggagaagacgtccgggagaaccattgtccgccctaaggctatcttagccagctcatccgcagtctcgttgtaccgtcgagcgatgtggttgagctcgagcccgtagtgggagttcttcatgacttggtcgatgacaagctgcgagtcgccacgagcgtcgaggtgccgaacccctagctcgatggcgatgcacaacccgttaaccagagccttgtactcggccatgttgtttgacgccgggaaatggaggcgcacgatgtagcggaggtgcttctcgaggggtgagatgaagagcaggcccgcgccggctcttgttttcatcagcgacccatcgaagtacatggtccagagttccggttggatcagagctgttggtagctgggtgtcgaccaactaatgaactcaattttttgacagatatatcatcatttcaagaacatttta

SEQ ID NO: 841 - DNA, 3012 bp, Arabidopsis thaliana landsberg
cctaaaaaacattattatttcatttcgtgtgctcttatgtgatgttagaaatctgtccgaaaaggacctatacgcctaagtatgagaatctaatctttacatgtaaagattttgtacaaacgaacaaaagctaaaaatcatcagcgcggtggatctcgcccataagaattcgattgctagtgactttgaaaccgagaagagctggatcgatttgcctccctttcttccctttcttcttaccacctccacctttgcttccttcggttgcatcagttgactctgccgccaccttcttcatgctattactcttcttcaacatctcactaaacgatgccgcctctgacgttgaccctttgtttcctgctgctcctgattcccgtctcacacctcctgttaataaattcgtttacagtctgagtcccattttccatcaataatgcccgaaaaagacaacattccttgagatagatataccttcaattccactataggaacttgctgctgccctgctagctgtgtcagacatacgctcgagtaatccttcatgcgacgaagaagaatgagatgagggaggcctttttaacaaaactgaattctgcccatgtgatggaactaccaacctacaaacaatcgctttaatatttaatccacaggaatgtatgggaggagttcagggtgctttacttatctaatatactggtgctaattgctatttgctaaacatcaaaaatacaaaattacctatccttccttctatcttctccaaccaagttgtcactgtatcggtctgcagcaagagaatatcaggataagccttcataataacaaagtaaaaatcaaccttccaaaccatgaaattagagaaataacaaaaaatcttagaagatgcaattactctgaaagataacataccagagatattgaaagaggactgttgaccaggcgtaccaacaggaagctcctcttgaatcagggagtctaatactgcttgcttgcccattctgtcttgggcatcatatgacatcatccttcccattccctcatttttaggcggcacattgttccaagtattgaggtcattcgcgtctttgttcataccaaacatattactgaaggcttgagtttcattctgagttgaccgcccagcatcgataattccagaaagtaaggaactattatggtgcaatgatcccatattgttcccatatcccggtactctgttgacctgttcatcagaaaatgaacgatccccaaaagcagatgaaacgttttgattaccaccatggtctgaaaggccgccaagcgtttgaatccctggggtaaggcctgaaggaaccatcctgtcataaggatacccacggttcatgtttggtgactcagcagattgatggccaggtctctggtggagcaactccataaaaagctgctttgacttgtcgtctgtagatccacctaccatccatgagttgggatcttcacccagtctcctaatttccgacctcattttatcatgctcagtatccatattagatctacgaaattgagattcggcccagtcaccagctagctgtgtatcggctccagaccagcgtccttccgttggttccaaatgtgaaaaatgtgattcacctaatggtatacggggattctgatgactgaaacccggagtagaatttcccaatctgccagaagattgcatgtgggcagtagcatcccgcaactccagaccctgggagagaccaagaccatttactgcatccagattcagccccgatgctgatctctcaaatggaagaccgtgctccaataattcttgtctaagttgttgctgatatgaacggttccgctcaagttgactaaactgatcctcgaagtgtggcctctgctgctgttgatgaaagtctaatggtctaaaccctgcagaagagtgtgaacggtggatcccaggatgagttcttaaaagctgatcactatggtcagatggccacagagggtcaatatgtctctgttcctccaatagtgtattgtgcctcactccatttgccaattgcataagctgctcttgctgcagcagctggtactccaaagaccggattggttcagattgcagttgtccatgttgagattgcatttgtccatattgagattgcttttgtccatactgagattgcatttgtgttgaaaatagctgttcaagtagctccctttggtgaccttcatgtgtaaaccgcccaaaatttcctacggcgtgttgctcaatgtatggtgcgaaattttgtgacggatggccagaacttttctgcagctcattcagcatctgctgctctaacaacatctgatcaacactgttggatcgagggaagtcatgtgactgcccaaaccttgtatcaggagtctgtccttgtaaaatctgttgaaaatgtaattgtcgagcatgggactgttgctgctcctgtaagagcttctgatgtaactgatgctcttgttccaactgatgctgttgcaactgaatcttctgctgctgttgcaattgaatcttctgctgctgttgcatctgaatcttctgttgttgctgcaactggagagttattaaatgctccagatcttgatcacctatatgtaaatgtgacagcatatcccgattttggaaatgctgttggtgatgttgatttgatggaagctgatccccatggttaaagaagttggattcatgttcaaattgtgacatccggttaccagacaaagcgtcgagggatatgttggggtcaatttgagaatttcttcgggaattaatgggacggttttctattgaacaactaggctctcccattgcaccagaagatctgtttggtaacgggttaactggtgtactaccgccctctagctcagaccacaacacaccaaatgggtgcagcttattctcattctgatttcgagtagcagccgtagttacttcaacagggatatcagagtggccagaaaattccattaagcatcatcatacttgagagg

SEQ ID NO: 842 - DNA, 792 bp, Arabidopsis thaliana landsberg
tgaatactaacagtttgaagaggtaaaatgaagagcggtgagataagctctagccttagtggattgtgttggaaactaagatatcctcaagtctgttggtttgccatctggatttttcaatagtcggattgagtcgaacctgtaacattcatcaactagacaataatctagagaaatatagatcatgattcctaactaaactaaacaaaaacattttttttttagaaagtgactcaataaactcaaaaacgaaaaataataagaatcaaaaataaaaacataattagtaagtgtctccttcagatttaaacgacacagtctccagtagcattcaaatccgaaaaaaacgagaaaaataaatctaaaataaaagaaaggaaaagaaaagaaaagaaaaatcaaaccactgagttgcctcccactaagcgcttgttttgagtcaatagcttgacttggcggagttcaggacgtggttggacgggtggaggacttgtgctgcaaccttgccttccaaggcggtgtgtaaacagatccgctctgtgcagcagcaggtgtcgatcgacactggtgttggtgtgggctatggagagtgtgcagcaacatctgcctgtaaatcgcgatggtgtcgatcgacaggaggtgtggtgtcgatcgacacagttgctctgcaactctcattggcgagctgagctgtagggagctctgtggttggctctgttgaggggttctgagcagcctgaagagatgtgtccttgctggaagcaatactactgataggcaatgtgaaaaccg

SEQ ID NO: 843 - DNA, 2835 bp, Arabidopsis thaliana landsberg
tttcttgattaaaaacaggttgctataatgggattgttacaaactacttagggcctaacagacccgcgacaaagaaataatcctcatgtcttaagagtagtatgcttttttttgataaaccttgtatggctcttgtttccgcaccagagattgctagtggtttgtctttgtgttttcgactctctaatccttgagtagcaaactagaaccttgagctcttgctcatttgtggagttcaaagacttttcagtccagatgcaaaaaatgtgaaatccgactttttctcttttgatctccctgatttttggaccctgcttcttacaacactgttacgcggactaacatcaaaaacactcctcaaaccaaacaaactcctcaatcattgtcactagttcgaatgtctctagtttcttgtttcaatcttttatatgaaactaatcaagaacaagagatttcatgttggcttatgtttttaacttccttatcaaatatttaaatcttctttgcggaataatacatatggaataatgatgtcgacttggcttccggaggtaaaatattgacactcattaaattagagaccttgtaatactctgaagcaaaggaagttaagtttcaatgactgattctaaacagcactcaacgacttgatagagagagttcttcagaatcttcgctgagtaaaaacaaaattagattcactggagttgttaccttgtggaatttctgttatggggcaaattctttactaagtatacaaatggatttgacatccaatattcgtgattaagcatacagtaatgctacatgtctactacgaaatctccggccttctgacgatggaggccttcactgttctcagaagtccgaccaactaactcttacccacccataaacacaaacattttcgggaggattggccaaaaagttaattatatggatctatcaatagttagaaagagagacattgtaccctatctggaatatgccgaggcactggagctacggtaacatatctctgtgggtttaacctaagtgaactcacggaccggtccatagatgaggacgattggtggaaacttgcaaaacgattgatcactgcaaacctctctagatcctggacttagactctcaagtctgtaattgtagttcctttttgtagtctgcaagaagaaccagattttcatgagatcaaactagcccaaatgtgaaaccatttcaaactggaatcaaatacaagaagagagatctacagtttttaccctgcaaagtcagactctagtttctttgatctactaatgaaatcttcagctgctttggagatgtattgaacactcattttttcagttgccgttctctcagacaacctacacaagagtgggtcgcttcatgtcaatagagaaccacaaactctagaaaagctccaacacttagataaacagaaagtatccttacgggtttgagttgtttgggggcgaaaagccctcactcctgtcggtactactggagctacatgcatctcctagtgcagctcttccagcagtatatgcaacaacatcataatttgagctagcaaccaaagatatcaccctagccggaggtgggctaaatagttgttgcatgagttgtgttatatgtataagccttctctttgatctaattggtgggctatcctcaagtaaagtctcacattccacctgtgagaacataagccatcagcgtattcaacaacattgtacaaagagcatagagaaaacatgtactgagcatactcactttttcagcaaatcgattagtttccctggcccagttaatctcggcctcgctgtaaaaatataaagtttaatacggtaccggatatgagatttgttttaggaatattagtgtgcataagcctcacacctgagcgtcttgagccataaggaaacatgcatgacttctttattccaagattgaagttctgatgtggcagttttgcttcttcttttgtttatcaaccttcagaagcttgtcaggagcaccatgaagcaatgaatcggatgagggagtctcaactcctggtgcggagcccgacatttgctccataagacactgcttggatgattgaacagtatgtgtaccatcaaccgaactctcaacattagacgattgttctcctattttcaagggggtaaatctccctgtatcattcatgggctgcaccagtccattcttgaaagttccatattgactataccaggatggagccatctgaggactaatttgttgatgatctgctctaaccgaggctgcatgatttttagaggagaaactctgagaaacagtatgacctaaatgcggcaagtgattcgctgactccttgttatttaacccacctctaactaaaccatcagatcttgaaggtgattgttgttcccctttgtgagctacctcttgaggatcaaaatcaccattttcaacagtcaccttggatgtatcgccctccccacttccaaccatttgttcctcgtgatgtaagctatcctttggaacgttgtttgaaggaagagagcgatcaaaggattgatgattgctctgcaccattttggagaacattgaagcaacattagatgttcgttttgcacccatatctttactctgtaacccatgcatattcaccatgtccctcccacttaatgacatgtcaccattttgggaggacaattggtttgtcttctcctgccttgagaagctagctgccatgttgttgctgggcaatggatgcgggcgtaaaataactggctgaggcttagatggctggttccaaaactgatgttgcggagctgaaatacccga

SEQ ID NO: 844 - DNA, 683 bp, Arabidopsis thaliana landsberg
  unsure (1)..(683): unsure at all n locations
cgataggattacaataaagcatatactattttatctcagcgctgacttttcgctgtaagctcccttaggagcttcttcgccttttactttcagcggaattagcgtttatttttcgctgtaagcctcccttaggagcttcttcgccttttactttcagcggaatcagcgtttatttttcgctgtaagcctcccttaggagcttcttcgccttttactttcagcggaatcagtgtttatttttcgctgtagtttcagaaaacttacactgcgttcccttaggaacgacttttactgtttcgagggatttgtactatgtccgttagaacaagtgtttgataatacaaaggtccttcatgccaccataaatttgtatgcctctgcaaatcaaacctatggaaaagacatatttttattacggtaatagacgaaagtgttgcaagaaaccgaaaaacgataacagacacttaaactcctcataattgttccttattaaaggtagtactgaatgtaannnnnnnnnnnnnnnnnngctgaggcaggatatttatcaataaatgtgcttcgactctggcacagtgctattgactgtgcgagcttcggactcatgtctgaaatcctctgaaggtgattgtgctgcgtccttctggttgctgtcatcgctcgcggcggtggtggtgagggtc

SEQ ID NO: 845 - DNA, 870 bp, Arabidopsis thaliana landsberg
taattttagtttttgttctaaatgaaagtatttaaattattaaatctacatattaccaatagtctaaaaatcttaacatactatccatgtaaccggaccatttttcaaaatatatatattcatttaagttaaggatctctagaaatctactttaacactcaacatttttttttcattgtaaacagctttggaagaacaatccatcatttttaacaaataggagaagatttctaaacttttacatatgattaatctgattgcgttcatattaatggaacattgcgtttactctgacttgagtgatcgcaactcaagactgtcgcttgcgccggtgctcacactcttttcttcgtggtgttttatttatctctaaatccctttgatatttctctttggtaatttcctccattcacactttaatcatatgatgaaacatctttgataaatttccaaatacaaacataattaaaatcctatatttgcttacgggaaagtcctcaaaaagtgaactatagtatgatatttgttaactgttccaacggaagcgtgttcaagaaggtaccctttttccttgctctgtttcttttttcttgtgttacatgctacaattttgcgtagtatacaagaagtagaactgatacaaatattctgtacatgactctaaaagaaacagattttaaaagttcaacaatcaaattatagaaactccattactcattttgatatcacacaggaaagtaacaacagtatatgtttcactcttgggtcttggccttaatatgctacatagttgcagcttcgtctctatatgcacatgcatagcgataggcttaatcagattggaagcaaaattgaaactttcgatatata

SEQ ID NO: 846 - DNA, 447 bp, Arabidopsis thaliana landsberg
taaagttaagcagttgcttttagtttgtcatgttttatcgctataagtagagccaagttttagtaataatcaagttattacccagaggcactccctccaagaggaaataccagagatcaggattataatcaccattgttgttctaatcgaagaggatcccaaggctgctcataaccgcgagcacagctgatataccagtttctaacactctgcagaggtcatacacttaacccacaagccgtgattcccattctacccggggttctagcctccccattgatcactaccaaggtgacctagcagggtctcactacgtagcctttacaaagatttcccagaggacatagccgcccgttaggtttctccagtttgataaacacagtacatctccccaaaggaagggtgactaacaaaaccaaatcaaagaacctctgcaaccagcctcgg

SEQ ID NO: 847 - DNA, 1185 bp, Arabidopsis thaliana landsberg
catcatgttaaggtccatcatacaaatgaaacagaaatccgtttatgatatcatacctctatatgaatacaatagattgaaagacctcggtcctaaatccaaaagtgatgcgatgaatcatttatttcaactattaatcccaaatcctaagcaaaaaaaatatgagaatttatacccttagcataacatagagaacaaattctaccaaacagccaccaatctgcgtagaagaaatgaattcttatcttttaacaatttcctctagtttcttccatcagcgtataaaaattctattagcaattagagaaacatcacacgagtcaactcacgagtcaacaagtcgattaaaacgatttagagaagaattttgcttggatgacaaaaaaaagaaaagaatgtagctttaaacgagagattcgtaggcagagggaatgaagaaatgttttcccttttccttatttttatatatattaaaaaaagataatggcaacaatcatactaatattattattatttaagtgtgttttggaaagcgccaatgaaaagtttttatctacgtaagcaaccatttttcttgttctgtgtgttttggaatttacgtgagatttatataggttgaaaagtttttcaaaattaaatgcttatagattaatagattatataccataataaaatgatttaatttattagcaatatgtcaaattgttcaatgttttctttttttttttataatttgactgtttttttaggtaaaaaaaatatttgatttaacagcaatatgacaacacataagataattttcctttcttagatttgaaatacatattattactatttgactgagatttaaggacatctcttttaatgaatttaggagaaattaaataaataaaaaataattaattatttaaagagccgaactctttagaattgataaagcttttggaatttgatagagttacgtgccaaccggttattggatgtgattgtaaaaaaaaaagtagctttcaatgagagattcgtaaacaaaaggagtggagaattttttatattttatgattttttataaattaaaaaggataatgacaataatcatactattattattattatagatcacgagaattatagagaagaatttagtttggatggcaaaaaaagaaaaaaattagttttaaatgaaaa

SEQ ID NO: 848 - DNA, 612 bp, Arabidopsis thaliana landsberg
gcaagctccaatggcttggtatgagcgtcttcgcgacttcctcatcgaaaagggcttcaagatcgggaccgtcgacacaactctattcacaaagaaatataacggtgatagtttcatttgtcaagtatatgttgatgatataatctttggctcgacaaatgactatcattgcaaggaatttggtgagttgatgtcgaaggagttcgagatgtcaatgattggtgagttgacatacttcctcggctttcaagtcaagcaaaggaaagatggtaactttctctcacaagagaagtataccaaagtcttgttgaaaaggttcaacatggagaagtgcaaaccaatcaagacacctatgccaacaaatggacatctcgacctagatgagggaggtaaccggttaatcaaactctctaccgttctatgattggtagtttattgtaccttaccgcatctaggcccgatatcatgtttagtgtctacatgtgtgctagatttcaatctaatcctaagaaagctcatcttagctgaaagggaaatgtgcccttggcgcatttctataagattttggtgattaagtgctcacacaaatgctttgagtgatatttgtgcaaa

SEQ ID NO: 849 - DNA, 641 bp, Arabidopsis thaliana landsberg
  unsure (1)..(641): unsure at all n locations
tctggtaggctgagctgatatgccacttctccacgttttgcctgaatcgggtacgattcgatgtatcgaggtgctagctttcccttgactccgaaccttttgattcctctgatgggtgacaccttcagataaacataatctcccactttgaaactcagctctcttcttctggtgtcagcatagctttgcagtctggactgcgctctcttcagattctcttaaaccattatgatattttcttcggcttcaagcaaaatatctagaccaaacacctacctttcaccgagttggtcccaatgcaatggagttcgacaattcctcccataaagtgcttggaacggtgacatcttcaagctggcttggtaactgttgttgtaggagaattctgcataaggtagcctcttgtcccaacctggcttgtcttgtaaagtaaaagccctcaacatatctctcagtctgaccatctgtctgcgggtgataagctaaactgaacttcaaatgtgtgccaaggcttcatgcaactgatgtcaaaaatgnnnnnnnnnnnnnnnnnnnnnnnctgatactatcttctttggaacgcgatgcaagcatacaatcggggacatgtatagctctgccacactacactattataggtg

SEQ ID NO: 850 - DNA, 2797 bp, Arabidopsis thaliana landsberg
cgttacagtttctgatacatttctctaacactcagggcctcgctgccaagcttggaaacaaccaatctcctgtcgcataagagctgcgtccctatgtcactctgtttccaagtagaatcgtcataatgcccaacaccaaatgctgaaacggagtgtatgaacttaggtttccagttatgctttatttggaacttctcatcactaagcagaaactgtggtattagcaatgtatcacgatctttaagctttaccaactccactgagaatggagtgtagttcataaccagctcaaactctggtgatctcccctttttcttcaagtttaatatcacatctccccacccaagcaaaatatgaacaagttctgcctccttgctggtcaagttttgcttcattttgacttcaaaaccatattgtaaagctcttggtacaactctatgtttgaacttgaatctcctagacttgtaaaacgttttctttctctttgtcactatcatcttggcttgtacaatattgtgttggaacagcatcatcactcttcgtaaaacatctctgataccaaattcagagtcttgaatatccatttttagtggaccctcatgaaacctatgtgtaaccaaatattgaatcctctctgctgcttccatttttctgaaaaccaccattctcacattcctagacatagtagagttgtgtagtatcttatggtcccttctatacttaaacatccaagactttggagatagtctttgcttcggtttatgagactcgtcacatgttaactgctcacacaactcagccacgtcccagtggaaatctttagagattaaacgcaaagcttctgtcacgataggttgttgatcctcaatgaccatttgcatatcaaaatcctctaacacttgatgatgatggctagtttccatgacaaaaattgatacctgatgttgtgtaacacaagccgtcctcatctttgagtcagttaactccccttcaagttcggacattgaatcagtttccaaaaacgattttgtagcacaaaccgattcaagatgcggcaacagtttctggacaacaacataagaatctccctgatccgcttgtgtctctttaatgcgttcttaaatcctgttgctgccacaagctctccacttcaacacccatctcttgcttaattgacttttttcccgcaaaagagtctttatccctatgtgatgactctttcacctgatgtgaaacaaactgcaatttcatagacttgctcttcctccaacccacttttctgctccaagtgtggaaccaacccttatgtctcgttcccttattgttttcttagcaagtttgaatttgaacatccatgatttgaatcctttcgctttcttctttatttccagcttttcttcatgttgagacgttttaccgaacacttggtgtgcactgcaattttctgtaatactcaacaatttctgacccctatcaacatcatcttcaacctcaaacctcttattcatgttctgtttaacccaatcttgctcctgatactcgttcatcaccacagaatcaagattttccaacccgaaatttacttccctaggttcaacacttttcagaatctcagaattggagtgctcctctcgttcctccatgatagttctctgtactaaatctttgtgattatccaacttggagtgctcctctcgttcctcatgtaccaaattcattgaacgatgatcaattgattcaccaattccaccattagagagatgatcgtcattaccatagatcataagaagccctaagttcttgtgtttcaggtggtgatcaggagcttctggctctttgcaaaacacacataagccattcaaccagctctcgtttatctcttcccacgatatgcgccgacgactcttcatcgtgcaagtagctttgatctccaccgaggacacgattggctctgataccagtgataacggaaaacagagtaacgaaatagaatgcttcgagtaatgaaaatgacagattaatacaacgttcatgaaacgcgatatcaacttctcatctacaagagttcaacatgaaactccggcgaacgatgaggaacgattctcagagagaatccaaaaggaaactataaacaacaaatccaaaatcttcttatcttctacaaatgatcctcattagctatatatatctgcatctcgattcttcctctaacactcccatcgaccaatcttctcttgccacgtctcacagctactgtctccactatctaaccatatatcaatgcctagtttcctatatcatttctttccctgttggaagaaccttgaccacagggtgtagttcgaaaaggtattctcaagtagctcttgtgcttcgagttcgatccccgaatcaaaggtttggttatgtgcaacttcaagctttcgttctactttcacaaattctagatcaacagtccaatacacacgctgagacaccactacaacattcttggcctcacttccaagcttgtaaacaaccaatctcctgctgtataagagttgcgtccctttgtcactctgttccaaatagaatcttcataacgcattattgaagaccctctcgtgtacaagcaattccatgaatttgcataactagtgattaactctatcctgtccaagcagaacatcaactctgaaactgagtgtaggagcttgatctccatttatgctttatttggaacctctcatcactaagcagaaactgggttattagcaatgcatcatgatccttaagcgttaccaactccactgaaatg

SEQ ID NO: 851 - DNA, 613 bp, Arabidopsis thaliana landsberg
tcaaaaagtgattcaaagactgatcaaacaaacaatgtcttttgtctctttagtgaccgaagaaaccttaaaacagacatgagatagagaaagcagtttctttccacctttgtatcatttttacacttttattgctcggcttttcaacacttgtaagcttgtatctctgtcttgcatattttagatcttcttcagcttcgagaaggttcctgactctgagaagtgctttgagccccacttcctaatcctaaagcttgctgaggattgcacaactctattccctgcatagaagtgaaagccaagcttgatgtcaaaccagaggtagttgcaccacccgcatactgcctttctttaagctttttggcgaccttggcattaattttaagcttgctctgaacactggatactcgcagcctcttgcttcctgcctgtccaagcattccataaccttctcctagtccatcaccgagggagctctcttcaggtgtccaaaggccgtcctgttggccagttctcatatctgtacttgatacttgcttcagtttcttagacggcgacaccttcttttttcggccagaagaggacaggaagtgcttagctgcatgcagaggag

SEQ ID NO: 852 - DNA, 3065 bp, Arabidopsis thaliana landsberg
ttcagaaccaagtttatttgtataatcaaagctacatttatgcttttaacatcatcagcatagctctcacagaggaaccagctgacatacttcattttatatcgtggatccataacacaagcaataaaaataaccaagttgatgtgctgcatatctccccaatatttatcaagcttagccttcatcttaatagccattgcctttcgaataggatcagctatgatcagacgtaactttagtaatataaccttcagatacaaattactagttacgtaacgagttgctacaattctcaccggtgcgtcataaaagaacttgagaagaggtgtctatgtcactgcataataccaatctgcttcagttgaaactccttctaacttcccaagttcactcacatatttatcatcttctaactcaagtatctactaggtgaaggtgatttggtgaaaattttcagatcaggaaaatgacgaccttattgaagagaacaccatgagtgtggtggtgaggtgtctcaacccgacagttcataaagttggcggctttgttaaagctttaccacctgatataaccctgtttttactgattttatctatgttttaggataaggattttgagtctttatgttatttctcgagtctttttagtgtttattcaggtattctgtcaagtgggacaacaatggagatgaggagacattttggtgcaagagctaagaaaaataaaactaaagacgatttcagattccagattcagagggagtgtccaccgacaccatttttggcccagaaaagtccatgacgctttcaagttaaccgaagtggaaatttgccccaaaagacttccctatttgcattactagtccctggacgttttatagggtttatatatagttttaaagttcattgtttagacctaagttgcttttatcaagttccttgcaattcctattttcataaagacattaactattcatcccttgttctttagagattcatttagttctcaatacagtgaagagatcccttcattctccaatcttatttgctgtgtttatgctttctatatcaaatatgttgcttgtttctttgattatgtctgagtagtttgcttgttaggtttagggtttctcattagggattcatatggtttagtagatcgcccccctgttaggtaatctgtagaattcttcatctttgattgttcataatgctagatctagattgatcacctagatcttgaatccagacaatagatatgcccgccataggtatatgtagttggatctattatttgatgagcctggtttatatgtgtgtaataagaatcggcctatctactaaggtgaacaatcgaactcgttaagaatgcatatttaggttaataatctctcggcttttccggttattcttagctatagatatagggagtggtccaactagctacactcagaattctcagttccagcaaccgcttcagaatagcaatagttttagcttcacaaggaactatgatcttgcttcataccaagccccccctccacccacacctaaaagcaagctagaatcattgttggaacagattctggaaggtcaacagaggatcttagagagacctatccatagatggaatgagagcagcctcactacttcttggcattctgcttcaatggaaagtgagtatgagttagtgaagattgaggagagtgacaattttgcagttgcagaggcagtgtctaacgacaccaacccttggtgtcgatcgacaccatcgcatatatacgagacatcaggctgtgacgaagcagaatcgaccaagctcgatattgatctccaaaatcactcgaaacacattgatagtgtcgaccgacacctcttgggtgtcgatcgacaccagtaccaacctgaggaagtgtcgacgtttgatggagcagaatcgaccgagattgacagagcaggatcgataccatatagtagtgtcgaccgatactcacctagtgtcgatcgacactggatgtagattgcagcgctgaattgtcaatatcctaagaaaagtcgagttgtagcacaagtgtcgatcgacaccaccactcgcgtcgatcgacacacatttttggttgaggaagagtcatctccgatagctacttttcaagttgggatcactgctgtcagtcctagcactactgtcacgtcacgcaatgcacctctcatacttcatccacctcctaaacggctaaggtactcatctcctcctcctaaacctccagatatcatcaataagactttaaaatttccaaagactattttacgtttaagcaagccacgagtttctcgtcgagcgcttgttctttctgttgatgattatgcaggaaaaaggagtattccacccatacctgagttccaccctgctgatgctcctctcttcctagatagacctaatacactaattgcttatacaccagtatggatgatgagaggtctttctccgcaatatttactgccaccatctgatccacctgatccccaaattccatcaaagtcaagctattgactataaacaagcgcttagtggtaggcaacacactggtttgatttttcttttccctttctttcttttcttttatttttgatttatttttcccaccttcttcgtgtaacacccgtcccgccatatagaccaagacggcatgttttcatctgatcttgccaaaaacgttttctttgaacttcacacacgaacaaaatattgcacacaactcttcacgcttactaacctgaggaaaaagggaaaaagggggtgagtaaagaatactcagtgaggggaattaactctgtccactgaaacatagaacactttctaaagctatacaaccatcatcataacatataaacttagacacacacaatcaacctaacatgctttaacttctaataccacatttataataaacatcttatatatatatattatataaacatacacatcattaggtccagtcatcctcgtgatgactagaacctcataagtggaggctggccctcgtggctcagacactcccattccgg

SEQ ID NO: 853 - DNA, 506 bp, Arabidopsis thaliana landsberg
tgtctaaccgcataaccggaaacaagcaaagaacatgaacaagcgtaagattgatggattcatggctaagattgacgcagcccacaatctagttgtggaggatgtcgattatgttggtagaagaagttttcagaataagagatttgaacaccaacaaggcgacaaaggattttgtgggaatggtccggctagctacactcaaaagtctcagttccagcagcctttttcagaatagctatagtttcaacttcacaagaaactatgatcttgcttcttaccaagccccctccccccctctccacccgcaccaagaagcaagatagaatcaatgttggaacatattctcgaaggtcagcagaagatcttaaaaagagctatccctatatgaattgagagtggtctggcatgctgcttcgatgggaagtgaagatgagatccgaacgttgaggagagtgatgacgaatttgtagtcgcaaaggcagtgtcgaccacaccaacccatggta

SEQ ID NO: 854 - DNA, 1757 bp, Arabidopsis thaliana landsberg
tttttttgtggccttaggcgagttcgagtttgttgcttgtgctcgcctttaatagaacattcccctaaactttttgattgtagtggtcgaatctctacaaaacttagacccgttcatgattacttcaatcttcttcttataaccaaaagcaactccgagattagatgttttaggtattttcttagctagtgatgaatttttgacttccgccttttcttcgtggtaaattttcacgaactctccgacgtcgaggttttgcgaggtcaccaattgtccgtagctcagcaagatgcctcttgatatcggtacagtcttttgtagtataattatttactctatggatgttgtcatatgccttttcatcgcaaccatgttgtcagagatggttgtctcgatcttctcttttccaagagatggtgtaatgcccctgaccttgactatgtggccggacgtacagtctgtcgagtagaatgcgagatcaagccaaaaaaatgcaagatcagttcggccatttagtgtggcaagtcatgggtaagaagcattgaattggatcaagtccatgcgtaaaggaatgactcaccatgagacggaccaagtttagctacaatgcgacaaaccattagaaggtcgaggggaatccatttggacagtgagatatgtgtatgggtcgtgaatggtcacgggattgatcggagaatgcggataagtgacgatagctggcttactcggttaattatggcatggaacgtgttatagtcctaaggaaaccttaatttgcgtcatggaccctcaagagacattggaacggagtgtgccgtattaatgttcttgcggtctggtgacagatcgtaggtttcgccggaatgaagaaatggacggccaggattgaaccgtgcctcatgtttatccgtaaaggctcaagcttatccatatttccggtcatccttatccttttagggtcgagcttatgcattttggatgatgtttatccataaaaaatggaggaaaccaatcggagaccgattagtgtcccggagcgcccgtggagtgacatttatcgagttttgattggtctgggcgacctcgtgcttgttttggccgatcttgtgaccgacttaagaccctaaaaatactccatttgttcctcagacccaaaaatccactagaaaacgcctagctcgcgggagaaaaccttagaagccaaaccccttacgggttgaaaagacttaggccacgggcgggaggctagactcttgtggttggacgactcgggcatacgaattcatttcggaaaccttggttggccgactgcgggcgtctacgtaacgcttctatttcgtttatatttatatagcgggataggggtgttacaaggtggtatgagagcatggttatgatgctacgggaaaccatagttttcaatgttttatcgagtaaatgtgtcgcaaaaagctgttaggaaattggttcagtcacttgctagagtttaggtagattaacccataggattaaccctttttatttaggttggcttacctttgttgttagtattataggatgcttacccttttgcttgtattttcgtgtcttaacctttttgtttgtattatagtatgctgcaaaagagatcacgtcgttgggagtctgtggaggagggacggtcctcgggtctgccgtccaggcgttatgaccttcgtgatagagtcggggtaggtgtgtcaataaaaatcaaacacgagtgttcccgagttatatcg

SEQ ID NO: 855 - DNA, 1820 bp, Arabidopsis thaliana landsberg
  unsure (1)..(1820): unsure at all n locations
tattattttaaatttacataaaattagaaaaatcaaaatatttttaaatagtcatttctacaatcttattctatcgtcgcaatatcaaagagacgttttctctttgaaaaaaactagaatcaaagattaatctaattcgttgagattcgggttgagattaactattttgctactaaaaataaaattagccatttttatgaattgataaatcttgagaaagacgatgagattcgggttgagattttgtcaaaaatagtttaatatgtgaaagatataatttcgaatagagagtttctcactacgaagaagaagttcatgaagaatttgatgttggcaaaagaggcaacaaagattgtttaccggtgattacgtaacgattaatagatgggattcgagttgagattagccattttgatactaagaaaaaaactaaatataaaattagccatttttatgaattgatcaggttgagatttggtgaaaaatagtttaattcgtgaaggatttaaattcgataagagagtttttcactccaaataataagtttatatcgaatttgatattggtaaaagaggacgacgaatattgtttactggccagtttaacatatttttgttttttttctaatttttatgttaaattttaaaataaaataataataataaaaatgaaattttaaatttttagacaccataaacgaattaagaaaaataatttttatctaaaattataaaattaatgtgttatcatctaaaaattaatagttaattgagatggtaaggttaaaattggaattttatttttgttgggagatcgagaatatgataataacaatatttaattgtttgggtattaaactgcacaattttattatttcgtgtatgtttcttcaaaccaaaaacatatggatattaaacgtccaaataaaaattagttgaggttttgttttgggttttttcccttaattaatatgaacctacattatattgttatgagagcatctaatagctctttccaacgagtatattaggaacacattttgttattttaggaacaaaaattcaacgttaaccataaaaataatacaatgacaaaactaatccaatgaactatcagctggcacattggttttataattatcacaagtttctacatttctttactatacttttaccattacaaattttcaaattaaggaaactgaatataataaaatgtttagcattcatccgcctaataagtttttttatatttttcttctttacatgtaaatcaatttatgtcgtaatatatatgttcattaatcataatcatatcaacagtgtataattaagcatacactaggtaattatattcagttttaattttcgtaattcatccgtttaaaaaatgttttagataaagtccaaaaattaaaatattataaaccatttctcatatattattgtttgggtctcggaaatggagagtaaataggctaccaatcccatattccaattcatacatatattctttgtggtagttttggatctttggtatttttcatttcagtttggatgattccaaataggttctcatcaagaatataatatagaatattaggcaatggggcacttttttgagtctcagttaggcaatggagcactggaagggagtacgcacttttttaagttgttttaccataaatccctaaaatctcaattaaacatagttactttcctctggttgaggaattnnatnatntttttnncagtcntcgtnnagtaaaatgccctgncgnnttgttcntcnctttgccctnagtgtgnnattattccggc

SEQ ID NO: 856 - DNA, 550 bp, Arabidopsis thaliana landsberg
agtagtgagagcagagcaagtgagcgagatgattcaagaagcatttattgctgtcattgtgatcattgaactgactacttggccacagcagtgagacgacacagtcatatgactccagcaatctacagttatggaacatttcattctttccgctttgaatgttatctatttttccattttcattctcagtttttggttgattagccgtttaacaccagtttctacttgagttatctctccattacattcaagttccatatatatgtttttgatactgatgtagtaaattgatatcaatgttttgagaagttgtatgataaaccctgactttaaattgcatcacataaaccatgacgttgaaattagaaaagcaagttggaaacaaacattcctgtaaatcaggacatgacccaaagtaagtaaagcatgagacagtttacttggttgtatcaatgagtctcataaccgcagttagataggggatgcgttggtcatctgaagctacaatatgatgctcccatcgtttttcaaccaatgaagagtgcggtcc

SEQ ID NO: 857 - DNA, 5092 bp, Arabidopsis thaliana landsberg
  unsure (1)..(5092): unsure at all n locations
gtccctcctgttgcttcgcatagccgaatcatacgaatgtaccatccggttcatcgaagcaacaacctggaaaagagaaaagttagctttataatgataacaccaagataggttataagcaacagaactcgtacccgcagaaaatgagatgcagtctcggcatacttccgagattccagaaaagtatctggaggaggaagcaagggaccaacacatcccccgagcagattagccgaggcagtacgatcttcaaagatggggagtattttctccgcctcggaaccagatgccttcttcttcctcttcttcttctttgacgactcatcgtcaacccgaatgcgcttacctgccgctttgtcactcgcaggcaacgccacaaccgcctcgggcgcagcagcggatggctcggctccctgagcctcagcgggcgtcacgtcaaccggcccggcagtatcgggattgaccccatctcgagacgcctcgggagcagtctgcggcgcgatagcatcgggaataaaattcccatcttgggtcgcctcaggatcggcccgcggcgatatcaatcccgtattaacaaggcgcctctcttccgccaatcgcctctccttgtcctctttcttcttggcatagacctcccgcaaagtaagtttcgtcgattgcatgtccacgaaaaattgagtgcgatgatcggaagactccgaactagtgggacaagaaacgccgtgaagaagacgaagcgcacgctcaactcgttccctagaaaaatgtttcagccaatcgcaccttcgagccgacaacgcgtgaaaagccgaaagaaaatcgtctggaatcggctcgagaaacttgagagtgcgttctgcaaaaggaaaactgcaattagagaacgaaattaacatcaccttgggtactaataaatttctaactacaactacccaaaattccccatctcgtcagaacagtcccgaggagatcttcatgaatagcatcttcaatggctacaaagaagaactgatcggtatatggctcgtctttgctcgggaacccatcgataattttctttcccttagcgggggaaatgtagtaccggtccgcttcggattttggcacccgcaagatctcgagaaaatttctcagatgagccagcgttatctccgtctcagactcgtaacttcgaatcaaaatcccgagcagatgtctcaaagaccgcatcgtgatctgcgagagggcgatctggtacgatgtcacgtactccaaaaccagcctcgggactggcaaccacaaaaaacaaccgtaaaagaatccctcatacagagtatagaagcccacggggggattatcggctcgctcatcggggctcggcacacgcaaggtgacctcaccaagaccgaatcgggccctcagatcctaaagggaccgctcggtgcataatgttgagccaaggggatccggcactatcgtcctcttactcttcttcttcttcttcttctcggctttctcaaaagccctatgctcgttgagacacagaatatcttccgtctcattcgggccgaaataaagaaagtcctcaatctttatcgtcggcattaagggctcaggcacgtctcgccagttggatgtcccggcttcgtcagccatcagggcaagggacctccggacgagagtcggcttgggattttcgggcaaatccagttccctagcaatatcggcattgatatcttcccgagccgtgaaagaggtcatctgctccggggcactcgaagaagacacaacatcatcttcagaggacgtccaaactgctcgccgtttgtagatggggggaaggtcatctggatgattcgagtcgctggaatcggcgaaagaggtgctcgggatcgaaaaagactggctagaactcattctcggttcggagatgctcgacgagatgagaacgaccagaaaacaaggaatttctaaaccggaaaaatcaaaaataacaatgaaacggcggagcttcaccggaaaaagagagaacaatagaaatatcaagatcagagagaagaaagcaaaccttgtttcttttcttcgaaancttcaaatgaaatctcgaaggaatggctccccatatataaagagtttttaaaggcgcgtcggatccgcagcaaacatttaaaacgcgttcaagctcgtgggctcgacagaaggaaaagattcgcgtgatcctcgggaatgagctagaaacgtttccacttctcaagaatagtcggcgacgcgcaacagaagtttgaccgtccgggaagatagagcgacagaattagaagacaagcagtcggctcggtaatccattcatgaagctcatcgtctctccactaagtcaatgagctggggggcaaactgttggggtcggattccacccaggtaaacgagccaaccatgtttaaacgcctcgggggatgtcaaagagttaccccgagccaggttacaaaacacctcggagatcacatcaagaatccatatcgaggcgacatcgagaacgcctcggagcattatcgcgaaatggtcccccgacccgacctcgaaacacctcggacataaacctagcaaatcatcccgaggcgggttccaagacgcctctggaatgcattttcgaatatcacggtccgagccgcccgagcacgacccaaggtcagctaaattccggctccgaagaactttggactaggtaagaaaaccttcaaaaaaaagggacttaaccaatataagatcaaacataccatttccgaaaactcggaagagatattagagaatcttcaaagatgtcaccggatacagaagttcccagaatctttggaagataaaaacaatctccttcgccaacttaaagataaagagagatcttccgggaatatcgcgagaagcgatattctcggaccctataaaaagcacctcagagaacaaacaaaagggatacgcacaaaaacgctctcaacttcaggctatcaaaaacgctctgactttgaaggcagaaacacttattttcatattctagcacacttgtacgatcaaatcattactttctcattaatataatcaagaacaccgtccgcggtaattgagaattctgttgttctttgagaatctcacaaagatccgttctttgaagaaacccttaaaataaattctattgtgcaactcagaagggaaattgccctcggacaaatggaaagctccgaaactcaaagctcagactgcacgtttcgttctagtagatgaaaaactttacaagtggcgattatccggacccttaatgacatgcgtggaaggagacgcggtttgcaagatcatgaaggaaattcacggtggctcgtgcgaaaatcattccgggggaagagctttatccattaaaataaaacggcacggattcttctggccgacaatgatcaaagactacgaaattttttcaaaacgatgcgaaatatgtcaaagactcttatcaccaatcgcctcgccgtatccattcatgcgatggtcaatggatatatttggacctatgcatccctcaaagcagaaaaagttagttctcgtcttgaccgactatttctctaagtggatagaggtcgaattttacgccagcataaaagacgctcaagtcgagaacttcgtgtggaaacatatccaatgtcgccacggaataccttatgagatcgtgacggataacggctcgcagtttatatcaacccgcttccaaggcttttgtgacaaatggggaatccgactttgcaagtcaacaccacgatatcctcaaggaaacggccaagccgaggccgccaacaaatcaatcctcgacggattgaaaaaacggctcgatgcgtaaataccgtagtcgaacttggattttgtatatatatacattttagaccggaccataatccggttaatcaataaaccggtctctgtccatattgcaatttcagggttgttgtccaaaagggtaagaagtgcactgtttctattactccttccgtcttccagcttcttacaacaacgcagcaagcctcagcttctcgtcctcaacctcgggattcgccgtcccgagcttctcgtcccttgtacccacaacatactcgaatatctcgatagcatcatctaacctgtaaggcaagtaaacacattgcttgtaccgcaggaaatcccaaaagacataacctagcaagaaaatgtgttttaagttccaaatttaccttcccattgcgtcgtatgttccggcgaggttactgtaaaccgctaatgtatcgggatggtacggtccatactctttctcaagaatagttttcgcttcttcaaacaaatctgcagcttcgttgatcttgaaaagctgaacgcaagctagtcccatctgattcaaagcaatcccgaaaagagcggtttttttctctccgctattgcggaactttgatatcgcgctcttgaatatgtcgtaggactcggagtaattccccatcatgtaagtaatcacacccatttgagcttcaatacctgcaatcgtgttctgttgacctggagcgtttgcatatatcttcaacgcccgtctcaacaacttaagagattgatcaagttcgttcattgactgatatatcgcagaaatctctataaaacctgtagcaacctcttccataggagttcccggagtcggttttaggtaaatcttaagagcgttttcgcagtacgatttggaatcgcgtgttttcccaatcttgttgtacaagtcagcaagcctaacgtaaaccaaagcaacagaggaatgagtctcaccttttgcttgcttaaacacagctaaagccttttggtatgcgaatatcgcttcatcaaaccgagatagagacatgtaagcatcaccaatactgcaatctacagcagcaacatcttctctatggttctgagatgacattgccatgctcgctaaaacataatgctcgagcgcaacttcataatcacctttcgcatcgcagataagtcccatcagttttctatccgcagcttccccaacagaagccgtagtagcagccccattaaagtaaaagaatgtccnatgccattcgacaaagccatgagtttt

SEQ ID NO: 858 - DNA, 1412 bp, Arabidopsis thaliana landsberg
  unsure (1)..(1412): unsure at all n locations
gccttctgatcttatccttcgcttggtcagttgcgagaactctaaaaaggccgaatcgaatggtaatgtgattggtccttccgttgggagaccgaaatcttcttcagatattttcaatagctcctggacaacagagttgctcagataacttattggaaaagcaaagcggattttatccgccgtgtagaccacgaaacaacccttttctacagtagaagagctgctagtaaagacacttgatctctgaaatgagattcttttcctgtggagggctgctctttgttgccatttcttagccatcttcataagcttctttgcgtttatcatcattttcagggagagttaaagcttgagattggaaagcaaggtgtggagaaagaaagagaaaagatacgtgagttctgtttgaagagctctttgaatgaaagttgtggttgatgaagagtaccaataagcttgtttcattatatagaaggagaaactattaggtttagacaagctcctgagcaatctaacccgacacaacacatgcttatgtttctgctctctaagggtctcaacttattaataaactatgtctgcaaatcaacttgtggactatacaacttcttcatgtgggtatgaatactttatgaacctttatatgacaagatttaggtactattatattgatggagaatgcaagaggctgctgttacagtatatacataatgagaacttatacattacaagagaagccaaaaattaccaaactcttgtatctgtacagatttgtttgttagcataaggggtccatcggctaaatcaaatgtttgtcacaaagataatagatgaagtacttattactcaggggacaacaaatcttttggtgaaatcaaggacaacaaatgtggttagaagtaatgatcaattagatacaaaagaaaggcatgtgctgatgaagcaaggatgaagagcatgtaggtccataaaatacagctacaatttctggtaaaatttcatatgttcttgtgtagtctatgagaaacttgatgtaaggtaattcgtagtgaaaggcgttttactcccgctgcatcccttttcttgaaagatagtatcagagtatatatgtcttcaaagaaggagatatgttttagtgaaatgggtcaaagattgttcttaagaccttaggctgaaactgcgagaacatgtgacattgaagttaaatttatatgagacaatctaaacgagtgagagagagacaaatatatagtagtttgtatttttgaaatgatctgtctatctaatacagtataattttntacagaggaaaaaatgtctacactctaattctctaaaatacaagtaaattgttgggtataaccactctgttgttcttgtgggtgcatagagcatctagcactagagattga

SEQ ID NO: 859 - DNA, 1390 bp, Arabidopsis thaliana landsberg
ggtgaaagtattcatcaaccaaagaagaaacatttttctttcttcactcgctaccgaaggaagagagagggagggagggagatggctacgtcaggaacatatgcgacggaggttcctttgaaaggatcagcggataaacactacaagcggtggaggaatgagaaccaccttttccccgacgccatcggccaccacatccaaggtgtcaccgtccacgacggcgaatgggactcccatggagccatcaagatttggaactacacattaggtaaaaaatgtatttacgtacttccgttaattacatataacccacgtctgaaaactagggttatgatgattatcacataaaaaatgataaaatttagttttaccaattaatgtgtcataagtataaaaagaaatcatttatcaaacgttttgaccatatgtaaagtctatggaacaaaccatatacgtaatctttccatttaaagcattcatcggaagtataatctttgtggaagaatctcttaaaccttgaaattagttgggtgatacattacataaacccaaacatataaatgtagatgggaaaccggagatgttcaaggagaggagagagatagacgatgaaaacatggcggtaacgttcgttggactagaaggtcacgtgatggagcagcttaaagtgtatgataccattttacagttcattcaaaagtccccggatgatatcgtttgcaagatcactatgacctgggagaagcgagccgatgactcgcctgaacccagcaactacatgaagttggtcaagagtctcgctgctgacatggacgcccacgttctcaaagcctaatccctctcacctaaacccatcatcatcgtgtgtgtaactttgtatgatgttttcaatataataaatgggggtttgcatgtatggtttcatctactgtaatatgctttgatgttgtttataataattaatgatttaaagagtaattaatcaatattgtcctaaatagtgtttcactatatattgtacttagtggttgtattatccatcattttatatgttcatttaatggttgtattattgctctcttttttcgttgacatctttttattttattgtattttatataatctttgtattctttgcacatctagtgatgccttcagccaccaacgccaaaattctcacccgtataactaagttccctggtgcaactactatctaggactacatgcctatcaaccggctaccgctgcaataccatattaccatctacgaagttatctctcaggttctggtttcaaggcttggttgtattatattcatcaatcattgtttttctaactgcatgttctttcttcttgagtactgtctcattattaattggaagtatataca

SEQ ID NO: 860 - DNA, 1646 bp, Arabidopsis thaliana landsberg
taatttgactctcagttttatgggttgttgcaagacgagtttggcttttgtgtgattctgattgtaaagtgagagtgaagtgagtaaagtgtttaagtgttgtgtgatcgttaagtctccttggctttacagttgtttcataaatatgtcttcttgttccttgttatttgttgcgtaagtattaggatttgtttcataaatgtctcttctttttttggtcatcttaagattgccattgccactttggatcagtttctatgggtttttgagaaaggtagtttttgatgttttttttatgtgtagctaagagtgtaagactgattagaacgagattaaagaatgaaaataaagttcactttgagaaatttcggttttgttatttctgtcctctagcactagtgttaataagcaactacttgagacattatctagaacagaacatcggtagtgatgtgaaagagatcgttgatgaagtatcatgtagattatattacaggttgtaactttgagtgtctgtacttaggatttgatagtaaagtgaaggtgaagtatttgaatcgagtgttgtgtgaatgttaaatctcgttgactttactgttgctttataaatctctaatagaaagtttgctttatatgaattttatagactatgttgtgtattgatgattttggcaggtgcataatgtctgaacacaatctaatggctcagtctatgattacaatgtctcctactagatatgggaaataagattgcaaaataagaggatcaatcaacaatcattcaaaatttagttatttgaagactgttaaagaaatcctctctgactcgttattcactaggctgaaaactatttttcttggccctatcatcaaagaggtttaggaaaagtagttggtaataaaaaaaagagttgattgcttgggttttttggtcagttggttcactttctggtagtaaaacagctcgtgccgtcaaggaaagacgagatgtggttttgcatcaacaacaagccgatgagattctcattgatgagtttcatcttgtcacgggattaccatgctggataaaagaggataaagtcccaatagattttgagtgtgattggcctttgttgcctgacaaactccctatcaaggtggatgatttgatagcataactgaaggtcttggatgatgaggaatgcaaggtacaacttgttatgttgattgttattttgatcgtcttcatgctgccatatggcattacaaaatactcggtttcgaaagattatttggccaatgcgaaaagaatatccatgcgtatccctagggaaaagatgcatttgatatgctggtgtcgtcggtaaaagatgatgataagaagaaaaatgttacgaagattgatgttaaagggtttcccatggcattgcagctatggctgttgggatttgtgtcagaattagaagtggcttatgctcggctcgatgataaatcagaccgttttcttgtttgtgcaaggtatttatctactgttcagccttcttatgaacaaatcatgagtaagagagaagatcttgaggtaatcatgaagaagaagatgatgatgttcttatgcacttgttaaagagtgattacctaattctttcgattagattggaatgagatgt

SEQ ID NO: 861 - DNA, 639 bp, Arabidopsis thaliana landsberg
  unsure (1)..(639): unsure at all n locations
attgtgttcagacattatgcacctgccaaaatcatcaatacacaacatagtctataaaattcatataaagcaaactttctattagagatttataaagcaacagtaaagtcaacgagatttaacattcacacaacactcgattcaaatacttcaccttcactttactatcaaatcctaagtacagacactcaaagttacaacctgtaatataatctacatgatacttcatcaacgatctctttcacatcactaccaacgatctcaagtagttgtttattaacactagtgctagaggacaaaaataaccaaaccaaaatttctcaaagtaaactttattttcaatctttaatatcgttctaatcagtcttagactcttagctacacataaaaagcatgaaagactacctttctttgagtcattttacatatgcgaagatcagctatagaactgtgtggagttcataaacccataaaaactgatccaaagtggcaatggcaatcttaagatgacgaaaaaagaagagagatttatgacacanatcttaatacttacgcaacaaatcacanggaacangaacanagatttaaatgaaacaacagtaaagccaacgagacttacattcaaccacactcaacact

SEQ ID NO: 862 - DNA, 1628 bp, Arabidopsis thaliana landsberg
tttgttttgtcattctccctcaacaacaatgcccgtcaagtggtaagctttgatccaatttcgttttccaaaatctttatttttttcgtttctgttctgattactcttccgattcttgtatttgggttttgtttttttctagggttttacattggcaaccaaaccaaggatcaacagtaagcagccaaatcctaaacgaagcaacacaatgtgtagagagcatcaatggtgtgaaagaaggaagatggaaagcaacactcaactattacaaacccatgttaaaagaccaagcgaatcaattggagtttcctcgtgattttctagggatttcacttgcggatcagccgaataagtactatttcattatcaggacgcagaggattgtcttggaagctgattcttcgattcagttgattatggagaagcttcagtcttataaatctaaagtggctctttactttgatgggtttcagtatcagcttggtgattttaggtcgagagttggtaaagttgttcctactcattctgagaatgttagaggcattgtcatggaggtaaacaaagtttccagctttttcttgtttaagacagatatgatgaacactgaacagtggtgattaattttaaagatgaaaatcttgtttttctacagatttttcttgttaaaagagtttcttgtaatatcttttagtgatgatccttgatgctgtttatgatgttaagacagatgatgaaaattgaacattgttgattgttgactatgcatctacaagtttctttagtcttgtttcgtgtaatcacaatgatgatgaaaaaatccttgttttcttaaatccctatagtctcaatgctaatctaatcacctaaagggtatatggagctgttcccttttggtgattgtcttgtttcttgtaatctcaattttgagtttgtgtgttgttacttgcaggtggagtatcttcctatatcatcaatggaaaaggcacaaaaggtgatggaggagttcttggagatatggaatgaagctctggctaaaaggtcgttgccgcgtaagtttgtgaacatagatcttaactttggggagtttggacttggagacaactacactccacaacacacagctgttcgtaattacgctctcgttatggctcacatgattgctaccgttcaagctgtgagtggctaaaccaaaactcagctttgtatttaggtataattctgtgttttgcgttattagtgatttcgttagccatgtttatctataagaagcattgagaaaaaaaattggacttttatagcagattgtgatttgaatttcgattaattatgtaactcattggcatattctttcattaaaacctatctatgtcgtatgcttttaattaaaaacggacaaataaatagataactataaaaaggtcaaaaagagactctctagggtttgtttcttcaattccacaatgcagaacaattggtgggactgaaagaaaccaaagtgaagaagaatcataacccaccaaaaaattgttctgtgctctgttcccaaagatagcatcttgtggtggattattacatataatagccagacaaaaggttcctctcgtaatcgtttcgatatacatgttata

SEQ ID NO: 863 - DNA, 1181 bp, Arabidopsis thaliana landsberg
cgcaataataagggccagtagtaacccatccatttagttggtttggttttgttaatgaaaaaggacctttcgtttattggtcttgttgtttttcaaatggacagtccctggatgataagtatccggagcccccgctgttaccaagttgactaccataaacgggcggtaaattaccaggtttcttcgatcctttgtcttcagatgatgatgtcttgccatcatctgcaaaaccatgtagttaagtccaaatgtagtgaacattatcagctttagattgcgagtgtgatcgttgttcttattttgtatatttcaggcgacgagtattgtcatgtctggtatacagcctcatcaaaatatggctctttttgtgagaagatgagattaatgtaatggattctactaatggaggttctataacaaagcaaacatagttacattttgtcattttttttaacagaggtatctcgaggacaagataaatgctgaggagaaaactgcttggattactaatgctatcacaaaaggattcacaggtatgatatctctaatctacctatacgtaatcaagaaccaagacatatgttcaaaatgtgattttgttgatattgtggttgtacaggtttataacgacctgtctgataatgtctcatatgtccttcagctctcgagaaactgttggtgagttgcgctggaaaatacgcgactggtgatgaagtttacttggtatgtctctaaatctccctggataatctctatggtactactctcttctttattacaatgaagcattgttttgcaggctgatctttttctagcaccacagatccacgcagcattcaacagattccatattaacatggtacttttcctcagctaatctcttctcctggtacctagatattgcattgtatatccccccaaattccatggaatccttgatcagagttttaaggtagcatgaaccaaatgttatctctgtctcacactttcacattcacagagtaacatagacgtaatactcagtttcataactttttttcctcgcatcacttggttttcatctctacaattttgttgtataggaaccattcccgactcttgcaaggttttacgagtcatacaacgaactgcctgcatttcaaaatgcagtcccggagaagcagccagatactccttccacc

SEQ ID NO: 864 - DNA, 546 bp, Arabidopsis thaliana landsberg
ccatccggtttggattgaacgtatttcgccatataacgggtttaaacacagatttcttgcctaaagaaaagtttgagtctgaagcgggctacaaagcgttcttcagggaattgggtgtgccaaccggtgaaggtcctaagttagaagaacttaggcaaggcttagtaatgtgtagagcatggcctcatgaaaagcgtagatggttagggttattgactcttctagccattgaactttatggcttgcatcctaactctaggataccatttgagagtgccaaaagagtttctgatgacgaagccatgaagactaatccatcggtcgggcagcatttgaagccattgtcatttctataaagttgccgaggtctattggcaagacgtacaccatcagttctgttttttttgtcaactatgttatgtgacggcttagttatgttctttgatggttaagttatgttctttgatggctaagtatgttatggtttttgtcaaatatgttatatgacggctgagtatgttctcttttttttgtcaaatatgttat

SEQ ID NO: 865 - DNA, 566 bp, Arabidopsis thaliana landsberg
  unsure (1)..(566): unsure at all n locations
tctaattgccaccgcaacagagactctcaagctaacctagtcccagactcaatcaccattgacgagagctaacctaacaggcattacgaatcaacaagttaaagccaaaacgctccttgcaaccaataccttggtacatggtcacgaatctctnnnnnnnnnnnnnnnnnnnnnnnnnnnnnnnnnnnnnnnnnnnnnnnnngtctgggctcaaattccagttgatcagaaacaactaatccagaagggatctatcaatcaatactcaatcacctagcatactgagaattctacactactctaacccatcctcagaaacctattcactactcagacatcataatagaaagcataaacgttgaacaggttgaagacatgataacaatagtgtaacagtagtgtgataacagaatgaacaacagtaaacgaaaatcaagaaccaaagctgaatactgaatagataaagagaaatccggattacaaaaagtctagagcacaaggtctgcggaaataaaaactaggtaaaaacttcttgtctgcgaaaatgaaaagttcatgctacttat

SEQ ID NO: 866 - DNA, 880 bp, Arabidopsis thaliana landsberg
ctacctcttcttttcctttacttcctccagtttacgctccaaccaatccaccttaaagccagaattttcgaggtatgttagtgcttgctctgcttggcccaggtcatcaatggaaaggtcttgcagtgactggcacatcgtctcgattatgttaaggaggagatttatggatgatgtcctcatacgttggttctttgctcggaactttagtgccatttctgggtgtttttcgaatatatgtttcagagattccgcctgcagttgtaaaaaaaaagatggataaagtataaactcatgtatagttgtatacatatccacaaactgaatggttagattataaagatgccatttattccctacattgtcttagtgttctactgataatttctaaacagaaaaagagaccacctctaatccaaagtcagcaacaacaaagaaggaaatggtaagactcataagtttgaaaccgatagttataaaatcagttcctatctaaaaagtttaaatctttatgaacttgttacctgtgaaggaagaactagaaacccattgacatcaatgctttcttttacggaagcaccatcatcatttagctttatccttttcataggttggtttacctctagagattcctcagagacatctaagttgccaataacttgaagaacatcaacctccacaacaatcttgacttcattgttcacaagaaatccacctttcttggcaataagtttggtaaggagaagcatttgatacccagagagaaaaagtttttgatcaaaccatttttccatttctgtagacaaagaaaagatagaactgatctaactcaaaacaaacacaagccgacataaattgaaatcacaaaaataggaacttt

SEQ ID NO: 867 - DNA, 1372 bp, Arabidopsis thaliana landsberg
atcttttgtttcttgtctatgtgctcgttcaaattgactttttcacattgcacaactgtcgtttgggcctttgtgctgccttaattttcttttgttaaattattcaaaaacagaaacctaaaagaactcttcaaaatctgtttatcatcacaaattcagttcttgattactcaagaaaacaacaccaattgagatctcatgcttaacaagtcttttacaacataaccaaaaatcatactgatacattctgaagtaaactttaaagcaatagaaaaaatcatttttgtctcttacaaagttaatcaacgaggatctaactccgtaattgtaacatcattcaaagacgcaatacgcgggtttcttgtatgattgttgtctcttgacgatgagtctacaactcctgagtaaaaagcgggttgcaagggtctcggtaaagtgaaagaatttgcattgagcattctaacaatagaagccattgttggtctactccctggattctcctgaacacacaacaaaccaatgtgaatgcatttcctgatctcatcacttagacctcttgtttcaatcaaacttggatccacaatgttcaacacttctccttctctccagcatttccacacctatacatgagttgaatatatgtcaaagtcgttcatttttgcaactttatcattcacgtccaaaaatgcagaataatcatatgaaataaaaataatacacaatatagcttttttcgctattaccaaattttaaaattttgataaataatatatcaaattgaatctcttgagatgaagatttcaactatatctgaaaacatctacaatatatgtaaagttgcaaaaatcggctatattgcgtattaattttgacttcatatgattattttgtatatttttttattttggacgtagagagtaaaattgtaaaaatagaagactttgagagtttatttgcataaaaatcaaaattacacaataatatttttcacttacatagctaaggaggaataatgagctttgttcttccggagaccaattgtttttcttacctttaatgatctcaaggactagtacaccgaaactaaatacgtcggttttcaccgagaattgcccactcattgcatactcaggagccatgtaaccgctgcaacgacccaaaaaaatggtttttaaaaatcttttttcatagaattggtagtactataagggtactttttgggcagcttactaagttcctgcaactttgcttgtaaacatggtctgacttgtttggtcagtattaaacaattttgccatcccaaaatctgagattttcggattcattgcatcgtccaatagaacattgctagctttcatatctcatacgtttt

SEQ ID NO: 868 - DNA, 1556 bp, Arabidopsis thaliana landsberg
agactagatgcagaaattcagagattacaacagcatgtacaagaagcgggtaaagatgtatcactttggagatcttagggaaatgatttcagaaaccagtttataactaaagtcacctgtaataatgttagattgcctcaaccacagagaagctggtacaagggcgtttggttcccctactccacgcccaagtactccttcattttgtggctcgcaatacacaacagactttcaaccggagatcgcatcaaaacatggaactccggtcaacaagtcgcatgcaatttctgcaacgatgccgaggaaacaaggaatcatctctttttttcctgcaggtattcctctgaggtttgggaaaatttggctcaacgcctcctctccactgactactcgagtgactggaatcatctaattgccaaagaatctgctcttcctgttccggtatgtctttcaagcttccatctcccatatttggtgagagagaaatgcaagacgtcatggggaactcagcttaccatcaaacaggctcatcaagctcattgataagactgtccgcaatagaatcagttcaatacgagacaccggaaaccatagctacaacacatgcctgcagttatggttctccacacggccacgctcatctctgcaacttctctaaagtctcctctgtttttgtaccttctgcttttgcaatttcagcttttgtatcctctgtttttcttttaaaacactcaacacacggttgcattcattgtacaaaggattttgattgaataaaattttacattctttcaaaaaaaaagaaccggacacctttttcacgcggtcgaaagcaccatcatctcaatggctacctgtatcaccaccactaggacctttgcattccaatttaggaggagaaagagttgtgaaatatgctccaagagagtttagattcttctcagcatatccatgaaacccgataatcttctttccattggctgcaagggaaaatttcctacctctgttgtctcccatcaattcagaagtcctgatattagttttgaattgaattccttgaatgaccccggattccccttcgtcatagtagccttcaacagaaatcaaatattccttgtcgagatggttaatctcaaactgcaaaaaaaaaaaaaagaaaaaaagaagtagagttaatgaaacaataactggattaacagctaataataagcctgttgaatcaaattttaagtcacacataccagctctgtaaaacctctacccctaacaccatggggtgacccatatatttgttgcccatccttgatataatcgaatttgacgtactgtaaaccctcataaccacctcgtacatatatttttgtaatacctttatggtcggctccatcgttccactccttgcctacttttccaccttttgctttcaatttagttggaacaatccaagtaacgtatgctccaagagagttaaggtatgtgttgtatgctctcggaaatccgatggtcttctttactcccacagctagtggaatcttattagctccactgcttgcata

SEQ ID NO: 869 - DNA, 482 bp, Arabidopsis thaliana landsberg
atcaattaaccttcatgttgatgctatggaatccattttaatttaaaacttgtagaggtaaaccggggtagcaatctttgcaccctcttcagctccacataggtaaccaccagagtattccgatggtaaatgtcgtttttgcgaacaaaatatttatgataaattcttttatcattgttctgcatgtaacttcagcttggataagcgttggtttttaaacccaccagcacaatctcttatggatttgaagattcatgctcaccaactcatctttcgcccaagacttgattcttttacatgtaatgcttgattatatatgtgttcaatgtgatttcatgatacatcaaaagtgtctttcccttccacgcctcattaacatcaatcgacatgatcaccgtgtttcacgcacttctgtttggtgttgagaattctgtatgtggagtatgtcatcggaaggtggattggacttggggtgggtattc

SEQ ID NO: 870 - DNA, 706 bp, Arabidopsis thaliana landsberg
aacctttaaagatgaactctgcgttcactcatatcttggaatcgttttatcttcgattcgtttgtaacagtgttaagggctggcttttcaataaaacaaacaagacattcatcgcggaaaaacatctttcgacagttgccgttgcaacaggaagaatcaaagatacctttagaagacgatataccaaaggatgtgaaagatgctttcttgtctctaccatcacacgagcaagatcaccaagacactttaaatctgtaaacctttcatcgtttttcacattatcaaggtagatctcaagttgatgatcaagagatctacgctccacaaaactaaagtcatctggataaaactcggtcaatctcacgagcatggacttatcaaactgacgaaaagaatctatcggactcaaagatgacatgcaaataagtagttcagaattcacctcatcaaagcggtcattaaacttttgaagttgcatatctaagacagtgtagaaacaatccaccttatagtgatgcaagttggttataccggtctttttccttggtcttctagaatcaacaaattcttcctccagtttaagcattccagtgttatttttctcgctaaagaactaacttcagctataaaagcatcccatccatcgtctctaaccttttgcaactgacatttagtagttctcaccaatgaaatagcatttaagata

SEQ ID NO: 871 - DNA, 2864 bp, Arabidopsis thaliana landsberg
gtaaggtatgccactacgaagaaataactattggtcatggtctttgcattcgaaaagtttaggagctacctggtaggctctaaagtgacagtttacactgataatgctcctctaaggcacatctatgcaaaggaagataccaagccgaggttgctgagatggattttgctgctccaagaattcgatatggagatagtggataaaaaggggattgaaaatggtgtagctaatcacttatcgcgaatgagaattgaagatgcagtccctattgacgacaccatgcctgaggaacagcttatggccatccgggaagtgaacaaaaaattcaaaagcagccagttttgggatgagatgctcgcagtagaggagaaacttccgtggtacgctgattatgtcaactacttggcatgtggtgaagagcctccgaatctgtcagggtacgaaagaaagaagttcttcaaagacataaatcgcttctactgggatgagccatacctctacactctctgcaaagataaaatctataggaggtgtgtctcagaagatgaaatagacggtatcttgcagcactgtcatggttctagctatggcggccatttcgcaacgttcaagacagtatctaaaatcctacaagcaggattttggtggccaaccatgtttaaagacgctcgtcagagaaggggaaacattagcagaagaaatgagatgccccagaacccgattttagaggttgagattttcgacgtatggggaattgatttcatgggtccgtttccgtcctcgtatgggaataagtatatattggttgcagtagactatgtgtcaaaatggatggaagcaatagccaatcctacgaatgatgctaggatcgtcctgaagttattcaagagcatcatcttcccaagatttagagttcctagaatagtcattagtgatggaggcacgcactttgtcaacaaagttttcgagagtctattgagaaagaatggggttaaacacaaggtagcgactccttaccatccacagacaagtggccaggtagaaatctctaatagggagataaaatcaattctagagaaaactgtcgggatcaccaggagagattggtctgtaaagctcgacgatgcgttatgggcatacagaacagctttcaagacccccattggtacaaccccgttcaatcttctttatggtaaatcctgtcacttacctattgaactggagtacaaagctatatgggcagtgaaacttttaaatttcgacatcaagactgctgaagagaaaagattgatacagctgaacgaccttgatgagctccgtctaaaagcatatgagagctctaaaatttacaaggaaaggacaaagtcgtttcatgacaagaaaataacttcaaaagattttaaagttggtgatcaagtcttgctattcaattctcgcttgaagctttttccttgaaaactcaagtctaggtggtctggccccttcagtgtcactgaagtaagaccatatggagctatcacgttgtctggaaaaggtgacgacttcacggttaacggccaaagactaaagaaatatatggcagaccaaacaattctagaaggaacttctgttccactggaagagccgcccaacgcccaataagcgtgaggagtcaagctagagactctaaacaagctcacttgggaggaaatcccatgactatctttgtatataattttaactttcttattgttttctaactcactttggtggtgttttaatctcaggaaagtaagcgacaaaaatcaactacagggtgaatagtgatttacagtgtgaatagtgatatacaaggtgaatagtggagtcactcgatcacgaagttaagacggttttcatactttgcgatcgagtggtttatttcccgggaagtaatagttcaaaaattttgataatggagctgaacgaaggaacgaaaacgtggagtgacccgttcaaatccaacgcgtgatcgagtacatggagtgggcgaaatcaggccatcacttcccaatgacgaaaccggtgaagcccaccttgtcccccatgacaaaaatgtcaacaaatcaatagttctcaccacccacctctcatcacgtttttgccaagggaagagctcccctcacctacctaaggggcgcatctacctcctcctcttcctataaattccaagctcctcatccaatgttaatcacacctcacaacaacatctccttctctctcatactcgatcacaagcttctctctctttaagagctgccttcactcgatcacaagtctctccatcctttgaagcttacttcactagatcgcaagctcccgacgcctcgcctttcactcgatcacaacaccgtgaagctcaaccgcctcaagcatctcacttagacgatctcaagccatcctcatcaagttcactcgatcgcaagctcccaagacccggctcttacctctttcactcgatcgcaagctcccaagacgtctccacgtttgtttctctccctcacttactcgatcacaaccactccaagctcctgtccacctcttttactcgatcacagtattgctgaagttcaggaagtcacttctctcacttctcctccttagatttgataactaacattccggggcagagggaagaggtcaatgacggaaaattatgagctaattgatgaagagatggaagatgatgcggagtacattccggggcaaacccacaaaaccaccaagtccttgatgaaagaagacaagctgaccccgggagactactacaaggctctcaaaagaaatccgttttagagaacaagatatcctcacccggagacaatggcggagttaggcatcctgga

SEQ ID NO: 872 - DNA, 1788 bp, Arabidopsis thaliana landsberg
atctaatatagaattgtgtagtacgtataagacttcttattgcatatagaacttcccaccattagtacataacaaatattaaataggtagagctattaaaacgtttctaaaactaacattaatcagaatcaaacatttacaatattttagaaactcatgcaatacaaagtgagccgccccatgtggttttaaatattaaccttaatgtccttataccgattacaaccttaaaaatgtcacaagttgtaacatataaaaagaaaaaaatgttaaaaaaaatcccaaactttaaaatttgagacaatttagtcttgaatttcacgaaagacaaataaatcgtaaaatttttgttaaatttcgaaataaatgataaatttattgttgtcatttaagtcatgtgattaaatatgttaacaaaaactttttacagcgttaatgtctcgtttatttgctctgttaaaacaaaacaacatcgtctacttcaaaattaaatcatcctaaatttgaaaattcgtgatttttttgacatttttccctatatagaactgatttcttctcttttatttattctataacgtagtgacttttgttttactaaaaaagaagttttttaaaaaactttatcatattataattatattattaaatagattaaataaaaaaaactttaaatttgacaaatatgaatgttacgcttacgtcatattgtgaaaaagagaaaggtacaaaatgggcaaaaatagtcaacaaagaacagcttctccgactttcgtagcctttaaaaaagcatccgcgtttgcttttctataaatatcttcgaaaccccattactctcaaatccaaccaacctttcaaaacagaacacgaagacatggaccgaacacaatctccaaagacagctctgttcgccgtgttggcaacactccttgtcttaaccgtgaacggccagtcactttgtaagacacacaggttcaccaataacctcgccttcgcagattgctctgacctctcggccttaggctctttccttcactggacctacaatgaacaaaacggtaccgtctcaatcgcctatcgccaccctggaacctctgcttcttcttgggttgcttggggacttaacccaagtagtactcagatggttgggacgcaagctctcgtagccttcacaaacacaacaactaaccaattccaggcctatacctcttccgtgagttcctatggtacgcggctcgaacgtagtagcctaagtttcggtgtgagtggcctctccgcgactctggtcagtggcgaggttacgatctttgcaactcttgagttgtctccgaatctgatcacggccaaccagctttggcaggtgggacctgttgtcaacggtgttcctgcgagtcatcaaacctcaggagataatatgagatcgagtggtaggattgatttccggactggtcaggcatcagctggtggtggtggttccggtgacaggctgaggaagagaaacgtaagtccaagtctttctctattaaaaatttatactactactactttggcaactttctaaaattaccacaaatttaagccttatgagaagtttctttaaagtgaagtaagagttactaaatcatttggaacccactgttttttttttaacatttagtattcttctagaatttctgctctattgatatctaaatatttgatgataatttaaaatatatatagtattctgagaattttataataatttattgaaaatatctaaaactagcaaataaatgctttaagaataat

SEQ ID NO: 873 - DNA, 551 bp, Arabidopsis thaliana landsberg
cctactgtcgagcagtcatacatactcgactctttatggttcagtaacgattcccatagtcgttcttcttcaatctcttggcgagacatctacaaccaacatccaagggtaaaacctaacctatctaacctaattgccaaggacgtaccggtttcctaatttgcctttgcgactcatttgactcgataaaacatttgaaaacacgtgtcccttacgagcatgatgaaccatactttaataccaccttgtaacacccctatccctgacgcccgtagtcagccaacctaggctcccgaaacgaatccgttcgcccaagtcgtccgaccgcgagtgtcgttcctcacgaacgcggcctaaggatttgcaacccatactgcgatacgtgagttgtgatagtccggacaggactaattataccatgggagacacgagggtttattaaatcagagctttattacttatcggtaatcgagtcttactaacatatatataaattataatctcttacaaaggcaaggaaatctacaccgttggcctaacgtcctttgtac

SEQ ID NO: 874 - DNA, 462 bp, Arabidopsis thaliana landsberg
tgcgctatggcagaacgctcgtacaccatgaaggacggaatttctccggagcccacaattatcttgtttatatacatcgaggccgaggacgaggccggaaccgaggtcgcggacgagattcctacatctggacgaaggaccaacccgcgggaaacgaacagaatattgcgaattacataagagttacggcgatcatacttccaaatgtcgtagcctccgggcgaagttggcagctaagttcctagccggagaaatcggtggaggcataaccatcgacgacttagaagcggagaaagccaaaaccgagcaggtcaatgctatggaaaaatcccgagcaggcagcctccgcggcgaacatcgaaggacccaagagaggcagaggcaatcgcgagcttatcagaggctgctcggggaaggatcttcatacttttaggagattcagctttctgtcaagttacaacg

SEQ ID NO: 875 - DNA, 1184 bp, Arabidopsis thaliana landsberg
tgaagatgagacaatacaattcctctccacactacaagtagagctctaccaaggtatgatctctgatgagttggattgtgaaggattgggattcttgcgattttctgtgtatggtcatgagtataggttatcaatcaagcgattggaaggattgtttggcttccccagtggaacgggaactaagccaaagtatgaaagagaagagctgaaagacttgtggatcaccattggcagctctgtaccgttgaatgcttccaggtcaaagagcaatcagatacgcagccgtgtcatcaggtacttccagcgttctgtagccaacgtactctactcccgagagattacagggactgtcactaactctgatatggagatgatcgcaatggccctcaagggaactcttcgccaaactaagaatggtatgcccctccagggtgaaatcaatgacacacccctagctctacttcttctgatccatttgtgtggatacaagagttgggctgtcaccaataaccgcaagagagcacgaggcgctctgtgcataggtggcgttgtgacaccgattctgatagcttgtggagtcccactcatttccgctggactcgagccgcgagcaatggatatcgagcacctacgtcactgcgaattcctggagtttgcaatggttgacgatctccacaggttcaggtttgagcactctatagacaggagagctaacatccttctccctagccctgaggtcacacggataatagagggagataacattgattttaggcctgagattggacgcctctactatgagaatgctccgccattagatgaggatgatcttcttgaagaagctgcctcggatgggatggatgaagatagggcagggaagttcgacctgcgcacaggcctgagcttagcgagcagagagtcccacatgtccaggctaggcattcgtcattcgaatcccgggaacacgagagaagaaggaaggctacactgactcgatctagcagcagatcacgcctcactcactcgaggagatcactcgactgcggtctggccgcagcagaaggagagaggtcgagtttcctcagagcggtctggccgccacagagctgatgaggtcgagtacccacctgctggagctgatacagaacaaggaggttcgtctatggcctgggagcaatcgcagg

SEQ ID NO: 876 - DNA, 561 bp, Arabidopsis thaliana landsberg
tcagacaagattgtctgcgttaggacaatgaccaaatttttgatgaactattcacgttttgcactaattacttacctaaacaaaaatattattttgcactaccctcataaattgcacacattaatcccttgaatctctactaatccgaacaaccaaataactaaccatatctttacttactttatttcaaaatctctaaatatttactacactcttaccaaatattcgtatttcgatatcacatttctataagttaaacgattattaatcatgcattaattccataaaccttaaaagaaccctttatttatcatataatcttacatatagtatagtcaatatatttttacacattctacaaatcatcatcaattcaaaattctaatatatcacctcgccaattaaatttcgccaactataatattattcaaattgttatttattattgccttccaaaaaatttatccgatcgaatcatatattctctccacaatcattcatagcaattaggtttcctgatttacctatatcaccttaactacaaaatttttaagtatttgc

SEQ ID NO: 877 - DNA, 3800 bp, Arabidopsis thaliana landsberg
ataaaaagccagagatctcatttctgagtcttacagttctggcgttggagaagaactttgatagaaaagtccttcttgcaatcatcccaggtggtgattgagtcatgaggcagattcttctcccagatgtgtgctttgttgcccaaggagaatgggaacaaacggagcttgaatccgtttttactgacaccattgatttttgttaggttgcagagcctatcgaattcatcaaggtggtcgagtagatcctccattggcagaccatggaatttgttaccctgaatcatcgagatgagaccactcttaatctcgaaattgttgttctggttagctggaggtacaatccctttcctctgatggtgattccttggtgcatctcgagcaccaatgtttgtgggtagattctggtcatcttgatcatcagccattctgaatcaaacacaaagttagtaactgaagtaaaaattgaaatagaacttgatctaagtaaatctgaaatcttaaatgtaacaaacaaacacccaaatggcaacggcgccaaattgataataggtttttagtcaattatcctaaaacaccaatcatatcgttgtagtattttaggttgtcaatccaaatgggtgtgatgctagcaatcaagatgtgatcagaagtcactaagtcaagccaagcataacaggttttggtgtgttccagcagtcctaagtgaacatgcagaaaacagaaaatcaaacagaaacagtaaaacactcgaccaacacagctctttgcagagcactgggtgaggtcgagtaacagacagaaaatgaaacagggatactcgactgcacagtctgttgccagacaactgggtggtcgagtatcaggtcgagtaacagtaaagatttgcagaaactaaacaacagatgacaggatgcagtaaacagtagtagagtaaacaataaaatcaatcagataaagaattcttaaggatgggataattgagtagtttcgtttcctcagtttacaggtgattgacatgctcaataaattaaccctagacaacaagttcattaaccaaatctaagtgccaccgcaacagagactctcaagctaacctagtcccagactcaatcaccattgacgagagctaacctaacaggcattacgaatcaacaagttaaagccaaaacgctccctgcaactaataccttggtacagggtcacaaatctctggaattagtggttcagacatttcatcgaacaccttttgggcgcggaaatgtctgggctcaaattccagttgatcagaaagcaataaacattaagaacaactaatccagaagggatctatcaatcgatactcaatcacctagcatactaagaattctacactactctaacccatcctcagaaacctattcactactcagacatcataacaaaaagcataaatgttgaacaggttgaagacatgataacagtagtgtaacagcaggatgatataagaatgaacaacagtaaacgaaaatcaagaacaaaagctgaatactaaatactgaatagataaagagaaatccggattacaaaaggtctagaacacaaggtctgcggaataaaactagataaaaacttcttgtctgcgcaaatgtgaagtacatgctacttatagccaaatatttcgaaaccctaatactcaaaacgacgaagtatgaggacggattaagaactgtactcgacccatgtggtcgagtgggaggtcgagtgcgaggtcgagtgaatagctggagtcttcttttcttccttgtgctcgagtgtctagttgagtgcagaatgaagaagactctgaagcttgcaatcgagtatgtagtcgagtggtggtgatggtaatactcgacttcaaggttgagtgatgtggtcgagtagtggtctggtaatggaggtgaagacactcgacctcgtggtcgagtgatgtgatcgagtggtggtcagaagatggagatgaagtcactcgaccagggggtcgagtgatgtggtcgagtggtggtcagaagatggagatgaagtcactcgaccagggggtcgagtatatgctcactgaaatgatacatgctcgtgtcaaactccgcctcatctatatcatccctctcatcaatatcttgtgttgtagctccttcggtatgactgatctcctcagttggcggactaccctcgaaataaagttcttcaagcgcaggcttgaagtcaatgttcctgccctcgagaatcctagcagcgtcaatgcaggggagaagaatgttggcgattttaatcgatgaatgctcgaacgtgtagcggtgaaagttgccagccatgtcaaactccaagaactcacatcggcgcaaatgatccaagtccatcatcctcggtgccaaccctggttccttgagcggtactccacaagcttgcagaattggcgtcacaacaccacccatgcatagtgctcctctcaccttcttcttcccgttcgtcaacgcccactttctgtatccacacagatggatcaactgaggcattactggtggtgccttgttgagatcgcctctcaagacattcttccccttcgtccggcggagaatccctataagcgcataatctatcatctccatgtccgtgttagacacggtgcctgtagactccctggagtaaaagacgttggcaactaatcgctgaaagtagcggatcacaggactccggatttggttgctcttagaccgcgccgagtttagcggtagattgttccctatagtggcccacaaatccttaagctcctctctgtcaaatctgggtttggttccctttccactagggaaaccaaacagttcttctaacttcttgatcgaaagttgataccactgttcattcactgagaacgtcaagaagcctaaccccatggtatccagctcaaagtctgtgagtgcctcatacatctccacttgtagcgtggaaagaaactctattgtctcctccttataggcagggtaagagtaagacatgagtgtctccagatgacacttctcgaacagatgctgcacgtcctccagtaaccccagctgggctaaagtttcataacacggataccgcgttccccagaagtcattcatctcgaagaaactgatatactcctccattgtaacctcgtcgggtttgttcagcagttttgtctccctgcgccatgactctgactcatactcagtctcgatatcctgatcaatcagctcatatctacttgacatcgccctctttcctctggcgatttcagctattctctgattacgtcgggctgcacagcgttcgaattcatccctgaagctctggtaaacatgttgctctctcggtctagcggaccaggactcagcttcatccacattgtaatcagggtccatagaggattctccgctgtagttactcattacgaaacctgaaaacaaatgtaactcaaaaataaacgttaatacgttagttccaacaagactagaaacacaaaacacacaaaccaaaaacaggtcgagtgtaccaaatttttttaatttttaattttttttttttttcggtttggtcgagtgaattctgtggcggtcgagtgatgaagagatggtgaggcggtgtgtcttggcgaggtcaagtggctgtgaaaggcaggagaggagcggtcgagtgacgaatgtgagcttgaaaggcggatgtgctctagccgggaagtcgagtgaattgagtaaagcggtgaagttgttgatgatttgaaatcgagtacttggtgagaattggagtgagccatgatg

SEQ ID NO: 878 - DNA, 7948 bp, Arabidopsis thaliana landsberg
taagaaagcattaaatgttgaaagcattgagaagcaaattagttcatgaaccacatcacatcagcatcctggagaccaaaaaaggaagacaatgaatcactcaatagaagaactgataagttcttgctttcactgccaagagtgtaagaaacataccgcaaaaacagactactaaacccttttcaagaacaatccgaaggaaattgattcttctccacatcatttagcatccaaagcaatgaccaccatctttagttgcagctctacgcagcacatctaaagcttttttgttcttttaccaattctaaaaatctcaaagaagagatcgattccagatacaagagctgcataagattcattcaaagttgtcaaaattacagtaccatttttttacggaggaatgacaagttatgagagtgctttttttatatcttttcgggtaaacattgtaacgtagtgaaagttgagagtgaattgcctaacaaccgatagaatcaaccaaaaagaaaaaaagaacatcttttctaaaaaccaaaaaaaaacctaggggttttctatttattaggtgtatattgtcttttctagtactaaaacaataatggctaagtctcatcctcacacgcaagagattaaggttgagaatatattgtattgttgttagcataaacaaaaatggatgaaaccaatttctaccaaattcattttttttttagccatttagagtacattggaaaacaagtatttcaactaaattactctaagacaattctttctatcttttataagctgaaatttggaccacttttcttttctgttctttgtggataataaaaccaaacttcactgaattatagcttcaattcacattgcactgaatttttagattgatctcaaaataaatttttttttctaaatattgtcgtttatcgaatacaattaattaaagggtaaattgattaagttgctttgctttgtatataaaaccaccatcgctccatcctctttcatcagttaagataatatatattcagtaattaagagagaagaaataaacacaaaaatgttggttaaagttttctcttttttcatccttatgataacaatggtggttattggtgttagcaaagaatattgtgatgacaaacagtcatgtcaaaactttttgttggagcttaaggcgggttcatcgtcactctcggagattagacgtcgtgacttattgatcatcgttttgaagaattccgtacggaggatcgacatggttatgattggtgtgatggatgatacaaaacaacatgaggagatggagaatgatttgcttggtgtgaaggaggacacaaaactatttgaggagatgatggagtcggcaaaagataggatgatccgttcggtggaggaactcttaggaggagaatttcctaatcgtggatcttacgagaacgttcacacttggctcaatagcgttcttactagttacatcacatgtatcgacgaaattggtgaaggtgcctataaacgccgtgtcgagccaaagcttgaagacctcatttctagggcaagagtagctttggctctttttatctccatttcaccgagagacaacaccgaacttatctcggtgattcccaatggcccttcttggttattccatgttgacaagaaagatctatatctcaatgctgaggtaataaaacggaacctttatattttgaagttataatttgataatcgtgaaaacccatattaaggatttacttgatactcaagtaacaaatatttaggattttatattaccttttattgtaattacttttaggtagataattccttttccttagagatcagcccttgtataaaaatagaccttaaggtcacgtaatgaagaacacaattcgatcgatatttttgaccctcttaacaaaccttttatccttttttttctttctttctactgctctaaagaagattgctgatgttgtggtcgcgaaggatgggaccggaaagtacagcacagtgaatgcggccattgcagcggcacctcaacacagccaaaagagattcatcatctatataaagacaggcatttatgatgaaatcgtcgtcattgagaatacaaaacccaatttaactcttataggtgatggtcaagatttaaccatcatcacatgcaatttaagcgctagtaatgttagaagaacgtacaacaccgcaactgttggtaagaatttgtattctcttcttgaatagtttatagttttctcttctttataccaaactataacattcttaaagacattactaattattctaaaaatatgtttgaagcttctaatggtaatggattcatcggagtagacatgtgctttcgaaacacggccggaccggcaaaaggaccagttgttgccctccgtgtgagtggtgatatgtccgtcatttgtagatgccgtgtcgagggatatcaggatgccttgtatcctcatagtgaccgccagttttatagggagtgctttattaccggcactgtagattttatatgtggaaacgcggtggcggtctttcaattctgccagattgtagcaagacagcctaagatggggcagagcaatgtcataaccgctcaatcacgcgcgactaaggacgtcaaatcgggcttctcaattcaaaactgcaacatcacagcaagttcggatctagatacagcaacagtaaaaacgtatcttggaagaccttggaggagattttcaacagtcgcggttctgcaatctttcatcggtgatttagttgatcccgcagtctggactccttggaaaggagaaactggtctatcaactctccactaccgcgaatatcaaaataggggtccgggagctgtgactagcagaagggtgaagtggtcaggatttaaagttatgaaagatcctaaagaggctacagaattcactgtagccaagctcttagatggagaaacttggttgaaagaaagtcgaattccatatgaaagtggattgtaataatgttgttccatgcttcacatgtataacgtataaaataaaagatattattcttctataattttttccatgattttctacaaagatggtaagaaagtgatatcagggaaatatcacgaagggatttactatcttgaaggcacggttgttaaggctgaaaagagtgtaccacatgctgaaaatggtggaaaaagtgttgtcaaggctgtagttggagtgaggaagaagaagtcaaggaaggtgactttcaacgtgaatttaatttaaggacctactccatatggctttggaacaaaggaatcatcagttcaaggtggagatgaatcctcaacagaagaatcagattgtttagaggaggttaaatctgcaaaaagtgaaggaccttctgatgaccagccactgttgagagatcacaacaaggagtggatgttgtgtgatagtaaaatgaaggatgaaaggattacgatgccagaaagtatcattaagaaaggggactcgttaaagttgaaatgaaagagttggaaaaagcttcaaggattcagggaatggaggttaacagagataaagctaagggagttctagctctgttacaagaaagtcaggaaaaggaagctaaaactttcaaaatgaatgaagctacagtagttggtaccaactacatctcatttcagattaatgagcttaactacagaagggaaggaatcgggaaccgaacttatggacacaagatttcagatcatcacagatttggtatccaaaggagaggctgtcctaaacaagatactaaaaacaattgatccaacagatgttatgactcaagtaatacctggaaaggactttcatgcctgctatgatctcctcaacatcgtccaggtaactccactatcgatattgtacgctggaaggaagaagaacagagaaacaagtcagctttgggaaaaattgttatgtcgatatgaagacttcataagggtaaatggagttacctgtaggcgcctggaaatacggtgaggagacttatattccaggtggagctgttgggaaaattaaagaaaagtcaggttagttcttggatttgaaagtattgagtcaagagtgggtgatgtaagaaaagagaagctgcttacatgtggagaatcagttgacctgagctgcagattctgattccatgtggagtttctgttatgaagattcaagaaatccgagttaggagctgctgtgagagtaaacatgaaattcaaagttagaaatattatgtagtctatgaaaatcgaaagagacctaatgaaggaagatgattcaggttaagaagagttaccggagttcatcttaacagatgaaaggcttcgttgttcattggagaaacagtcctagtgtttgtgacttgatcttgcaagatagatttgaaaaaagtactgggaagaagctacctcggaatattttggagccgtgttagaaagtgataggttccaggtggagtagctcatgaaagtttcagcgagaaacaaaaaaaaaaggagggattaagggttctcgggcaaaacccagaaattgagatggagcagctacagcctaaaggcaatagaaattggggaataaaagtgctcacctttggatttctagaagtgacagtggaagatggagatcgtcggaagaaacctaccgtagtatcaaaattgaagtttgtcaactttcaaaaattttgaattctcagaagatcttaatctctaagtgtgaagaagagacaagagagagattagatgtacctgagatttgcagatgatcaatggccggattcgccggaaaagcctcatcggagaagaggtggagctcaccaatggagactgaaattgaatttgaagtgtctcacaatttcagaagagatactctctaatcatcacaacaacgagaaaatgagagattggagagtaccatgagttgagcggtgatggtggcggtccgattcggcggagttaattgatggtgaagatgactgtgatgttgtgatgtgtcacggacaagaggcatgtatgagagacgaagagaagtctgttgtttcactagaacggggagcaaccaagaaaaggtgaaggtttgcagttgctttcgccggaggtggccatcaaagtagtcggaatctgagtttgattttgtcatcgaaaggcaagctccatcttctccatgtcgagaacaagagagcgcggtgcagaaaggaggagacgatggctgacgggaacaaagtcgtatgttcgccggaggaggttggaatccggcaatggtgtttatttcacgagatgagaaagagatgacgttggttgtcggagatggagatgtcgaagtcttcgaggaagtgtgttgttgtcaagaggtggagattgttattgggtttgaccaaaacacacaacattgggcttttattgggccagacggagttaatataaagaaaagaagaacaaaagtggtccatcacatatatatatatatatatatatatgtggatgtaggtgtgagacaagacacagagagttctagagagaaagagaagaaacgagagtttattcttcaagaagctttctccttctttgttctttgtctttgatctttgttcttcttgagattgtacctgaaaccaaagacaacatcacaagtcaagtggtgtttgtaatctctttgatatagtgaagctttgggagcaagagatctctcctcagacatagcggttaagccgtgaacttggctatcaatttctgtgtttgtttctgttacaagcaaccgttcagtttcgtgttctctacagagccaaccggctaaggctaaggtgatgactcaaggagaagccaaatagactacggttagagaaagtcgagtgatggttcgagtcaaacagtctgaagctaaagctaaagtgatggttctaagaatcaaagtaaagaaggaggtgttcaaaggtggacaccaagaagaggagaagagaagcttacctgagagagaggaagctgaagaaggttgcagcgacaaccggaagagacgtgagggaggctcaccgagaagatgcggagaagacatggagactgcttgagggaatgttaattaatgagatgacttataaagattggttgtataaaatcctaagtagacgtactaaaaaaatatagttttgacttttttataatatagattagttgtttttgatttatttaatttctcctagatccattaaaagagatgcccttagatcttagtcaaatagtaacatcatgtatttcaaatctaaggaaggaaaattatcttatgggttgtcatattgctgttaaatcaaaatcaaatatttttcttacctaaataaatggtcaaattatcaaaaaaagaaaacaatgaattgtttgacaaattgctaataaattaaatcatttattatggtacataatctgtaagtatttatttttgaaaaacttttcagcatatataaatctcacgtaaattccaaaacacacagaacaagaaaaatggttgcttacgtcgataaaaacttttcattggcttgttttttggttttacttctttttgttgactcatcgtatgcaaggtttaatacgttggttacaaaagatcagatccacaccatatgcaccaaacaagatatcaattcttcatattgttttcaagttctaaacgcaaatcctgaaattgctagattagattttcctagtctcttcaaatttgtgcttaattatcaggctcaaaatatttcagatacgctgaaacaatttaaattatcaggaggctacacgccgggtgttgaatctaaatatagcttatgtatagaattttatgaaaattctttcgaccggcgtgatgaagccctcagatatttggctgccaaagactatggcagcgtaaacactatggtcgggggaacggcgataaatatgttcaattgtgctgatgatttgtcaacaatgaagccagtaccacaattttttgtgacggaaagtaatttgattaaagaattgtctaagattctcttagtgattctagaatgtttcataagtaagaaaaaagaatattgtaattgagatctataataataataatattagtatgattgttgccattatccttttttaatatataaaaaataagaaaaatagaaaacatttctccactccctctgcctaagaatctctcgtttaaagctacattcttttctttttttgtcatccaagctaaattcttctctaaatcgttttaatcgacttgttgactcgtgagttgactcgtgggctgtttctctaattgctaatagaatttttatacgatgatggaagaaactagaggaaactgacaacagataagaatccatttcttctacgcagattggtggctgtttggtagaatttgttctctatgttatgctaaggttataaattctcatattgtttttgcttaggatttgggattaatagttgaaataaatgattgatcgcatcacttttggatttaggaccgaggccttacattctattgtattcattcagaggtatgatatcagaaatggatttttgtttcatttgtgtgatggaccttaacatgatggaccttaaaattgctacatataacaaaaacaaaattttatttatatgatgatttatatatccatcattctgtgaacggattagattttctttgccttgtagatcaattgtgtgtccagtatagtatagacaagttcaaacttgcttggctttgcttaaccaatcattaattcgtattttaatttcaatctcacttatcaaaatcactgatgcttaacttagctcatggacagtctctctacgataaaaaagaaatataaatttattttactaactttacatgaaaaaggaaaatttaaaccctttcagtatctatcaaaccagattttgacgatttcaaca

SEQ ID NO: 879 - DNA, 427 bp, Arabidopsis thaliana landsberg
tattggaaaatctagatggcaaaccaacaaacttgaggatattttattttccaactcaactactaaagagggattgagacaactttctgatagtgtataggggtaccaatgtgataaaaaagaatatgttcctctcccattataaaaaaaaaatataatgagagattgagacgactttcagatagtgtataggattagaaatatttcctatgaccccattattatacattatttggaatgatcaattacaaaggttggaaaaatgtcgagggtgtcgatccagtatgcgagttcccctttgtttactctctaaaaagaataagtctggtggagagaaagaacaccgaaaaaggatcttgaatgttagcttgtttgatgagacccagcgatgaaagcctggtggatatagactgggaacttaggtatg

SEQ ID NO: 880 - DNA, 3582 bp, Arabidopsis thaliana landsberg
ttttggtgggtttgggttcgtgttagattttactttcacagattcaggtatgtatttgatcttatttagctttggtaatactcaaaccaactagtatttgatcttaattaggtgacgttgatattttgtgtgttgtgggtcaatcatacactctaggttgatctgcgtctatgtttagtcctaattttgaagaatcattctaattgctgatgtttatttatgacaattttatgtcttacttcgaatttagctaagataataaatctagacgagtgcctttataaacagtttatgtatgaacaatgcttcgcttgtgggattgttgatttcactacatttgattaagaatgtacatactattacaaatgttatcgattaaaaacgtcattttcagatattagttctccagcgagttgacacaaaacccgattacgtttcatccggcgactcgctttgatattccatggattctcagttgaatccttccaagagacgcaagataaggttcgcgtctctcatcttttccccagttttttttcttattcgaatcacttaaggcttgagaaattagtggttagggtgtgtaaattgcgtttgatatagtgtcaggcacagatgcgttgcgtgctataagatgttcaatagacgagaacacctcgttgagcacatgaagatttcctaccactcacttcaccagcctcgctgtggggtttgcctcaagcactgtaaatccttcgaatccgtgagggaacaccttaacggtatgtttggatttgtattccttttccaccacacatcgtatgaatatggtggatgatgatgtttgtttgatttcgtctttcaactatttcagtttcagaccatctttccaaaggaaactgcaaagccattttcactaaacgaggctgtactctctgtcttcaaatctgtgaggaggccttgtgtctcgccgagcataaaaacaagtgtcacctctccgcacctcgtcctcttgtaagttttgttgggaattatttagataatgtggactatatatgctctgccgcctccaatattcccgagtctattctttctgattattgaaatatcagcagttttccccttaaatgatctgattagtgctttattcatatcagggaacatctacccaaaggaatccttctagttcacttgctggttcacgtctcaaggctgtggcacttgactgtgaaatggttggtggtggtgctgatgggactattgatcagtgcgcatcggtttgcctggttgacgatgacgagaatgtgatcttctccactcacgttcaaccactgctccctgtcaccgattacaggttctgcttgtggaccatttgtgcttgttttgttttataattcttccttttaaatctcaccccgcctcatgttcaggcacgagataactggattgactaaggaagatttgaaggatggtatgccacttgagcatgtacgagagagagttttttcgttcttgtgcggtggacagaatgatggggctggaaggcttcttcttgttggtcatgaccttaggcatgatatgagttgcttgaagcttgaataccctagccatttgttgaggtaactaactgacccgtttttgttgactctttgcttgaaatctaatgtaattgctatgcttcacctcagagacacagcaaaatacgtgccgttgatgaagacaaatcttgtaagccaatcgctcaagtacctcacaaagtcatatctcgggtaagttatgcttgggctttgatttgttgacattggattatgaaaacttggaacatgagatagaaactggttttgtttgtatgtgtagatacaagatccagtgcgggaagcacgaggtttacgaggactgtgtatctgcgatgagactgtacaagagaatgcgggatcaagagcatgtttgtagtggaaaggcagaagggaatggtctgaactcgcggaaacagagcgatctagagaagatgaatgcggaagagctgtaccaaaaatcaacgtcagagtaccggtgctggtgccttgaccgactcagcaatccatgaaatgaaatcccaatttctcttttaaaagaaagctccttctcttcctcccttaagtctctttttgttcgatgggaggattaagaagacttgttaagagcttttccggctagtttttggataatcaaatatgatatggcttcattcaacaacaactctccctttgggaactcgtataaaaagttactacttaagcttcaaatctgtgtaactaaaatggataaagtctgatgcatctgaggtcttggaatctgttgctcatagttgtggataccagcaacatcaaacattattacttgtttaccaaacccactctcagcttccatttcatcagtttgaagtcaagtggataaaaagactgtctacataactcaaatactgtagtattatattcacatataaatgagaaattgacatttcctctagaaaaagaaaagcaatcgtgtgagaagaaacaagtaaaaggctgaggaagaagacgactattagtccccgtcgaacttgtttctcccggtcgtccaacaaatggctccgtcggagttccaaccgagtctctgggaatcggttacgtcgctgattaggtcagcccaggagaagaacgtggatccgcttcattgggctcttcagcttcgcttgaccctcgcgtctgctggaatctcccttccctctccggacctcgctcaattcctcgtcacccacatcttctgggaaaatcactctcctctttcatggaagcttctcgaaaaagctatatccgtcaatattgtccctcccctacttgtcctcgcccttctctccccaaggtaacaatgagtcgtccgtctactaattgctcttctaatggttctcatcatttatgctacttgttgaaatattcccctcaagctgtctgtaataggctcattgccgttgggttatcacttttctttttttatcaccaggctcatgtacaagatcagtacagtttttaattctttatggtttggtaattttagggtaatcccaaacagaaagcttcatcccgcagcctataggctctatatggaactcctcaagagacatgcattctcattcatgcctctaatcagagcaccaggatatcacaagtgagttccttatctcagttaaaccttgttttctccaaaaaagttatttatttttggcagtgtaataagatattaatgtaaaagtttttacatgcgtaatcataatgctaatttttcttctcctagtttgtaaaatgcatactaatgttgttgttacaaatgaacagaacaatgaattccatcgatgatatcctccatctttctgaaacctttggtgtccaagatcaagaaccgggaagtattctccttgcatttgtcttctccattgtctggcagctacttgatgcatccctagacgaggaagggcttttagaactgacatctaataagagatctaaatggccaagcagcccacacgacatggatttagacgggctggaaaattctgtgaagagaaatgaaaaccatgatgca

SEQ ID NO: 881 - DNA, 570 bp, Arabidopsis thaliana landsberg
aggtaatcacgctgtgtttctttcgctggctttgttaaacggttaactaatccctctgcaatattaggacatagtcctttgcataatatagcctgtacaaattggatactgaactcaggtactgacaaaatattaactgattatccacaaaacttgaagtagagcaacagatgtaccttaacaacttcaggttcttgtgaatacatattgaaaggttgagttttgtcagaaaaccaaacatcaagattctccttccttctcccctaagaaagaaaaaagttgattcatgatcagatttccttaaacaaacaatggctttctttcttcccaagctttattaacatcattgaacttgatggtgttgtatcaaaaacttgagaacaatagaaaaactgtgtttcacatgtaagatcaaagacatctgtgctttgtgtgaatgccatcaatagttcagaatgttgaagagaagttacctcccctttaggaagattgatgagcccgatgtcggcaagcaacatgccaaactctactctactctctctgatatttgtgaaaaagtcaaaaataaaa

SEQ ID NO: 882 - DNA, 667 bp, Arabidopsis thaliana landsberg
aaatgcttagataattctcacagatgtttaaagtttctctcattgtaatgattttcaacagatttatatccttcttggaggcatattattaatgtacgagttccacaactacatgcggccgatcctcctactcatgtactcattttggattccccagatagttgcaaacgttgttcgtgattctcgaaagcctctgcacccatattatatactagggatgactgttacacgacttgctataccgttgtatgtttttggttgcccgaagaacttcatgcgtgtagagcccagcaaggcctggtgtgtaagcctgtgtgcattcatggggtttcaagctggtgttcttcttcttcagcattatttcgggtctcgttgctttgtccctcgaaaggttcgttggtctgatgactttgtagattgatagtaaattgcttagttgtctttagttcatgtgtttgcttctgatttggcagttgctacctgagaaatacagctactacagaagactcgatcataatgtaaaccgaagcagggactgcgtaatctgcatgaccacgattgatctcagacaccgtattaatgattgcatggtaacgccgtgtgagcatatattccactcgggatgcttacagagatggatggatataaagatggagtgcgccaacat

SEQ ID NO: 883 - DNA, 519 bp, Arabidopsis thaliana landsberg
cactccgatacatggtttttcaaactagtaaagatctttctctttggaaaaggaaaaatgactctcacgagtgtggatattcttcccaagaaacttggcactttgattcgagaacacaatcaagttcgtgaatggtacaaagcagtttggtttccttactcaactcccaaatatgcgttcatcacttggctcgccattcaaaatcgtctagctacaagggatagattattaagatggaatgcagatgcaagtggcagttgtgttctacgcggagatggagtggagactagatggagtatagacagctttaaccaatggcgttctaaatcatagttttgtaaaggagaagtatagttaaggttataaattgtaattattcatgagctaaaccctatggttaagcctctatatatattgtaaatcattcctatcaatacacaatacaacccacgttcatatggtatatattatagacttgggcatcctactttatctactctcaaaaccattgtttctcag

SEQ ID NO: 884 - DNA, 2395 bp, Arabidopsis thaliana landsberg
  unsure (1)..(2395): unsure at all n locations
cctcttgttaagtttatgttgagctttaagatgcttaagagactcgtgatcggtgtgtataacaaactccttctgccataagtcatgctgccatgtttgtaaggcgggataatttaatgtggcaccaccgagtttctcactaaagtaggctctgagcttcttctcctgcatcaaaacatctccaatacctatacctgaggcatcacattcaatttcaaatgttttaagaaaattctagtaaaataaaaatatgttagtaagcttctctttaagtgctagaaaagttttctcttgagtttcttcccatttgcaccccacatctttcttgattacttcgatgagggttcggctaaggtgctaaaatccttgacgaagcgcctattaaaaccggcaaggctatgaaagctccaaacttctccaacggttttagggctaggccactccttgattgccttcactttctcctcgtccactttaacgccatctgcacttacaacaaaacctagaaaaacaagattatccgtgcaaaaggtgcacttcttaagattcggaaaaagcttctcttttctaaggactttcatatccgattctagatgatcaatatgctcagtcatgctcttgctagaaaccaaaatatcatcgaaataaaccagaacaaattgacttatgaatgctctaaggaggtggttcattaagcgcatgaatgtactaggtgcatttgtcaacccaaatggcataactaaccattcgtacagcccatgttttgttttaaatgttgttttccactcgtctcgttttttcatcctaatttgatgataaccactttttaaatctattttagagaaaatgcatgaaccatgcaactcatcaagcattttgatatagctcaaattgccttaagcctactccctcaaataagagatcatccgttagtacttaagggtcaaattccactgagctctcgatgttcacacaatagacttatgatgttttcaattaagctagaccaatagattataaaataagaaataaacaaaagcaatacatatcaagatgtaaatcagatgggaaaagagtcaggtttagggtattctcacgagatagatgattagtagatctagtgatagctaggtggttatcgaaccgttttttaaactcaaactctaattatggaataaccagtggtgttccgcgaaactccctatgcttatagctaagaataaccagagaagctgagagatctttaacctaaacatgcattctagacgagttcaattgttcaccttagtagataggccgattcttattacacacctataaaccaggcccaccaaataatagatccaactatagatacctatggggggcataccttagtagataggccgattcttattacacacttataaaccagactcatcaaataatagatccaactacagattcctatggcgagtatatctattgtctggattcaagttttagttaattactctatatctagcattaagaacaattaaagatgaagaactctacaaataacttagcaaagggggcgatctactaaaccatatgaatccctaatgagaaactctaaccctaacatgcaaactacttagacatggtgattgaaacaagcaacataattgagtaagaaagcataaacacagaatataacattagagtatgaaaggatctttccactctattggaaactgaatgaatctctgaaaaacaagggatgaatagcttatgtttctttgaaaacttgatgaaaagcttgaataaaacatgataggtctaaacaatgaccactaaaactatatatatgccctaataaacgtccagggactaataattcaaatagggaagtcttctggggcaaattttcacttctgtaaacttgaaagcgtcatnnnnnnnnnnnnnnnnnnnnnnnnnnnnnnnnnnnnnnnnntgtgttgatagacactctcactgaatttggaactgaaatcgtccttagcttttgtttccttagctctcgctctgaaatgtctcctcatctctattgtcatccctcctcatagatacatgaaaagactctaaaaagactcgagaactaacagaaagactcaaaatcctatatctaaaacactatcgtgtcattgtagtattttaggttgtcaatccaatctaatatgatgcaaacagatgatatatgatttgaatgccctatgtcaagccaagcagagagttgttagtttctaacagtcataatgtcaaataacagaaacgtaatgaaactaaaatgcaaaacggcagtaataggcaaaccaataacaaagcaggtaagataataagcaatcaaatggataagagattcgtaaggatcgggtaatcgaatagcgtggtc

SEQ ID NO: 885 - DNA, 1034 bp, Arabidopsis thaliana landsberg
ccactgtaatcatctgtttcaagactttgatatagatatcttaaaccaggtactatgggtaaaccatttagagtatcagtagtccatttaatatttttaatggaccaaacacataaaattgagctgagccgtatcaatccattaagacttctgatatccagtattattataaataatactaaaaaactccttatgatactatatgaatatcacttatatacatgctcttatatggtgtgtagttttcatcccatccatgtagtcttctaaaggcgctgaccatgtcagtgatgacataagtccaacaaaggacatggttacgttggtctcgaatatactccgagacatctttgagcctttctctgatttcctcgtctagtagtagaaaattttctagtactcctgtctcctgatatcgtctaatatataataatatagttaaccttaaggcagtcaatcatcaatacgccatttatcctactaatttagctcatccaattggtgctacactattgacgtttgaaggttgggatgggtgtaacatatatcgcggacatgccttatccataaatacacttaaaattagtataaattttctgacttgccttacctgagtttgattattttcttagtaaagtattttgatattataatttggtagtaatataatcactataacatgcaagaactacaaaaccagaggtctctcaaatggacactcatttaattgttacgatagtaaatgtcacccatcaatgaaacctaagtcaattggatgatttgggcccaattggacctaattcggcccatttaatattccctcttttctaacctttgtttctcctcttgcttgctcacccttttccctgaatcttaagaattactaattcccggcgagttttcccggcggcggctagataatactggtttctgccagcaagatcgaaggagataaacttcgtaatcaaaaagtctccttctgataaaaagatgtcagaaaacacaaaagtcgaagcgaagagagtgttcatagg

SEQ ID NO: 886 - DNA, 869 bp, Arabidopsis thaliana landsberg
ttctccaaaatgtgtttttttccccaagtgtttcagaagtgatacacatgtacttcttccattctgagttgcagactgagtgtcatatccacgaaggatatccatgaaggtatatatttttgaaactcaacaaaagtttttttgaatttggagaaaataatgcattatttatcgagaactttgtcctaacaggtaatccaaaatttgctttactcgtcccttcaattaagtctgtgggacctgatatgttaactccaacttttgttgatttcaaatcagagaaatattttttatgttttagaatagtgtgcgttgttctactatctggtatgcaaatatctccaaggtttgccttggatattgttccatttgtaatgtgatccatttcctcaatatgttctgtgaggttcactttctttccttttcccttggcggattctttgtatagagcacacagatgtgctggagttcggcatacctaagaccaatgtcccttagtgctgtggatgtcggatctcgtcagtttaccccgacccgagatccatcatcatcaatcagtgggctcgaaacggtgggcctgaaaccacccgtgacgaagtgggcatcgagggcccattcgaggcccagtacgcgtaagagtatctgcgcgttacgtaacagaaaatcacaggactaaatgaggatgcgttaatatgggaagtggcagtttgaaacgtaaacattaatgaggcatgatttgcggcgtaattcaagcgttcagttacttcgtagatattcgatttcattgtataaatagaactcgatcatcatttgtaagggggacagaaaaaattactatacaatagaattccgattaactgaaatattgt

SEQ ID NO: 887 - DNA, 478 bp, Arabidopsis thaliana landsberg
  unsure (1)..(478): unsure at all n locations
taacgcattttatccctttcttactttttacgctttatctctcttagaacaaagtttttctctgttttcctctatctatcttttcctcttcaaacaccggatttttccatcttcttcgatgaatctcgacactgaaagacccgaatccccatcttttgacgagggcggctcttgtaatgacatatgcactcgccttaatgatatcgccggcccacattaccactcgccttctctttttacctttattttttactgaccaaatctgttgtttcacttcgcagctttcatcgctcagactctcccgtctgacgaattcattgaatttttcaaaatcgtcctcgaaggggaaaccctctgaaattctttcaccctcgaccgatttatagaggccaatcataaggtcaaaatgagccctcccggacagcttcatcaacttccgccacctnctcccctacctgaaggaacatcagcccggact

SEQ ID NO: 888 - DNA, 1153 bp, Arabidopsis thaliana landsberg
tgctgtattaggcagtgattcagtgcgagctcattcaaaagatcataagagcaaccctaatggttgattgtttacaagggctcttccaaatttttaaagcataaattttgagaaattaaaggttaagagtttttgttgggccttaaaattttttctatgtctaatggtagagccctttaagtgagtttcttaatccaacttttctgatccaatattcacaaattggaaactaatccagccaaaaaaagtttcactttatatggagtgatgatgactgattcagtttcatacctcttctcttaaagctatttcattgttttgaacaccttcttatgaatatatcatagtttcacactttgaacctattggtaggatctgtaaaaaagagcaagtagaaaccattaggttgattgatcatctttgaaattggattttctgcaccaacaatctataaaagaatgggcatttacataagaaacataaccctctatcaagataccataaaagaagtgttgacgaggtactaaccgataaaagattgtcattcgacctcggcaaatcatcaaaaactacctcaaacagaatttccaaagatattggctttcgtgactcttgactcagattgagcatcacagttttatcttgaccaatacctacacaatcatcaatattctcatgaggtctcaaaagagctttaaattttaggataaggatacattccttattagatatctgtcaatattcttgtgtatattcgtatacgtttacataccgactctcttgtactatatatattctcatattcacatcaataatactcaagcaattctattcactttggcatggtatcagagccaaaaccctaaaaaaatacacaaattttttttttctactaagcttcatcgtcttcttcacacaacatgaccaaaccagtcgacggatctaccgctactacagcttcttctgaaaaggatgcaatctctgcatctccctactacttgcatccatcggatcatcctcatcatgttctcacacccatgttgttgaacggggagaactatgaacgatgggctaaacttactcgcaacaacttgcaagccaaacaaaagcttggcttcatccgatggcacccttacaaagccattattctgac

SEQ ID NO: 889 - DNA, 991 bp, Arabidopsis thaliana landsberg
cgtgctcggtcattcagaacaagtcaaacagaacatgtcaaacagattagtgatatgcaacatctcccatataatgaacatctcccatataatgtgacaagaacaagagagcctctgtcaatctaagattacctcacggctcatgttattagtgtaataatctagacacaaaaatcatcacgacccagattaggacaagcgtctagttgctccatgtagagaatttagagatctgcagatagagaagtgcagaagaggtaaggaacatgtaataatatattacagagcaggaggttgtgtggaaagtaacctttttaaacaacgatctcttatatttgacaatgaatggtcctttgtttcttggagataaaaatgggaaacaatgggctattctcttctgaaccctttagaagagtgattctattctgcagaaagaaaaagctctgttataatctcacaacatccaaatatctcaaagaaaagataatcaaagctggatatgaggccaccgaaattaattagggattctacatgacggatatcaacactaatagatctcggctaatctagtctatatgtatatgaatccctggactcactttgaggccctcgactgttaaacaaaccaaaccaagttttatgcaaataaaacagattcaatacctgaagcagcgagaataatgccttcgatgaggatgacgataccaagaccaagccaagtaagaagaaacgagttctcgttttgtctctgctcctctgccttggccgctccttcttcgctcatctccacaggagcacgccgattcacctctctattacctctccctttcttgtttcccgatgtagccgcacttaatttcttagccggagaagaaaaagacgccggttaatcgaatcctacgctggcaaaccttgaattctttgattgagatgattcggaggaaagttttagagttttctccgagagagaacagaggacgattaagttttt

SEQ ID NO: 890 - DNA, 1086 bp, Arabidopsis thaliana landsberg
tgtaaactatgagaaggctcttgaaatgattgacaagcacttggtgagattgagatttattgccacagtttatttctttactcttctacttcattagcaatgtcaatctcttatgatttgttggagtttaattctttatcttacgtatggcagttgtactggcccaagttgttacaacataatattgcttaaataatttgcaagcatacttttgtgtttacgatttcgatggtttcttacatatgtatgtctttttcaggttgagcaagaagatgcagacacaagaacatccctgaaaagccttaaaatttgagaaacattgtgaaagtttttgatactaatgatcaaaaaggtaaaaacttcttcagttgagagtccttttttaattttgtagaatctctacctttatctcaggaaccaaacgtaatcagaatgtaaattcacgtggcgggcttggagaatcttcaggttttaggagaatcggttcgagtcatcgagattttcttgtggaaacgtctcctctaccggtttgagttcttcgaggttttctcgagaaggtaacatctcgactgcaaaaaaaaaaaacttgaagcttcttgctaaagaaaaatcaagaaccagctcttgaaatgattgacaatcaatgagttattgatcttacctgcttcttcaggtttttgtttgtggagtttggtatcttgtttgatagttttgattctttttcacaggctattgaaaccgagttgaagaaagacatttaccctactataacgaccacaagtgccgacatcatgtactttagtttgtcaccattgaatatactttagttttgtcaccacaaacttgattattcttttaatttgtaccattcattattgtaccattcactactcctttattttgtatgaatgaatgtacaccacataataaaaatctgaacactactcatttattgttctatacataacccattaaacactactctttctacacaattctacactactctaatatttctatcaactctcttgatcacaataataaacactcttttcttctttctatttctataattttgctaaaatg

SEQ ID NO: 891 - DNA, 644 bp, Arabidopsis thaliana landsberg
  unsure (1)..(644): unsure at all n locations
tgaccggaatgagggcacaccttgtgcacctagctttgctgcttgnagagattaaccctgcaagacgaatcgtacaaggatattaaattcctgaaagacaattgccaccaggcggaggtctacaatttgagtcaaagttactcacttgcactagcaagaacttcggaggagagactggtgtgtgagttatctctgtcacaaccttaagccgagtttgaggcactgacctttctcttgaacaacagcaagagcagcggtttatacacacaagaacaaatacatctccaccaaggacagcaaccaaaatcccaatctttcttccttggaactgttttcctcagtttcagcctcttcgattacgaattcttgatgctgatcatgactgccaataatggaaaagcaacggggaggggtccaattaatctgttattcgacaaatccaagtttgcctccacaggtcagattatgctgtagcttcccactgagcttgttagatgcaaagtctaagtaactaatgtttggcaaagagaacaagaaccgagatgaagttccagtcagatgattgaacgacaagtcaagatgctgaagctgagacnaacnaccaaaacttctggtagtaccgatagacctgaggcantgtgatg

SEQ ID NO: 892 - DNA, 2496 bp, Arabidopsis thaliana landsberg
  unsure (1)..(2496): unsure at all n locations
agactattccggggactacaagcctctgtcttctctctcgtttagggttttattccaaaattccgtgcttcgatcccgaagatcagaaaaaatgggtgatgagattgtgcctccggcgaatcagttagccgccgataacttggaaaacgatggatctacggtgcagaaagcgcaattttcagacagggttctgattcgatcgattttgggcggcggagctaaactcgccggtcaaaaggttagaatcggtggttgggttaaaaccggaagacagcaagggaaagggacttttgctttccttgaggttaacgatgggtcttgtccagcgaatctccaggttatggttgattcatctctttatgatctctctaggttggttgcgactggaacttgtgttactgttgatggagttttgaagattcctccggaaggtaaaggtttgaagcagagtattgagcttagcgttgagacggtgattgcggtgggaactgttgatccgactacgtatccgcttcctaagactaagttgactcctgagtttctcagagatgtgcttcatcttcgttctaggactaacttgatctcagcagttgcaagaatccgtaacgcgcttgcttttgcgacgcatagtttttttcaagaacatagtttcctttacattcacactcctatcatcacaacaagtgattgtgaaggtgctggtgaaatgttccaagtgacaaccttgatcaatcacactgagagggttgagcaggatctcattgataaccctccaccaactgaggctgacgttgaagcggccaggcttattgtcaaggagagaggtgaagctgttgcgcaacttaaagttgccaaggcgagcaaggaagagatcactgcttccgttgctcaactaagtgtagcaaaggcgagtttagctcatgttgaagagaggttaaggcttaagcctggactacctaagaatgatggtaaaattgattattccaatgatttctttggccgtcaagctttcttgacagtttctggtcagttacaagtggagacctatgcttgcgctcttagcagcgtgtatacatttggtcccacttttcgggcagagaactctcacacttcaaggcatttagctgagttctggatggttgagcctgaaattgcttttgcagatatacatgtaataaacatagagataatatcctttggtttcttctttatcgtaacatagtgtatcttagaaacattctttgaaatttgtgtaggacgacatgaactgtgcagaggcgtatgtgaaatacatgtgcaaatggttgatggataaatgtggcgatgacatggaacttatggataagaacgtcgacgagggatgcactaaaaggctaaacatggttgccaaagcctcgtttaagcgtgtaacatacactgaagcaatagagcgacttgagaaagctgtagctcaaggaaaggttgtttttgataacaaagtggagtggggaatcgacttggcctcagagcatgaaaggtttgtctattcctcaacttcaaacacttgcaagaaatggttagttggtaaccaaacttgtcttgcaattactacagatacttgacagaggttgagtttgatcaaaagccaataattgtgtataactacccgaaaggaatcaaagctttttacatgagacttaacgatgatgagaagacagttgctgccatggatgtccttgttccaaaggtaataaataaataaaactcatcatcttgttataataacgatgatgggaggaatattttcgttatatttgttttctttgtatatatatattaattaggttggagaactcattggtggaagccaaagggaagaacgatatgatgttatcaaacagaggtatgtgaaagtgaaaccaatattcattttttggcttctgttttgtgatgaagcaatatctgtctggtgttataataataggatcgaggagatgggtctaccaatggagccatatgagtggtacctagacttgcgtcgttatggaacagtgaagcattgtgggtttgaacttggcttcgaacgtatgattctcttcgctactggacttgataacatcagagacgttattcctttccctcgctatcctggaaaagctgatctttgattcctcttctttacaccatttacatacacaatttcgcttttannnnnnnnnnnnnnnnnnnnnnnnnnnnnnnnntagtttactttttaagttggttaaaggaaaattgtattgacttttgattttttatctctatggatgtggttttgttcggttatcccgatttggctattgaatgataggagaaccaatttgagatataccacaaacatataggagaaccaatttgagatataccacaaacatataggagaaccaatttgaggtccccactaaccgttgtcagttgttactgttcacataaatatccggatttggataaatctctttggcttgttggaagttcctt

SEQ ID NO: 893 - DNA, 525 bp, Arabidopsis thaliana landsberg
gagcaaccatgctcatctatgtgcttctcgcatgcttccgtctatttcctttgcactgtagggtaagtatcttattcacagtaatactctgctttagttcttaaactactatgttaaagatctatatagaatctttgtttctggtcatggagttgttttctaattttgtttattgagctttaagtcacttatttttataccatatagttgatgaatttgagtttgcttgtggtacaagtaaaatgtgccattatagatcctgaatcattagttaaatcttctttactagtatttatgaaatgacaatctttcttctgtatctgcagttacttcttgaacttatcgttcaaaattgccaccagatagccattgatcaacacgggtgctgcctgcttcagctatgttttaacaaggaccgggttccaaatctagagataaggcaacgtttgattatggaagcaatcgctaatgcattgagactctgcttaaactgctacgggtaaacatgatatgaatgatatcttt

SEQ ID NO: 894 - DNA, 3047 bp, Arabidopsis thaliana landsberg
gcaaagatggttcagacattactttttgtttctggacttagcactttattgcaaagtttctttgggactatacttccagcggtcattggaggctcttacacgtatgtaccaaccacgctttccatcatcttggctggtcggtacagcgacattttggatcctcaggaggttagtaaaagaaaaacagagcatctatctgtttctgtatcatattttctcattgatagagtgaaaatatgcagaaatttaagaggatcatgcgaggaatccagggtgctcttatcgttgcctcgattcttcagatcgttgttggcttcagcgggctttggcgcaatgtagttaggtaagctaagaacactcaatcatatacacaaaaaacagattctcttctcctactttctgatgattgttcttactttctttaggctcttgagtcctctctctgcagttcctctagtagcactagctggttttggactttatgagcacggtttccctctggtgtgttattgctttacttgatctctctttcagttttataacatttttttgaatacagagttgttttgtttctggcagctagccaaatgcattgagattggactgcctgagatcatacttctactcatattctcacaggttaagctcttcttgttatttcataagaggtgataactagatattcatctttttggtttctttttgcagtacattcctcatctcattcgaggagaaagacaagtctttcatcgatttgctgtcattttctctgtggttattgtctggatttacgcgcatctacttaccgttggtggagcctataagaacacaggaatcaacactcagacaagttgtagaacagatcgttctggcctcattagcggctctccatggttagagaaactttgtcttttatctttgtgcattctctagtgacattatttggctacataatttggtacaaatttagactaattcttgataattccaggataagagtgccttatccttttcaatggggacctccaacatttcatgccggtgaagctttcgctatgatggctgtttcatttgtttcccttattgaggtcagatttaaaaagtttctttttgctgtaacaacaataaatacttagatcattgggcatattcatgttcttatacttttgattcatgtaaacagtccacagggacttacattgttgtgtcgaggttcgcaagcgcaactccgcccccgccttctgttctcagccgtgggattggttggcaggtaacattaacaaaaaaaaatcatcttaattttccttactagattatatatataagcaaatgcatttatgtatagggtgttggagttcttctctgtggattatttggagcaggaaatggagcatctgtgtcagtgtaagactagtttacctatgaacaaatgaagtatttgaaccgaaaccaacaatctttattgcaaaatccaatggttataatgatgatcttgcagagaaaatgccggtttgttagcgctaacacgcgttggtagtagaagggtagttcaaatatcagccggttttatgattttcttttccattcttggtaaatttggagctatctttgcttcgattccagctccaatagtcgcagcattacattgcttgttctttgcttacgttggtacgtttcttgaaacacctcttcttttgttcaaaccgctaggttttttaaactgcaaaatgagcaaagaaatgaaattgcatgcaggtgctggtggtctaagcttacttcagttctgtaatctacacagcttcagaacaaaattcatcctcggattctcggtcttcatgggcttatcgatacctcagtactttaaccagtatacagctgttaacaagtatggaccagttcacacacacgcaagatgggtaaaaagcaaaacaagaatcttaatcttttcgatatcttcccacttatgataagtttataaccaaaacacaaagctgatttgttgtgttctgtgcagttcaatgatatgatcaatgttccattctcttctaaagcctttgtggctgggattttggcattctttcttgatgtaacagtgtcatctaaagacagtgcgacgaggaaagaccgagggatgttttggtgggatcgattcatgtcgttcaaatcagatactagaagtgaagagttttactctttgcctttcaatctcaacaagtattttccctctgtgtgatcaatgaaaattatgctgaaagtgttcattggcttggcactgactctactcttatgtataacattttgtatatcaagtataactttattttctcaaactgcgtcccgtttatttattttggtaatgtacttctttgttgtgtttgcctgttttcagcgtatggcactttgcacagcttgccgtttcaggtagatgtgtatttgactgttttttctagctggaatatttttctttctttagtattgtattgggctgccaatgcgagcccaagcccgcataggcgcataccgcccgttccgacactttgagcaactagacatgatgttctaaatctgcaacgacatgtgatcctaaaagcttcacaggcacaaagactaatcctcaagcccggagaaaccatgttaattgcttgccaatgctactcgaacccaggtggcgggaattactctctaccactggaccaaggcgacttggttaaagagttgtatccactttttttgaagatgaaattatgtgatggtagtgttggtcccttctccagttttcgctgttaaatccttaaacatcaaaagattcttctacttctaaacaaccaacaaaccaaacatcttcatatgagtctctttaccatcaatttttcccactctcttcatgtaggcacaattgttgaggtttatgaaccttgcttcctagcttttgtttgaaaacatgaagctctcgtactactttgttgagattaaaatcgaagatttgcttagaaagattaaagctacaactctctttctttctaatttagcttcttaaccataggaat

SEQ ID NO: 895 - DNA, 3052 bp, Arabidopsis thaliana landsberg
tgcatatatattacattaatttctccacttatctaccgcttaactctattgtagcctatgtttcatgataatggaccaaaggatgttgttgaacctggcttagttggtacccatacaggggccgatgaaatagctgatgctgacacagagatggtagacaatccatcaagtttaccttcaacatctgcacaggtatgtgttagtcacttgttctttttccatatgtgtacgcccataagactttgaaaattatttttgtttcaggaagaagcaagagatgccagtgctgcgactgaagctaatggcagcgagtcagaagaaacttatgagccttctgatggagatacagctcacatacctagcacaagtgtacgtacatttttgtcactatgttctgtgtacatatatattgtttcatacattagtagaaagtttctttccgatgataaattctacaggttgaggcggcaggagaatccaaattagtgacagggatggaagttgaaatacctgagaagactcacagtgatcccccgtcaccatttcaagtagttaacaatgtaagctaactcttgcaacaaataaaatgtactatttactgttcaaatgtataaaatttatattatgcaggtcatacgggagttggataccaaagccgttggtgatttggctgcagctactgatgtggaggtaacaatttgtgtgtttcaattcctattttcggaatagcatgcataggattatatgtgtacattatatagatttgtgtacgttaacttgcacaggtagtcatggaagagccgggtattgtcgaggggtctgtaggaactgaggatcctaacccagggtcagatgaagcagacaagaccgatattcctaaaaataatgtatgtacctattttaaacatagaaaaacgtatgaaactgttgttgacaatcatatttgttaataggatgaatcagacaatgctgctgctgtcgaagcaaaagaagaaaaaaaatcgtccccaaaggtcccaaaaaaagtgaagaagcaacttgtctatgaacaggatgatgcacatcctcatggttttaaggcaaaaacagtcttggtgcccgatgtaccaactcaacagatagaggttgttatcagggctggaaatgtctcatacaaccccctggacatggttgacccttcaaaagtagaggaattcagcaatatcattaaaggaccctctatgtaagtacattatattaaaatggattatttaatatctcaatcatcatttttccaagtcttaaggttgttatcaaatatttttctggatttacaggattcacactctttttcgggtttcgcaaagtgcccaacgagttttttgcgaaccttctaacacctggtgaatgggtcgaaagttcggtacgttgcatttatatacgtacattccttgttataaattgtacatagatgattaaatttttcgtggaagtgtacgtacactgatatattttttgaacatttcagcatttagaaatgatggcaatgttgatgtgtcacaagaacggggaacagatgatagcaaacagatgtattgtattggacatgatgctgacgcatctacttaccaagcgggtgggcgacttcaagaagtgtattaataagaacgggttcaaatggggcaaatttctgtccgacattgctaatggagtacacataaaccgtgaacccaatatgaagtggctgaatgatgtcgatgtcgtgtatgctccgatgaactggaagagtgaacattgggttgctttgggaatcaacctcaaagaacggctaataactgtgtatgacgctttaatatcgcacacgcgggagtcggctgtaaagtcgagaatgactcctatttgcaaaatgatgtcgtacttagtcagagcgatgtgccaggatgtattgacttctgcgtactcagttgaaccttttgagtatgtgcgttgtcctaccgttgctcaaaacccaactacaggagattgcgggccttacacgatgaagttcttggagttgcttaagtttggaaaccctttttcggacttgacaaccattcgagaagcacacatggtcttctatcgtcggaaatactcggttgacatctacgagcacggcaagcgcgaggccggttctgtgcatttgctttaatcgtccaagaacaatattctgaatctttgcaactaattattttgaacaaacctatcttagatatttgattgcaactacatttaattttggagattgtaagaagttaatttagtttcctcgatcactctcttctcgtacacatcgttcacttctaaaacagaatgtaaatgtgtacgtacacgttaaatacatatgtcatatatctatatgtctcgtacactgcaaattaactttctaacataactcaagtgataaattgatttgacagccaacgcttaccaacacatgtatgacattcaattcaaccgtaattgccccaaccaaatacacagtagtagttattaaagtgaagaacttactgacaatctctgactatctcatttcaaacatggttaacccgactctttccgacgatttactctcgaagatagctaagaacctggctgaccaatgctggtccgaccttggtccactggtacgatcaggcactcgtggaagagacattgtttaccgtccggatgtcctcaaagatgccaatattctcaccttgtgtagctcgcccgatgacttccaagctggagggggccacaatccctctggatccgctgatgaaggccgacatcgaccatttttcttaaggtgttttgcagctaataattccacggccgtgtattacgaaggtattcgtgttctaatgcatgaacgaaacatcaatggagccatcaagctcttatatgggcgacttgtttctacaactcttcgcccgcaaccattatccattggactcggttgccactcgagttttgggtgatgagttcatcgaggaaataaagaagtttgaccctccatacagcaatacatatggtcctactttctcttatccta

SEQ ID NO: 896 - DNA, 724 bp, Arabidopsis thaliana landsberg
ttgtacccaattgacctccctctgagtggttcacaccttcattctgaatgagagaagtgttgggatattggttcgacttggacctgaaacattacttaatcgttagtaatcaatctttaatctgctttctataagcaatcaaactatcaaccaactgcttaaaagctaatcttaaaggaagcagtggcaaaaatgcatcattttgcacaaccattaatcagaaacaatggagtaacatttcaaatatgagagcactatcattgaaatctatcagttgtggcaaagttacaaactttcatcgagaccttatgttgatatccaaaaacgataggtgaatattcaaatccaaataacttaagaacatacagagaaagactgaaaattgaaagtacctcttgtagccgaggactgttccacgaacatacaatctgcataacagcaacacaaagatttcatcagattaaagtgaaccagtaacgaacaaattcaaatcggagattcagctgagaaaaagagagcacaatcaaaaccctaattacctaactctctctccttgacgtcccttcattttcaatccttgtaactctcgtcttcctcttcttactctcttttaagacggcgagcgaattcacagagaaaaaccctagctaacgttattaggtcaagactttatatggattcataaataagctcagcacagaactctattgggcttatatgctat

SEQ ID NO: 897 - DNA, 823 bp, Arabidopsis thaliana landsberg
  unsure (1)..(823): unsure at all n locations
ctagctcctgttttgacttcctaggactcttgggaaaaggaatcttgggtttggttgccctttctgcagctgaaatcgggttttggagaattcgcaggtctggtctcgggtggagggtgggcttggattgaagatgcataattctgaatgaagcttgtagtttgctgaaccggtgttggagatgtagattttttattatagctcatgtatgatacatattctctgaactatcaacatgtgcagcatactgaacttgcgttttccttacaatgtcaacgattttggtacgaatgctcaaagataagctttcaatcaacattgttgcatcccctggatatctagacatgaaattcccgttactagctgcatccaaagccatctaattatgcaaaacaactcctctaaagaagatacctaacagctgaacatcactaaaaccaagatgcgggcaatctctcttatatcctttgaatttgatccaagtggctttaaattattcaacggtttcttgagagaaggtagagatcttcattctcagttggtgttgatcgacaccctcggcgatttctggtatcaagttgccctgttcatctattttctgaccctcatcgttgtatgcctgaccatatttgtcttgtaagactccagcagcatcaggtctgataatttgtgtcaacatatccactgattcctagctttccagttgttgcgttcgaattcctattagctcacgtcacaagaaaaataagaaaaagaacgtgtgagaaacaaagtaaaagaaaaatttagactaaattctagtaactactctgtcngttacaga

SEQ ID NO: 898 - DNA, 10999 bp, Arabidopsis thaliana landsberg
  unsure (1)..(10999): unsure at all n locations
caacacagtcacaacaaaccttttgttccctacaatcaaggttttgttcccaaggatcaatttcaaaggaactaccagcagcaaccaccacctgggtttgcacctcagcaaaaccaaggtcctgctactcctaaggctgacatgaaacaaatggtacaacaactgcttcacgggcaagcctctggctccatggatttggcaaagaagatatctaagttacataacaagctgcactgtagctacaatgatctcaatgtcaaggtggaaacactgaataccaaagtccgatacttagagggatattctgcatcttcttcagctccaaaacagataagcctactaccaggcaaagcaattcagaacccaaaagaatatgttcacgctatcactctgcgtagtggaaaagcacttcaaactagggaggacccaaagacagtcactgacgacagtgaagatcaagatgggccactcgagctgccactcgaccactttactcgaccaactactcgagcaaccttcccagcaacatcaccaactgctccaaaaccagttgctgtcaagaacaaagaaaaggtctttgtccctcctccttacaaaccacagcttccatttcctggccgtcacaagaaagcattggcagataagtatagagctatgtttgcaaagaagattatggaggttgagttgcggatacctcttgttgacgctctagcgctaatcccagaatctcacaagtttctgaaagagttgatcgtggagagaattcaagaagtgcaaggatggtggtattgagccatgaatgcagtgctatcatacagaagaagatcattcctaagaagcttagtgatcctggttcattcactctaccatgcactttaggtccattggctttcaacagatgcctatgtgatttaggagcattagtcaatctcatgccgctctctacagctaaaaggctagggatcatggaatacaagttctgcaacctagctttacttttagttgatggttctattgcacatcctcatggtctaatagaaaatctgcctgtcaagattggaaatgttgagatacctacaaattttgtggtattagacgtagatgaaaaaggcaaggatcccctgatcctaggtagaccattcttagcttcagctggagcagtcatagatgtcagaaatggaaaaattaatccgaaccttgaaaaaggcatcaagatgaagtttgaaatcagagaagcttcagggaaatcaacaacaggagttcagaattttgggattcaggacatggaagttgatgaagaaatagaatctgaaacctcaccaaaagtcaactatacttctcaactcagcaagctgaaaaggacttttgaccacaagaagagagcaacacaaaggctagcttagactgaagatcctacagaagatgaggaaaagatttaaatggcaaagcagagtcatagagggattatcttcaagggtgatgaagctgaaagatcaactatggatgtttgaaaaaagagttaaaaaaatttcaaatggtattgatccagagaagatggaaactgcactatctatcaaggaggacgaacatttcacaacataatggcttgcaccagaagataaaaaaggagttcacttagaggaaagaagcctagagagcaagttgttgagtgagggggaaatctctattccgacttattccccagaagaacactttacacttgattctgttactgaaaaacttctgaaactcaggatataatacaaagctcaagaggataccattggggagctaacttacaagatggaaggactgaaccatgcaatcttggaacttcaagaaatggttaaaggctaccctagttttgaatttgaggattggtcaaaggagcctagctcaaaggaagaagactactctgctgaccagaatgaagcttactttgaagaaaaattaaatgagtactcatcctaccatatgtcaagagaggatgcagaatatgattcaggaactgaaaattcaaccactgaagatgaggactcctttgttcctctcttcaaccttttttttgactgaactctctaagagtcaagcttagtgacttgaaacaagttcactagggaggaagttccatgtctatccatgtaaataactttctatttttcttgttatttttgatgtttttgtttaagtgtttcaggtttgttttagtgaccctaagggagtaaacggtcgagtaaattcaaaccaccccaagaaagatctcaaccgttgataaagtaaccaaaggagaaacattctccattgtttgatagagtgattttttgcgattcattctggtccgtttgaccgagtgattgaggatggaggatttctcaccgtctcatcaagtgaagaaaccaaagagaccctcttcgtaacaccgacgcctcgtgaaccgtctttattgaaacgctcgcgtccctttgtcttcttgtcccccccccctcccataatcactttggtccccccattgcaattcccgaactcaacaacctcatctctccatctcccataccaaagcattctcgaatccttacaattctctcgttatctccttcacttccctttcttatcaaaaacttttcacaaattcatttctttcctccatcattcaatatcctaatctactgaattttggttttgagtttctcccacctttgttcttgatgatgaatagacgctcgcttttgtcaaggattcaaaacaaagctctctccccatcgaggaggtacccaacaccttcttcgcatgcaacagctagaggaccttctgaaccatcacccttggggtcgagcaggagagaacaagctagtttcaagatcgatcatagtgaatcgagccaagaggaggaagtgatccaagaagaagagaccttcagctctccagctggaaatactcgatcccgaaggtcgagtaagtcctctgcaagggaattcttgaggaacaaggcagatatcactcgagggaagaagcccgtggggaggaggttggagctggtagatgaagactctgaggaagaaatggcttcgccagaggaagatgatcaaacagagaaaggaggtggtgatgatttggaatcagagaagtgtgcaactcgaaacgagtactacaagctgctgaagcgcaatgagtttttaggaactcgataccctcatcccgagaccatggagagactcggcatctatgatgatgtagactatatgtttaagcagtgcagcctgaatattcacatgtttcggccaatggaggggaatgaggaagagacaatccagtttctttcatccgtggaattgttcttatatggagagtcagagagcgatgaaatcagcccagacggaagtttgggatacttggagttctgtgtatatgacgtggagtatcggcttccaatagagcatcccgagctgatgtatgaatttccaagcggaaaagtcacaagtcatcgttttgacaagagagagcttcagtcattctgggccacacttgggtctaagcatggattttcatcctctagtaccaagagcaacgagataaggagtccggtggttagatactttcataggtccttggctagtgtgctatttgcaagagaaaggaatggaaccttcgtcaatggagaactagagctgatggagacagcgcttcaagagctgcttggtttagcatcagatggtacagttctagctggagatcagacagacacttcggtctcattcttcctaatcgagcacctgctgagttacagaggatggggtaagggacttaagaaaccaggaagaatggttgtgggaggagttggaaccccaattctgagagcatgcaatgtacctctacattcaaagccgattcccccgagatggattgatatgcaacaccttatcaattccaagagtttttggtcgcagcagaagaatgacctatataagtataggttcgatcaccccacagcaggacaatatatttttctcctcccaaatcccgctttcacttcgattagagatggtggcaacattgagttttgcccaccattagagaacctctatttttcaggtgatgaagttgtgccgatggaaggaatgaataatgatgagaccccaatccatcattcagataatgaggcagaacctatggacgtgtcttacgcaacacaacaattttactttgaggagtactccgcaccgagtcaaagtaaagactcaaaggaaattcacaagcgccttggtttcttctaaagctggtgtatgttccacaacaaggctctcgcgacactcaacaagaagtttaaaaatctccaannnnnnnnnnnnnnnnnnnnnnnnnnnnnnnnnntgccacagagcatgctttgggagaagcagatccactcgtcacgaacctatgcatttcgatccgccttcaccaccaagacagtcttcatatgagccgagggaacaccatgctgcaccttcaccaccaaggcaatcatccttcgaacctagagaaaaggaaaagaggagcaagttgaaaaagcgaagaagaacaaggaaatcagacgctggagcaagccattctactgcaccacttaaggagccactcgatcaacaacccgagcaaagagtcaagcatccagctaatccaagttcagcacaacccgttccttagagttacacaaaggagagtatggacgatttcgttttctcctacttcacctgaccacttgaggtaacaccacctcaaccattgtatataccataacattttccttatttttgtttgttctttgttttggtcttgaattctttctcagatttttatcacacaagggactgtgtagtttaagttcgggggagggttcaagacaggtttaactttgtgttcttttttcttatttcaaattttgcatcatctaaggcagtttcccatacccttagcctagccttatttcaagtcaaagatcatttgtgtgtgattgtgaggtcttttttgattgagcttagtataacgtgttaggtatgagccgacaagaacagtgtttcatgtagacctagcccacgctttttgggttagctaggattagggggagacttgtatttgggattgggattgtgtatggaatgaatgggaatgagaatgagaatgaaaaaaaaaaaaaaaaaaaagtaagagtttagagttttaagggggatacaaaagtgttaagtctagtaaagggtttgaaattcaaagaagttacgcattgtgattcaaagaaaagggtaaaacgccctatgtgctaagattagaagaaaagccttaagtttgtcaaagtatcaaaaccaaacccgctagactcttaaatcgtttcaaagagaaccccttagaacttgaaccaaaaggagagaaagaatgagaataagggtggagttaggacatctatgggaatgggatcatcctatgagctatcatactatatcattgggtagatgggagtctgtacttgtatgtgttcgttggcttttacctttagcattctactgaaactcaatcttttctctgagagtcccctgttactcgaccaaaccattaaagggaccatttttgtctcttagcctaagcccgaaaccaagtgagttcataaccattgcattgcttgatccactgttcgtgcttaatgaatgttaaagggaattggttgatgagaatgcttgaatagattaaggcaagttgttaggttgcattgtgacgagtatggctaacgtttttaagtaagggtctatcatcttgcaacctagaattagctacctggacattgagcttacccattttataggcatgcttcggttttgaatccccaccttcaaacctctccttcaacataagattttttgtttgcttgacggcaagcaagagataagtttgggggagttgataacactgtattttactcattttaggtgtatgtttattaccatttagctttgcattgcaccattttagcttgttttgcatacttaggcatctaggatcatcttgcattcgcattgcatgttttggtgtgttttcaggtgcaaaaggagcttaaaaggactctacttgatccattcactcgatccaggcagctacagaagaggcatcattctactcgacctcttcactcgatctaggcagctacaaaagaggcatcatttcactcgacccctttactcgatccaagatgctacaaaggaggctgcagtttactcgaccctcctcctcgatcaaggcaacctcagatgaagcagcagattgatctactcgcccgtcctactcgatcctctactcgaccaagggtgaccaactctacaagacttgttgatctatcaaagtgacttcggatcctcctcattccccactcaaccaaacatctgagcatacagataggagaggaagatgcatctactcgaccaattgatcactcggagcatagacacaaaggcgcaaactttgcagcatcctctttactcgatccccaagatcaagtatccgtccaaaccccctcaagtctcttgtcttctagtgaatctagggtttcaacattttactataaatagatcactttgggatttgtccaaaggatctatgctttatcttctcagtttttctttgtgtttatgaatcatgaaaccttcattactcttaatctatttcgtctttgcatttgattgtttaagtatagttgtttagcttgtttaaatctacattttggtatgattttagtaatttctgggtttgtgttcttgagaatgttgcttgagtagtgataagggttcttgaggatggattagattagggtaatctctaggttagttaggtggtaagtgtttaggtttatacccttctggattcgcttggcccctatgcggtttttgcttgctaatgtggagattcgatcatagacgtccagcgtccaaaagacgttcaaatggatgtctgatctacgaattccagagatatgtagactctagcccaagggattggatgtttgattctaggtacccatttcagagctttgcgataagttctccttgatataaccctatttttactgcttttagttatgatttaggtataggtttttgaatctatttcttatttctatagtcttttctagttctttacaggtctttacatgtttgggattcatttggagataatggagcattctggaggaaaactttgtgaagacgttcatgttactactggctacatatgcaacggtgggattacgtttctaacggttagttctcgacttataggtatgtttccgagacagatttatatggagtaaatcatgacgagtttttattgttttattgggaaattgagcttggcttgagctaaatctttgtaagagttttccttaatcatggactcaggtcttcaggtcttggttgaaggagaaccaagttagagcttaagagcatgcagtcgcagttgagatgataagtttgtctaaatgaggaagaaggagaattgtgttgtcattttctactaggccaaggtgagggtggtatttgcgaagcatggtatcattttcttttgttatgcttcttgacgcataatatgtaggcttagatatgattgtataggattagattacatgatgatatgactttatgattgttgagtatgatgtttgataatgtgatgttatgtatgatattataagtatgtttatgttaagtataagtatgtatgtatgatgattatgtatgtttgtatgaaagactggggggaatcgagctatgggtcgtggtctccctaataatgtggacagtgatgggccgacatgttacatgctggtcaagaaaggctgacgagcccgggatgcatgggagtgtctgagccacgagggccagcctccactcatgaggttctatttgtcacgaggatgactggacctaaggatacatatgtatgtgctatcatggatttatggataaattgattattataaatgtgtcattagtagttaaagcatgttangctgatcgcttgtgtctaagtgtatatgttatgatgatgattgtataactttagaaagtgttctatgtttcattggcagatttgattcccctcactaagtattctttactcacccttttttccctttttcctcaggttagtaagcgtgaggagttatgtgcaatattttgttcgtgtgtgaagtttaaagaaaacattttagcaagatcagatgaataacatgccgttttggcctatatggcgggataggtgttacaaggtgcaatacccggatttggtggcagacaccgtcgtggtcaaaaagaagaatggaaaagacagggtgtggatcgacttcacataccttaataaagcttgcccgaatgacagtttcccgcttccgcatatagattgtctcgtggagtctaccgctgggaacgagttactaactttcatggacgccttctcgagttataatcaaataatgatgaatcccgaagaccaggagaagacgtcatttatcacagataggggtatttgttgttacaaggtaatgccttttggttttaaaaatacaggagctacttatcagcgattggtcaataagatgttccacgagcatcttggaaagacaatggaagtttacatagacgatatgttggtcaagtcgctgaagaaagaggatcacgttaagcatttagaagaatgtttcgaaattctcaatcaataccaaatgaagctgaaccctgcgaagtgcactttcggagtcccgtccggagaattcctaggttacattgtgacaaaaagaggaaaggaagccaatccaaaccaaatcaacgcctttctcaacatgccatctccaaaaaacttcaaagaagtacagcgtttaactggtcggattgtagctttgtaccgttttacttcaagatcaacagacaaattctaaaaggaaacaaaagatttctttgggatgagaaatgtgaagaggcatttgagaagctctatttgtaagtatcagtgtcaaaccatgcagttagcggagtcttgatacgagaagatcgcagagtacaaaagccgatttattacataagtaagtcaatgacagatccagaaaccaggtatacaatgatggaaaaattgcacttgcggtggtaacctccgccggaaagctgcgtccatacttccagtctcatccgatcgaggtgttaaccatgcaaccactttgaacaatacttcatagtccaagtcagtccggaaggttggcaaagtgggcggtggagctaagtgagtatgatatagagtaaaaaagccgagttagcatgatggcccaagttttggcagatttcttgactaaaccactagtacttggcgcgctggagcaaccagaaaatcaaacttggaagttgcatattgacggatcttcatcaaaacagggatccagagtggggatcaagttggaatctctcatgtcggaaattcttgagtaatcattccgtttgctatttagtgcttctaacaatgaggcagagtatgaagctctaattgtcggacttatgttggcacaaggagttggagctgaagaagtggttgcttattgaattcgcaactagttgtaaccagttcaatggagattatgaagtcaaagattcaagaatggaagcatatctcgaagtagttaaagatctggctaagaatttcaagaaattcgaactcattcgcataccttgaggagaaaatacaaccgcggacgcgcttgcagcactggtgtcaacgtcagatcctgaggtaaaaagagtcattccggtagaatgcatttcgaccgaaacattaaggaggagaaagagaccctcatcattacaaggtctcgagctgcggcacgtgatcgtggcgaacttgagatagagttaccacctgtcaagcagaggaagtcaaaaaggttaaacgtatccgatcccggtgtacccaaaaaaagcttaagcaaggagcccgttgacctaacaaaggatatagtcccataggcacaaactgagccacaaaccaaggaagatatcctcgacaaagtacacaaagcgacaaacttagatctacaaaataacatttcttgttatccacattgatctacaaaacagagaattagaagacatcactgacagttccgaagaagaagaagaatcacacgaattcggcgaatctgataatggcgttgagtcagaaaatggttgtaatgattcagaaaatgaatcagaataaatgttattattgttaactttcgatatttgtgatggagaatgtccctcgcaatnnnnnnnnnnnnnnnnnnnnttttgcgaggcgagcgatcttaaacctaaacattcattctaaacgagttcaattgttcaccttagtagataggctgattcttattacacacctataaaccagactcatcaaataatagatccaattacatatacttatgatagatccaactaaatcatatataaaatcagtaaaaatagggatatatcaactctcccagacttagcttttacttgccctcaagcaaagcacaaaagccaaacccgtggaagaggttttgaaaacaaaggaactcccaacatgctctaccctattgccatgatcattctatctaagtccttatgcctaccaagtctcatcagattctaaccaacatgtacttctctgcaagcttacacaacattatagattccatacctaagttcctcaactatacccaccaggctttcatcgctgggtctcatcaaactagccgacattcaagatccttctagactcattcatatacctttttttttttgaatagctgttaaattatattcaaaaaggagggtgaaaatccacatgttctacaatttaatgcacactttttatactaggaagaaaccgcaacatgaatttagtcttggctttgtcttgatgccagccaaagctgaaacccgtctccatatttgtgtcttcctccacgtccgattgt

SEQ ID NO: 899 - DNA, 1014 bp, Arabidopsis thaliana landsberg
gactaacattgttcccattgaaactcggatgttattatttgaggattatttttaaaaggttattcacaaatatgtttgcgtttagcgaaaaagagatattcgtgattctgttattattagaacgtgctactagcttctattctgtttgtagaacacaaaggcacaacatgtggtatcgtagttattatcttaattatttgctagtagttatatcgactaacattgttaccatttaaactcgtagtctattgattgtggactttctttaaaaagttaacggaaatatcatcgcgtttagcagatacagagattatcgcgatactatttgttatccgaacgttgcttatagtcaaggagaccacataatttctatttaaaccagcgtatatattcgatatacccacaactctatatatatcagtaataatttacaatatctttatgtatttaatgtgtgctggagatatcttcccggatatctttagcatgcttcacctatactataaactattatagttatttcagttttatagagactttttcgtcaaaaattatggtagggaaaagagagaattgattactgaatttcgatgcataaatacttaatattatgatcatctgggcatagatattaatatagaccacaaaattttggccgaagacaaccaactacattttttttttttggtttaatgttaaactttataccaaataaaaaaagttttatattgtacaacgaaaacccaaaaacataccgaattcttaaaaagagagactaatggaacacgttacatagatactaatgagcttagccacacctaaggtgagctagagatacaaccaaagtagacaaccaactacatgtcgtccacttttctttttctttctacatctcgtcaacttattgtgcaggttctcttctccataggtgaaaccagtcccctcaaggctatctcaaatcagcatgcaagattcgaagtctccgaaagcatcttacagtttaaaaaaaaaatg

SEQ ID NO: 900 - DNA, 1275 bp, Arabidopsis thaliana landsberg
taggctatacaataaaggctaactactgactggtgtcaatggtaaaatcttaatttttatcataaacgtttgtcctatttttcttttgtatatctctgttacagtctcaacatatgtgatgcaggttggttgtggtgaagaagaagaacacatttgtttagcttatgaaaacaaccgttaggtcaatctcggacgagagtctttagcaagtgaggtaagaagaaacagtttccctttgtcttccttgagttgaactgtgaattaggataggccagacattattgacacatatgtggtgatgctataggatgatggcaactggaagagtgtggtcagtttctttggagaaaggaagattcgaccagagattctattttatgaagctgtcggatcgatggcctaacaagtgtatcaatatagaggatcccggcattgatgtaaataaaacagtgacatgttccaattcaaaagaagttgtgctctctgttctataatattttgtcttggaaactacatttgttcatatacagggagttcttatcatatatacatgaatggttcagctttattgttatgagttttctgagatcagtatgatccaagtatatctcggcaaagacggtatctcacaattcactatcattggaacaaatatagcacaaaaatttgattttggtaaacaaagggcttttttaaggtctcatgcatttgaccagaacatcgacgaatcgcttgtacatatgttgcttcatgtacattttctcaaccattttgcgtccttcactccccaatcgtagcctctcgtcttgattcctaagtagatacaagagattatgagctaattctttgttaccggatcgccccattgagtgaagtagaccagtcatgttgtgttgaaccatctctttggttcctcctgcatctgttcccaccactgcaagtccataagccattgcttcgattgtcactctaccaaatgtttcaccaactccctgtaaaaaatcaaggttcaaaataaataaaccgaacaaaatcgaaatggtcaaaccgaaatcaaaacctacattttgaacaaaaacaaaactgaaatgttttatccaaaaccaaactgaaattaatcacaaattggtttatttgattcagtaattcaagttcctataaaactgataaaactaaaccaaaacctaactgtaaactactttctagtggaaaactgcatatgcatcaaataatgtttttgaggtgtgaggaggattacctgggagtttgtaacgt

SEQ ID NO: 901 - DNA, 2059 bp, Arabidopsis thaliana landsberg
taatcaagcttattaatttatggagtattaattttatagacggtttcattcggatgtttattagtcgatattgtgggtctcaatagagtcagaggattgagattctcaaactgctcatgcattcttctgctagagagaagtctcaggacattgctatggcgcatgagtctttatgttttgttgtgtgtacatcagttaatgccataaatcatatgtttaaaagacttgtcaacagcaacggaagcatttgcctcgacattttgaaagagcaatggagtcctgcacttaccatatctaaggggaaatatataagcgagaagtttgaagaatttgtagctacgtattgtggaaaaacttcatgatccagccacacttgttctatattatctcctaaactgcattcactaaaatgtaacagaagatgatgccattgactcctacaacgcaaaatacaggaagcaaatgaaacaggagatggagtcattgattcctacaatggcaggaaatgggaaagtggagaacgttgcctaccaactagcaagactcattcacttattgaacaaatgaaacagtggattgcagtcttgcaattaagataaaggccaaatggcattttacataagggaaataagatcatgttgagaaagttccaactactaaacctaacaggaccaaaagaataactacaaatctttaacaaagcaaacttcttgcagccttaggttacaccaaattggcaggggcttgaatcgtcttctcatttcgcatagactcaagctgaggaaccgaaaagattccagtcattgactttgaatgtagagagtgattgtttaatgatatcacacattggcatttttccagattgtgaagctgggacagctaaaccagatcccacagcatccgcgctttcgctcagaggactgcacaataatacgcaaacaccttagatgaaaagacatgtggtacaacaacaacaacaataaccatattttgatattcaagttctgtatcaaaacgatgcatatctatattcaactgcttgcaatataactgagtgactcaactttgtgggacttactttatcaggataggttcataggcagtcactaagacatctgtatcaactcccttaagacgaatatttgccacatatacctgcagaatcatataaaccagttggtgtctcaagtaacaaacccctttagaataaatagagagacagaacaaggagaagcttcatactctcactaggttttgtgcttctcttccctgtcttcctttggatatagcctgtaatgatccttgttaaggagaaaacaaatagaaaggaaaattatgagcaaagacatcatatgtttatggacattaccatctctccaatagcagttgtcgcaacagcagagatgtttctgaaagacagtccaggcgcctcaatgacctctgattgctcaatcaactgaaaattacacagcaacattactagattgtcttcttcatatatatcatcaatcttggtaaagattaaccaaaaacacaccagtattagttctatttcgactagtttcagagactgaatccacaataaccaaaaaacagcctcactagtatcatcacaggcaaaaaggttccaactttgggaaatctatacacgttaaactctatgtttgtactcaagatactagatgtattctagagaaataacaccactagttcttaaagttggtttgtctaccataagaagagttctagtgtagtagtggtattacctgaaatccttcagcatcttgctcactcgcaagatcattaaggaaccaagaggcactgccaatgtcaccaacctcagccttgaaatccaacaactcagaaatcaaactctcatctcttgaaggatccacagacacttgctgtgaaaaccaatcaatcaaacacaaatacagagtaaactagagattcttctacacatgtacttacatacaatgccactgagaatagaaccaccaaacctgatgatctggaacctgacggatattactcacatcctgaagattcacaataagga

SEQ ID NO: 902 - DNA, 1370 bp, Arabidopsis thaliana landsberg
  unsure (1)..(1370): unsure at all n locations
tgtcttcgcttgtttcgtagatttgatgcttcctatgttaagaataagctttcttctcttttagttttggtaaccaaatagtttactgatgaattgctttagtgaattagaagtcagtgtttatgtgtatgagtagccaaaattgtacattgtaaaaggctaacaatcgtcccttacaaaacagctttgacggtgcaggtctcttcaagtgtgaaagacaagctctcagcagccagtgaagaggtcaaggagtcattcaagctcgggaaggaggagaatgcagagtcagcgagttcatcaggcacaagagcctctcaaggagaaaaacagcaatcaggttctacggaggaactacatacattttttgcaaaattcaagtcaagtctttcttcaccaaaggtatccgaggtgttttacaggctgaaggaagccaaaccctttgatatagtaaagcaagcacttgacattgtgaaggatgagttacgtgggaacccatctagaaaaaagttcctggaacatacacctcccccgccattcaccggtgagagaagtatgagaacagagatggtggttacgcaaacaaaacagtctaagttgcaacaaaagtgggaatcctttagagaaaaggtaagtagccctctctgtctcttccacttatgccatgttttaaagtcctttgttgagtattttttggtatagatgcaaggttctcctgtatttaaacgtctaagcggaatgagtgagcctgttgtcaacaagagccaagaggtaacgaacaccttctctttactcattttgttcaatcatcttaccttgcattactctttttgctgatacttctttatgcagattgcagaagatgtgagggaaatatgggaaaccagtgataatccaattgttcacaagattcaggagtatgctctaacttctctcttactatcttcccttaaatttaactttacttctgcttcctaacatgtgcattcttttgatttggcagcatgaatgagaagttcttgaagcctgcatcaacttacaaagagatacgcagccgagacccgtaagttgtatagatgcttagtattggttttgaagatgtgcatcttggtaataatattcttatgtctttcatggttagatcgttgctccttgccagactttgctgcagaaattgaggaagtcatcaaaccagtcttgaatgcatacagtgaggtgaatcttaggttttgaaatagatcatctgctcccattctcgnttatgctgcttctaactaactctttgcagggagatgttgagaccttgaagaatattgcagcaaggaagtgattgaacggtgcacggcagagcgcacagcttaccaaactcatgg

SEQ ID NO: 903 - DNA, 7522 bp, Arabidopsis thaliana landsberg
ttttattttcttttagttttaactcgtcagtcacaattatttattttactataatgtttttttttgttaatgaaaaagtaatttttctataatgttgttctctttatacttgacattaatgttctagtaaagttgaaggctaattagcatatataatcattgtaaaaaaaaagagaaattataagaaagaaaaattataaacgtgctttgttagaacatgtctttcatatttagaattttacagatggaattaatttttcatatttgactttagatctcattaattagaacactaattatgtctatgaaaaaacataggcaaaatgataacataaacaaagaacacttcataaatatggtttatatatagaatcggtcaagtcgacgttctctcattgtacatttaactaagaacatgagtagcttctatggaagctttaggggaaattaaaagaaacttgcttgcttaaactgatgaaaaaaaaggaagataattaagaaccgagaactcctagtgtcgacaatgaccttgttgcttgctctccaagcttttctttgccacttttaacatcatcctcatcggacgatgaacttgtgtctgagtcattgacttgctgtttcttcatgtcctcaatgagttgatattcttcccaatcatcccagtgacgatcagtgtcactgtcatcatcatcagttgttatcactccctcatcatctgaatcaataatgtcatcatctaagaagtactccctctccggcactgactgttagtgcaccctctgtcaggacaaaccagaaggagtgctgattgctggaacaagctggaagctgttttagaagactaaagtgaagatcaagtaattgatgctgacgtagatatgccgccaaatgaacgaatgacgtggagatcacaacaggatgagttcagtttggagaggagatattcacgcgaagatttggagtgatccaagatctcgaaggctaacctagaagaccaaagacctcgatggtataaatagaggtgctaaggttcttgttagactttgccgtgattgtgagtgaaaaagctagtgcaacgcttttcattgttagagactaatgtttagtctgattggaattctagagagatgaaagagtgtgttgttgtgatctgctcttgtgtgtttagggaaatctcaagtgacaagctaaagtagtttagatcttgtgtaaaacacaattaaggtagttgtaaacttcttaatcagatttctaataaagtgatactcagtggttctgagtttggggaatacgattcttggttcatccggaattttatttggtatcagagcgggcatctaaaccaagttgtacttaacaacaggtgcagatcctgcagagaggatggactaccccaaagagttcgttgcggtcggtaaaacaatcatgttggaaaaagggaattatggacactggaaagtgaagatgagagctctcatacgtggtctaggaaaggaagcctggattgctacgagcattggatggaaggctccggtcatcaagggagaagatggagaagatgtgctaaaaactgaagatcaatggaatgatgcagaagaggcaaaggccacagctaattcaagggcactgtctttgatattcaactccgtgaatcaaaatcaattcaagcaaattcaaaactgtgaatcagctaaagaagcatgggataaacttgctaaagcatatgaagggacaagtagtgtcaaaagatccagaatcgacatgttagcatctcagtttgaaaatctcactatggaagaaacagagaacattgaggagttcagtgggaaaatcagtgccatagcgagtgaagcacacaatctaggaaagaaatacaaagataagaaactggtcaagaaactgttgaggtgtctcccatcaaggtttgaaagtaagagaacgaccatgggaacgtcgttggacactgactcaatcgattttgaagaagtagtgggaatgctccaaccatatgaattagaaatcacttccggaaagggaggttactccaaaggacttgctttagctgcatcggcaaagaagaatgagatacaggaattgaaggatacaatgagcatgatggcaaaagacttcagtagagcaatgaggagagttgagaagaaaggattcggaagaaatcagggaactgatagatatcgagaccgaagttcaaaaagggatgagattcaatgtcatgaatgtcaaggatacggacatattaaagctgaatgtccctccttaaagagaaaagatctcaagtgctctgagtgtaatggtcttggacacactaagttcgactgtgttggatcaaagtctaagcctgataaatcctgcagttctgaaagtgaaagtgactcaaatgatggagactcggaagattatataaaaggtatcgtgtcttttgtaggaatcattgaagaaaaagatgaaagttcatacagtgaagcagatggtgacgatgaggacaactcagctgatgaggattctgacatcgaaaaggacgttaacatcaatgaagagttcaggaaactgtatgacagctggttgatgctgagtaaagagaaagttgcctggctggaagagaagctaaaagttcaagaactaacagaaaagctgaaaggagagttaactgctgcaaatcagaagaactctgagctgattcagaaatgcagtgtggctgaagagaaaaacagagaactttccaagagcttagtgacactcgcaagaatatccacatgctgaacagtggaacaaaagatttggatagtatacttgctgctggaagagtgggaaaatcaaattttggtttaggatacaatggtgctggatcaggtacaaagacaaattttgtacgaagcgaagctgctgctccaacaaaaagtcaaacaggttttcgaagcaactatgatgctgttccagcaagacgcgtgtaccagaatcacgatcactatcattcccggagaactgtgacaggttacgaatgttactactgtggaagacatggtcatattcagagatattgctacaggtatgctgctaggttgaataagctgaagagacaaggaaaactatatccatatcaaggaagaacctccaagatgtatgtcagaagggaggatctctattgtcatgtagcatacacctcgattgaagaaggaataaagaaaccatggtattttgacagtggagcatccagacatatgacaggaagtcaatccaatcttgaaaattacacctctgtcaaggaaagtaaagttacttttggaggtgtggataaaggaaaaatcaagggaaaaggtgatttgactaaagcagaaaagcctcagcttacaaatgtgtactttgtcgaagggcttactgcaaatctgattagtgtgagtcagctatgtgatgaagggctgactgtgagtttcaatagtgtaaaatgttgggctacaaacgagaagaaccaaaacactctcactggagttagaactgggaacaattgctacatgtgggaagaacctaaagagtgtcttagagctgaaaaagaggatccagtggtatggcatcaacgtcttggtcacatgaatgcgaggaacatgtcagaaatagtgagcaaggaaatggttagaggagtacaagagctgaaacacatagagaaaattgtgtacgatgcctacaatcaaggtaaacagattagagtccaacacaagagagttgtaggtgttgttgagagaaagaaccagacttttcaagagatggccagagccatgattcatggacatggagttcctgaaaaattctggacagaggctattagtacagcatgttatgtgataaatcatgtttatgtgaggattggaggcacattcgacaagttggtcaaagcgtttgtgaagacaatgacaactaagttcaggttgagtatggtaggcgaacttaagtactttctggggttgcaaatcaatcagattaatgaagggattgttatctcgcaaagcacctatgctcagaacctggtgaaacgcttcgatatgtgttccagcaatccagttgaaactcctatgagcactaccaacctctgcagctgctgtactaaatttctttggatgaaacacatgggtttggattacggtatgtctttttctgaccctttacttgttaaatgtgataatgaaagtgctattgccatatctaagaatccggtacaacactcaatcactaaacacatagctataagacatcattttgttagagaattagttgaagaaaaataaattaccgtagaacatgtgcctactgaaattcaacttgctgatattttcactaagcctttggacttgaacatgtttgtgaacttgctaaagtccctaggtattggtgaagtctaactatcttcttgatgagtgtttgtgctgaaacagggttggttgtacagtgagaagcaagttttcatatctattttacaaagtgtcataaccggttttcaaatcttctactgtaaaaagttcaccaagagaaagagctacccttcatggttcggagatgcaaagtcagtaaagtgtgtgacagacatagtgtgtagagcattaaggaagggatgaaatgcagaaaggggcagaaaagaagcatttcatttcataagatgaagcatgagcttatctaagacacgagggacaaaggagaaatcttgtcactaacccgatgggaacaaaagagaaatcttgttcacctacactttggagagaagggatgtcaaacaaaaatattgagagaacaagtaagaaagagcatcactacactctgcaacaagacaagagaaaaaaataaaagaaaaaagaagggggtgcaaaaacaagttctctcactgacatctcgtctctctacagaaaggagcagtaagaaacaacaataagttctgaatacaaaagatcagacttgtaatttatcaatagcctgaatgttgctgcacagtctgtcacactccttgttaaaaggactcgctaacactctgagatatgacgttgtgaagactactcttggagaatcaacattctcttttgtgttgtgtcagcagattatgttctaaatttttttgaatcaagttacaatgagcttagtattgtacaatcacctctgggacagttctggacctcagtatgagggagagatggttatcactttgctgatactaatggggacttgttctatgtgattcaagatggcttcagaaaaaatgagttgagcttcagaggtatttaaatttgttttttaatcgatttcggttttatgttaagtggtgtcaatttcggcttgatgtgtttttatctgattttaaccggaccaaaaaccggttagcactaatgtttggttttgagttgattggtttgcataaaacaaaatcgaaggcaaaaattgaaggggaaatcaaaaaggttaccaccaaaaccctaaatctctaaacaatggcgagaacccgcggcggctcccggcgtccgacaagagctccggctgaaactcgaaccgtggcgagaacacgcagcgaagcccggcgcgctgctccgactggacctccgactacaactccaatcgtggggagaacacgcagcgatgcccggcgtattcgaaagatgtttaatccagagtatgtgtttggcacatccttacttgtagatttgagatatgtctctaccttgctgacgacaataacgacacatatggaaggtatggtgtcttggtcctgtgctcagtgtctggtttaattggtagagtgtctagatagagtttttgatcaattgtgtcatgcaagcagggggagattatggactggtccctgagaactctaattcatttgtaagctctctagatgttgataacgaagaaggctaggtctagttgtgggggagtttaggattaagggggagtttttaagctttggttgttaatcatgctattttggttttagtagttgttcttctaagtaatgaatgatgtattttgaatcttaaaaacttatttatgcaatctatgatgagaccctctattggttattttcgctgcttattatctctatgacttgatgtgtgcttgtgagttttctttgaggggtttcttgcaggattgcttgaattgacaaattgtatcaaaaagggggagattgttagtgcaccctctgtcaggacagaccagaaggagtgctgattgctggaacaagctggaaactgtttcagaagactaaagtgaagatcaagtaattgatgctgacgtggatatatcgccaaatgaacgaatgacgtggaaatcacaacaggatgagttcagtttggagaggagatattcgcgcgaagatttggtgtgatccaagatctcgaaggctaacctagaagaccaaagacctcgatagtataaatagaggtgctaaggttcttgttagacttggccgtgatagtggtgaaaagcaagtgcaaagcttttcattgtgagagagtaaggtttactctgattaggattctagagaaatcaaagagtgtgttcttgtgattatctcttgtgtgtcttaggaaatctaaggtgacaaactaaagtagtttagatcttgtgtaaaacctattaaagtagttgtaaacttcttaatcagatttctaataaagtaatactcagtggttctgagtttggagaatatagttcttggttcatccggaatttcaaatattgtaggccaataaaagatgagaggtaccgactagttgtgcaatcaatgcattcatcatgaaaaagttgaattctctttgacgcgtcagggactccccgaaaagatctaccttttccattttaaaggagcacaaattttttaatgcgatttcttttttcataaggtatatgatcatgtgaagatgaaaaaagcattcctcaaaggcacttattaatttgtgcagagagacttcatatgtatagattagaagccatttagttcttccaaagtcatcaaaaataaacttatgtaagttgacgtaaataatacacgatgatcatatttcaatatttcatataaaagggcctctcgcgcgctgtggaaaaatatttcatgcttcaatgatcagaggcaaatcaaaatctgtaatgaaggatttattataaaattaaaactaatttgtcattaagctacaaaacctattcttaaatctcaactaaacccattaagttcattattggtagggccaaatcacattgatggctcgcttttctttcttatgataaatacaaattcttaggtgtactttcagtgattcaagtgtcacatgatgccacacttatttctttcaaaacatccttaattacacacattttattttatgtatattatgatcaatgaatttttaatgatattcagtcacaataatctttgaacttacttatattcaaactatgttatacgcatccatgcatcaatggatattagtatcatttgagttcacgactttaatcccatcacttccaaaacagg

SEQ ID NO: 904 - DNA, 3369 bp, Arabidopsis thaliana landsberg
tttttgtcagaggctcatttgtcagtaaccatttgatcaacggctaaatcctatatccactaaaattcaaccacgtcatcagacataccaatatacagcaacacttgatagcggctgataaaaagatcgtcaacagaattaactctttaaatcacttctctgttatacctctctgttttgctccctgaagaagaagaaacagagcgttcacatttctctgcaacaaaatcatggcattgaccttcttcttcttgttatcgaatttgttcttctccggtaagaatctgccagaaaaatctcacatatttaaagactctaattatttttaaatttcttcatttttttcaatcttaggagttatgtcaaggagcttcacattttcaaacaaatgcgattacacagtgtggccgggaattctatctaacgccggagtttctccattaccaaccaccggcttcgtcctcctgaaaggcgagacgcgtacaatcaacgcgccgtcatcatgggggggtcgtttctggggaagaacactctgctcaaccgattccgatggaaaattctcgtgtgccaccggagattgcggctccggaaaactcgaatgctccggcgctggagctgctcctcctgcgactctagctgaattcactctcgacggctctggaggactcgatttctacgatgtcagtctcgtcgacggctacaatgtccagatgctggtggttcctcaaggcggttccggtcagaattgcagcagcaccggctgcgtcgtcgatttaaacggctcttgtccgtcggagctaagggtgaatagcgtcgacgggaaggagggggtggcgatggcgtgtaaaagtgcgtgcgaggcgtttcggcagccggagtattgctgcagcggcgcgtttggatcgcctgacacgtgtaaaccgtctacgtactcgcggatcttcaagacgcgtgtccacgcgcctatcagtacgcgtatgacgataagtctagtacatttacgtgcgcgaaatctcccaactacgtcatcactttctgtccttctcccaacaccaggtaaaattcctttaatacccttcttctatttactttcacccatttcgttaaaaggtgattaggaaatatttactctttcataagtaggatttttttgcttgttgtataatcgaagttttactagatactcaattccattgataatcattaattttgctatacaagttttgtttttctttcaagagttttatgatagacattgtttgtcaggctcctataaaagagagacacgtgggaactaacttcattcacttattcctttatttgcagcttaaaatcagctgaggaacacagcacagagacaatgacgacaacaagtccaagttccggcagtacgacgtcgacgcagatggtctacgaaggtgctctggacgaaagcagtggttcaccatctacgtgtcacggcgtatcacgagcaatcatagtcgttcttctctcgcttgctttttgtcatatgtggtggttcttctgaccagattatttgtcttagtgtctgccacgtatgcgaagaaacaagaacgtatgggccttagaaggccttttctcactatagtaaaaatatttctaaagtttttccacataatgtcaacttttttactccacatgaccaacgttgaaatgattaaaccattcttaaggaaaatcataaaactaaatattcctcagcttttcctcaactattcctttaactaatgatgtaacaaaaaaattaaatcataagttttcctcaaatatttttcaaactttatgtcatcatttagacccttgtgtctagttattatggcacatcctgttttctagccagacggaccttcatatttgatcctggtattcacattctgtctccaacagaactggatcccgcatctcagcacataattttgtagacaacaactattttctacagaatcgagtcgattccaaatgattaaaatcaaaccctttatgttctttatctagtatgaaggtctcagacaagtgtttagtgaggcgattattggcaatgaagatatccaactaccacatctaaagaaatggcttttagcgtcatgacaaatagagatgaaaacaatcacctcttttacgatataacacgggttatatttcaacgaagggaattagcactctttaaattcaattacaatgtttatgatctgtatctttaggcacggttctatttatgagatcgtgtaggacggcttcatcaaaattattatcgaactcttccagcgcctgactggtgtcgactttatgatcatcacccaccaaatacttaatacaatacttagtctagcacccttttttggattcagaacgttgaggctcgccacgaaattacaagtacaacaaaatagtggtaaaatccaattaagacgatttattattatgaaagatacatggctagtgatgaatgaattgacattgatcagaatgatcaaaatatttgagagaaactaaatattcctcagctttaactaaatgatgtaaccaaaaaaatttcagaagttttcctcaaatatttttcaaattttatgtcagcatagttagtatggaactagctactattacattcatttcccatttctaagctttttataacccttttaatggattagaaaaaaagggggaaaagccgaaaaaaccttcatttatttttaatttggccgtttaatacctatacttttaaaattggaagaaaaatacataagttaattttgattgtctactaaaaccctggtcttttaaatattagatattttttgcgcccgagttaacgactgttagtattggtaacggaactactaactgcaataactctcggtatttcctcatatatattcaatctctaataactatctcacgaattaattgtcttacccaagaagtggggtgaaatttcatccatatccgggttcgaacccaacagtatactttttgacgttttttctttcttttttgtcttaatttaattgaagaaggaagaatggaggtggtggtggtggagaggacgacggagatggcagagcaacgggtattctcaaccaccagatctgaaaactttttctatgcataacctcgacgagaaacttatgtgtagattttgagatttgatttgatatttgtagggcttttactttcttctctgtagatacatgtttaagatttgtatccaaattggaatttattaaaattcaaattggatttgctttccaatccgaatttgttgcttatgttgtgttgtgagaaaagagagtttggtgaagaagaagacgtcaagttaaaaagaagaaaaaaggaaaaaagaaaaacgtc

SEQ ID NO: 905 - DNA, 12317 bp, Arabidopsis thaliana landsberg
atgtggatcactacaccacattctctcaagcggttatctccacgtctgattccataatcaaacgtgatgcttctccctcggttccaaatcacacgctttataaatatccccttcacgatttggaaacggcgcttcatctcattatccaatctgcaattctctacccggcgggcattgtccacggtcgtattgtggagggaaggcttttccaattcatctttccgacggatgaatctctggaaacagttctccgacgtggtccatgggcgtgcaatgataggatgctcatcctccaacgctggactcctcaaatgtcgttgctcaatttcattcccttctggatccaagttaggggaattccatatcagttcctcaatcgcggtgtggtggagcacattgggagatctctgggtcaggttctagaggtggattttgatgttgcagcggtggcgagaatggatttctttcatgtgcacattcattgggacattacccatccttttcgattttagaggaatttccagttcagtgacggagttaatactctccttcgcttcaggtacgaacgactcctgggattttgtgaagtatgcaggatgttaacgcatgaatcaggggcttgcctcattcaaaatggcggtgaggaagagaacgacaatgatgaagatgacgatcagcctcagagcgtgttccaaatcagggtgtcataatcagggaactcaatgaggaggaagcaatggaaatggacaacaaccaggtcaacaacgtggtgatagcagatgtggtgccaggacaaaatggggagaatgaaatcacccactctcctcgtagtgggtctaatgaagacagcctctcagacattgatcccaatcatgactctctagttgattttgagcattacgacatgtttagtggcgagagaaatgacagtgaactcctgaatccgatcccaattttcgaaaattcttgtggtgatatcccaggcagccctagcaacagagtttactctagatccatcctctggctctcatggattcggagatcgtcatagaccctccaactgaagcagtagttgaccgtggtaagaggaagagagatgacatgttggaattctctgaaccacaggggcactctaaacacacaatctgcgagaatggggagggcagcggaacctcccgtgaagacaaccaaggctgaggtgcggtgggcccgaatccaccacttccgccatgaggacagcctgctggaactgtcggggtttaggcaatgactccacagtttgacgccttaaggagattaatagaatgaatctcctggacatcattgctctatctgagacaaagcagcagaatggctttattgaagagaagggtttagagttgggttttagtatggttgtaacagtcccaccagtaggtttaagtaggggcttagttgttttctggcgtgattatgtagatatctctatttgcttcagttctcccaatcttgtagatcttttcgttaaaagtaatgaaggtgattcagaagctacaaaattatctccaagattctggtcaaccggctcaaaacacatctctcgggattaatttcagaaaaccaagctgctttcattccaagccgtatgatcaccgataacatcatcattgcccatgaagtatattattctctcaaatcaagaaagaggcaggcaaattcttacatggctctaaaagcggacatcacaaaagcttatgataggctggaatggaagtttcttgaagaaacaatgagacatatgggtttcaattctacttggatttcttggataatgaagtgtgtctccacagtaagcttctcggttctcatcaatggttcacctcatggtcacatcaccccttctcgtggtatccgtcagggcgatcccttatctccatacctattcatcttttgcgctgaagtcctctctcacatgatgcatcaagcagagccaaataaacaacttaaaggaatcaagctttcgacgagaggtccaaccatttctcacttattgtttgctgatgactctctcttttttactttagcaaatcacagatcatatcacgcgataaagaaggttctaagctcttatgaggaagtgtcaggacaagctgtcaacttaaggaaatccgccattacgtttgggaaaaatgttagcagtgatactaaacgtcatatgcggaatttgctaggcattcataatgaagggggtgtaggcaaatgcttaggtttgccggaacaatttgacaaggaaaaatccgagatgttccgctatattgtcgaaaaagtcaaagaaaaaactcaaggttggagtaagaagtatttgtctcaagccgggaaagaagttgtaacgaccgcgtcccgcgttcataaagaggcaggtttgttttaggagaaaactagatcatggtcgaggaacggaccaaaatactaagtaggaagaacgagaaagtataagctaaaccagctaggtgagctggacaagctgtatgaactagctaggtaagctatgtgagctaaactagctggaagactagctagctcagctaggtgagctgaccgacagctcgactgagctcagtgagctgatcaagtactgacccagctgggtggtccggtcagctgacactcgagctggtggactgtcgtagctcacgggtgaagaggtgtctcggccaaaaagtgtaaggtcgagcgggtaccaacgaacggttgcatcgtccaaaggatgcaaggaacagatgtgacctttcgaaaggatgcaaggaacggatgtgacctttcggaggggtgcaaagaacggatgtgatgcttcaggaagcatccattcgccccctatataagggaggacgcccaaggaatctcacatcatctcacaacatccaaaacaccataaaacattcttaaaggagtcccaacacatcctagagttgttggtcggaaagggggtgcggctcggcgagtataactcgaccgaactgatgcgcatgctacctcccggtccaacggttcgatggagtgtagaggatggagagggtagaccgttcgtcttagagacgaatcggatctggtagaccgatccttggatcggatcggccagaccgatcgtcagacggatcggatcggccagacggatcggacagaccgatcgtcggacgggtcggatgggacaggccgatcgtctgacggaacgggtcggacagaccgatcgtcggatgggatggatcgagaaaagtgttcgaggaagcacaaggataagtgcatccgaacacacccaagggtcgcccatggatgcaatcttaccgataaagggagaaagcaccaagaatgggtaaggaacgtgattcaccatataggatcaacatcgtggccgccttcatgtatctatctcttcagccatggtgaaaccgattagagatcggtaagaccaaagggtgactcgacggataaccaacaggaaagtccacggtgggaaccgatggacaaaacggatgttggacccgcgagcaaacctaaggccgacggaagaaagatttcatgggctagcctacgatgatccagtggatgaatccacggacccttgggtatgataaggatatcgttcggaccgcatggatggatcattaagccgaaagctttatcgaccaccatggactggacgggtaaacggttagtaaaccgtgggcggtcgtagtgttaaacgaccggaacggaaacatggatggttcgataagccgagggctcaatcgtccaccatgtagccggaggggcgtacgtttggagaacgaatggaccaataagccaagagcttgattcggccatcgtgaaccaagggaatcgtacgatccccaatctctatcgttgtacttagaccagtggggttggttggttgtatggctaagtaacgatagggattggttcatcaattcacgaccgatgacgagtcgttgaacgaatggagtaaggcgacaaacgggctaaggaatcaaatccgcatattgaccaaggtatgtaacgatctagcttattagttaagatagacgtttggtaattgaccgtgaaagtaggataaaggaatatgcgattgtttggcttagaatggttagcgaacatatgcatgtcttgaccgagtaaaggatcgatctaagtctaaggaacaaagacgatgaaaccggtacaagaattggttagaattaaaccaaggttagaaagacttccgctgtgtaataagagagcgattatagaatttagcctcgtaaaggcaattctatgttgaatcgcgaaaaattaagaggttcggccgggaagaggcgcgaacttgagtacaacgtcgccggacgccgagacgtccgggacggggtctcacaagttggtatcagagcatgcttgatcctaggatggataggtgctcgagaaaacgttatagtaaggttttggcggataaggaagttgagggatcgatgtgtttggaaacggaaatagttacccaactcacgatcacgaaccaagatattatccttgtagtcaaaacttaaacatgacggaaaagtgagttgatatattcggagatggaccgatatcaatggaatttggatctagtcggaacttgactaagatcgggtacagacttagtcgggatttgactatttctggggttttgatcttatcggaaattgaccaagatcatggaaaaacgacaaggtcggaaagagacctatgtcggaaatattgaccgagtcctttggggaccaaggttggaaatattgacaaagtcggaaaaagacttaagtcgagaatatgatcgagtccgagaaaggaccaggatcagaaatttgatcgaatgtcggaagagacaaagatcggaaaacattgatcaagtccaggaaaggacaaagatcgggaaataatgatcgagtccgggaaaggaccaggatcaaaaatttgatcgaatgtcggaagagacaaagatcagaaaacgttgatcaagtccaggaaaggacaaagattggaaaacgttgatcaagtccaagaaaggacaaagatcggaaaatattgatcaagtccaggaaaagacaaagatcgggaaataatgatcgagtccgggagaggaccaggatcaggaatttgatcgagtgtcgtaagagacaaagatcgggaaacttgatcaaactcggaaatagagatttgatcaaatgtgatatctaaagtctcggaaagactaaagattaaggagtaaacaagatcttaaacccgctgaattcgaggacgaattcagtttaaggggggtagacttgtaacgcccgtgtcccgagttagggagtaaccaagatcttacacacgccgaattcgaggacgaattcagtttaaggggggtagacttgtaacgaccgcgtcccgcgttcataaagaggcaggtttgttttaggagaaaactagatcatggtcgaggaacggaccaaaatactaagtaggaagaacgagaaagtataagctaaaccagctaggtgagctggacaagctgtatgaactagctaggtaagctatgtgagctaaactagctggaagactagctagctcagctaggtgagctgaccgacagctcgactgagctcagtgagctgatcaagtactgacccagctgggtggtccggtcagctgacactcgagctggtggactgtcgtagctcacgggtgaagaggtgtctcggccaaaaagtgtaaggtcgagcgggtaccaacgaacggttgcatcgtccaaaggatgcaaggaacagatgtgacctttcgaaaggatgcaaggaacggatgtgacctttcggaggggtgcaaagaacggatgtgatgcttcaggaagcatccattcgccccctatataagggaggacgcccaaggaatctcacatcatctcacaacatccaaaacaccataaaacattcttaaaggagtcccaacacatcctagagttgttggtcggaaagggggtgcggctcggcgagtataactcgaccgaactgatgcgcatgctacctcccggtccaacggttcgatggagtgtagaggatggagagggtagaccgttcgtcttagagacgaatcggatctggtagaccgatcgttggatcggatcggccagaccgatcgtcagacggatcggatcggccagacggatcggacagaccgatcgtcggacgggtcggatgggacaggccgatcgtctgacggaacgggtcggacagaccgatcgtcggatgggatggatcgagaaaagtgttcgaggaagcacaaggataagtgcatccgaacacacccaagggtcgcccatggatgcaatcttaccgataaagggagaaagcaccaagaatgggtaaggaacgtgattcaccatataggatcaacatcgcggccgccttcatgtatctatctcctcagccatggtgaaaccgatcagagatcggtaagaccaaagggtgactcgacggataaccaacgggaaagtccacggtgggaaccgatggacaaaacggatgttggacccgcgagcaaacctaaggccgacggaagaaagatttcatgggctagcctacgatgatccagtggatgaattcacggacccttgggtgtgataaggatatcgttcggaccgcatggatggatcattaagccgaaagctttatcgaccaccatggaccggacgggtaaacggttagtaaaccgtgggcgattgtagtgttaaacaaccgaaacggaaacatggatggttcgataagccgagggctcaatcgtccaccatgtagccggagggcgtacgttttggagaacgaatggaccaataagccaagagcttgattcggccatcgtgaaccaagggaatcgtacgatccccaatctctatcgttttgcttagaccagtggggttggttggttgtatggctaagtaacgatagagattggtccatcaatacacgatcggatcagaatcgttgaacaaatggaataaggcgacaaatgggctaaggtgtcaaatccgcatattggccaaggtatgtaacgatgtagcttattagttaaggtagacgttagggaattgaccgtaaaaataggataaaggaatatgcgattgttaggcctagaatggttaccgaacaatatgcatgtcttgaccgagtaaaggatcgatctaattctaagggacaaagacgatgaaacctgtacaagagttgaatcgcaaggcaattctaaggttagaaagacttccgctgtgtaataagagagcgattatagaattaagcctcgtaaaggcaattctatgttgaatcgcaaaaaattaagaggttcggccgggaagaggcgcgaacttgagtccaacgtcgccggacgccgagacgtccgggacggggtctcacatcatcaggcttttgccttttgtgtaggaatctgccttcctctgatgagtttgatcaaattgattgagtcgttgcagagccgagattctcccatgataaaatcgatgcgtttcggggagaggtgctcggttgcgtttctacagaattttgggaggcataatgggaacctcatgtttttcttttgcggggcgagaggaggtgtagtgactgatctttctgtcctgccttccagatcaagtccttcaaagagtaggtctgtgcgctctttcctagcaggtggaggagactcacctcctttcggtgttcagtcccgtttctttcgtttgggagtttgctcctcctcctgctcgtcgggaggaggggtgtcggcattagcgtttgaaccttttttagttttggcccccggctgcgattaattttttaacgccgcgacattcctcgatggaatgtcctctctttttgtggtacttgtaatatttttcgtggtcaagttctggattctcgtcctctgctacctcttctattgcaaataaggtatgctaccctagtgtttggttttcctttttgaagggttttttagttgcaagggaagcgttttgtgctttagattctttgaatcttagggccgaaacggcgagctcctctccggactccggctttggcgaagtagacagctttgtgaagggcatcgtcttaagagaccagttgcctaatggtgagttcctcacgaaacctagaggaaaaccacaagccgttgtgaagggcggctatggctacctcctcgtttaggttcgcaatctttgatttgattgctttgaatttttcgacgtaagatcgcagaaattcgttctgaagttgggtgacaccagagaacggcttcagacgtcctgtttacgatgagtaccgagtactgtttttagaaggcgggggcaagctggtcgaaggtatcaatagagttccctttgagactagcaaaccatttgagtgcgtcacatacgaggttctctgcaatgacctgcttcattttctttgtctatcaggtacgctcgtgttatagccagacagaaggctctcagatgagcctttgggtcactcgttccatcgtactccaggaaacggagtctcccggcgtctaagatgtgacaatgggcgatcctatccgtgaatggggtgcgcctggtttcttcgatcactcgatctatgctagatgcatttgtgaatgcatttgaaccatgttcgcatttgttacgtggatcgatcggtgcttggggattagttggaccgttaaggaatgtcacttccaggtatctggggaatggatgagggattagcgatagaggtccgttgttgcgctgagttccagggaacgcgggagctgcacgcggttgttccctttatcccccatgtgtacctagggggcgagtagcctagtggtagcacaggtgggagcggtagccttgggaaagcaggcgttgtacctgtctcagtccctgttattgggttttcgacgagagtgtgcacgggtgcctgtaaaaaggcgacctgccggttgagaggaggtgagacctctatcgaggcgaagtctaaacgagtccttggagtgggatctgttggggagacggttcatgtcatatctatggggatctaggtagggatcccatttttgtggggaggaatttccttgcatgcggtatcacgctctacctcctgcgccatgcgagaagagtcacgtttctgctgacccactattgcggtgaggttgcgatgcggatttcttgatttttgcttatgttgatcagttcaggatcattgtgcgaagctcggctagctcattggcagatctcggagggacctgttcagaagggttagccgggttatctccgttaggaggctatatcatgacgttttgctccccgtccctggtttgcgagggggggggaaggatttggtcagatctagaagaattcgagttttgggagatgttctccacatcaatgtcatggatagcatcggcctcgattccaagagggagatccgttggaaggtgcctgtccgtgacattgtcgtttgggatctgaactggtaagccagatcttgacgaattggatgaattgggatccatgatcgttggtcacaattgatgtgttagtttcggtgttggaatgatctagatcttcaagattatgagaaaggaggaaatgatccatgatcgtgggttctgaaatccacataagagatttgtacttaagattatgagaaaggagggctagatcttcactgaagccgtgagagttatattgctaagaacgaatggacttttgtattaattttgacaaagcttttacaatgagaaaagagattacaagtgtaaaagtgtgtgtgtgccaatgtgaactagattgaatgtcccttccaagtcgtccttgctcccttatataggtctacgcacgtgtaagctccgtccgggatctacggagatcctcctggatattcggcaggtcagttccgagatatcatggtcctccgcgaatatctcctcatcagttcctaggtcattattcgcttatctccctgcatcaggtgactgggcttatctggcccaaatacccattcgcgtatgtgggctcgtcagctgcgtaggtcctctacttggtgggcttggtgggcttttgtgggctggcttggtattttcgcaggtggattcctggaggggaatacagctccaacaggtgtgtatcttcaaccattggtagatgatttgaaggatctatggaatgaaggtattgaggtttatgacttgctgtctaaggagaaatttcatacttaaagctatgttgttatgggctaattagtgattatcctgggttagggatacttgttggttgtaaagtgaaaggtaaacaagcatgtaatgtttgtggaaggatacaccgtttagatggctgaagtttagtcgaaagaatgtctatatgggcaataggaaaaggttgagacctggacatccatatagacgaaagaaaggctggtttgacaactccatagaatctggttttactcgtagaattctgactggttttgaaatatttgagacactcaaatattttagaaacgattatagacagaccattagagaagaaaagcaaaaggaaaagatctgatttcgatgataatgaggagcttgcaaaggaagaatgtgaagaagactcagataagtggaggtggaagaagcggtctattctctatgaactatgttattggaaggttagctaattttcaaatatatatcaggttttgtaagttaaattgtttttcttattctaactaactatgtttgttttatgtgatagtttatgcatgtgcgtcacaacatagatgtaatgcatgtggagaaaaacgtttctgatgccattttatcaactttgatacaaagtacaaaatctaaagatggattaaaggcacgccaggatctagaagacatgggtattagaagcaatttacacagccaagttcgaggtaagagaaaatacttacctccaattgcctattggctttcaaaggttgaaaaaaacatttttgcaagatgatatctgaattcagaggccctgatggttattgtgcaaatattggtaattgtgtgtcactagatcctcctgaaataggcggcttgaagtcacacgatcaacatgtgcttttatagaacttgttacatgttgccttgagaggcactctgcaaagaggtcctcggattgccgagaatagaatatgcaacttctttaatagattatgtcagcgggtaattgatccagataagcttttatcattagaggcagaggttattgagacattgtgccaacttgaacggttttttccaccatctctgcttgatatcatattccatgtacctgtacatcttgcaagagagacacgtttaggtgggcctgttcacttcagatggatgtatccctttgaaggtactctatgtttaatttctgataacttttaatagttcatcaatttagatactcttgtagtgatctaacagattgcaaacttgaccaataggtacatgaaaacgcttaagtcatatgtaaagaactatgcaagaccagaagcgtgtatggctgaaggatatatggcaggtgaatgtattgcattctgcttagagttcttacagaattatgtaccagttcaagagaatgtaaaccgaaattaagatgttgagttatctgcaaccattcttgaaggcaaaccattgcaaaaaggtaggcaagttattcttactgataatgaacgagagatagcccatcgatatgttttaatgaacatggcagtgatgaatccatatgtagagtaagttcacctttgagaacttttactaaatcgattgtgaagtatatgaaattaacttgatatcttttgattgttaggatgcatatggaagaattgcaagctaatgatatccgatgtggaaaaaatgagactcttctgtggaaatttcacacagccagattctcattgtggataaaagaacaaggttattgataattttatttttctatgtattgaatcagatactaacttagttagaaatgcataagtctaacttggtattttttactgatgtgtcattagatacctagtaattcccacgagcattcaactaagttgacatacttggctcatggaccaaggcatatagctcagtcctataaaggatatgtcattaatgggcaccgctttcacactgaggatgtaatgcgtaagactcaaaaaagtggcgtcacatatgaagctttcagcatgtgtagatctagtgccagagatactaggcatatcgcatgcatggttgtgttctatggagctatccaagagatcatcttgctggattatcatatg

SEQ ID NO: 906 - DNA, 18968 bp, Arabidopsis thaliana landsberg
gcaacaacacacacggtgtccggttttcaatttccatttctatatgcttaactcttatctaatccatcgttggtgagaaaaaacacttacctcgacctttaagttgtatatcagagacacaaactgaaccaactggaatctcagagaagttactgaaagaaactaaaaaagctgatttcaatacataaaagataagcaaaccttaaagaggaaaccaaacagatagatgcttactgagaaacaacatcgtgagtggaagacaagtatggagaccaaatgagaaaccgaccaaaccgatgagtcgaaatcgagttcatgaacaacgaaagattgaaggaagaatcatcatctctgacaagattcttgatctcagattgtaaaaagattgaaactttggaattatctgggagtttaagaacgttattgttcttcaaacgtgttgctgtatcagtttctacagaggatttaccatataaaaccaagctacacgaagcatcaatatccatggctaaatcaaaacaaaacacgaaaaagtttcaaaatttaatcaagcaataaaattcccaatctttaacaagaagggtttattagaaatgggcaaagattatttaaaaagcttacctttttctcaccgaatctctgacttgcctgaaagtgaaacaacggcgacaagtgaaaagagagcatgacgacgaaactgttcaataactggtaaactaagtttttgtatgaaatcatctatcattttctgttaggaggtatacaagataaagaaaaaactgaagtagattcacgtctaatgacactaatgagacttggtgcagttttttttactttaacaggttttcccaagactaactagaactaagtccctgaaaattccaattcacaaataatcacagccaaacacatatatacagtcccaattcagagagcttaagatttgagtcaaataaagcaaaggaagtttcaagctctattttcagcaattgatcaagctctgttttcaatatataaaaaataccaattgagtactaacatagctttgatgaatgatgatagtaccttagacaaagcgatcgattgaaccaaagagttgatcttggctattgtggaagaacaagagaggcagagagcaacaatgaaccctagagaatcaaaacaacagaggaataaaagtactgcaaatacaaactgaaacatatcatacatctcaaggtaacacgaacacagaacaattatttggatttaaagcaagttaacctaaaaccgcagagagaacaattactcacaacaagacttaacatatagagcaaatagatttttcctacaatctttccaaagagttggaactgcgaaaaagagaaggatttggatcacttagaaaaagtacttgatacccaatcaacacacaatggcagctccaattaaagattttcaatcacctgcatttatcacattcaagattactgataataggtttttagtcaattatcctaaaacaccaatcacgtcgttgtagtattttaggttgtcaatccaaatggatgtgatgctaacaatcaagatgtgatcagaagtcactaagtcaagccaagcaataacgggttttggtgtgttctagcagccctaagtgaacatgcagaaaacagaaaatcaagcagaaacaataaagcactcgaccaacacagctcgttgcagagcactaggtgtggtcgagtgacaggtcgagtaacagacagaaaatgtagcaaggatactcgactgcacagtctgttgccaaacaactgggtggtcgagtatcaggtcgagtaacagtaaagaattgcaggaactaagcaacatctgacaagataaagataaagaattcccaaggatggggtaattgagtaatttcgtttcctcagtttacaggtgattgacatgctcaataaattatccctagacaacacgttcattaaccaaatctaagtgccaccgcaatagagaccctcaagttaaactagtccctgactcaatcaccattgacgagagccaacctaacaagcattacgaatcaacaaattaaagccaaaacgctccctgcaaccaataccttggtacagagccacaaatctctagaattagtggttcagacatttcatcgaacaccttttgggcgcggaaatgtttggactcaaattccagttcatcagaaagcaataggcattaagaacaactaatccataagggatctataaatcaaactcaaccacctaacatactaagaattctaaactactctaacccatcctcagaaacctattcactactcaaacatcattgaagaaagcataaacgttgaatggaatgaaagcattatatcaacagagtaatagcaggatgataacaggatgaacaacttagtaagcgaaatgaaaaacaaatactgaatactgaatagattaagagaaatccggattacaaaaacgtcaagaacacagtgtctgcgggataaaaattagataacgaaaatgtaaagtacatgctacttatagcaaaatattctgaaaccctaatactcaaaacgacgcagtattgggacggattaagaacggtactcgacccaagtggtcgagtgcatggtcgagtggtaagctggagtcttcttttcttccttttgctcgagtgtctagttgaatgcagaatatagaagactccaaagctggcagtcgagtatgaaggcgagcgatagagatggtggtactcgacttggtggtaaagtgatcgagtgaaggtgatagagttactcgaccaggtggtcgagtgatgtgatcgagtgatggtcaggtggtggaggtgatgatactcgaccagggggtcgagtgatgtgattgagtggttgttttggtggtactcgatcatgggggtcgagtagtgacgtgaagtgatgaggtcttctactcgaccagggggtcgagtggtctgttgaagtcgtgaagcatctactcgaccaggggctcgagtggcttgacatgatcaggtacgcttcttccaattagctcgtcaaaagctccaaatcacttgaaatcaacacaaatatgcaacatgcatgcaaaactatcctaaacatgcaaggtgatgacaaatgatgagaaattgtataaaacagtgatgatatgatgctaaaatgatgacaaatggatgctcaaagcatgcaaaatacagacttatatgttgatcaaaggttagggatggttttggtgtcgagatgacacattaagcgccgaagggtattataagcacctaaatacaagcttatacaccaccacttatccgctaaagcagtattctgctctcctttaaacttccggacacctaaatccttcatcatcataaccagctttaagaacttggccgaaggagatttagcacgcaggctttcctgaatatgttgttcgtgttgctattgttgaattatatgactcatcaaggtctgaatcatcctcaacgtctgttgagtctccgacacactttgaacattacgaccttccccatttccttcattaacttctcttggcagcgacggatttgggtgtgcagtgggttgattcacaggaacatgtgatcttatccctgagtgtgacccttcggatgtgctatagtacataaaccttggtaaggagtattccggtgtggttccgcgaacatcccaatcaggcgctccatacatattaggataatagtatcccccatccccttctcctccaacatacggtacccagttttccgccccgaagtgctgactcgagttatcataaactggtgagaaattcatcaactcgctcctctccgttctttgaccaaacatttgcatccattcaaccaaggtaaacttaatccatctacctaacaatggtgaactgaccggattatcctaaatgccttttgcgactcaattacttgataaaacagtttgaaaaacacgagtcctgctagcatcattaaccatactctaataccacaaactgtaacaccctcgagacgctctatgaccagacaagtcacgagcgcctcgaaaacgccacattgagattgatcatcaacatccaaccgaggtttgggaacccatcccgacccttgacgaccactctcccacttaaaacatcgtttaggcttgccaacccttacgatatttaagtgttgtgccgactcggactaagtcattatcaatcattactcgcaaatttgtacaagaatacccgatttatctcattagtataaatattttacaacatgttaccaaacatttataagtgttctggccaaggcctagtgccaaaagcacggtacataatagaaacatacttgttttacaaaaggcacaaaactactccgggtttcgtattctccaccacgccctctaatccccacatgggtttcctgtaagacaagtagaatcatgagtaatctaacattactcctgagctgggtctatgcacaaataaatctttagggtttaatcaactcaataagtaaacttaaccattcgatatcacaaagcacgtaataaacgtattatcctatacttatagtaataccagaatattcagccaaactagacacatgaatgaaacttgggcccaacatactaccaaccttaccaaaaaggtgcaccacaacatcggcacaaaatcctgcatacgtgtatacatgttctccacacgtatgctaccacacacacgtacgtgcacacccacaccacacgtacgtacacaactgtgaacacccgagctatagtcacaaaggcttataactagaacatcactttaatccatcgccatgcattacccggcatacgctccgtgtcttgtgccatcatgtaagtgaccactcaggatcaagacttactgacacaatcacaacacaaaaaggaaggcagctgcttactctaacatgatggtctcaggtaaaccctgaataccacttagacacagtaacctcatgcagtactatatataagtagtttaccataccttaaataagtatcgacaatcaagtagcaaatcacgtatcaatatatatacataatataacaaggatttattcacaacctcatagcatatctgatatcagtgtaacaatctaacaaggtaagtaagccctcgaatcatatctcaattcatcaagtaaacttagttaagtccatattcatttaacctagtcatgcaccagtccgttccattacttagtgatagtatgatcaagttcgtcaaatgcccatattcactttaagattcaagttctaacttaagccgaaatacaattagttaagtctaagtgagtaagcatgcatatattctaaagactagctctagaaaacatgcaaacaaacacacaattcgaccacaactcacggatttggtatctcggaaagttttctgggtcttgggaagaacttctcgagcacggtcaacgatcccttactcacggtcaagtttactcgaccaaaggcgataattctcaagtctcggacagagtttcctcgaccaggggaaagttttactgaattcgggcgatggcgtggtgacaggtggcgacgggtgtcactccaccgttccaccaacttcggcttcaagactcagctgacttcggctccaaggttggtaacttgagccgcaaggcaccgcgagtgaggtgtcctactcatgtcggttctgcggccggtggggcaaacttcgcccttggcatgcctattcttgcccattcgtgcccattgcccgttcttgccctttcttgtattggcaccgtttggacatacgcagtcaattgacttggtattcgggccaaaattttcttattcggtcctttggccgtgcccgatgcctttatgcgggtcacttgactgccgagttaaaatcgtccgtccaattcaagttaaggtcctgtagccgaaaactctgcccgaatcgtaggaagcattccgttggttactgactgagttctagataatggtttaaatttcataatcatattctaatgcattcttgattgatttcgtgagttataggaatcgtgtgaatggttatattggattgcatatgcgatctttagattcttatgctattgtttaggttgggaggttgtgttgggatattgatgattctatgtgtttgatttaaccatatgtttcataatatcttaaactttggggtaggaggcaaagaccataagcgtgccaagatcgtgatatgtctgaccttcgttgtgaaccgtgctatcgtggggtcttgtaacgatgttacttgatcgccataaagtgcgaagaactcggagagaaggggctagctaccctggccgagtgtctacacgacggtgtagagcttggtaatgatgcttcggttgcatacctttgtggttgtaacgcggaagatcacgagagtgtgtgtgtttggtgttgggtttgaaggcagcatatcaggccctttaaaacttaataaaactggagtcttaatgcatttgcatgtttttgtagtttgcttcgggaagctacctttcgttgccattctctgttgcgtgtttcatgttgggtattcgggtaggggtaaaataatgtttttgcagggaatcccaagctcactgagtaatcttagattactcatgattctacttgttttgcaggaaacccatagtggggactagagggcgtggtggacaataggaaacctgaagtagttttgtgcattttgtaaaacaagtatgtttctattatgtaaaacttataaatgtttggtaacatgttgtgtaatatttatacttatgaaataaatcgggtttcttgtacaaatttgcgagtaatgactgataatgacatagtccgagtcggcacagcacttaaatgtcgtaagggttggcaagcctaatcgatgttttaagtgggagagtagtcgtcaatatgtcggccaagggttgggattggttcccgaacctcggttggatgttgatgatcattctcgatgtggcgatttcggggcgccagtgactagtctggtcatagagcatctcgggagcgttccaatttgtggtatcagagcatggttaatgatgctagcaggactcgtattttttcaaaatgttttaccgagtaaatgagtcgcaaaaggcatttaggataatccggtctgttcaccattattaggtagatgacccccagtttaccttggttgaaaggatgcacatgtctggtcaaagaacagagaggagtgagcggataaatttctcaccagtttatgaaaactggagtcatcatttcggtctgggagactggtaccgtatgttggaggagaaggagatgagggatacaactatccccatatgtttggagaagtcatcaatattcccggaaccacaccagaagactccttaccaaagactgtgcactatagcacatccgaagggtcacactccgggacgagaccacatgttcctgtgaaacaacctaccgcacacccaaatccgttgctaccaaggaaagttaataaaggaaatggggaaggccgtaatgttcaaaatgtgccggagactcaacagacgttggggatgattcaggccttgttgactcatatgattcaacaatagcattactaacaacagatgcagaaaagcgagcgtgccgaatctccttcggcaaagttcttaaagctggttatggatgatgaaggaattaagtgttcggaagtttaaaggagagcagaatactgttttagcggataagtgtttgaggaacctggaaatgaattttgaaacttgaaggtgcccggaggactttaagggccaaatagcggtaaactttttagatgcggatgttcgagcatggtgggatagtgttgtttcatgatactgcgaccagcctatcacatgggaaatgtttaagaaggagtttgagtctaagtattttccacctgaggcacgtgatcgtctggagctacagtttatgagtttggaacaagggcaaaagagtgtcagggcatacgagcaatttttttcaagacttcgaagatatttgtacaatggaagggttgatgaagctatgatggtacgaagttttttaagaggactaaggcctgaaattaggggacgtcttcaggctgtgacttataccaacgtgagtgaattgactgatagggccgtgaatgttgaagaagggattgagttaggaaagggaaagaagtttcaggagactgaaaagtctgaaggcaaaaaggggaataatgtacaatttcagcctggtgttttgaggactaatcagtcgtaaggtcgaaaccagaataatgatcgtgggaagcttaaggttggtaaccaaggaggacgtgtaatgaccacttacgattcaagagcctgctatatgtgcggaaagccgggacattttgcacaagattgctcaacggtcgtaaagactaaattgccaaatctggcatttgttacttgttacacttgtggggagtcgggacatgtatcaaatgcatgcccgaataagaaagcgggactacagggtaaccgagtgggagcttgttccatttgtggagacccagggcattatgctaacgcatgcccagacatgcaaataaagcagtataaccttagccagttcagaaagctaagggaccactggtaaaaaagcaagccactctagcaaatgtttatgccttagatgtagaacctaccaaaccttcaggacagccaaaggtcccataacaggttagtatgggttcttactttttcttgtttatgtgtgtttgagtaattgattgttgtctgcgtagtttactagtttaaatttgcatacatcatttccatatgcattagggacattaattgttggttgtaaccccacgcatgtattgtttgattcgggagcgacaaatagttttgttagttctgacgtggccgataagtttaaccacgggtatgagaaaagagaggtgaatgttttggtacataccgcgggaaatcagccacccatgcagacctgaattgtgttaatagaagttctagtagtaatccaggatacgatcctactggcaaaccttctggtaatgccgatggaaaggttcaaagtcatccttgggatggattggttattgggatatcatgccaatttggattgcgggcggagtagagtagtgttcgaattgagaaattgaccacaactcacttaatgtggaatcaatccaagtatgattgcttcgctcgtgtcagcacttaaagtcgcgaacttactaaaggaaggagaagtctaccatgtcactttaaccgccgttggtggagaagttgaaagtgactcaaggattaaagagatcccaatggtgaatgaatttgaagatgtgttcaagcctttggaaggattacctccgccaaggaatcatccgtttaccattaatcttgaacgtggggcgactctaattgcaagggaaccatataggatggcgccagccgagcttgtagaacttaagaaacaattggaggatctacttgaaaagggatttattcgtccaagttcatcgccatggagagctctggtattgtttgttaagaagaaagatggaagcatgcggttatgtattgactaccgaggtcttaacaacatgaccattaaggataagtatccatttccaagagttgatgagctattggatcagttgaggagagcatgttggttctcaaaaattgatctggcttctaggtatcatcaaatttcaatctcggagccggatataatgaagactgcctttcaaacaaggtatgggcaatatgaatttttagtcatgccatttggacttacaaatgcgcccgcaactttcatgagacttatgaaccaggaattccatgattatttggatagcttcgttatcatatttatcgatgatatcatggtatatttacggagtgcggaagagcatcgtgaacatatgtggaaagtaatggacagacgtagggaacaacggttgtttgctaagtttagcaagtgtaagttctagcaacgagaaattggatttcttgtccaccgaatttcaggacaagaagttacgcggatcctgaaaagattgccgtaatacagcaatggccgcaacctacatccgttacagaagtacagagctttttaggattggcaggctaataccgtaagtttgtcaagggattctcgttgattactaagcctttgactcgacttactggtaaaggtgtacccttcatatggaataaggatgttgaggaggccattgttaagttaaaaaggcattaacaaccgctccaattctagcattgccggagccaaataaaccatatgatatttacacggatgcttcaagagttgacttgggatgtgtccttatgcaagacggaaaggtaattgcctatgcatcacggcaattaagacgacatgaggagaattatcccactcacgatttacaaatggtcgctatagtatttgcattaaaggtatggagatcatacctgtatgggaaagcagtacgagtatttacagaccactaaagtcttaaatacttattcacgcagccagatctgaatctacgacaacggagatggatggagttaatcgccgactatgatttgaagattcagtatcaaccgagaaaggctaatgtggtaggagacgccttaagtcgccagaaattagaagtggatgttgaaaaggatctagactcgttaactgatgagttaaagaaagtgactttattagctctagagggtgaatctagtgagcccttgggtttacaagctgtgactcaagcaaacctacttcaccgaatccgagaagaattacagtacatgatcgtaaaggtttacgacaagaaattttgaagggggcacatacttctttattgagcattcatccgagaagtacaaaaatgtacaaggatataaggaagtatcaccgttggcctgagatgaagagatcagtggcgaaatgggtaagccaatgtgattcatgccaaagagttaaagtagaacatcaagtgccgacaggtttattgcataatctactaattcctgcatggaaatgggagtcaatctcgatggattttatcacttgattgccaacaagaccaggacgtggcaatgatgctatatgggtagtcgtggatcgttgaccatgatggctcatttggtgtcaatgaaaagcacagatcagccatctatcctggcagagaagtatatcgatgaaatcttaagactccatggggtacctgttaatatagtatccgatcgagatcctaagttctcatccatattttggcaagacctccaacgtgcattaggaactaatgttcacatgagcacaacatttcatccggaaactgatgggcaaactgaaaggaccatccgaaccatagaagatatgattcggctatgtgcactagagtgggctggtgattgggaagactacatgcctttggttgagttttcttacaataacagctatcactcaagcatcagtatgtcgccatttgaagcaatgtattgaaggccatgtcaaactcctctttgttggacagaaatacgagaaaggacaagttttattaatcgattgatcgaagacactacagagaaaattcagtttatccgagacaatatgaagaaagctcaagatcgacagaaaaagtatgctgaccgaaagaggcgtgaagtggaattccaagaaggtgacatggtttatcttaaggtaactggtgataacactgtattttactcattttaggtatgtgtttatcatcatttagctttgcatttgctcattgtatcatgtcattttgcaccattttagcttattttgcatacttaggcatctaggatcgtcttgcattcgcattgcatgttttgatgtgttttcgggtgcagaaggagctaaaaaggactctactcgatccattcactcgatccaggcagctatagaagaggcatcgtttcactcggccctcttactcgatctagaatgctacagaggaggctgcagttcactcgaccctcttactccatcaaggcaaccttagatgaagcagcagattaatctactcgcccctcctacctgatccactacttgatccatttactcgaccaatggtgaccaactctacaagacttgttgagctatcaaagcgtcttcggatcctcctcattccccactcaaccagacatctgagcatatggataggagaggaagaagcatctactcgaccaattgatcactcggagcataaacacaaaggcgcagactttgcagcaccctctttattcgatccctaagatcgagcactcgcccaaaccgcctcaagtctcttgtcttctagtgaatctagggttttcaacatttctgtataaacagatcactttgggatttgtccaaaggatctagctttgatcctttagtttttctttgtgttcttgaatcttcaaaacttaattactcttaatctatttcgtttttgcatttagttgtttaagtaaagttgtttagcttgtttagacctacattttggtatgatttcagtaatttctgggtttgtgttcttgagaatgttgcttgagtagtgattagggttcttgaggatggattagattagggtaatctctaggttagttaggtggttaagattaggttagaacccttctagattcgcttggcccctatgcagttttcgttggctaatgtggagattcgatgatagacatccagcgtccaaaagacgttcaaatggatgtctgatctacgaattccagagatttgtaaactcgaccaagacattggcttgtctgcttattggctttggtagattgtttcttaaactctgctctgctatgtttcatcaacgatagttgagattaggaagtggtagagttatggaggtctctgtcacgacagtggattgacccggtttttgaatctatcgtcaagggtatctacctttcacctattagccatctgataaaccctagagttgcccttatcaatgaatatccttaggacttctattagatttatttgtatcccctgttgattgcacttttattttacatgttatttgtatcccctatttgtatcccctgttgattgcattttagttctgcctgttggttctactcgatccaatgatcgagtagggctcttaagttctcatttttacttgtttgaatcctgacctaggattgttactagaaacccaccatcattataatttggcttgacttagttgtttctgtacacgtcttgattgctagcaataacgatggactggattgacaccctctatagctgcatcgacttgttagtgtttaaggggaattgaactgaacctcacattcagcacataagtaggcttaaaaaacttacatatcaatttggcgccgttgccaattcattgttgcattgttacattcaagatattagaaaaatttaagatcaaattcttttacatttatcaagttactaactcatcttttcgtctgcttgtttttgtggtataggtactaatctttgtgcatgcaaactcgatccaaaggttcaacacaccaactaccattcagagacggaatagatagaatagctcgtgagttacaagaaaccaaagctaaggcagtctgtgatcagcaaagaccagctgctatggatcaacagaacagaccagtagatgttcaagacccaactaatgttgatcaatcaagaaacattagtgctggtgatgccccaaggaatcatcaccaaagacaagcgatagtgccaccaccagttcagatcaacaacttcgagcttaagagtggtctcatctcgatgattcaggggaacaaattccatggtttacctatggaagatcccctagaccatcttgacagctttgataggctctatggccttaccaagatcaataatgtcactgaagatatgtttaagctcagactatttcccttctctttgggagacaaggcacaccactgggagaagactctgaccccagactccatcacctcatgggtcgattgtaagaaagcttttattgccaagttcttctctaatgctcgcacagctatattgaggaacgagatctcaggcttcacacagaaaaacaatgaaactttctgtgaagcttgagagagctttaaaagctacaccactcaatgcccccatcacggttttaagaaagcatcattattgagcacactctacagaggagctttaccaaagatcagaatgctactcgacactgcctcaaacgaaaacttcctgaataaggaagtagcagaaggatgggagttggtcgaaaatctggcacaatctgatgggtgctacaatgaagaatatgatcgatcagtgagaggaactggagacactcaagatagacacatgatagaaatcagggttctaaatgacaagctgaataaactgttgttggcaccacagaagcagatacactacataactgatgaagagcatttccagatgcaagaaggggggaacgatcacactaacgaaagcatctacattcataaccaagaaggattcaacaaagattacaacaattacaagtctaacttgaacctctcctacagaagcactaatgtatccacaatagcagaatcagtctaagacatatgttccctataaccaagtatttgcccctaagaagtagttcaacgaaggttatcaacagcaaaatccaccaccagggttcacacaacaaccacaacaagccccaacagcacaagatcttgaagtaaagcaattgatttaacatatcattaagggacaagccactgaagctttgactttcgaaaaaagtagctgaactacacaacaagattacaatgatctaaacgtcaagtttcatgctctcaattcaaaagtgaagtgtctggaaggtcatatagcatcttcctctactcagaaacacccttaacaacttctaagataagcagttcagaatcccaaagattatgctactgcccacgctatcatcattcaacaagacgatgagtctccatctcatcgtatgcctccacgaaaatcactgaagacaatatgattcaagaaggggggggtcaagttacaatgttgcacctgcttataagcaattcatctggactatagagcacataccttttctgaatactcacaattctgaaaaacagttcagaattgaaaaactcaagaaatatcaaaatcaagagatgattagcagtgctaccacccaagaaacttacaagaagaaagtcatccaagaaaagcttgatgatcccggttcattcactctgccatgctctctagaaccattgacattcaataggtgcctttatgatttggcagcatctgttatccttatgcctctctctacagctaaaaggctagggatcatggaatacaagttctacaacctagctctacttttagttgatggttctattgcacatcctcatggtctaatagaaaatctgcctgtcaagattggaaatgttgagatacctacaaattttgtggtattagacgtagatgaaaaaggcaaggatcccctgatcctaggtagaccattcttagcttcagctggagcagtcatagatgtcagaaatggaaaaattaatccgaaccttgaaaaaggcatcaagatgaagtttgaaatcagagaagcttcagggaaatcaacaacaggagttcagaattttgggattcaggacatggaagttgatgaagaaatagaatctgaaacctcaccaaaagtcaactatacttctcaactcagcaagctgaaaaggacttttgaccacaagaagagagcaacacaaaggctagcttagactgaagatcctacagaagatgaggaaaagatttaaatggcaaagcagagtcatagagggattatcttcaagggtgatgaagctgaaagatcaactatggatgtttgaaaaaagagttaaaaaaatttcaaatggtattgatccagagaagatggaaattgcactatctatcaaggaggacgacaatttcacaacagaatggtttgcaccagaagaccagaaaggagttcacttagaggaaagaagcctagatagcaagttgttgagtgaggaggaaacccccattccgacttattctccacgagtgcctaaacggcccaccaacccctcttctgaagaagaacacttgattcatgattctgttgctgaagaattcctggagctctggattggatataaagcttaggaggatacaattggaaagttaactcacaagatagaagagttaaacaacagcattctggaacttcaagaaatggttaaaggctaccccaattttgaaattgaggattggtcaaaggagcctggttcagaagaagaagcttaatttgaagaaaaatcaaatgagtactcatcctaccatttgtcaagagaggatgcagaatatgattcagaaactgaaaatttaaccattgaagatgaggacttctctgttcctctcttcaaccttctttttgactaagctctgtaagagtaaagcttagtgacttaaaacaagctcacttgggagggagtcccgtgtctatccatatatataactttctatctttcttgttatttttgatgtttttgtttaagtgtttcagggaaaaagacttctagagaatttcaggccacactcgaccgtgctacttggctacaggccgagtgtgggcttcaattgaccaaaggcccaagattgaatagtactcggcccacaccactcggcccgaagccgagtcagaaaaagaagcccatcaggcccaacactgtactcgacacgcgcgtcgagtatgtcggccgagttcacacgtgcgaggtcaacacaattcaaattcgaatttgcggggccccaccaatcaaatcctgctccccaaagcccttcaaagattctgctgcaaatagtgagacatgtccccttgaccaaatgaagggtgatgatctaaggtgtttggagggctaggatcaaatcttcttgtctataaaaccacactcaacaagctaagtcactcacactctctttttgctcaaaaatttcgaattctactccgatcataccagcactaatgcaccagatcccatcagaactccgaagttaagcgtgcttgggcgagagtagtactaggatgggtgacctcctgggaagtcctcgtgttgcatccctcttttactgtattatattagctagatatacgaacacctaaccatagttataatgaatgaccatacacgtaataaacagaatatttatgcatttcttactatttaaagatttgtttcttaaagatactcattgacatcggaatgcttagagtaagaaacaaacatattttggtagacacaaaaccggagtaaaccgagaattattcgttatcttcactggttttctctcttaaggtttgttgttgcatactcttctcactaaggatgtcaaaatgggtaacccaactcaacacaactcataatcaaatgagtttaaggttaaatgagttatgggttgacccaactcattttgttaaataggttgggtttacctataactcatttaatttgatgtattgatttgttatatgggttaacccatttaaataataatttaattaattattattataaaaataataaattaataatgattcattatcatcaaacttaggatatttacggattccactttttacggatttacgtttttgacgagaaaatcacgggtttacgtttttggcgggaaaattatggatttacgtttttggcgggaaaatctcggatttacgtttttggcggaaaaatcacaggtttacgtttttggcgagaaaatcacaggtttacaggtttacgtttttggcgggaaaatcatgggtttacgttttttggcgggaaaattatgggtttacgtttgttggcgagaaaatcacggatttatgttttttggtggaaaaattacgagtttactttttctcaatttcatcgcttgtatatttaagaaatttggaaaaatattgattttattaaattggtttagatgtgttggttaagtttaaattgatattggtttagagattttagttggtttaattcaattttacaaaaattgatgggttaattgggtaaaccattgaaaccattaaccattacaacccaacgtattttattcatcaaaccaattgatccaataactcatttgacccatcaactcatttgagtcaatattttcaactcattacgttcatgggttgagttgagttgagttgacccatgaattttgacccattttaacacccctactgatacctaataaccttctttatttgaattaagtaacataaaaattcataaactttccaagattcatttacatgatgactctaatttgtataagcaacacatgaatagcatgaacttcaatatggaagacctttgcatagtggatatccaattttaaattgcatacctctttagggtttattaaagctctttcaagttcatgaacgtcaatcacaaaataagtttatggtgagtaatgatatgttgttcattctttacttttacatatatatagataaagactggtccgatgagcgggtttattttcttataactaaactcaaatttaacaaaaataataattgacaacgttgtaagttttcaaaagtaaaaaatatatatatatatataaatttcactattgcattgtttccttcaccacttcaattatttgaatgaaaaatatagcatatatcaataactcgaattatttgaatgaaaaatatatcacgtatcaataacttttggtatagatatgaatacaaaaattaaaaatattcatcatagaattggtgaacgattccaaaatggttttaaattagacacattaaaaacatagaataattgctaagaataccctttcaacattacctattttcaat

SEQ ID NO: 907 - DNA, 550 bp, Arabidopsis thaliana landsberg
gttgatcaatgtttagattatattatgactatgcggatgtaatttgtttttgctttttgctgtatatttatagtccttcagctattatctcactatgttgtttaattattgtattaagttgttttcgcctttctggatgtataatatttgttctttgtattatttatatatatgttcttattttttgaaagtttgtcatgaccttcatctatgtcggctgtatgtatagtatatatttcacaagttttgctttacgttctctaaaataaattgttctctgatgttcctaactctgttcttttccacagatgaacaagtttttaatatgtgttaataaccaaagaactgatatgttgatgatatgattggaacttcaacacacaccttccacttgcatttccttggatgcataaatgattggacatgtatttaaaatatatgtctatagctagcggtgcatctttcttctactgacatttataatttgtttttgaataaattataagctcaatcatttcattattatctcaccatttcattttgagttgag

SEQ ID NO: 908 - DNA, 1027 bp, Arabidopsis thaliana landsberg
aaactcggtaagttgtgtactttattcagtttgtccctcacagttttaaccataggattcatggaagatgacgcaccatacgcccatctaattccagttgggattattttggagaatatatattcagtgcgagtcatatgtcgtagtttttaatatggcatatgtaaagctcacctgatagaacactctcctgatataatgaaactcgagtaacaggagcatttcctcaatggagttggtaatccatctctctcctgcaggcaaaaagaataacaagcaatctctcatgcactgtctctatttgtttactgatgatacaaagaaaagaccaagtggaccatatgtttgaccgctgtgaggaaacattgtccatttgggtcaaagctggtccagccaattttgtaacttgggaggtgctctttgctttctgggctgttcacaagatgagaaccatattagacttgtgtagttatactgcttttctaacaccaaaatttttactaatacaatgctagctataaacaaaatgttagcttttgcaacatatgaatgatgtatgttacctatgaaataagaacgttaagataaagggataaagatgtatcacatatacgtcaataggttataatgttttgatccatactctacaggagacacaatgtctttccaatttcttcaatgataatctttcttgatgtgtcaagaagaataactgacagtaaaactagctgaagcgtaaatagaaagcttacggttcagtcttgcaagcacttcagctgcatatcggaagacaaatcacacagctcaatacgacagattcagctgcaatgaacataaaatccggatacattacactatgaagtcacacaaagggaaggaaaacaaaaatcctattaaagctaagatataacagtgatgagtttttcactatacacattacttgatgattgcttgagtttggaatcaataaaagccaaataagaatctcagtgatgccaagttgatcaacaaagtgaaagaagaatca

SEQ ID NO: 909 - DNA, 1881 bp, Arabidopsis thaliana landsberg
  unsure (1)..(1881): unsure at all n locations
gagatgttaccgttgtataaccagctataatacctaaagaatgagcatatatcttctatttgactgtcgctctcaagaaaccttgctcgctatcaaaatttccatagacacacacattagacacgaagcaaacactctaagaaagatcaaatatataggagaaacaaaagatagagaaacacctctataggagtcatattggcagtggatttgaagaatctattcaggaacgacccctcagctgaaataagaaatcaaaagtgataatcgataaggattaatatctttagattaatgaaaggaacaaatagaaagcctgaatataactcacagagtttgatctcaaaggccaatggttccacaagcatattatccacattttgtttcatgaagtaaactttatcactatgcacctaccaaattcatcaacacagagtatgaacgatacttaactacaaagacaagggttcttttttcatagaacaacccagatgtttatcagagagaagctcatcctttccttgatttcttggttatatacattatatatataaaaaatatgattaattttgcttagaaataatcttcctttaagaaaaaatgaaatatttacatgaaaatcaaccaaaatgaaagaatttttatacattatataaaaaataatatttttgtttcaatgtaggtggacaacttttatcctatgtagtttaaattaactgtgtatgggggtcaaaactataaaatactaggtcattataattattcctaagaaaaaaatatagttgtttttattttattttatagaggtcaattgacccccataatactgcactgcgtatatatgtttttgcattccgaattttgttttacctccgtatcatagagactgaaatatatatcggatcttgtctagataaaaaatcttaaaaataaatgaggttaattattatacaatatttaaaatgaagggacgtatccagtagcatatctagaaattgttgttgtaggggtcaaaagttttctttaatatataaaataatatacattatagatattaaaaatattcttaattttgcttagaaataatcttcccataaaaaaatgaaatatttacatgaaagtcaaccaaaatgaaataatttttatacattatataagattaatatttttgtttcaatgtatgtggataatttttatcctatgtagtttaaattaactatgtatggagtcaaaacaatataaaatacttagtcatcatgattattcttaagaaaatatagttgatttttttaattttatagagatcaattgatccccataatactatactgtatatcttttttcgtaggatttagaatggaaaaccttttggaataattcaccaatttacaattcattttatgattttgccatcacaaacgacatcagagtaaatatgactaacgggcccggcccaataattcaagattagttttttttaggatttctagggtttttactttttagtatattatcttcttctctctctaaccctcagttctgttaagtacttggcttctaacaaacgctgtctgaatcatatttcgattctgatttttcttcatggattcgtatagccaataagttttttcaatattcaaaacaaaaaccccatcaaaataatctccggaccagtttctctttcgattcagtcggaccggaaaaacaatggcgtctgtgaaccctttcgatctcttggacgatgacgcagaggatcnnnnnnnnnnnnnnnnntttaagccattgaaggttgtggctccggttcacacccctaccctggtaagatccgagtagcccaacctcaaactcaagctggtaagttttattctagattacagtttg

SEQ ID NO: 910 - DNA, 1373 bp, Arabidopsis thaliana landsberg
tgaccttatacatttgctgtcatcttcttcagctgtatcttccatttttatgttgtcctcaggcaagaaatggttaataggacatcatcatcgatcctaatgcgtgacaaataatctactacaccattttcaactcctttcttatctctaacctcgatgtcaaattcctgaagcagcaaaatccatctcaaaattattggcttagcatctttcttttgcatcaaatacttcaaggcagcatgatctttgtgaacaataaccttggatccaacaagataagatctgaatttctcgaaagcaaacaccacagctaacaactccttctctgaagttgcataattcctttgagcatcatcaagtgtcctacttgcatagtagatggaatgaagtttcttatctttcctctgtcctagaacagccccaactgcaaaatcactcgcatcacacattacctcaaaaggtagatcccaatctggtggttgaacaattggtgcgctgatcaaggcttgttttatctgctgaaaggcatcatgacactcttgtgtaaactcaaatttgacttctttacagagtagagcagtgagtggtcttgctattttgttgaagtctttaatgaatctcctatagaaaccagcatgtccaaggaaactcctcactcctttaacattatcaagtgcttgaagacttgtcataacttcgatcttagctctatcaacatctctaccatgctcagaaatcctgtatccgagaactatcccatcctgcaccataaagtgacatttctcccaattcaaaaccagatgtttctcctcacatcttgctaacactttgcagaggttctctaagcaatcctcaaattatgatccataaactgaaaaatcatccatgaagacctccatgatatcctcaatcatgtctgtgaagatagaagacagaagggcattctcagataagcaaatgtaccataggggtaggtgaaagttgttttctcctggtcatctggatgaatcgggatctaaaagaatcctgagtatccatcaaggaagcaatagtatttatgatttgctaacatctccaacatttgatcgataaatggtaagggaaaatggtctttcttggtagcagcattcatctttctgtaatcgatgcacatccgatggcctctgattgtccgagtaggaatcagctcgtctttttcattcttgactattgtaacacctcccttcttgggaactacatgaactggactaacctaactactatctgaaatcggatagataatccctgcttccaacagtttcacaatctccttcttcaccacctctttcagattcggattcagccttctctgatgttcaactgaagacttagac

SEQ ID NO: 911 - DNA, 17397 bp, Arabidopsis thaliana landsberg
  unsure (1)..(17397): unsure at all n locations
cctctttttctgaaagtattccaaacagctccacatctctcttttccatttttgccattctctttccgtatatgtaattttgataatctttcttaaaaaaaaacagatttactcagatcccaacttctattctcatcatttcaacggttgcttttgctgaagtccctgacatctcggcatcatcttcatgttgttttggagagatagataattctcgatttcccttcaacaaatgcttcataggtgtcctcactaaatcatggttatggtttggctcgaatgacacaaccttatattttttggtcttctgaaggtagcaagtcatatgagcattagaaccacaccgtgttattggttgttgatagtaggatttttacgggtttgtaaatctcgaagatcaattccctaacactatcttatgtcattgtagtattttaaggtgtcaatccaaatgggtgtaattgctatcaatcaggatatgatcagaaaatactaagtcaagccaagtgtgaataggtttggtgtgtttctactaaacctaagcaacaggttaacatgcaaatcgtattcataaacaaatctacactaagcagaaaatgaagaactcatgcagcacgaacagaaagtaaaccaagcacaaagagaagcactcggtcgaacaaacgagtaaacaggtcgagtacaatactaaaaacaccaattttgcacgagacgaacagagtactaaaaacacgagttttgcacaaataaacgaaacagagctcttaagaatggggtaattggtcttagtggactcctcaatccattcgctaactaacaaactcaatcaagctatccctagacaatagattcaaaaccaaatcaatccactttcgtgacaatgattctcataactttagaacttccaaatctcaattttcattgatgaaacataataaagcacgctttaaacaccaatctattaaagtcaataagcagtctcaacatccacggtcttgggctagaatctacaaatctctgaaattagttggttctgaactttcatcaagcacttgttaggtcgagaaagtctgaaatcaattgtcaatcgatcagaaagaaaatagcattaagagctcctaaaacagaaaggaatcatgcatataaacacttagctagctaaagaaaagaggaatccacctaaacctaacccatcctcaagaactctgaagaagactactcaagaacaatgtagaacatcatagaacaaaaccctgaaaattcataaaactcagaaatcattataaacttagcaaatgatagatctcaataagataaacaagtttgcagaagaaatcaaattcaaattcttaacacaacaaccagaatatgcaaaagaaaatctaagaaccctaatatccagcagacaaagcaaatatattttgggcaaaaaaataagagatctatttataggcaatcctagattgccctaattgggaataagacaaaataagaaagtcaacgctgcatcactcgggtcttagccgagtagaaaagtcgagtggcttcctcttagtcacatcactcgggtcttggccgagtggcttggtcgagcagcttctcttcttccttaagtgcactactcggcctccagccgagtgccttggtcgagtagactccttgttcttcacgtgtgctccactcggcctccagccgagtacgtaggccgagtatacttcaaatccttccttaggttccccgaactcgagtctgtccatcccttgtgctagaaacctccaagttgagtccaaaagtacctaattcacctgcaaaacactccaaatgcaagtatgctatgcaatgcaatgcaaaatgtgcaaaagaaggaaaagagactaagaatgcatgaaaagagacttgaaactcagctaaatgcatgaaaaacaagggcttaaaaaggttaaaatctagtgttatcaatgagtctttggctttgtgtcttctaacaaggatacatttcttaggcttataagatcgggttgcgatttaagttgttatactcaatcatacatatgacatgaagtcatattcgactccaaaacactaaccaaccttcttcttgcttctcaaagctttcatggtgtagccaaagtccatatgagtctttggcttcgtgtcttctaacaaggatacactacttaggcttacaagatcaggttgcggtttaagttcttatactcaatggtacacatgacatcaagtcatattcgactttaaaacactaaccaacctcttcttgcttctcaaagctttcatggtgtagccaaagtccatatgagtctttggctttgtgtcttctaacaaggaaacactactgataacactagattttaacctttttaagcccttgtttttcatgcatttagcttagtttcattcccctttttatgcattcttagtctcttttccttcttttgcacattttgcattgcattgcatagcatacttgcatttggagtgttttacaggtgaatcaggtacttttggactcaacttggaggtttctagcacaagggatggacagactcgagttcgggggatctaaggaaggacttaaactatacacggcttatatactcggctggaggccgaacggagcacacttgaagaacaaggagtatactcgaccaaggcactcggctggaggccgagtggagcacttaaggaagaacaaggagcctactcgaccaaggcactcggccaagacccgagtgatgtgaccaagaggaagtcactcgacttttctactcggccaagacccgagtggtgcagcgccgactttcccattttgtttttttcccaattagggcatcctagtattgcctataaatagacctcttatgtttctgtccaaaatatctttgctttgttcgctggatattagggttcttagatttcttttgcattttctggttgttgtgttgagaatctgaatttcatttcttctgcaaaactaatttatcttattgagatctatcatttgctaagtttataatgatttctgggttttatgattttttctgaattttgttctatgatgttcttcattgatcttaagtagtcttcttcagagttcttgaggatgggttaggtttaggtggattcctctgttctttagctagctaagtgtttatatgcatgattcccttctgttttaggagttcttaatgctattttctttctgatcaattgaaaattgatttcagactttctccacctaataagtgtttgatgaaatgtctgaaccaactaatttcagacattggatgtttagactgcttattgattttaatagattggtgtttaaagcctgctttattatgtttcatcaatggaaattgagattaggaagttctaaagttatgagaatcattcgcacggaagtggattgatttggttttgaatctattgtgtagggatagcttgattgagtttgttagttagctaaatggattgaggagtccactagaaccaattaccccattcttaagagctctgttgcgcttagatttattgagtttcgtgttatttactcttctgctcgttcagtttagtttatctgctcgttctgctttgttattctgctcgactttgttactcgacatgtttactcgacctgcatgttcatactcggtcgagcatctttactttcctctacttagttcattgtttaagtttatgcattgagagttcctggtctgtagtttacttcttgcttttatcactcatgttctttatcttctgcttagtatagttctgtttctgaatttgatttgcatgttaacctgttgcttaggtttagtagaaacacaccaaacctattcacacttggcttgacttaatattctctgataatatcttgattgatagcaaatacacccatttggattgacaccttaaatgctgcaatgacataagatgcatatagggaattgacgcagaaaacccttgtatcaatttggcgctgttgccatttggtgcttgctcaacagagaaatgtccactacattacagaagaagagcttacacaactccaagatggggagaaccttactattgaggaggttagctacctacagaatcaaggtggctacaacaagggattcaacaactacaaaccccctcatcataatctctcttacaaaagtaacaatgtggcaactttggacctccaggcttcacccagcaacaacagcacacttcagcacaagactcagagatgaagactctacttcaacaacttgtgcaaggataggcttcatgttccatgaccatggataagaagctagctgagcttaccactaggattgattactcttataacgacttgaatataaagattgatgcacttaacaatagagtcaagagcatggagggctacattgcttctacttcagctcctaagcaccctggacaacttcctggaaaagctgttcaaaatccaaaggagtatgtccatgctatctccacagttagtaattctgccactgaggacagtgggattcaagaaagggaggttttgcgaccaagatcaagacaggaaattaaactcgacttctttgctcggcttgtcgaacgagcacatgacccgagcaacccaatccctattccacctccctatgaacctaaatcggcatttccagaaagtattgcacagattaatgaaaagatcttncagaaacataagatgatgttcatcaagtgtatcaaagagttagaagagaagataccctttgtgatactcccaaggaagtgatcatgtaaagaccccaagtagctcagcaaatagttgaattgagttttgagtgcagtgctatcattcaaaggaaggtgatatcaaagaagctaggtgatttaggttcctgcactctaccttgttcgctaggacccttagtgttcaacaatagtctttgtgatttgagagcctcggttagtttgatgcctttgtctgttgcaaagagattgagatttgataagttcaagcctagtagcattcatcttatcctagttgatagatcagtgagagtgcctcatgggatgctagaagactaaccggtgaagattggatcagtcgagattccaagcgactttgtggttctagagatggatgaggagccgaaagaccctctcattctcggaagaccatttatagcgactgtgggcgctcttatctacgtgcaaacgggcaagatggacttgaaccttagtaagaatctccatatgagctttgatattgctaagaagatgaagaagcccactatagaagggcagcttttcttcattgaagaaggaaatttagatgctgagttgttgagtgggttggaaaatcctattccgtactccattccgactcgccacctaggagagcccgagaagcttcttatgatagaaggaggactagcttagaggttgagactaaggggaaccatttggatgttggtcctattgctagagagcttatggagctcaggaaacagtatggagctcaaggagagaccatgaaaaagttggacctcaagatggaggagctgaactacgctatcctggagcttaaggagatgattaaaggttatccaggtcctgagatcgatgaatactttgaggaacccgatcttggagaagaggactatagtactgatgagaaagaggcttacttcgaggaaagatcaaatgagtactccacactccagctatcaagagaaaatgcggagtatgattcagactttgaggattcaacaagtgaggatgaggacttctcagttgctctcctaaatctcttctctacctaaacgttgtgagagtcaagcttagtgactttaaacaagctcacttgggaggaagtcccatgtctatccttgtatatattgctttcttgttatttttgatgtttttgtttaagtgtttcagggaaaaagacttctagagaatttcaggccacactcgaccgtactactcggctacaggccgagtgtgggcttcaattgaccaaatgcccaagattgaatagtactcggcccacaccactcggcccaaggtcgagtatggacctcactgttcaaaggcccaacaagatgcagcactcggcccgaagccgagtcagaaaaagaagcccatcaggcccaacaccgtactcgacacgcgcgtcgagtatgtcggccgagttcacacgtgcgaggtcaacacaattcaaattcgaatttgctgggccccaccaatcaaatcctgctccccaaagcccttcaaagagtctgctgcaaaaagtgagacatgtccccttgaccaaatgaagggtgatgatccaaggtgtttggagggctaggatcaaatcttcttgtctataaaaccacactcaacaagctaagtcactcacactctctctttgctcaaaaatttcgagttttacttcttctctccaaacatttcaagtttttactctcacttctctagatttctcagaaactttgccaaaatctcttgttacaaaccttttcaaaacttctcttgcaacctttgttcattcttaaacataaatttctcttctactttgacctacctttggcaattttgtggtgactacctgcagtaaatcatcccaagatcatgaatcccgaggaatcaagaaggagagcctctgctcgagccgtggcaagagggtttgagatgattaatgagaagaatcagtcaaagaatcaggaagctgcgagtcctggttttactcggatgacaggccgagtacaatggccgagtatggccccggagtcctctgtgggtcgttctgccgctgctcaagaggaaatagcaagaggcaagagggtctgggagtccgagccagttgcagaagaagaagtgcctgagatagagaaggaagcatctgaggaagatgtgcaagttgatgaagaggtcccgatagttcctacaagtagaagaaggaacaccatgaggagaaagaaagaacctaccatagaagagcactaccaatatctcatggagctgagttttgaggggacaagatatccccatagacctaccatgcaagctttggggatatgtagagatgttgactacctcatggagatggccaagctggagaccttcttctcctaccagtatgaaggatacaaaactgagagctgccaattcctagccactttgaagctccatttctatgctgaagaaagggagagagagctgcataagggagttggctacatcacattcatggtgtttggaattcaatactcggttcccattaggcagttggatgctattttcaagttccccaccaagtatggaatccgccaaaatttcagcaaggacgagctccttgatctatggttgacaatcgccggtccactcccctacaagtcatctagggccaagagttcgttgataaggagcccggtgcttaggtatctccacctttgcattgcaagtgccttcttcccgaagaagacaaccggccatgttaatgagggagagctgaagttgcttgatctcaccttatgcttcattttggggcacacgaggaatgggatagagatgaaaggggatagggctgatatatccctttcggtggtgttgattgatcacttgattggttttagggagtatgcagccggaatccaccaatccggctatggaggaagcttatgtgctggaggagtgatcacgcccatcctaatagccgctggagttcctcttcatacccccactcacacagcaacctacatcgatatggagtatttgaagaggaagtgctacttggataggtctgctccagcggatcaactctacttcaagttcaagcactccacgctaggtctctctaggctagcactcccttgcaagaagttcaccaccattaggattgggaacaacattgactttgatcctcctcaatcgatcttagtcaatgtccttgcgcctctacaagcagagccgagcttaggaagtgagtctcaagaagaaggagcagagtggaatgaagaagaagccgagcaggaagcttatactcggccgagtaactttcagcaggccgagtatggccaggacgagtttgagcaagctgagttcagtcaagctgaacagtttgatgaacaagaagattcgtgcgaagctgcagcggagcagtttttctttgaggattatgctgagtccgatccagagagagatcccggtcaagttcacaagaagttgggaatgctcaaaggtctgggcaagtttcagaggaagttgttcagtgggttgaagaagaaggtgagaaagatgaagagagcaatggatggcatggcggttcagattcaggagctgcaacgaagacagagatcaccaccacctcgacccgagttcaggagaagtaactcaacaagtgtggcgccgcgaagggacgctcgtttcgaccagccaagagcctcaaactacgagctcgggaggagctccaccttttcagatcgccgtttcaacagccgcccacccggtccagtgaaacagttggttctgaacgctgacccaagccgagaggagtactactcgggatacatgctcgaccggtcaaccgagtacaacgccaataaccccaacacctccacacgagatcctgagtacacacaagaccgcctggacgagtttgtccagaacctcttcgtctaaatgttgaggtatcactccatttcactgtgtatatcattgcatttcttttatttcttgctttgtgtggttatttcttttgaattcttctttgaatttttattacacaagggactgtgtaatttaagtttgggggagggttcaagatgtatctaacattgtttcatgttttcttattcaaatttttgcatcatctaaggcatagaaaacccataaaaatttgaaaatttttgaaaatgattccaaaaaaatagagtgtcatgtagtttgcatttgcattaatagggctgtttttagaatgttatcatataggttgttgcattttgcacttgcataggggataatgatgatcatagccttgtaaatttgcaatgttcactagatagtttcaatgcccttgttgttagttgtctagtgcttaaccgattgatcttgaagtaaaaccgcaccatcttttgaattcatatatttgatctttccttagtcgaaacttgctgtgatttgaagctattccctatcaatttgaaccataaatttgacttttaattatcatactatgcattgtttgttaaactcatggtcacccttaaaatatttggatcttcttattcatttcaccactcttgttgatccaaatagctgtctctcatctttagagcagtttccccataccctaacctaagccttctttcaagccatatatcacttgtgagtgttgtgaggtctattttcgattaagcttagtagaaagtgttaggtttgtaacgacaaagatagtatctcatgtagttctagttcgcgttatccggactagataggactaggtgggtacttgttctatgggttgggaagagtttaaaagagaaaaaagggttgagttcattgtttacaagaaaaaggaaaagaattctaggagaagtaagctaaagaagttagaaaaagtctagtaaagggtttgagattgttaaagaaagagattgggttattgttagctaatgaagaagggtaaaaagccctaagcttaatagagatcaaaaacagaaccttagtactaaagacagccaaacccgctagcagtatcaaagagaaaagagtagcttctcctagagttaagagaaaaagaaaaaaatgggttaagaaagagttctaaagattatgaatgcaacagggtagagtcaagttcttaattaggatggtagatgggattgccattaggccttcattgattatactttgggtagatgggctcttatctttgtaagcatagcttgggacgcacctttagcattctactagagcttaatcatcttttttgagagatccctagtcactaaagcctattctttaagggaccatttttgtctcttgaccctttgcccttagccaaatgagattaatatgcattgtgtagtatgatccatgactcttgcttaataaatgttaaagggaatttgctgatttgaaggcttgaatagccaaatgagattaatatgcattgtgtagtaagattaggttgtgttgtgaagaagatggctaaagtttttaagtagagatcattcaacctagcactctagaactagcaacatggacattgagactatctattttacatgcatattttggttctgaatccccaccttcaaacctcactcctagcctagttctattgttgcttgaggacaagcaaagagctaagtttgggggtgttgataacactagattttaacctttttaagcccttgtttttcatgcatttagcttagtttcatgcccctttttatgcattcttagtctcttttccttcttttgcacattttgcattgcattgcatagcatacttgcatttggagtgttttgcagatgaattaggtacttttggactcaacttggaggtttctagcacaagggatggacagactcgagttcgggggacctaaggaaggatttgaagtatactcggcctatgtactcggctggaggccgagtggagcacacgtgaagaacaaggagcctactcgaccaaggcactcggctggaggccgagttgtgcacttaaggatgaagagaagctactcgaccaagccactcggcctagagccgagctgtgtgaccaagaccaagccactcggcttttctactcggcctagggccgagcgctcctgcgccgacttatcttttttgtcttattcccaattagggcaacctaggatggcctataaatagacctcttatgtttttgcccagaggatcttcgttttgtccgctggtttttagggttctttgattttcttttgcattttctggttgttctgttgagaatttggatttgatttcttctgcaaacttgtttatctcattgagatctatcttttgctaagtttataatgatttctgagttttatgaattttctgggttttgttctatgatgttcttgagtgttcttgagtagtgttcttcagagttcttgaggatgggttaggtttaggtggattcctctcttatttagctagctaagtgtttatatgcatgattcccttctgttttaggagttcttaatgctattttctttctgatcaattgaaaattgatttcagactttctccatccaaaagatgtttgatgaaatgtctgaaccaactaatttctgagatttgtagattctagcccaaggaattggatgattagactgcttattgactttaatagattggtgtttaaagcctgctttattatgtttcatcaacggaagttgagattaggaagttctaaagttatgagaatcattcatgcggaagtggcttgatttggttttgaatctattgtctagggatagcttgattgagtttgttagttagctaatggattgaggagtccactaagaccaattatcccattcttaagagctctgtgtcgtttatttgtgcaaaactcgtgtttttagtactctgttcgtttcgtgcaaaattggtgtttttagtattgtactcgacctgcttactcgattgctcgaccgagtgctttacctagtgcttggtttactttctgttcttgttatttgatttgcatgttaacctgttgcttaggtttagtagaaacacaccaaacttattcacacttggcttgacttagtattctctgatcatatcctgattgatagcaattacacccatttggattgacaccttaaatgctgcaatgacataagatgcatttagggaattgacacaccgaaaacctttgtatcaatttggcgccgttgccatttgggtgtttttcttgttacatttaggatttctgagttattaagatcaagttctatttctttctttctggttactcacttgtttcttcatttgcttgtttctgtcttgcaggtactcttactcgactagcacgtcgagtacatcaaccgagtaagatcaaaacgtatgcaaactcgttctcaaggttctggtaatctcctgcggtacagagacgacatcgacaggattcagcatgaactcagggaacaacaagccacttcaaacccagtagtcatggctaatgaggtgaatgctaatgagttgccaggcaacattggtgctggtgatgcacctagaaaccaccatcagagagctggtattgtcccacctcctattcagaacaacaactttgagatcaagagtggtcttatctccatgattcaaagcaacaagtttcatggactgccaatggaggacccattggaccatcttgacaactttgatagactctgtagtctcaccaagatcaatggagttagtgaagacagcttcaagctcaggttattccctttctcactaggggataaagctcatctttgggaaaagactttgcccgttgattctgtagacacttgggatgactgcaagaaggctttcctagccaagttcttctctaactcaagaacggctagattgagaaatgagatctcgggattcaatcagaagaattcggaatcattcgctgaggcatgggagcgttttaaaggatataccactcagtgcccgcaccacggattcaagaaggcctccctactcagtactctataccgaggtgccttaccaaaaatccggatgctcttggacacagcttccaatggtaactttctcaacaaagatgtagctgaaggttgggaacttgttgaaaatctagcacaatctgatgggaattacaatgaggactacgatcgcactgacagaggcagtagcgattctgaggataggcacaagaaggagatcaaagctcttaatgataagattgacaaattggtgcttgctcaacagagaaatgtccactacattacagaagaagagcttacacaactccaagaaggggagaatcttactattgaggaggtgagctacctacagaatcaaggtggctacaacaagggattcaacaactacaaaccccctcaccctaatctctcttacagaagcaacaatgtggcaaacccacaagatcaagtctaccccccacagaaccaaccgcctcaagctaagccctttataccctataaccaaggctacaaccaaaagcagaattttggacctccaggcttcacccagcagccacagcaaacttctgcacaagactcagagatgaagactctacttcatcagcttttgcaaggacaggcctcatgctccatgaccatggataagaagctagctgaactcaccaccaggattgattgctcttataacgacctgaatataaagatcgatgcacttaacactagagtcaagaccatggagggacacattgcttctacttcagctcctaaacaccccggacaacttcctggaaaatctgttcaaaatccaaaggagtatgcccatgctatcaccacagtgagtacttctgccactgaggacagtgggattcaagaaggggaggttttgagaccaaaatcaagacaggagattgaactcgacttctttgctcggcttgtcgaacgagcatatgacccgagcaacccaatccctattccacctgcctatgaacctaaaccatactttccagaaaggattgcacaagttaatgcaaggatcttccagaaacacaagatgatgttcataaagtgtatcaaagagttagaagagaagatacctgtggttgatactcctaaggaagtaatcatggaaagaccccaagaagctcagcatatagttgaattgagttttgagtgcagtgccatcattcaaaggaaggtgataccaaagaagctaagtgatccaggttcctttactctaccttgttcactaggacccttagtgttcaacaacagcctttgtgatttgggagcttcggttagtttgatgcctttgtctgttgcaaagagattgggatttgataagttcaagcctagcagcattcatcttattctagctgatagatcagtgagagtgcctcatgggatgctagaagacttaccggtaaagatcggatcggttgaaattccaaccgactttgtggttctagagatggatgaggaaccgaaagaccctctcattcttgggagaccatttttagcaactgcgggcgctcttatcgatgtgcaaatgggtaagatcgacttgaaccttggtaagaatctccatatgagctttgatattgctaagaagatgaagaagcccactatagaagggcagcttttctttattgaagaaggaaatttagatgctgagttgttgagtgggttggaaaatcctattccgtactccattccgactcgccacctaggagagcccgagaagcttcttatgatagaaggaggacctagcttagaggttgagactaaggggaaccatttggaagttggtcctattgctagagagcttatggagctcaggaaacagtatggagctcaaggagagaccatggaaaagttggacctcaagatggaggagctgaactacgctatcctggagcttaaggagatgattaaaggttatccaggtcctgagatcgatgaatactttgaggaacccgatcttggagaagaggactatagtactgatgagaaagaggcttacttcgaggaaagatcaaatgagtactccacactccagctatcaagagaaaatgcggagtatgattcagactttgaggattcaacaagtgaggatgaggacttctcagttcctctcctcaatctcttctctacctaaacattgtgagagtcaagcttagtgactttaaacaagctcacttgggaggaagtcccatgtctatccttgtatatattgctttcttgttatttttgatgtttttgtttaagtgtttcagggaaaaagacttctagagaatttcaggccacactcgaccgtactactcggctacaggccgagtgtgggcttcaattgaccaaaggcccaagattgaatagtactcggcccacaccactcggcccaaggtcgagtatggacctcactgttcaaaggcccaacaagatgcagcactcggcccgaagccgagtcagaaaaagaagcccatcaggcccaacactgtactcgacacgcgcgtcgagtatgtcggccgagttcacacgtgcgaggtcaacacaattcaaattcgaatttgaattcgaatttgctgggccccaccaatcaaatcctgctccccaaagcccttcaaagattctgctgcaaatagtgagacatgtccccttgaccaaatgaagggtgaggatctaaggtgtttggagggctaggatcaaatcttcttgtctataaaaccacactcaacaagctaagtcactcacactctctttttgctcaaaaatttcgaattttactccttctctccaaacattttaagttcttactctcacttctctagatttctcagaaactttgccaaaatctcttgttacaaaccttttcaaagcctctcttacactctttgttcatttttaaacatcaatttctcttctactttgacctacctttggttattttgtggtgactatctgcagtaaatcacctcaagatcatgaatcccgaagaatcaagaaggagagcctctgctcgagcagtggcaagagggtttgagatgattaatgagaagaatcagtcaaggaatcagaaagctgcgagtcctggttttactcggatgacaggccgagtacaatggccgagtatggccccggagtcctctgagggtcgttctgcggctgctcaagaggaaatagcaagaggcaagagggtctgggagtccgagccagttgcagaagaagaagtgcctgagatagagaaggaagcatctgaggaagatgtgcaagttgatgaaggggtcccgatagttcctacaagtagaagaaggaacaccatgaggagaaagaaagaacctaccatagaagagcactaccaatatctcatggagctgagttttgaggggacaagatatccccatagacctaccatgcaagctttggggatatgtagagatgttgactacctcatggagatggccaagctggagaccttcttctcctaccagtatgaaggatacaaaactgagagctgccaattcctagccactttgaagctccatttctatgctgaagaaagggagagagagctgcataagggagttggttacatcactttcatggtgtttggaattcaatactcggttcccattaggcagttggatgctattttcaagttccccaccaagtatggaatccgccaaaacttcagcaaggacgagctccttgatctatggttgacaatcgccggtccactcccctacaagtcatctagggccaagagttcgttgataaggagcccggtgcttaggtatctccacctttgcattgcaagtgccttcttcccgaagaagacaaccggccatgttaatgagggagagctgaagttgcttgatctcaccttatgcttcattttggggcacacgaggaatgggatagagatggaaggggatagggctgatacatccctttcggtggtgttgattgatcacttgattggttttagggagtatgcagccggaatccaccaatccggctatggaggaagcttatgtgctggaggagtgatcacgcccatcctaatagccgctggagttcctcttcatacccccactcacacagcaacctacatcgatatggagtacttgaagaggaagtgctacttggataggtctgctccagcggaccaactctacttcaagttcaagcactccacgctaggtctctctaggctagcactaccttgcaagaagttcaccaccattaggattgggaacaacattgactttgatcctcctcaatcgatcttagtcaatgtccttgcgcctctacaagtagagccgagcataggaagtgagtctcaagaagaaggagcagagtggaatgaagaagaagccgagcaggaagcttatactcggccgagtaactttcagcaggccgagtattgccagnnnnnnnnnnnnnnnnnnnnnnnnnnnnnnnnnnnnnnnnnngatgaacaagaagattcgtgcgaagctgcagcggagcagtttttctttgaggattatgctgagtccgatccagagagagatcccggtcaagttcacaagaagttgggaatgctcaaaggtctgggcaagtttcagaggaagttgttcagtgggttgaagaagaaggtgaggaagatgaagagagcaatggatggcatggcggt

SEQ ID NO: 912 - DNA, 1499 bp, Arabidopsis thaliana landsberg
gcattcaaaatcgctattctctcgtacttaacatcggcatagtactcgtcaatgtcttgccaaaaagaaacaaattggacttatattatcgaaataaccaattctagaacaaattgaagcagcatcattgtataactgcttaccagaacttgacccttcctccaatatttgtcgaaactgttcaatttttccttgtttgaagtactccctcttcaccatagatgaaaccaaaatcagaattggaaaaaaaaacaatctttaagcaaatcagccacaaaagcaactaacttttgaagtgttaatcaaaacccatcagccattaactaagaaaaactcaacaaaactcgattccagatagaacctaattagagtggaaaagaacgaaccgcgatgatgagccagagatcgagaggagcttgttcggctttaagaatatcaagtatatcagaagcgtcacgagggagctgatcaagaacaaccctaacttcttcttctgaattctgaaccggtatgtacacactcgccattgcccggctaagtgaggattaccagaaaccctagaagaaattgcagtggcgaatttttcgaatagagagtatgtgtgtgtgccaacgatgaagtgaatcgaacaatcgattacaaatctgtttcttttttatttgtgaccttggtttggtctgataagctcagataagaagttttagggtcaaatatgttaataataaaaagttaaggtaagagtccttttcttttttggatcggtgttactttctttttttcccacatatcgtgtcaaatatggtaaaccaaatatgcaatgcgattttgaacttagaaacaacaaaaaatttaaattactaatctttagccaatttttatatcgatctttagtaaacggaaacggtcttaagtcaaatgatagaatatatggttggaatgccattatctcaaaaaaaaataatcaagaatgtcatttttctaatttttaattctttgttaaactaaaaataagaaaaaatcaaaacaattggtaaaaaactaaaacctagatgacccaaaaaagtattcgatccaattaagatatatgtccatcgatctaaaactcatcccaaacacttaagtaaaattcctgatttttaaaataaaaccgttttttctctcacaaaattcagattcttccaaaatcagattcctaatttttcagctttcacgatttttcgacgaattcttgattcgtgtaatagtttgatggctcgtgttagagatggtaccggtggccatgtatatgagtcgacggagaggccgtccgaagaagtttcgacatcacaaacagtttcttcagaaattgagatcgacggagatgccgccgtagaggttccgaccgaaccagctgaaacagatgtttcagcgaataagactccaaaaaaaactgctgaaattgaagaggccatagaggaatcgctagatggtgatgaggcttcttctaaaggaaccgccaa

SEQ ID NO: 913 - DNA, 9350 bp, Arabidopsis thaliana landsberg
  unsure (1)..(9350): unsure at all n locations
tgcccaaacttgtccattcgtgcccaaacttgcccatctttgccctttgattgttcattgtgttttgggcacttaatgtcaattggccatgcattcgagcaactttctaaaattcggactcttgcccgtggccaatgtccttatgcgggtaactacagggtcgcaaggaacgggcaaccttgaatgctacgcctggaccatcccccggaagcttaaccccacgaaaatttttgttggatccgatgtcaactctaccctttattggacgattaacctgaacttaattctttatcataaagaggtgttagatcagggaaatgagcatatacattaaggacttcttatcccttttttgtggttcatacccttaaaccctatcctcttttcaagcctcatgcattctcatttccctttttcatttaacaaatatgtgcaaaaacgtcagagagaaaggaacaacacagtttcccgccacaaagacagaagaaggaagcaaaagaagagattctaacaaacgccctaagagtttattcttccttggaaccaattcaaaggtatgcccattagattcggtgtttaatagttctgtttccccttccaaaaataaattaatatatatataaaaaaaagagaagaaagaaaagaaaaggaaggaaaggaaacataacaaccaagagagtaacgcccccgaatcgcctatggccggacaagccatgggcgacccagttacgataactgtgaagatgaacgaccacgacttagtaaaggttccaaatgaatccagtttcttaaccaaattataatcgactttcttcccactaggaacaccacttaggcttgccacaccacttaggcttgccaacccctcgtgatattctagtgttgagcgacccggactaggtcttatatcattaaccacccgactgcttttaagaaaacactttatacatagtatatagcttatgctttgcaaagagttacccaaaaatatatctttgtatcggatccttgttaaaatttacataataacaagtaattttgtagaagcaacgcaaaatatcctatttccggcatttcctagtgttcgtcttcccgctatggtcatcccactatggttacctgtaagacaagtagaatcatgagtaatctaagattactcagtgagctgggtctatgcacaaataaatctctagggtttaatcaacttaataggtaaacttatccatcagagatcacagagcacgtaataaacgtattataatatacttataataataccagaatatgcagccaaactagacacatgaatgaaccttgggcccaacatactcccaaccttaccaaaaaggtgcaccacaacatcagcacaaactcccgcatacgtgtatacatgttctccacacgtatgctaccacacacacgtacgtgcacacccacacacacgtacacaactatgaacatccgagctatagccacaaaggcttataaccggaacatcactttaatgcatcatcatgcattacccggcatacgctcggagtcttgtgccatcatgtaagtgacccctcatgatcaagacttatagacacaatcacaacacaaaacggaaggcagcagcttactctaagcatgatggtatcgggtaaacccctgaataccacttagacacaataacctcatgcagtactatatatcagtagtttaacatgccccaaacaagtgttgaccatcaaataccaaatcacgtatcaatatatatacataatataacaaggatttattcacaacctcatagcatatctcatataagtataacaatctaacaaggcaagtaagccctcaaaacatatctcaattcatcaagtaaacttagttaagttcatattcatttagcatagtcatgcaccagtccgttccattccttagtgataatattatcaagttcgtcaaatgcccatattcactttaagattcaagttctaacttatgccgaattccgattagttaagtctaagtgagtaagcatgcatatattgtaaagactagctctagaaaacatgcaaacaaacacacaattcgaccgcaactcacggattcggtagttccgaaagttttctgggtctcaggcagaacttctcgagcacggtcgacaatcgcttactcacggtaaggttttcttgaccacaggcaatgattccctagtcttagaaaatgtttcctcaaccacggacaatgttttattgattcgagcaagtttttcttagtttcggtcgactttttaatcggacaacctttcagtctttctctcttgccttcaaaaatgaaactgggcggagagagctctatttataatccgcccaaggttgccatgcagtatcgcccgctgccacatgtccagacagctaccgcgcccccaggcgacaagtgtgttagacgacggtgtggtgaaaggtggtgacggttttcactcgaccgccccatcaacttcggctccaagactcagctgactttgactccaaggttggtgacttgagccgcaaggcaccgcgagtgaggtgtccacacatgtcagtccgcgggcgccattttgggcggccaacttggttcagcggaacggcgaagttttgcccaatctttcccatctttgcccattcgtgcccattcttgcccgtttttgtcgtttgatagtttggcacctttgggcacattcagtctatcggccgtgtattcgggcaactttttctcattcggtccttggcccatgcccgatgcctttatgcgggtcactacaactactggccaactatgctgccggactgcgaggcttattcggcgaagtgcaaaccatgtcagcgacatggcccgatgaaaaatgtgccacctgaaatgttaccctcagtaacagctccatacccgttcatgtgaagggccatggatatcgtaagactatttcctccttcgtgatccaaaaggttcttgctggtgctaactgactatttcactaaatgggttgaagcggaagcatattatgaagtccagtcgcctgcggtcatcgcatttatctggaaaacatcatatgtcaacacggtcttccgtatgagatcgtaacaggttaaattcttgaggtcatccagttcaaattctgaaatcacttcgcctcttttcatccggattctgactatctcttctgcaccatgggcctgattcagagcgtccacctttggcttaacaacctcttcttgctcggtgagatagccttcattttgtcgagtcgagcttgagccttccaagtaatacgcgcgaccttggcggctcagtcaccctgaagtctgttgcattccttttccatgtactccttggcagcaacgagtgcgatctgcagcttctcgacctcctatgagagctcggcctcacaattgttgagccaggcgatctaatcattcaatgaatcgaccttcgccttatttgtctcagcagccacctttagagtggccatctccttcatgtctacgtcatacctgatcctcgtctggtcgacgcttttctttaaattgaagaaggcgtctatgtccgcaagctttagtttcagcttacaatcgtaggtggcgatcaggttgttggcaagcgtggcagtctgagaaagaagcaacaagattaaatcagaaaccatgaaaaaatatacaaaatgtataacagatggtcatgttagaaataaacctctaaggatgatctggcaaactgatggtactcttctcttaggaccaagtcgtcaggattgggaagcgcattcgccccagggagcatcaagttgcgccataggtgactggccgcttcctggtccctcatgaggaaccgatctccaacatacttgaatgaaaattgatcagggttgatagattcacccctagataagcagaaggtcttgggtggcggagcttcgtcggtcaaaacggcatcagaggttgatctcttcttggcctgattagccattccttttcctttctcttcacgggacttccttgtattctcgtgtttcgcaggagtttcatctctggttggataagagatggtctggaaaacgtcgacctgtgtattctcaggcgcagtgacttgagcaacaacaggtcagtcacccgcattgacctgtacagcttgaggtgcgactacctgaacaacagaacttgagcctgatcattgtcaacgatcactagaacttgagcatcttttgccccttcaataagtagcaggttctgggtatcttgagcgacctggttctcgtcgagaacctgattgatatcagaagaaccgggggttgtggtagttagcgccagggctgatgcgttaaaaggaagaggattttcttctcagacaggagcttgaggaggcggtagattcataagcctggaggcgaagttgacaaaagatttcctgacttttcccataatgcgggcgactcgtagtttggtgacgcttttccacatacgatttcgagctcggaatattgccgctctaacttcctcgaactttgttagggtcggatttcacccaggataagcgagccgaccacatctccgcctcgggaaccatcgatgaattatcccgaaccggaccacaaaacacctcggaggcctcgtcaagaatccataccgaggcgatgtcgagaacgcttcggagcactcataaagtggtcccccgacccgacctcgaaacgcctcgggnnnnnnnnnnnnnnnnnnntcccgaggcgggctccaagacacctcgggagcttgtcttcgaataccgcggaccgagcatcccgatcatgacccgaggccagcttaatcacggctcggaaaggtctcgagttagacgaggaaaaacttcaaaagacttagccgatgtaagttcaaaacacttcacctccgaaaaccccggaagagataatcttcgaagatatcaccggatacagaaatcccagaatcttcggaagataaaaacaatctctttcaacaagataaagataaagagggattttccgagaatatcgcaagaggtgatattctcggaccctataaaaaagcacctcacagggagaggcacaaaaaacgctctcaacttcaggctatcaaaaacgctctgactttgaaggcaaaaacacctatttctcatattctatcaaacttgtacgataaaatcattactttctcattaataaaatcaagaacaccgtccgcggtaattgagaattttgttgttctttgagaatctcacaaagatccgttctttgaagaaacccttaaaacaaattctattgtgcgactctcacaatttggcgctagaaggaggggctatgtggtctttctcttccatggattttaccaacatgtcgtcgatgtagacttccatcgtcttcccgatctgtaaggcgaaaattttgttaacgaagcgttgataggtcgccccggcgttcttgagtccgaagggcatcactcgatagcaaaaaattccttgctctgtgtaaaaagcggttttttcttgatcttcggggttcatcatgatctggttgtaaccagcaaaagcatccatgaacgacagtagcttgttttcagaagttgattctacgaggcgatcgatgtgtggtaatgggaaactatcctttgggcaagctttgtttaagtccgtgaaatctacgcagactctccatttgccgtttttcttttttaccacgactgggtttgcgatctagtcggggtacttcgcctcggtgatggatctgatcttcaataatttttctacctcggcctttacggcttctgctcgttcccgacccaattttctcctcttctgcttgatgggtttaaaagttggatcgatgttgagctcgtgtgatacgacgttaacacttactccgggcaaatcctctagggaccaggcgaaagtattgacgttttctttgaggaaagtggtgagttcagttgttagttcttctcccacatctccgctgatttctacgcatcgctcgggctttgcgtcgtcaaggcaaattgagatgatcggatcgggagttggtgtcgtagattttcgagcttcttcgatctttagctgctataactgctcggagattgacttttcttcggctcggccaagcttggccttcttatgattcgcgtcggccgtcgactcagtgacggggttcctgagcttgtgttctgccatgaagcaaatgcgagcatttttctggtttccccagatggttttcacgccgtcgcttgtgggaaattttaagcatagatgatacgtcgaggcgacagctcggaactgatttagccatggggtgccgataatcgcgttgtacacggtcggctggtcggtaacagagaaatcgacgatttttgttacccctttggctcggactggcagtttgatggttccgagagtcatagtggtttcccctgagaacccgagcacaggtcgtggagttagaacgatttgcgtcatgtcgatcttcatttctcgcagagttgtaaggaaaatgatgtccagtgtgcttcccgtgtcgactaggactcgttcgacgttgaaatcaccgatggtcagtgtaatgactaagggatcgttgtgtggacggtctaaaccgttggtatcgctttcgtgaaaggttacttcgtcatttggtccattaaatggccgcgtccaattatgattcgcgtcggctttcctttgatatgccttgattgatgctgccgtgtcttgacagaaagctgaatcccctaaaattgtgaagatccttccccgagcagcttctggttcatcgtcgtctttttcgcgattaccccggcctcttttaggtcttcggggttcgcgcgggggcggtcttctcgggattggccacagcgttgacctgctcggttttacctttttctgcttctaaatcttcgatggtcaaacctcaaccaatttctccggttaggaattttgcagccaaccttgctccgaggctacgacatctggaagtatgatgtccgtaactcttatgcaactcgcaatattcttgctcgtttcctgcgggttgatcctttgtccaagtgtaggattcttgaccgcgacctcgacagcggcctcgcccttggcctcgggcggcttcgcctcggggtgaatcggcttggtaattatgggctccggaaaaatttaatccttcatggtgaacgaatgtcccgccttgggcacctttcttgtggttcagagcgccggtctgaggtttatcgctgcgaggcgtttgcttggtcggttcgtgtcttctagctagtagctccatctcttcttcatgggatacgtaatccgaggctcgatgctgggcgtctcggattgtcggtggtttggacaagtttagttcctttcgaaattcnnnnnnnnnnnnnnnnnnnnnnnnnnnnnnnnnnnnnnnnnnnnnnnnnnngattccttctactttggctagggtggatcggaattttgcgaggaaatctcgaagtggctcattaggctgctgagatagtgaccatagatcggcgtctgatgtgccgggatcgattagcaccgaatattgctttaggaaaagagtcgatagctcctgaaaactatccacagaattttccttcgagtctcgagaaccagtccagggctggccctttcaaatactcgacgaacaggtgacagagaccagcgtctctttcttctggtctgaatttggctcgggccacagagatgataaacgactttaaatgccctttcggatcggaagaccacattgaaatactcgattcttagtttccctggatctgagattatcgcattggagatcttgtgtgtgaacggcgtgtagtgggattcttcctgaatgtggtcgatgttcggtgccgaggaaactgcgttatgcatttgggatcttacgagcttcatctcgtgtccagccttggctagggatagtttgatggagcttatttcctgctctctggcgtattcttcagcccatctaacgttctcctcggagtcttcattatccgaagcgtcgatatgatcggcttcggtaatctctgctcggagaggagggagttgtggttcgtttcgatctgtttcccgatttctcaaaattgccggctcggttcggtcccgtccgatttccgatgccgttctacggacgggtcttgcagtattgccaggtgtttggaatacgagccatgtgggattgagatctgcagccgcccgtcaatcatgaatgtgcctcgcgccgaaacgggtagtcctgatttgtccttgggaggtagctgcttcgagttgctgcgctaaggaccgatttgcttgttcttgatcgtttaccttctgttgaagttgagccatcatactcctcagttctgctagggtcgcgggagcagcggcttcaggagcatctgtctggattggagggattgggttcccttctgtatcaactacgttactggagacttgattgttgaccattgtgaattgggtgattggttccgtgttccgggtgttagagaaacacccatttggattgacaaccttcagcactacaacgacatgatagtgctttaggtttaattgatcttaaaaacctattatcaatttgcaacaatggtgagaaattcaatcttcaaatttgaccttaatccagcaatttaaggcacaaataggttccccaaactatcctagacaagaatctagcatcaaacaactcataaacatcaaggaatttcaagaattagacatttttcaccttgtaaaaatggaataaaaaaaagggatttcgaacacatatctttgtagatcaagaaaaccaacacaatatttaataaaaggaccgaaaaccgagtggaacagacaccaagtttgtgaaaatcgagtgttttttatcgattccgtttttaactggcgactccggttcaatctggttgagttcggttaattggcaatttcccgttcaagagaataaatcacttactcagattgatcgatctcggagtcggattgatcgatcccagtatacatgattgttttcaatcacgatgttgatgttcagatcgatcgatccgaggagcagatcgatcaatctgtagggggattgatcggtccttctttctctttccaaaataccgggtagtggaccgatcggtccactagtgaatcgatcggtctgtcgctctctgtaaatcaaaataaaactaataaaatgcatggactgttcaatcctattttcgatcgatcgatccaatccccttgtttttttttccaatgaaattgcaagtaaaaacaaaaagaaatgaaagaatgtacatagaatacctggtgggtgtgattgtcgatcacacact

SEQ ID NO: 914 - DNA, 1155 bp, Arabidopsis thaliana landsberg
gatccagtgattcaatcaaaaaaattgaatttttttatttgaacactcgattgcatcctggtggtggctccatcttttattcatttcctgaaaatcaaaaacaaaaccaaaacaaataaatggtaactaaaaaaaataaaaactatatacagggataggactgggacttcctcccaagtgagattgttttaagtctctagcttgactcctcacactcattaggctcaaggagggtgatagagtagaattgacgtctcttctccttccttagtagatacaacatcaaattcagcatactctcgtgacaggtctgtaattgagtactcaatggccctttcttggtaagctcctttttcatcatctggatagtcgtcttttctagactgttctaatgtgaattcacatccttcttttctaaccataggaataacttcatcatttgggatgtccttgatgtcgagtggtgcgtggttggctttcccatggagctccttaatttgatctttcagctctcttataatagctttgtcgtgccaattagacctctccttgagttctaaccaatcatttaatgccctcatgcttgactttacgggtttggttgagcactctagtctagtatcaattgagccttcctcgttcaatgcaacatcctctctttctaacccaatgacacctttaaaaatctctgatcctggtactttgttgtgtgagtctaatgacatctcatagctcaaggtctcactggagagaaatccagcttcactactttttgtcaaagcagtttgaaggtgatctttgtcagtaagctcctctagcagttcattagctagttgacccatttcttcaactaaaaaggtttgtccttctattgttggcttcttcatagtgttcctgatttcaaacttcattttgaaatcctccccgagattaagattaatttttccttgcttaacatctatgactgctccagctgaagccaagaaaggtcttcctaagatcagaggatcattagattcttcatccatctcaagcacaacaaaatcaatagggacctctactccattaatcattacaggcacatcctctaacaggccaaaaggtctccttaaagtcctatcagcaagaatcaaggttaggtcacaaggcttgtac

SEQ ID NO: 915 - DNA, 3308 bp, Arabidopsis thaliana landsberg
gggcagccacatggcaatttcaatggcaacagatttgcagggaactaggattcctccaactacactccaaagcctgctttccagaagacctttcttcgtatcaacttccacaggacctatggtatttcatcttaccaagcccccccccctccaccctgggcagagaccccctccaccctcagcagagacaagaatggaattgatgcttgagcagattctagagagccaaacaaagctcgttgtggagtttaatggcaagtttgatgctgtctacacagatcttaatgggaaaatcgacaatctgagctctcacttgaagaagctagatgtacagctagatcaaactgcacaatctatcaagagacaagagggttttctttctggtaatcatgatgctaaccccaggaagagctgcaatgccatcttgatcagagaaggagatgatgtgtgggaggaattggacactaaagacgagttggagctcgcaattacagagatggtgtcgaccgacacccaacagacctactctatctccataagtaggttcagacgttctttgtgtgatctggtatcaagaatcaacctcatgcctaagtctgttgctgagagactaggcatcactcactacaggctaactcgcataactctcctcttatgggatcgttccaaacgattctccgaaggaatccttgaagatgttcctattaaggttggtaactccattatccctgctgattttgtaatcctggactatgagaaggaacccaaggatcctcttatccttggaagagcatttctagctacagctggtgctaggtttgatgtgaagagagggagaatctctctcaaggtgtgtgatttggaaattgagtttggcatggatggttcagaactaagactatcagtagcattgcttccagcacagaaacacctcctcagactgctcggaatcccaccacagagccatacacaacactccaacccgtccaggtcgccaatgagagttgcagaggaacggtgtcgatcgacaccactacccctgcagatcgacaccatcaggtttcacagatagaggattctgcacattctcttcagcccacaccaattgaggacctatgtgataagttctcttctctctcttctcctgttttatctttgattaattctttagattattcgaagactgcttcactagataacaagcctagagttcctcgaaagcttgtctctcctgttgttcttgcaggtgacgagaagagtgtcgatcgacacacacctgagtgtcgatcgacaccggaagctgctccaaccagatccaaggcggtgaggcagcacctatccaccaccactccacccacatcgtaaactccgccaagtcaagctattaactcaaaacaagcgcttagtgggaggtaacccattggtttgatttttctttttcctttcttttattttcttttatttttgctttatttttcccgctttctctggatttgaatgccactggggacagtgtcgtttaagtctgggggagatttttactaatgatgcttttatttttgtttcttattttgcagttcatttggttatttctttaaaaacgttttctttagtttagttaggaatcatgatctatatttctcatgtttattgcctgattgatgagtgatgcaggttcgattcaatccgactattggaaaatctagatggcaaaccaacagacttgaggatatcctagtttccaactcaaccactaaggctggagctaatctcactgctcttccttttacctcttcaaacggttagtattcatagatcttgattccttgttcataccttatattgagaccagtgtgataaaaagaatatgttcctctccccttataaaaaaataataataatgagagattgagacaactttcagatagtgtataggggtaggaatgttttctatgaccccattattatacattatttacaatgatcaattacaaatgtgtgaaaaatgctgagggtgtcgatccagtatgcgagttcccctttgtttactctctaaaaagaataagtctgggggagagaaagaacaccgagaaaaaaaatatataaagaatggtgaatttatcatggtatagtacatgaatgagtctagaaggatcttgaatgttggcttgtttgatgagacccagcgatgaaaccctggtggatatagttgtggaacttaggtatggaatctagaatattgtgtaagcttgtagagaagaacatgttggttaggatttgattagacttgttaggcatatggacttagtttggatgatcatggcaataggctagagaatgttgggagttcctttgttttcaaaacctcttccacgggttcggtttttgtgttttgcttgagggcaagcaaaagctaagtatgggagagttgatataacccgattttcaccaatttgagctatgttttaggtataggatttagagtcaatttgttatttctagagtcttttatagtcctttttaggtctttacatgttttggactcatttggagacaacggagcattttggaggacaacagagaatttatgctagtgaagaatgcggagactaaaaaccgcataggtgtcgattgacaccaccactggtgtcgagcgacaccaatacctgacggcaattcgaagacgcaacttattgatgtttcgaagatctccaaattcggcctagaacttcctcctatgtttaatgaaggcccaacacgtttttaagacatatatatatatatatatatatatatatatagacatatacatatatatatatttaggtcaatgttgagagcctaagcttggagaggctattctcctcatctcttttgtactttgggagcaaaacggtatggagactctctttggaaaagatcttctttactctttctcttgctattattgatttcttattcagactatgatttgtgtttctttgatcatgtctgagtaaaccacttgttaggtttagggtttctcattagggattcatatggtttaatagatcgccctcttgctaggttatctgtagaattcttcatcgttaattgttcttaatgctagatctaaattgatcacctagaacttgaatccagacaatagatatgcccaccataggtatatgtagttggatctataatttgatgagcctggtttataggtgtgtaataagaattggcctatctacccaggtcaacaactgaactcctttagaatgcataattagattaaagatctctcggcttctctggttattcttagc

SEQ ID NO: 916 - DNA, 2203 bp, Arabidopsis thaliana landsberg
gtctttcatactctttggttgtttctccttccgggtctctctaataccgttgcacatagttataagtttgtatctgttacttagacctcagtcttcgccttcaaaaatctgctcatctaaaaaacagtcttttctgagtaatgataaacaagaaaatcataagctataacagtttaccaatagtgttgcaaaaaatttaaactggaatcattacataacgagaaggtggttaatattgtgagcatgaaagggtgaaacaacttagcactgcattatcagtcttgcgaaataattggaggacaaatcatatgaatcttcataccattggatactactaccaacttggttagtcaataaacaacactggcatgcttttttatgcgtaaactactgtcctatggagaatctcaaaaacggagtttcttctactttgcttttttttgagcaaatcactgtatttctcccgtaaacaaataaagggattaaaataaaaaagtactcacatagtatagtccactgctctccattgtcttggcatggatacaatttcttcattgttggtttcacctaaggggaccctgtttccaagtgtacgtatgacagttcttctaaaacacggctgccgaatcctatagaagagcagctcaagctagttgaagttatgttgccatcttcatcgctagcatttcccaagccactaatgctatttccgtcttccttcgcttcaggatcataatcaccattctcagagtcatctgaaggctaatccacattgtcattgagtaacatttcagaaccagtatggagactagcatcacctttgaatatatccaagaggagagtacaaagtctcagaagtagaaggaacattacagtgttcattgctgtttctgtctcttttaccattctaaaaacctcattacagtgttcttgcaactgtttagcaattccaactgctgctacgggatcttcaaaactcttaaaaagagaaagaacagagaattatcaaaaagagccaggcaatattttttatcatcgattcatacactccagcaataccttaaattaatggcaacacggttactcttggatagcaccttcttcaggttggtagattgcaactaaaagtggcttgcatgggttcctaaagctgattccttctctttcaactatattgagtattaaacatctgtagtagctctatatcagactcatatagagaaacagacacagagacgcacgtcaaattcctctttttaaaagtagtgatacacacgaagtcaagtcaatttagaaaaatataacgaaacacagacattacatatacagagtaatgtaaactgttcaaagatcatattgaaactgttgttgagcagtgtatatgataaagagcaaaaattgatgcaaagccagaagccatcaagtctattcgcatctgaatcgaaaaattgatacagaactgcgataaattacttaccgatcatgcgtggtcggttgagtcaccggcggcgactgacgaagctgtggggtttgggttcgtcgtcaccttcaactttactttttgttcaactcttaacgtttttacatttgagcccctctatttaacaatctatatccaatttgttttatgttcatgaaatgaaaattacattccattccctatatttttgagacatatttcaaatttgtttgttggttttactttggaaaaaagaaaataactgtttcccaaaaaaataaaaataaaaataaatctggtcaatttaattatgtaaaaagagaaaaagatggtcaattaattaattatcaaagaaaaatctgattatagggtatttcaattaagtgataatttatttttcagtgacaatatattactgatatttataccctttttctcaacattactttaataattaatacccattttttaggttacaattaacaaaagaacaagacaaaattcaattttaatttaattagcatttagctctacttgttcttcttcatcaatcggctcttcgcgcctggaatctctcacgcaacagacaaaattcatattttcatcttcatcatcattcaccgtaagtagtttcatgaagagttaacaatgtttatcgtttggttatagttttgcttatttatctcctcggagctgtgtgatttaacttaaaaattgacagagaagcaaaagaggattaagcta

SEQ ID NO: 917 - DNA, 2900 bp, Arabidopsis thaliana landsberg
tttgattaaaaaatttggaagagccccataaagggcctaccattggggtttctctaagaacctctattggaggtggtctaagtaactatgaaagaaaaagaagtacaaaccaaaaaaaatcttcttcttttgattaactataaaattatcattgaattaaaaattatttggtaacttcagtatcttgtcgatagttttttcttttttccgctaacaaacttaattaattctattcaaagagtcattacaaagacatatacagaattactataacacagttattacatacatagatgtatgtctcatatactaataaaaatatagtataaaggagtttaacgatgctttcctattggtgtcttactcgctaaccgatcataagaacggttactatccaactttatatttgatttttttttgttacaatttgtatgcaataacttttggctgaaacttcttttcacaaaacataatattcaaccaaatgtgcccatatctaattctgaaatgtagacacaatggcaccaacgcttttgtaccaggtctttctgaaatattttgacgactgtgtaattctcttcaacataactacacatagttttattgtatcatcccatgtagccctcttgaatcaataggtttccatctaactgtcactaatgcatttcgcacctaccaaatctgcgcaataccaatcaaatcttgtcaccagtatttgacaaagcccacgtgtaatctcgacatcacaatccaacaaaagccgaatttatgcaactataaacctcttccacaatcaatataataatgaacgagagtgatatatccttattttcactgattttatctatgttttatgtataaggttttcagtctttatgttatttctcgattctttttagtgtctttttaggtattctatgcagtaagacaacaatggagatgagaagacattctagagcaaaagctaaggaaaatgaagctaaggacaattttcagttcttgattcagaggagtgtcaatcgacaaactcctggagtcaatcgacaccagtttcggcccagcaaagtccatgatgctttcaagtttacagaagaagaaatttgccccagaagacttccctatttacattattagacccaggacgttttatagggtttttatatattgttttagacctaagtttcttttatcaagttctttgcaaatccctattttcagagatataagctattcatcccttgttcttgagagattattcagttcttaatacagtgaagagatcccttctttcccctatcttatttgctgtgtttatgctttctatctcaattatgttgtttgtttcattcaatatgtctaagtagtttgcttgtttggaatagggtttctcattagggattcatatggtttagtagatcgccccctgttaagttatctgtagaatttttcatctttgattatacttaatgctagatctagagtaattaactagatcttgaatccagacctgagttatacttaatgctagatcttgaatctgcagggcaaaacaaagatagtttaaaatcaaggttggacttggctgaaatatgcagcagacctgagttgcatgttacacgagatggaaaattaccggtttgaaattccacttgtctcctgatgcaaagaaggagttgttctagtgggttgttgctgaagtgaagttcctagatggatatgtgtcaaaaatttcaagatgcgtgttggggtcggattccacctaggtaaccgagccgaccatgattaacgcctcggagatcttgttgaagaaccatcctgagtcgggcctcaaaacacctcgggatcatgtcgaggaaccatcccgaggcgacatcaagaacgcctcggagcatcaccacaaaggattccccgacccggtcttgaagcgcctcggatggcaacccggaaagtcatcccgaggcgggttttaagacgcctcgtgagcgcatcattcgactaacaaggttcgagccgctcaaccacaacctgagggtcagctcaacccggctcggaggaacatcgggtcgggacagaaccttcaagaaatgacttaaccaatatgagatcgaacataccatttccgaaaaacccggaagagatattagagaatctccgaggatatcaccaaatataggagttcccagaatcttcggaagataaagacaaatctccttcgccagctctaagataaggagaaatcttccaagaatatcgcgagaagcgatatgataaagccctatataaagaacttctgaggacaaagaaaaagacacgcacaaaaacgctctcaactttaggctatcaaagacgctctgactttgaaggcaaaaacacttattttcaaattctaaaacacttgtacgatcaaatccttactatttcattaatacaaccaagaacaccgtccgcggtaatcgtcaattctgttgttctttgagaatctcgcaaagatctattctttgaagaaacccttaaaacaatttctattgtgcgagttttgactctcacaatttggcgctagaaggaggggattcgagatttctcttactcccggaacacagaaccaaccacctaatccacaatggtcaacaatcaaatctccggtaacacagttgatgcagagggaaacccaatccctccaaaccagacagacgttcctgaagccgctgctcccgcgaccctaacagaactaagaagtatgatggctcaacttcagaagaaggtgaacgattaagaacaggcaaaccgatccttggcacaacaactcgaagcagctacctcccaagaacagatcaagactactcgtttcggcgcgaggcatcttcaagatcgacgagcggcagcagatctcaactcaacac

SEQ ID NO: 918 - DNA, 1154 bp, Arabidopsis thaliana landsberg
gaaaactgttcgtcaatggttactgataaaccaaggcaactgttggaataacagtaacgactaaacgtacggttgcaaacgtacgtggagatcgttggccattatataactctgtctctttgcatcaaaaaggcatagaagagaaaaagatcagagagaataaacagagattcacaagaccaaaggattgagatattctttggtgaaacacaaaaacaaacactagaaagtctatttgtttgtcttgtatctttgcctagaacaagagagagtactttgattgtcgtatcctagaagggatttcgtgtaacccaaggcttgttaataaagtagaacaaggatttcgtgtaatccactatttctcttgaaaatcaaaagcctagtatggagagccgatttttgtggtagacattaaagccttgaacatcaacatgatgttttgcgtccttcacaaatccaataattacaatggcagacacatctgataaaagaagttgtgaacggtaccagctttacgttataactggatgatcctggcttgtaataaaaaaaatataagaaggctggtataattaagttattaaaacttacatttgtcacaactctatatataaaaccttaacatgagcaaacagaccataagatttttaaaataggaaaaaccgaacacaaggtaaaattgtcgaacatctctcagattagagaatgatgccaacaacgtcggccttataaaactttacaaagtcataaaggttagaaagccttataaaaacttataaaggtttgtaaagcgtataaagacttgatcactaacaaaactttggcatgtatatatatttgttcttttctatgtttgactaagaaactatgcaagatatgtaagaaagacattttttctagaagcataaccaaaaaataaatacaagagccttatcaacaaaggatttctgattcatgatagctatctttatattcaataccaaaagtccatcacatgtttctgtggaaaacacttgaagttgaaaagtcataagtgttttctcaaaaacataccaaaaagaaccatcaacctggcccaagaacatgttagaacatgtaaaaaaacatacctaaaaccacacatgtgttcacccaaaaacatcttggacacatgt

SEQ ID NO: 919 - DNA, 1039 bp, Arabidopsis thaliana landsberg
tgctctttgtccaaatatcaggagacttggaaagcataaccgcagctattactacttgccacgacgatgagaaacagctccctggtaatgatttttctttgttttaagtattgtgttctcaaattgttgatttagataatctgagtttgttgtgtcatcaatcattttttggtttcttctctctgatgattgtgtcagtttcttcagggttggatactttttctcgggagagtgaaactaatgagcccgctgaaatgcttgttgaagatacttctcagtctcaggggtttgcaccttgggtcgatggttctcaatctgtcgaaaatatggtaagattggatatctggagctgattctcaaggatactggagagcaactttttaattgtggttttaacatttatgtgcaggaaaatgcttgcaatcacatgtcaaactcagatacaatattttcacctgttctgaatgatgaactggatggaactggtcgaggtacatgttcctgttgtagttttggtataaggtatcctttgtttgacatataataagctaatagatttctttcctcagtatttacagcaggaaattctgtgatctgggaaacccccaggtggggagccgacgagagcagcaacaagatttgctttgacaaccaaacgtgcaacgtttctgatttctacatttctgacgttcttattgcgagcttgccgtttgatgagagtggaaacaacgatgcgttcactgaaataagccccttgcctcattacatctttcctgagcagtatatggtactaccttacttagaagatggatcagccaacaaagatgatattaagtcagatactgacaagattaatctcgataaccatgacttgtttctggcattcaaccggacaagatcgtacaatgtggaaccagatgatcgtgctgaatctgaagtagctgaagactttgatcctcagctctttataaaaaatcagccggaattatcggatgttgtatccaattattggcctcgggataccctaagaaagaagtct

SEQ ID NO: 920 - DNA, 5104 bp, Arabidopsis thaliana landsberg
caaaaaaattcgaaaagagaattgggtcgggaggtttgggaatcgtatactatgggaaaacaagagaggggaaagagattgctgtaaaagttcttgcaaataattcatatcagggaaagagagagtttgcaaacgaggtaaatctgccttagtctaaacccatgtgcctaagtatctagtttttttattttgcttaggaagtaacacaagtgattatggtttgttcaggttacattactctcaaggatacatcatcggaaccttgtgcagtttcttggttattgccaagaagagggaaaaaacatgcttgtgtatgagttcatgcacaatgggactttgaaggagcatctttatggtaacatatttttttatgataggacggtatattttggtttaacattatgttaacaagtggatttattttcaggcgtggtaccgcgtgaccggagaatcagttggattaaaaggcttgagatagctgaagatgctgcccgaggtccgtgaattttacaaaataaaacagaaagcactcttgatctctgatccgaagccatttttcgatatttgattttgttggttttgattgtttctgtagggatcgagtatcttcacacagggtgtgttccagcaatcatacatagagatctcaagactagtaacatcctacttgacaaacacatgagggcaaaggtttcagatttcggtttgtcgaaattcgcagttgacgggacctcacatgtctccagcattgtccgtggcacagttggatatcttgaccccgagtaagctaagacttaaactaataccaagaacttcacaaatattcaccaaaactagcataatatcaagaactcacatattttatttattcgatgttaaaggtactatatatcgcagcagttaacagagaagagtgatgtatatagctttggagtcattcttcttgagctaatgtctggccaagaagccatatcgaatgaaagctttggtgtcaactgccggaacatagtccaatgggttagttcaacttttttttttgtggttacgctttgtttgaatatatgtaatatggaatcatatcggtttataaatcatcgcttggtaacggtttttgtaggctaagatgcatatagacaacggggacatccgagggatcatcgatccagcactagcggaagatgattacagtctccaatcaatgtggaagattgcggagaaagcgttgctctgtgtgaaaccgcacgggaacatgagaccgtcaatgtccgaggtgcaaaaagatatccaagacgcgattaggatcgagaaggaagcgttggctgcaagaggcggtatatcagatgagttttccaggagctcggctcattcgtcgtcgctcaacatgggaatgcttgacctggctggatcacagagttatgtatccattgatgaatcagtattgcagccaacagctcggtagtagattcggctttgtttgtacagatgcattacttgcttgtgtttttgacctttcacattgtctctggtctttagttattagttttgagcttaacactacttttttttctttcttttggactcgaggttacaagaagtgcttcgagtttgtttgtttttcttttattgttttcagactaactcggtgatttatgtgggattgtgatatattatgttttcttttaactgattttcacattttcaactgattatataggatgatgtttatgctctcgtagaaataagttctataggttattgacacattcgagattcaggcgcagttgtgttagtagtggtcaaaccaaacccacgagttacttctcatgatacagtaggttaataaagggcttgaatggtgtacacttttattttacgttttgaaaacataattctgataaatacatgttattctaaaaaatttacgctaaaattatagaacatgaatttaaatactataatctataactatatttttttaaaaacattgatttaatgatatgggatgtttttctcagtgcttataagccaaaaaatatgttggtaatctcaaaaaacaaaacttgaaaacaaggaggccgatcagggttctttgggctttggaatcgagaagtttgatcaatgttctcttggtacagcctgatgatgaggccccattagaaaagctatttcatactccagagtccatatctgaatgtacaaggtttttaaatggagaaaagcctatagaagaaattgttgactatacttcttcttgtactagctgggaaactgatactgactatacagatactgagaaagaagagtccaatgttctcttggtacaggatactgatactgagaaagtggagtccaatggtctcttggtacatgatactgatactgagaaagtggagtccaatgttctcttggtacagcctcatgatacagaaaaggtgtttcctacttcaagctcagtatctgattgtacaagcctattagatggaggaaagccgcctatggaccaaagcgtaagctcacaaggtgttgacaatattactgcgtgatctattttttattttatctttgtttatgcacgcgttctccgttttgcaaaccctttcttctctatgtttttcttctctcccaatttgctctatgtttttcttttcttctctcccaattctatatcgtgatctcagtcgaaaccatgagtgaagatttctccagtaagatctctttcttccatatgtcatacatgtagacgttctttgtgggaaatggacactccttggactatcctacagaatccaatattatcctcatctctaacaacatcgaaggtgatattgacttcatccagtgtcttgtatcttcagcttccgcaggttacaataatctcttcgtagagactactgaggctgctcccgagaaccttgaaaccacaggatggccgacatacatattacaaggagggaagcctatcggccgaatccgctataatccgcctcgcgatctgtagttgttttcattgagcggaagaagaaacatgaggtaacataagagcagagctgatactttgattcggtgcatatgcctattttgctactggtgtctagagccgtgctaattttgatgtcataggcgaaaaatatgctttaatatttttaaaaaatattatacacataaaaaaaatcaatgtttaaagtttaataataaattaagcaaaattaaagcaaaacttaaaaaataatttagaacaaaaatatgccctacaaaaaataggttgattataatgtgtaatctagtaaattgtgttagtgtcattattgtgttatcaatcaaaacataattttggtagttaaatttttttaatatatatatataatggtaatatccaaaacgtaatacctatatataaaaataattaattaactttgataaatatgattaacaaaaatgaagctggtaaagaagtgagaaaagaagactttagttattgccttaagtgtgtttgatatagatgcattttttacaaggaaaatagttatatttgaaagatatatgtacttagcttgtgtattaagaaactaaatattttaatatgactcagatacatttcctctctctaaattattgttttctgtttattttcataaaatagtagaagttttaaaaatattaaaatgatcacaaatattttcgtaattgtttatagattttacctatttcttgtattttgggaaaataaaatttgtaaattttaaaatgtttatagttaattgaattcttaaataacttttaaaaccctaataagttttcgaaaaaaaaaattactttccctactatacaataagaaaatgtatcaaaaatcaaaatttaataaaaatgaataaaagtaaacttatataaagggattgaataataataaagttccccttaatggttaaagataatgaatacacgtggcgtttctgcatttggtagaatatgaaccagagagaaaataaataaagagattaaaaaaaaaacgaacggtgctgataaaagtgaaaacctaatctctcaatcgcagacgttgtcatctctcttcttttctcaagcgtccgatcaatctctcctcttctctcgatctctctccctctctgcctcctctcttcctccaatcaacaaacacctctctgtttcactcccgccctttttcgaattcttctggtaaatcaatcttctctctcaacttctctgattcattgcttcatttcaattttccctttttcatatcttattaggatgtgttttgtctctgattttcttcgttttctgttgatgggttttgtctattttgtgttaattgttgtaaagttagggtttttttttttctttctgagatggcggagtcgcaggccaagagtcccggaggctgtggaagccatgagagtggtggagatcaaagtcccaggtcgttacatgttcgtgagcaagataggtttcttccgattgctaacataagccgtatcatgaaaagaggtcttcctgctaatgggaaaatcgctaaagatgctaaggagattgtgcaggaatgtgtctctgaattcatcagcttcgtcaccagcgagtatgtcttttttaaccttttaacaatgctatgttgtgtttgctcttgctgaatgtttagaggcttgatgggaactttgagttttagtttcaagtcttaaactttatagtgatttttgggtttttcttaactagtgaaagttgaggcctttttagtccttacattggttactctttcttgttgttcatctttgtttggctttgatgttgcatatttgatgatgcaatggtttttctatgacgttgatgagcagagcgagtgataaatgtcaaagagagaaaaggaagactattaatggagatgatttgctttgggcaatggctactttaggatttgaagactacatggaacctctcaaggtttacctgatgagatatagagaggtatgttctgagtacgatgtttattagttatgctgttgtgtgaagagagtttttgaatttcactaacttactctgtttctccttttccttttcttgctctactacgtgaactggaatatcacagatggag

SEQ ID NO: 921 - DNA, 2751 bp, Arabidopsis thaliana landsberg
tatcgttgtatgttaaccaaatactttctatacccgtagggacatgaaaatttctcttcttcttattgatttttcaagctaccttcgagttagcgtgtaagatgaattgttttttatttccatactacttttctctctatttgacagcctaattatctgttaagtctactgcagagtcgagttatgctggtattggtttcatgtctagttacgagttaggttccgtgtacttgcaactctgtgaaatgtcgtaccttgtgcaaaacaagaactatgaggagcttgatgatccttcaatcttcattccttgattcacaaacagtaagcatgttgtctcttggctcccattcttcttctttatcggggttgatgcagaacattcgatttttttatcagttggtgttaacatcagtcaaaatacaaaatagttgtatcacattcttgtttcattatacactgtaggcttattgaaaggtgcacacgctaaagcaaaagatgtcgcgaacacggctaaaaacattatatctagtatgaagagagattggatacaggtgtgatagttacctacatgttctttgtcttaagagttatatattatggcttgtgttaatgttggccatctattcgcttgcagacaggccggaaaccaagtggaatatgtggagcagcaatttacatggctgcactttctcatggtatcatgtactctagggcagatattgtaagaatctgattcaagcttctttaaagaatcttgttataagatgagagcaaagatgtttcgatttgatgtgtttttctatataactttcaggcaaaagttgtgcatatgtgtgaagcaacaataaccaaaagattgaatgagtttgctgataccgaggctggaagtttaactgtgagtaatttcatttgcaggattatgttacaaatcgattctagttggttcttttttaaatgttgtacaatgcttgtctagggtgatgagcttgatgaaagcaaagagatattgcgtaaagaaacttttaccccaagaccaaattctgacaaaggagtagtgaactgtaaacataaggatttaaaacgctttggttatggattatgtaagagctgtcacgacgatgtaagtatctttccattttattgttatgatgcttatgcaactggtgacaaatggctccgagagttgacaatcagatgcttccaaaattttttccggcagttcatgacagtttctggtggacttgaaggtgggtcggatcctcctgccttccagcgagcagagaaagagagaatggaggaaaaagcttctagtgaagaaaacgacaaacaagtaaatgtaagtttagttgatctctgaggaaactttgtttgtaaaaccttactatgcttcaaatccgacttttggcagttggatggacattcggatgaatcaagcaccttgtctgacgtcgatgatagagaggtgggcaaataacttttactttcttgtctttgtattataaattctttaacttcaacaaatatgtttcagtctgatcgtttcactgtttcccagttggattgttattttcggacgccagaagaagtgcgcctggttaagatcttctttgatcacgaaaaccccggatatgatgaggtgtggttcattaggctatagaatattgggttcctttcagagtttggttgtggttaacatacataaaaaggattcttttaccaaattggtttcttttgtagaaggaagcagctaagaaagcagcatctttaaacgcttccaataatgcaagcaacctttttgaagcttctaaagcagctgcggcgaaatctagaaaagaaaaacgacaacaacgcgctgaggaagaaaagaacgctcctcctccagctacaagcatagaagctgttgatagcatggtcaagagaaaggtaaaaaaaacattgtatattttgaagaaaataattcttttgtgtttctgattttgagtctttaacttcttatacagaaatttcgcgatattaactgcgattatttggaggagctttttgatgcgtcagttgagaaatcacccaagagatcgaaaaccgagacagtgatggagaagaagaagaaggaagagcatgagattgttgaaaacgaacaagaggaagaagactacgcggcaccatacgaacaagatgaagaagactacgcggcaccatacgagatgaacacagataagaaattctatgaaagcgaagtagaagaggaagaggatggttacgattttggattgtattaaaatcatactttttatcatctaattattattatttggttgactaaaaaaagtattttatgatattggcataaaaacatgattttacggttttgataaaaaaaattgattttaacataatattatggttttggtggaaaaacatgattttacggttttggtaggaaaatattattttacggttttgatgggaaaatataattttacggttttagaagaaaaatatgattttgtagttttgacgaaaaaacataattttaccgttttgacggaaatatgattttgttctttagcgggaaaatatgattttacggttttggcgggaaaataccgttttacggttttggcggaaaaatatgattttgcggtttcgccgagaatacacaattttacggttttggtggtaaaatatgattttgcggttatggcgggaaaaacatgattttgcggttatggcgggtaaaacgatgatgttgcg

SEQ ID NO: 922 - DNA, 5306 bp, Arabidopsis thaliana landsberg
tttttttttaacccttgcctttgcattattgagatctaacgagcacggaatccaagatgatttcaaattgatgacgagattgctcttctaagggccttctctctcttcctcgtcggtcctagatgctcacctgaagtaagattcacgtcagttatggacagatcttagatccagtgcagattcactattgagatttgagattgatagctttgcacataaaactgagagttctataattctatcactacatttctagaaatcttgataatttttttaaaaccttgttaaacatattctagaagtatcaaagaaggcgtaaacctttacacgattgaatattattatttggagagaaaaaaaaagaagtggtgatagaaaagtcatatttggcttccgagaaattcagtgaatcgtgtggagcatagagacattttccacgaaatctccatggagtttctgtgccaatagactcgtcgagatctatattctcattcacacaaatcgtttcaactacaaaatttcatcaaacccgtgtgattcttcaaactctttggagatctctcatcgttttatgcatcggtgagattttcatttttttactcctcactgtctgaactaagttccaactatttttaagttttgcttaaggttttatcactgtggaatcgaattgattggactggctcttgatgattatgctgatattgatgctttgtttagtgttttgagcccatttcttgattatgtgttcttgattttatattaaaatgattactgcagtgttaatttcttgattcatcgataatctaagttctcatgggttctgcaatgagcttgagctgttccaagaggaaaacaacgagtcaggatgttgattccgaatctcgtaaaagacgaaagatatgctcaacaaacgatgctgagaattgcagattcattcaggatgagtcatcttggaaacatccatggagtttatgtgtcaacggtctgtatccatgacactcacacagaggcctcttcctctttgttaatccttcatccatcttaaatcttgattcactttttactaataaattattcttattttccttggttcagtggcagccgcagcttttacaaaattcagattccaacaagacaacaaatatactaaatcttctgctttatctcttccatctcctccaacttcagtgtctcgaatctggaaacaccacgtcttcccgagcttccacggggcagatgttcgaaaaaccattcttagtcacatcctcgaatcgttcagaagaaagggaattgacccatttattgataataatatagagaggagtaagtcgatcggtcatgagctcaaagaagctatcaaaggatcaaagatcgcgatcgtcttgctctcaaagaactatgcttcttcatcttggtgccttgatgaattagcagaaatcatgaagtgtagggaattgttgggtcagatagtcatgactattttctatgaagtggatccaactgacataaagaaacagaccggtgaatttggaaaagccttcacaaaaacatgtaaaggtaaaacaaaagagtatgttgagagatggagaaaagctttggaggatgtggccacaatcgccggagaacattctcgcaactggtttgtcctcttgattaatatttacttattagagtttatttgtagctttcagtaaatatcaaagcaagaaaatacttttcgttcacaacttcatgaccattttatcgcaacagttgtatattgatttggtatactctaatgttaggaggaatgaagcagacatgattgagaaaatagccactgatgtttcaaacatgttaaatagttgcacaccatcaagagatttcgacgggttagtagggatgagagctcatatggataaaatggagcatttgttacgcctagatttggatgaagtaaggatgattgggatttggggtacgcctgggattggtaagacgaccatcgctgcatgtatgtttgatcggttctccagcagatttccatttgctgcaatcatgacggatatcagagaatgctatccaagactttgtttgaatgagcgcaacgcacaattgaaactacaagatcaaatgttgtctcagattttcaatcagaaagatatcaagatatctcatttaggagtggcacaagaacgtttgaaagacaagaaagtgtttatcgttcttgatgaagtggatcacatcagacagctagatgccttggcgaaagaaactcgatggtttggtcccggaagtcggattatcattacaacagaagatgttagagttttgaacgcgcataggatcaatcatgtttacaaagtgaaatttccatcaagtgatgaggcttttcaaatcttttgtatgaatgcctttggtcagaaacaaccacatgagggtttctgtaagcttgcttgggaagttatggccttagctggcaatctccctttgggattgaaggttttaggctccgctctgcgtggaatgtccaagccagagtgggaaaggacactaccgaagataaaatattgccttgatggagaaataaagagcattataaagttcagctttgatgccttatgtgatgaagataaagatttatttctttatatagcttgctttttcaacggtataaaacttcataaagtggaaggggttcttgcaaagaagttcttggatgtgaggcaaagtcttcatgtcttagttgagaaatctctcatatctatcaaccaatccggattaatagagacacatactgtgctaaaacaatttggaagagaaacttcacgtaagcaattcgttcatggctttgcgaaacatcagcttttggttggtgaaagggatatatgtgaagtactcaatgacgatacaatagtaagttttgccattgcagcgccccgtatgaattgagtttatttgataacaaaccatcattacttatatttcttttggctcatgtttcaggatagtagatgttttatagggataaatttggatttatctaagaatgaggaagaattgaatagatgtgagaaagcacttgaaagagtgcatgattttcaattcgttaggatccgtgctagatttcaacctgagagactgcagttagcactacaagatctgatttatcaatctccacgaattagatcactgaaatggtattggtacgagagtttatgtttgccttcaacttttaatccggagtttctcgtcgaactagatatgagttccagcaatcttcggaagctttgggaaggaactaaagtaagtcatttatttttttgaatctataacttgctccttataatgtacattagccaattgtatcaacatgatcttttttgtcaaatgcagcaacttcaaaatctcaagtggatggatttgagttattctttaagcttgaaggagcttcctgatctttcaactgccactaatcttgaagacttaattcttagaaattgctcaagtctggtgagaatcccttgttctattgagaatgcgaccaatctccagatattagatctccacagttgctcaagtcttttggtgcttccctcttttgggaatacaactaagggtaagaaactagatcttggaaagtgttcgagtcttgtgaagctcccaccatctatcaatgccaataatcttcaggaattgtctctaagaaattgttcacgtgttgtgaagctccccgctatcgagaatgcgactaagctccgtgaattgaagctccgaaattgctcaagtctaatagagctccctctttctattggaactgccacaaatctgaagaaactgaatataagcggatgctcaactctggtggaactcccctcctctatttgtgaatcttactaatctcgaaaatttggatctagagattgctcaagtctggtgacgcttccttcctcgataggaaacctggaaaaattgtctgagttgttaatgagcgaatgctcaaagctagaggctcttccaaccaacatcaacttgaaatctctctatacacttgatctcacagattgcacgcagttgaaaagttttcccgagatctccacacacatttcagagctcaggttaaaaggaactgcaataaaagaagttcctttgtcgatcacgtcgtggtctcgtcttgctgtatatgaaatgtcatactttgaaagccttaaggaattcccgcatgctcttgacatcatcaccgacctacttttggtaagtgaagatatacaagaagttcctccatgggtcaagagaatgtctcgtttacgtgatcttagactcaacaactgcaataatctggtatcactcccccaactttcagattcccttgataattgtaagtccctttaacaatccatggattagtctctatttccccaaatgcttcaaactaaatcaagaagccagagatctcatcatgcacacatcaactgtgcgatgtgcgatgttacctggtacacaagtgcctgcctgcttcaatcaccgagctacttctggggattccttgaaaatcaagttgaaggagtcgtctcttcctacaaccttgagatttaaggcttgtatcatgcttgttaaggttaatgaagaaatgagagatgatgagatgtggccgagtgtagtcattgccatcagggtcaaacagaatgatctcaaagttctatgtacaccaagcagctgttatatatatccagttttaacagagcatatatacacatttgaacttgaagtagaggaggtgacttccacggagcttgtctttgagttcacattagaaaacgaaagcaattggaagataggagaatgcgggatactccaaaaagaaacgagatcacttcgccggagctcttcgccggatctctcgccggaatcttctcgtgcgttctctctctctcactctccccttctatctctctgtctcttggattggttaatgattcaatttctcctaatgggtttcaggtgtttccagctgcgaccactgttagagaggtaagaatcatgggtttgatttctccttgagtcattcgatggattcgattattggttttattttctgtgaatgggaattagctgtgaaatatgtggtagctcgtttggaaaagtaagattcatgggttttgtattgtgtttatgatgcttataggctataatttttcatgggtttttgtatttgtcgagattcatgagttttgttatctgtcgtgtatttactagaagttgtaaaaaccacttatatggtatttatgtatcatacacatgtaatgattttgtcataaacgttc

SEQ ID NO: 923 - DNA, 5574 bp, Arabidopsis thaliana landsberg
taccttcactcaccggttttggcagatttgtcgattcatgattccacgatgaagaggtagatgcacaaacagcctgggttcccatcaatgacttcgaatcagagctatacaaataaccaggctcaagcaacggtaatgtactcgaagacgggagagaggtataagcaactgcagcagcataacaaatcattagaaaatgattaaagcaaagaagaaaacagagtaagaagatgatcaaaagtcaccatttttaggagcctttataggataaggatgactcgctttcctcttaggtcgaggaggtggaagatgttcgttagcaccactcttctgaactttgagaaagtatttctgagcgtggcttcgtatctgccattattactcttaaacatcatcaacacacaatcattttcaaaaacaatacagagaataatagtaagatggtcttcaaattaaacctgaactactgtttttgatccaacaaaggcttctattttcttccaatccctatcgaatctgtaatcaaacgaaaacaatcaaatctcgaaacttgtgaaattttcttaaacgaaacacacaattgagtgacaattacacgtacaagtgaagagcttctagaaatttatcgtgctcttgatctgtccaattctctctcgacttcttgattgtgtacggcttccgaatcttcgtcgtcggatcctcagaaaacgacaccgtactggtccgtcccgtggccggaatcgaaccaaatccatcggagcttggtaaactcatattcgaggaatcgaaaactggaaaacccttaggtctagggtttacggacaccatagagctcgaaatcgcgattcttcttcttcaaaggtcctttcactgtcaaaagattttgacttcgccagtttttttttgtggctgaagaacagaggggtagaattgtaatttcaggagcataatattgtttcctttacacgtgttagggtctcgttgctctagtacccagactataccactgacgccttaaactagtgttatcacttaaaccaagaatcaacggctataaagatgtccgcgtggagacgatctcgaggacggagaagctctcacgttttggctagtaactactaatttttgtttatcactaatccactatttaaatagtagtattaatcttcattctttaactacaagtgtttactagccccaacaaaaagttacattgtcgaaaatttagcgattagtttttccgaaatagtgttctatctgaagacaaccttgagaggacgagccacttgttttagttccaagcttgaatctcttaccacttcctgagcttgcattggttttctatgcacagatatcaacacattaggcaaggtagtggaaattaatgagaggagaaactgaagaagaatgtaaaactcacagaaatttggggtttagatctcagcactttgattctaccacctttaccatcaggtccaatagagatgagatcatcttttcttggaacagaacctcctagtgatggagttgcttcgtttctctctccatgtttgctccatctaccaaggtttctatttgttccacttgactgccaaatgtttccactacctgcattggacaatcttcaatctactactacactcaagaacttgaattcatgatgtacaacaaaagtaccattgctgtaaggtgacactgatgatgtcgggtcttttctgatgttgaactttatatccttcaccatggaattatcacctttctcttcaatattagtattccaatctctaatgccagaagtgttggtttcaggaacataatcatcatctacatctataaccgagtctgttctgctaacgaaggagtcttctcttccccttaagcatgatccttgaatggtaaagccatccttttcttctaatttaccaggtggtgtggagattttctccactttgttgtctgatgaaagcattctgaaagaagacatgctctcgattgcaggctcggaaacttctgtgtaactgcatttctttgaaacgtttatgtcccgtagagctctgttctctctctcttcagttatcaactcaagttccctcattcgtttctggtcatagaataaacataataagagccagatatagaagacacaaagaagatcgagataaacaccaaaacacacacctttagtttttctatcttttccaaagctttttcaagtttctcagaagatcgtgcttcgcctcttcccagctgattgcacttggctagcaattccttataactcctgtcagagtaagaaagattgttttttattagagacttcataaaagaaaattcaaagacctaagagaaaagaaacgcaatgttcaatcctcctttcctcaaattcttgaccatacctacttatgaaatttcgtaatttcagtttaacaagttgttgttacgaatgaactaaggtaaatcaccatttcataagtcactgaaggtcaaattaatcttttttaatcggattacactgctgtagacatgacaaatgggaaataatgaaccaagttcactaagtcaatgaccaaaatgagagcagggaaggagtgacaactaagtgctaagcacctacctatatcaaataaccaaaactaagtgaagccatgtgaactgagtggaactaatctatgtgacaaacctattccgaataaccaaggacttgactagtgtgtctattgtatctttcgtcttcgcgttattccccaacaaggccaacttcagtacatcatcttcctccaagcttaaatcagaaaccctggatgcaaaacaagatattagactcagaaaaggtttaaccatacgagtgaatgattaaattagaacctgaagacactaaaagagcaatatgaaagatgttatcttacaatttaagcgatgcgagctccttggcaagagccacagttctctcctgtagcttaacacactgtgagttaagctggatacattcctgtaacaaacaaacacactaagaaactcaacacaaaattctgcctgtgaagcaaaaaggatctaaaatctaaggatgttgtatagtttaaacaaacctcagattttaacttaagcaaatgctgagtcgttgatatttcttgaagagcctcccaccttttcactttatcctccttcaattgctcattgcattgatgcaactgagacacacacaaacaaaaacaaaaaaaaaaaaaatcacataaccttatcttatcttataaaccattctaatcaaacgaaatgaacaaaattaaccttatcagagacttcaacattctcctttttcttcgcctccagagccgaagtaagattctgtaccttcccttcaagccgcttcacttctcctctcaacaaaaccggatcttcttcgattccaacaaccttatccgaggcaatcgaatcggtttgattcccagaagactgaaagtaaagtcgacaaggatcctttagagagcacttctgcttacaaatcggacaatttcgcttgttcgtactcgggcaatactcaaaccattgctgcaaactagggtttccgaaagaaatcgattaaacacataaatctataaaatttcggagataataaacttcattagagaattgattttgccgtactaaccaaagttcgtgaaagacatggccacaagcggagattgattgcagattctcaaccaccggtttaagatcttcgtagcagattgaacaaattgcattccccgccgcgttttcttcggccatagctatctctccggcaatcaccgactagtcagtttccgacacagtcaccattttcttctcgagaaaatcaaaaggaaaatatcagatagcaaacacatggcgcggataaaaagttgaaatttcaatggtaagcgcgaaaatctggggaaggatagcacgtgtaagtcacgtgagataaaaacataaacaaccagtggcttgtattaggcccaacgtttttaccctataggtccattaaagcccaaatcagctattgatcagtggtcaaacacaatgtttaaattaatgttgacttaactcgtttttagtaatactagtagatcttttcgcatgcactaattaactcactctcgagagtagcgttcgtgagtctcgaggtttctcactattttttcttccgcagcgtcaccgactcagatttggtggtgctaggtcaccgtgttcttcacggcgttcgggagaatgtcttagttaccccagcttctccctaaagaaactccactactgttcaaaatccctttcctacacatctgtagttaaatgtcacataatctgttgaattacttgaggcttaaggtgtaaatgttatttttccttggcagagacctaaggtttatgtgtgtcttccagtttaaattatgtgtgggtgactcagagaatggggactaatgggaaagagattccttgtgagactcagtttctaatcgtagaagcaaacaaaggttctggtttaggaggaggagatgaatcgtcttcctacgttgtattcttgcctatacttgaaggagattttagagctgtttttcaagggaacgaggctaatgagctagagatttgtcttgaaagtggtaaattgacacagctagctagatttgagttgaaactttttgttagattctctctgagatttatatggtttgtgtatggtcaaggtgatccaaccgttgaccaattcgagaggagtcatttggtttttgtggctgctggctctgagtatatataacgtttctcaaatctcaacttaagacttctttatgtccaaaatttttttagtgctaagaatctttgcctttcaatgattatgcagggcttttgaacaacattttcacaccgagagagaaagaaagtaaggaaacactgagacgttttatgtgatactttgatttatatacataccaaaaactaactttgaaaatttcccctgttttggttgtgttcagatgccagatatgttgaactggtttggttggtgcacttgggatgcattctatagaaaggtcttgagaggtactcctgagtctttatttttaaagatggctttaacgtttagattgtgacttaaccaaacctgcaataattctctgtagcctcaaagctggtgtggttactccaaagtttgtcataattgatgatggatggcaatctgttggcatggatgagaccagtgtagaattcaacgctgatagtgctgccaagtaagtaatgaagctctctgttcagatataagctctttctttaagctaataaaccactcttttatctttttgtgaattccttcagtttcgcaaaccggttaactcacataaaggagaaacacaagtttcaaaaggacggcaaagaaggccaccgggtggatgaccctgcattgagtcttggacatgttatcacagatattaagagaaacaattcactcaaatatgtttatgtttggcatgcgataaccggatattggggaggattcaaaccaagtgtttctggtatggagcactacgaatcaaaggtggcgtatccagtttcttaaccaggaat

SEQ ID NO: 924 - DNA, 1481 bp, Arabidopsis thaliana landsberg
agcgtaacgaggttttgttctgcctcgtcctttcgtcttctttctagtgtacgatgactcataattacttcttctatgagattcttccacgactcagactgaagatactatctactagggaaacttatatgcatcaacactctaatgcttcaacatgtttttttaaacctgaaagtaaaaaagcctcacaattgcctaacaaaaagaccagttttataagtttcacaattctaacaagtcctagtgaaacctacgtaatctacttcaggagggtggacattaacgcacatgatatttgaacaattctacatttgagttactgtagcttgttttaacacgcgcagacacacacacacacaatgtatgtaaatgattgttcacaagagcagacaaaaacctcaaagtcttactgggaagtctggaccgcttgatctaacaccaaggatagaaaagcacaattctatcagctaagctaaagattctgcaaagcaggattaaaaaaaagtatagcattctagaaatcaaacaatagaggctgtgagaatggttaagaagaagagcatacctcagaagccttagagacgagtttctcatttaacttcaggcaatgggtctaaggtttcaagacttggtagacgaaagggagtgtttacgggaccagaagctgaagccgccatagatagaagatggaagaaacgagaacaaagagaccctctgtatagaacaagaaaccagcgacatcaaagttagaaaaccaccatcagaaattcagaataccaacaaagaatctttttttcatccagcttcctcaaaaatcgttattcaaaggaaaaaggaataccttttccaaatgttcacatcaatgagtttactcatctaactttgttcgagtgtttgcaaaatcaaaatactctttccacctattaaagttaaaaagcctactactctacataacacaacgcagcaacaagtccaagtcgggacacagtttaaacattcttaagaaagacttaccgggttcaataaggtgcattctgcagactcccacattgtggattctttcttctctgctttggtttgtattgtaactcgtcgatggcaaagtagtcgatgactttgtgactagagaatattaattataatcattaataaccgtaaccgtatttaaccgtaatctttataactgtaaccgtaattagtcataaccattttaaccgtatatatagtggttaagattacggttaaacaaaatttataactggaaccagtggttaatcaaagttgatatgaattctatcaaactaattgtggattctctcaaaaaagatgtggactgtgtcaaaagtatagtaaactttgtgttatgtccattggtttgatgctcaaaaaagaggatttatttgcgattcagcttccccgaaagaaccttctaccaaggaacctgaaaatcatctagctcggatgattcgccaacggatgag

SEQ ID NO: 925 - DNA, 4748 bp, Arabidopsis thaliana landsberg
cttattttcaatcatagagagtttggggtccaaaacagatatacttaagtaaacctatctgtgtcaggcattaccaaaaagggcttcgtcttgatccggaacacagtgaactgaagaaagcatacttcggattgaaaaaactgctcaagaaaacaaaaagcgtgagttctgcaaacctctttgtcttcttttaacactgagctttagctgccaatttcttgtgttgaaaacatgtgctctattgcaggcagaagataatgcaaacaaaggaaagttgcgagtttcagcagaggaatataaagaagctattgctctggaccctgaacacacggcaaataacgttcatctctatcttggactatgcaaggtctcagtcaggctcggccgtggaaaagacggcttaaatagctgtaatgaagcacttaacatcgatgcagaactgattgaagctttacatcaggttcaaatcatcaagtgttaaatcataacattcataactattttaaccaacagggttctgattactacttcatcagagaggagaagctaaactgttgcttgaagattgggaaggagctgtggaggatttaaagcaagctgctcaaaactctcaggttggtgaaagattagtgttcagtgtttctgatatctaaaatgtagcttagatcttgactcaactaaaacacacatctaattgtaggacatggaaattcatgaatcacttggtaaagcagagaaagcactgaagatgagcaaacgaaaagattggtataagattcttggaatttccagaaccgcctctatctcagaaatcaaaaaagcttacaagaagcttgctcttcaatggcatcccgataaaaacgtaggcaatagagaagaagctgagaacaaattccgagaaatcgctgcagcttatgaggttcaacaaaattccacatcactctttcatattcacacacatggtcatggtctctctcattctcttgacattttaaccttttaattttaccagattcttggagatgacgataagcgggcgagatttgacagaggagaggatcttgaagatatgggtggaggcggcggtggaggatataatccgttccatggtggtggtggtggtggacaacaatacactttccatttcgagggtggttttcctggtggtggtggcggttttggtggtttcggtttctaacttgaacaacatgatggaatcatgtaacttaagactaatcttttcaaattatactcaatatcacattttcctttctttcatcaaaaaaagttttgtgcaatcttaatcaaaacaatcacacgtaataacacatctataaaacaatctcaaagtacaacaaaaacttaaagctctcgttattcttaaaattccaaatgtggagactcaagaaaagctctctctcgagttatatccacagagaagaagaagcagcaatggctgcaacggtagtgattctgatcccaaacccgaatccagtcctctctgcatcagatgaatcagtagaatctcctccatcatcgccaccggaagctgagccttttgaaacagagccgcctttctcaggggccggagcaggagccacgcttgatccaaacatggctaatggcagcaaaacttgatcaacctgataaacggccagctgcttatcgctgtagacagagttagccacggtggcgctgacaactccagtggtgatgttaacttggttaccggagctagtgatgttaagagggaatttaccgttttggccatctccagcttgcgtgcgtaaagggttactaacggtttgaaactgaggcatggttatgagtgtaggtaagacatggaactgaacaagctgaactttttgttggtcagacaatgagtttaaggttccggatttgaggctgttgaaggcgttatcagtcggggcaaacacggttaagccattactcgaggaagaattgagctgagtgttgatttggtctgaggcttgagtgcttttaagaagtcttatgaacaatgtgaattgaccagccttttctaggattgcggttatgttcgttggacctgaagggcctggagctggagcctgaccataagtagtggctataacgaggaagaagatgaagagattagagaaaatgaatgttcttgaagtagccattgttgtagttgttgtgtgtgtatgttgagatgttttggggtttgttatatagagagagatgtagtttggtgaagagtaggattctcttactagtgtgaagattattactaggtaactaaatgagattctatcaactaagtcattagagattggaaatgtttcttttaggtttaataaagtttgtttgaattgagaaagagagaggagagacattgctttgaagggagagtttgggtgggtgaggattgaaaatgaaaaatgaactgaaaaaggtgttatagtgacctgtcaaaaaagctgtgaagaagtgttatccaagaaatatgggattgctaatcatactactgttcattatgattttatgtgtcatgtgtgtgcctatcatcattccttatattttagttggcaaaaaaaaaaagacttggaagtattgaaaaccaaatctgatctcaacctagacaaatcgattaaagctaaaccgaaaaccgaatcccgaccggttaattgaaaaccgatccaaccctttagggactctagcttcactcaaaagatctacgctgctgtcaaaccacctgagtacttgctggctcttctggcaggtgggaattgcttctcctccatttcaaatactcgttaatagctgttgtgccggtcatggtgagtccaaatccgatcatagtggctaagacaatgcacattaccggctgcttcacctacacacaagttaatgagagagagtgtgaggaatcaaaaactcttcaacaaagtaaggtttctctgtgacaacaaagtaaggtttctctgtgacattacatcaaatcttacaactctgtagaaaagctgagcgaaaaggaccacaaaaccgaactgaacggtggcgtagatccatacatagttcttcttcactgcaacaaaccaaaccacttaagactgatgatcaatatagaatacgaaaaaatatataatttcgaagtagcttctttattacccattgttgttgatatcattgatgcaagaagaccgataatgcaagagaacggtaaagctattgcaacggcgctagatttcatatctataatcagaagctgttcaaggaaacagaagtatgcaagcatgcttacaatgacaagaattggaatatcttgccattcattattgaaccgtgaaatctcgatatccctggctgctctagaacggttttgagaatcctgcacacgtagaagggtaaccgggagatttctcacctcttgcttacacacatcacatgttatgttccctttaattgtaaaccatttgatagtgcacgttttgtgggcaagagctagttcccctttgcacatacattccatcttaaaagcttcttcatcttcttccatttcaaccatacagattctacacacagcttcttcttcaggaacatcttctccaccatcatcattttcatctgaacacatatcacatagtttgttacatagagtcaaaatatggcatcacaaagatatgtctgggaaggtgatttgtaaccgtggagtttactcaatttcgatgcctgcgtcatctctagtctcttctcatccccacgagacggagtaggaatcacgcggaaaacacttgacggctttacacttccatctttgttgaagaatgtggggacagagcgtgtacgacgaataggcagtaaacgctcccctttctagtaaaaagaacagtaaaatcaagtaaagcagaagataaacagcttctctaaagctaagacaaatggaaaatgaatcaattcatcaactgaaatactcaacaagataatctcccttattaatggtataaccaagttttgtaagatagaatactgaccatggatgtaaccggatcaacctcaacggcatacctcccgttcatggactcagggtttgagtgagttataaaagactctgtcttcttagattttctaggagctaagagattagtgagagaccatgttcttggaatataagacttatcactaccatctcctaaaggggacacaacaccttcctcaatatctgcactgtggttcctgtttttgaaattcttctgattcgttctgtttcttgacgaggaaggactcattgatccaacacgtctcccagttctagggctggacattggagaaaacttgaaccttttggaaacggggctatgaattaaggaaccatttgctctcaagaaatcgccatgagcttctctcgattgtatatctaacacaaggcctcgccatcgttgatgttggctcggtgatagcatttctgttatctcagtagaatctccaacctggaaaactcaaaagaagacttttgtatcagttcctcacaaagttggatccttgaaaactcatgttcctcaatgagcaattacaatccctagattttcacaaaaatgtgtgccttaaacctggaatctccggaaaacataattgaagcagttccatgatttacaagtgacaattcaccaagtactaatgatcaaaacaatccctaaaacacagatcttataaccctaaactctcaagagctaagctaaatcagaaagaaagaaaaagaagaacaa

SEQ ID NO: 926 - DNA, 1009 bp, Arabidopsis thaliana landsberg
actagctttgccctcacacacttcatgtttgcatcttcaagtgactcttcactctcctctgcatgacatgaagcaaaagtatatatataagaaacattatagctatgcaaatcaaaaatattggtattaattatcttgagaaataaagatttacctaaggatctatctatggctaacactaaagagagttgtgaacggaatgggaaaaaatcgaacaagccatctcccgaagtattaagcggaactcggccatccatgcgatacaccacttttccttggctcggtaaccataagaaatccgcaaactcgtgtctttcgccaaaactcactgcttgatctccgaaatccgaatcgtttctcataacataatttaacgatcttttgaacattggttgcaattcgaaagttacttgagagataacaccaagaacacctagagaaactttggctgcgcgaaattcctccggatctatagtctcgctaagaacctgaacctttacatacccatcagaagccaaaccgggactcaccattcttatctcggtcacgtaatcatgaaccgcacttcctttaccccataaagaacttccgtgagctcctgtccccatcattcctccaaccgtaagtccccaccaatacggtgcgtatggcaaagccagatcaaacttagctgcttcttcgatcagttgccttagagtcacgccgctctcaaccgtcaaagtcttggcctccgggttggtggtcaccacatggtttagaaacttggtgcttatgagagtcccgtctttaccatcagtacaaaccagcttggggaagctgtgagagtacctagtcacgacccgcattttttggccggctctagtggctgcagccactatagagaccagctcagcctccgtccttgggtactccacctttgctgctttgcatatagagcggtcaggaaaggcgccgtacgagttcgtcaccgtgcacattgtgtttccgaattcacagttgacaggatcat

SEQ ID NO: 927 - DNA, 10163 bp, Arabidopsis thaliana landsberg
  unsure (1)..(10163): unsure at all n locations
acaaaactcccaagagtcaacagaagatgaaaaaacctctgaagactatagagtgatcccaggagaagggtatgagaatgagaaagtaaaagagcttaaaaagatgtctaggaagcaagaagaaactatagagaggctagctcactctgttggggaacttaggggtaggctgaatcagatgcagaagtaagctcaacctaagcgggattaacactatcccgagaaacaagttcacttcaagatggtcttgagagacagattaccctccagaagagaaagaagcctattttgaagaaaggggaattgctattctgctgcagacctctccagggaggacgctgagtatgatgatgatatcagagaggactatgcagaccctctctatcattcattttcttcttgataagtgtgaggagtcaagctagagactttaaacaaactcacttgggaggaagtcccatgattatccgtgtaaataatttttactttcttgttatttttgatttgttttcgttatgtttgtggttctcaggaaaaaaggaataacaagaaggtagagtaaaaattcaaaacttttactctactgatggtctagagatcgagtacattggtcgtgtttgagtgatgcttaaaaacctaaaaaaattttaatcatcattttactcgaccaacagaagctacaaagtcttccagggagtctttcaagtttacagaggattgcgggatttcctggagtttttctagtgaacagagaatacagagaaggaacaagaagacatcctgggacccgccgctgacgcccatgttctctatgcaacagaccaaaggacaggaaatctctcctcatctcttctcctccactcgacgtcaacgccatcactcgggctgcattcctcttaactcgacctcatcacctcgttttctcctccacaaccccataaactcgacccatcactctcattcatcaccaccaacaaaccagactccaaaccactcgaccccatacctcttgaatcaacgctcctttatctcctttactcgacctcgtcacctcctcctcaccacctcataaactcgacttcatttctcccacttctctcccataaaacagtcgacctacaaacccatctcctccccacaaccttcactcgatcgccgcttctcaccgcctatccatcatcgctgcctgctcactctctccaaggaaacaactcgagctctccatttcactcactcgacctctccaccatcaaccaaccaaattgattctcctccattacagcttcactcgaccgccgaacatttatcacctttaagctcctcatctctccatcgtttccaacgccgctgctctcatcccacgaaagctcgtcatctcctttcactcaacaacggtttactcgattcagcaaccatacacttgattcctcatcaccttctccgtccaagcatcactactcgaccttgcctaatcactcgacctcaccatctatcttcgtctctcatttgctcaacaaacagtcgtttctcctctccaaggaatacactcgacctcaacacagctttctctagctcataactccactcgacttcacgccaaaagcacctccgtttctccaccaccgattcaacaactcgaatcaccgctcctctacctccactcggccttccgaaaacactcaaccgcaagttcaccaaaccggaaaaaaaaaaaaaaaatttggtacactcgaccggtttactctgttggtttgtgtttttggttttgttggaactaacgtattaacgtttatttttgagttacatttgttttcatgtttcatcatgagtaactatagtggagaatcatctatggaccctgattacaacgtggatgaagctgagtcctggtccgctagaccgagagagcaacatgtttaccagagtttcagggatgaactcgaacgctctacagaccgacataatcagagaagagctgaaatcgccagaggaaagagggcgatgtcaagtaggtatgagctgattgatgaggatatcgagactgagtatgagccagagtcatggcgcagggagacaaagctgctgaacaaacccgacgaggttacagtggaggagtatattagattcttcgagatgaatgacttctggggaacaaggtatccgtgttatgagactttagcccagctggggttactggaggacgtgcagcatttgttcgagaagtgtcatctagagacacccatgtcttacccttaccttgcctataaggaggagacaatcgagtttctttccacgctgcaagtggagatgtatgaagcactcacagactttgagttggataccatgggattaggcttcttgacgttctcagtgaatgaacagcggtatcagctttcgatcaagaagttagaaggactgtttggtttccctagtggaaagggaaccaaacccagatttgacagagaggagcttaaggatttatgggccactatagggaacaatctaccgctaaactcggcgtggtccaagagcaaccaaatccgaagtcctgtgatccgctacttccagcgatcggtcgccaacgttttttactccagggagtctacaggcaccgtgtctaacacggacatggagatgatagattatgcgtttacagggattctccgccggacaaaggggaagaatgttttgagaggcgatctcaacaacgcaccaccagtaatgcctctgttgatccatctgtgtggatacaggaagtgggcgttgacgaacgggaagaagaaggtgagaggagcactatgcgtgggtggcgttgtgacgccaattctgcaagcttgtggagtaccgctcaaggaaccagggttggcaccgaggatgatggacttggatcatttgcgccgatgtgagttcttggagtttgacatggctggcgactttcaccgctacaggttcgagcattcatcgattaaaatcgccaacattcttctcccctgcattgacgctactaggattctcgagggcaggaacattgacttcaagcctgcgcttgaagaactttatttcgagggtagtccgccaactgaggagatcagtcataccgaaggagctacaacagaagatattgatgagacggatgatatagatgaggcggagtttgacacgagcatgtatcatttcagtgagcatatacctcctgcaagggaaagcaggagtttgagcgaagctcacaaaaacaatagcaagctgcagaagtggtgcatgaaacaggacaagttactcgccaagtgcctcagggctatcaagtttatgaagaacaagctcggctgctcctcttccactacagctattccgcagggacatctccctcaggacatgccttcgaggagatatgacgcgcccgagccaagtcagcgcaggcctgagcctagagagcaggagattccgcatgtccctgcgaggcattcatcattcgagcctcgtgaatctgggaggaagaggaggaccacactcactcgatctagcagtaggagcggacgacttctgcagtctcgtagtttacgcgaccgcggtgctggccgcaacagaaggagagaggtcgagtttcctcatagcggtgctggccgcagcagaagaagagagatcgagtatcctcagagcggtgctggccgccacagacctgatgaggtcgagtacccacctgctggagctgatactgaacaaggtggttcgtctatggcctgggagcaatcacatgcagccattgacgagcaactacgttcattcttcaactgaggtaagcgcctcacttcaccattgtattataccatttgtcttgatttgtttcttcattttttgtttctgtgattggatttgtcctgagtactctcttccaagtttattcgcacagtggactgtgtgatttaagtttgggggagggctcaggaagtgtgtattgcattgtgtatatttttgagtctgcattcatctaaggcatagaaaaaacaaaaaaatttaaaaaatttcagaaaatgatttcacaaaaaaaagagtgttcatgtagttgcattacatttaggatcgagtcttgagtgtttcatttaggattgttgcatatgcataggggatgatgatgagatagccttgtaagcattttgattcaccggataaactcagtgtcctcgttgctagttgtctgttgtgtagtcaatgaatttgaaataaaactgaaccatgcctagattgctctactcgaccacactgtcatgatttgataccattccctatcaatttgaacctgaatttgatctttaattatcatgtctgcatcaaatttaaactcatggataccgtaaaatacttggattttcttattcattttgatcactcttgttaatccaagtagctgactctccttattagagcagttaacccaaacccaaacctagactttctttcaagccctatatcacttgtgagtgtttgtgaggtcttattccgatttagcttggtagaaagtgttaggttcgtaacgacagagatagtgtctcatgtagttctagttcgcatttttcggactagataggactaggtgggcgcttatactttgggttgggatgtgtttaaaaaaaaaaaaagaaagggttgattcattgatgagaaaaggtaaaagactctaggtgaagtaagctaaagaagaagaaaaagtctagtaaaggttttgggatttgtaaagaaaagaaagagttcttgttagctattgaagatgggcaaaagccctcggttttaaaatgttaaaaacaggaaccttagttgttaaagaaatccaaaatccgctagatgtaacaaagtgttgagaaagcttctcctagagttaagagaaaagaaaagaatgattagaaaaagggcttaaaagattcatgaatgcaaagggtagagttaagttcttatattgggattggagatgggattaccattagagcttcatttgatacactctgggtagatgggatcttatctctgtatgcatagcttgggacttacctttagcattctactaaagcttaatcattttttgagagatcccctgttactgaagcctattctgtaagggaccatctttgtctcttgaccttttaccttagccaaatgagttctttgatgatgcattgcttgattcacgttccagaattaatgaatgttaaagggattggtagatttaaaaacatgtgtaggtcgagcataagagtcggattgattgattgatgagacatggctaacgtttttaagtagaattcgatcttgaagcttagaactttcaacttggacattgatttcatatggtctatctggtgctttggctatgagtccccgctttcaaacctcacttccagcttgttcttgattgtttgcttgagggcaagcaaagtctaagttcgggggagttgatgggtgtgtattttgcatgttttgagcatccatttgtcatcatttcagcatcatatcatcactgttttataccatttcacatcatttgtcatcactttgcatgtttaggatagttttgcatgcatgttacatatttgtgttgttttcaggcgatttggagctgtccacgagctaactggaagaagcggacctgatcatgacaaaccactcgacccagaggtcgagtaggagcttcaagatctcaagagaccactcgacccccatgtcgagtagaagacaccgccactcgatcacatcactcgacccccaggtcgagtgtcttcacctccatctcttgaccaccactcgatcgcatcactctaccaggaagtcgagtatcaccatcaccaccactcgactacacactcgctggcaagcttcagagtcttctttattccgtactcaaccagacactcgagaacaaggaagaaaagaagactccagctattcactcgacctcccactcgaccacatgggtcgagtacagttcttaatccgtcacaatactgcgtcgttttaagtattagggtttcagaatatttggctataagtagcatgtacttcacattttcgcaaacaagtttttatctagttttattccgcagacactgtgttctagaccttttgtaatccgaatttctctttatctattaagtattcagtatttgttcttgattttagtttactgttgttcattctgttatcatcatgttgttacattgttgttatcatgtttttaacttgttcaacgtttatgctttctgctatgatgtctgagtagtgaaaaggtttctgaggatgggttagagtagtgtagaattctcagtatgctaggtggttgagtattgattgatagatcccttatggattagttgttcttaatgcctattgctttctgatcaactagaatttgaacccagacttttccacgcccaaaaggtgtttgatgaaatgtctgaaccactaattccagagattcgtggccctgtacaaaggtattggttgcagggagcgttttggctttaacttgttgattcgtaatgcctgttaggttagctctcgtcaatggtgattgagtctgggactaggttaacttgagggtctctgttgcggtggcacttagatttggttaatgaacttgttgtcgagggttaatttattgaacatgtagttcacctgtaaactgaggaaacgaaactactcaattaccccatcctcgggaattctttatctgattgaattctttgtttactctactgttgtttactgcatcttgtcatctgttgtttagtttctgcaattctttactgttactcgacctgttactcgaccacccagttgtctggcaacagactgtgcagtcgagtatccctgttacagcatctgtctgtttctcgacctgttactcgaccacacccagtgctctgcaaagagctttgttggttgagtgttttattgtttctgcttgaatttttgttttctgcatgttcacttaggactgctagaacacaccaaaacttgttattgcttggcttgacttagtgacttctgatcacatcttgattgttagcatcacacccatttggattgacacctaaaatactacaacgacatgatagtgctttaggattaattgatcttaaaaacctattatcaatttggcgccgttgccaattgggtgtttgtttgttacatttgagattgcagacttgcttagatcaagttctttttcaattttcaatctggttgctaattgtgtgtttttcttgttgtcttcttgatccaggtacacctctgctgtatgcgaactcgatcaacaggcaatcagaacctccttttcaacgacaacattgaccgcatagctcgcgaactcagagaaaggagaaacacagtcaaccttgtacctcagcaaccactcgatatgactgacgaacagaatcaacaaaatggcccttccaacattggtggtggagatgcaccacgtgatcaccgttagaggaaaggaattgcacctcctactatccagaacaacaacttcgagattaagagtagtctcatctcgatgattcaggggaacaaattccatggtctgccaatggaggatccactcgaccaccttgatgaattcgataggctctacaacctaacaaagatcaatggtgtcagtgaagacggattcaagcttcgtttgtttccactctccttgggcgacaaagcaaacatctgggagaagaatctgccccatgactcaatcaccacctgggatgattgcaagaaggcttttctatcaaagtcttctccaatgccagaactgcaagacttagaaatgagatctctggctttttacagaaggctggtgaaagnnnnnnnnnnnnnnnnnagcgtttcaagggttacaccaaccaatgccctcatcatggctttactaaagcctctctactcagcactctttacagaggaatcctaccacgcatcagaatgcttctgggtaccgccagcaatggaaacatccagaacaaagatgttgaagaagactgggaattggctgagaaccttgctcaatcagatggcaaaaaaaacgagaactgcgataggaccgtcagaggcacagttgactctgatgacaaacacaagaaggagatcaaagcaccgaatgacaagctggacatgatccttcttagtcagcagaagcatgtgcacctccttgttggtgacgagcagtatcacgccatcactatttgccatgaccctcggatcggggttgagcggctcggatcacgatagccgaatgatgcattcccgaggtatctcgagacccgcctcttgatgattttccgggttggcatctgaggcacttcgagaccgggtcggggaaccattttgaggtgatgctccgaggcgttctcgatgtcgcctcgggatggttcctcgatgtgatctctgaggtgtttgaggcccggttcgggatggttcttcgacatgatctccgaggcattgatcatggttggctcggttgcctgggtggaatccgaccccaacagtttgccccccagctcattgactcagcggaaagacgatgagcttcatgaatggattcccgagccgactgttcatcttcttaagtctacctttgtcgcttcatattcccggacggtcaaacttccgtcgcgtgccgccgactatttttgagaagtggaaacgtttctcgcttattcccgaggatcacgcgggtgtctcttctgccgagcccacgcactacaacgcgttttatttacttgttgcgtacccaacgcgcctccaaaaattctatatatacggcgagccattccttcaggagctcatttgaagttttcgaagaaaaaaaacaaggtttgcttccttctctctgatcttgatatttctattgttctctcttttccggtgaagctctgccgtttctttgttatttatgatttttccggtttagaaattccttgttttctggtcgtttctcatctcgtcgagcatccccgagccgaaaatgagttctagccagtctcttttgatcccgagcgcctctctcgccgattccagtgactcgaatcatctagatgaccttccccccatctacaaacggagagcggtttggatgtcttctgaagatgatgctgtgtcttcttcgagtgcccacgagcagatgatctcttttacggctcgggaagataccaatgccgatattgctcaggaattggatttgcccgatgatcccgagccgcctctcgttcggaggccccttgccttgatggccgacgaagacaagacgtccaattggcgagacgtgcccgagcccttaatgccgacgataaagattgaggactttctttatttctgcccgaacgagacggaagacattctgcatctcaacgagaagacggcttttgagataggcgagaaaaagaagaggaagaagaacaaaaaagtggttaggccgaatcctcccggctcgtctttatgcaccgagcggtcattgtctgatttaaaggctcggttcggttttggcaacgtcactcttcgtgttcctagcccagatgagcgagccgacaatccccccgagggctttttcactctatacgaaggatttttctaccattgcttcctttggttgcccgtcccgaggctgattttggattacgtgacctcgtatcaaatagccctttggcagataaccgccccatcgctgagatatcttatcgggatactagtgcgtggttatgaaaccgatattatttggagatccggcgagttccaaagtccgaggcggacaaatactatatttctccggccaagaccaggaagattatcgagagttttccgagcaaggatgatgcctacaccgactacttcttcttcgtggcattggaagatgctgtccttgaagatctcgtcgggaaagttctgacgaaatggggacttttgggtagtttagacattccgtgattgatttgtctgtgcccgaggtgattactgtgatttatgctgacattatttcgttgatctaattctgcagatcgcccaattaggtttctcgagccgtgtcccgacaatctcatttcctgccatcgagagctatcggcccgcaagtgtcattggacgaaacatctctctcaagatcgagttgaacgagcgcttagattatttca

SEQ ID NO: 928 - DNA, 934 bp, Arabidopsis thaliana landsberg
cctaaccccacccccaaaaccttcgattattactgaaacgccactgctctctcgccgggattccggtgaagaggaggagatggatgtcggagtttcaccggcgaagtctatacttgcgaaacctctgaagctactcactgaagaggacatttctcagctcactcgcgaagactgccgcaaattcctcaaagacaaaggtttcttcttcttctacctttctccatagtcttgtttccttctccgatttgcagcggaagtcaaattttgaaattctctactctgtcggagcttttttttgcttgtttattctgagaatggaggctgacacatgtcgaaataggaatgcgaagaccgtcgtggaacaaatctcaggcgatccagcaagttttatctcttaaagctctctatgagcctggagacgattccggcgccggtatcttccgcaagatcctcgtttctcagccagtaaatccgcctcgcgtgagatatttacttcgattttgcttctatttctcgtttaaactcacagattgaaaaaagtgaaaatctaagttgccttgtttgttctgatatctacaggtcacaacaacgtttattgagccaagcaacgagctggaagcttgtggccgggtttcttatccggaagataacggcgcgtgccatagaatggattctccaagatcagctgagttttccggtgggtctggacactttgtatccgagaaagatggccacaagacgactatttctcccaggtttacattttcgtatttgaattttttttgttacctttctgcttctatgcatcaggaactggtatgttgtttaattcaagaaaagtgtaatgcattgcattattaagtttgtgatattaggaagtttttggttcaatatcacatccttagatgttagaatctatatatggttcaaggct

SEQ ID NO: 929 - DNA, 1691 bp, Arabidopsis thaliana landsberg
agtagagtaccaatatgtacaactatgttctgggactaatttttttgtgttaatattgtaggaaataaagatggaatctgatgaggatttcatgccttttcagcctgagagtttcttctttactcctaacgagtatgtaaagactatgaagatttctacaaggtgtagcattgcttccacgctggctgtcatagggcagaagctcaacgacagagaaaagagttggtttataaagaaccggcagttcaagcttatatggcacatggttaggtgggataaaaataaggtgcagggtatgttgatgcttcttatgcggactgcttcgactgagaagaagagagtctgctggtttgtagttaacggcgtgcccatccggtactccatgagagaacatgctctaataactggtctcgattgtcattgctatgaatcagattataaagcaaggagctttggtagttatgactttgtggagagggtgtttggaacaaaggttgttaacatgaaggatgtggaagacatgtttgattcaattgaagatgagtgtggtggagatcggttgcaggtggcagtctagctctttttatgcaagataggaagaggaaggagaatgtttaatagcatccattcatccattcactacttttgaagacactatggacgagatccgtcacttgatgaagaagcggttagagggcacaatggaagtggactatttatttccaggcttcattgtttttcttgaggtacggttctatatatcttttaaataagtatttctattttggatgaataaagatatgtgattctgtaaattgtgttgatataggttttggcgtttgaatgcattcttgagctgtccaaacagtatcaagaatgtgtaataggcgctaataatatatgtccgcttatctgaaaaaggaaatttaaagacaacaaaatgacaggttttccacttgacaaagtaaacagagtgcttggaacaagtaaggtaaaaactggttgagatgatcaagtgtaaggatatcataagtatcctacagccatcaacaggtaaggaagctcttttacttgatcttatggagcgagttgaagatgaagattcagtggacctaactactgatgcttggaatgatcgtcttgatgtacaacagaacaagatatggtgggaggatctctataagttggatgtcgattctcaaagatatagagaggtacatgtcccagctgttgaacaaatggaagagcctcaacaaaatgttcgacaagcagaacagatggaggaggattcagagctgttgttaccttaaatgataaagagaatggtgcaaaaagcggtggtagatgcaatgaaggatgtctatctgagattagaaaagttttaaagggttttttgaattcacttccactcctaataaaaacaaaagacagaaaatcaacgagtgttttatcaaataggtcattggtcccaaatcaaaataaaagaataattgtgaaaacaaaataaacacgctaagaatataaaataatgactttagaacagaacttatactgttaccccagaaattcttttttggttgtacacacttaaattgcagaatcggaaaatcaaatcgcggattttggatgaaaatatggctttgcgatgttagcggaaaatgcgggttttaaattcagctgaaacaaggttt

SEQ ID NO: 930 - DNA, 4774 bp, Arabidopsis thaliana landsberg
gattaaacacataacacaccaaaatccgcaaatggatatatatatcatttcctgaaaatttccggcgaagcgaagcagagctcagatgggtaaatcatgaagtcgaaagacgaaactaaacgaatcacaaaaaatttctcgatctatcaataataccaccaaaaagacgcaatcaacgagagtgaaaaacatacggatttgtaaacggaaagaggcgcggagacgacgtcgcgtcggcgaatcgatcggaaaagagccgtggcagccatggactgaatcagatgagaattctctgctaatgatcttcctgcgtaaattcgagagaagtaagccaacaaaagaaatgggatctcgattaaatcagccctaattatttcataaaaattaaaataaattagagggtaattgcgtaaattacaaattccccaacgaaagttatccgcacgtttcacaatgagattattgaaacctctggctcctttagcgggtctctccggtgagtgctacaaacaagtcaagtgataaaaacttcggaaccactgtagtggttgtagttgttccgtataagttttggcgtggtggtgggttccaaagaataagaaccaaacaatgagctagccagctgtgtcgtcgttggttcttacatcgctagttttgtggtagcttcttctcgggctagttttgtgaccgcttctttgaaaacttataagcttaaagaaagataatatccaatccaatgaaaataaactataaagtataaagtgacaaaattttgaaaacttcttctctttaaccatcacattacataacaaaggttttttagcaaaaaaacattaagtttagttccctgacaaaagcttattccagaaacatatccactgctcgttgttctaaaaggcaaaagttccttggacatagaacccaccatgatctaaacctaatctcttaaaacccaagtggcaagaatttaccaaatctcctcactttttcacttcctcgtactctgcctctggagcttgatcactgcctccctcagatcctcctcctggtgcagagcctccaccagaaccaccagacatgtgctccccaatcttagaaacagctttgtttgccgcctcaatcttggccttgatctcgttgagatcatccccagaggaagcgctccttagatctgccacagcatcttcaatctccttggcgatttcacttgggatcttctctctgtattcaccaagactcttctctatgctgtaaattgttgtgtcagctgtgttcttggtgtcgatcaattcttttctttgtctttctgagcatgcaactctgcttctctcaccatcttaggtctcacggacatgttacgtgatcgagaagaagcagcgaaagaaggatatagcaattaaaggacgaagagcgagctgcgccgtcggagcgaccagctcgcgaatcaatgaaggcgccaagttgcaggattattgttaacgtaaaccagaaatgaataaacagagtttgaaatcaatagaacagagagatgaaaatagagtactccgattaacacacttgatacaacgttcgtaaagagacgcgatatcaacttctcacctacaagagactcgacgagagctccggtaaaacgatgagggaaatctagaagtctctagagagagattacaaccagattattcgataatgaaagcatgagcataacatgttgctcttatacaaaaaggtaaagaaagtaaacgttaaccacgttaataacgatcgccgataacgtccatttggattgccagctcgccagctcacaacacacgtgctttgcttaacatccctgacttcacatttccagctcgccagctcacaacacgtgctttgcttaacatccctgacttcacatttccagctcgccagcttaacccctgaacgctatagcttgacttcagttttcctataacaattatccaggtcaacatcgacgagtcggatccatctcggacggtcggtatcggatgcgagctagaaggagagataaaggaagagctgatcgccttcctgaaatcgaggtcgtcatcttttgcttggtctacgaaggatatgacaggaatcgccccggaggtaacctgtcataagctcaatacggatccaaccttcaaaccagttcgcctagtcgaggcaacgtctggaaatcagcttttatctttcatggatgccttctcggggtacaattaaatcttgatgcacaaggacgattgtgagaaaacggctttcatcactgatcgcgggacgtattgctacatagtgatgccgtttggtttaaagaatgcgggggcgacctatcaacgtttagtgaacgaaatgttcgccgaactactaggagtcacaatggaggtttacattgatgacatgttggtaaagtctctacaggcgacagatcatatcaaacaccttaccgcgtgtttcgatattctagacaagtaccagatgaagctgaatcccacgaagtgcactttcggagtaacgtcaggagaattcttgggatacatagtcaccgaacgaggaattgaagccaacccaaagcagatcgatgcaataatcggactaccgtccccccagaacaaacgagaagtgttacgtgatcgagaagaagcagcgaaagaaggatatagcaattaaaggacgaagagcgagctgcgccgtcggagcgaccagctcgcgaatcaatgaaggcgccaagttgcaggattatccaggtcaacatcgacgagtcggatccatctcggacggtcggtatcggaagcgagctagaaggagagataaaggaagagctgatcgccttcctgaaatcgaggtcgtcatcttttgcttggtctacgaaggatatgacaggaatcgccccggaggtaacctgtcataagctcaatacggatccaaccttcaaaccagttcgccaaaagcgaaggcggctggggtcagaccgcgccaaagccgtccaagacgaggtcgagcggctcctaaaagccggcctgattaaagaagtacaatatccagaatggctggccaacccagtcgtggtcaaaaagaagaatggtaagtggagagtctgcgtggattacaccgacctaaacagggcttgccctaaagacagttatccactgccacacatagatcgcctagtcgaggcgacacgaggaaatcagcttttgtccttcatggacgccttctcgggattcaatcagatcctgatgcataaagacgactgtgaaaagacggccttcatcacggatcgcggaatatattgctacatagtcatgccctttggtgaaagaacgttggggcgacttaccaacgactagtcaacgagatgttcgccaaactgcttggggtcacgatggaagtctacatcgtcgatatgctggtgaaatctttacgagccgaagatcatatcaagcacctcaccgcgtgcttcgatatcctcaacaagtaccggatgaagctaaatcctactaagtgcacgttcggagtgacatcaggcgaattcttaggatacatagtcaccgaacgaggaatcgaagctaacccaaagcagatcgatgcaataatcggattgccatcccctcagaacaagagggaggtacagaggttgacaggtcgtatcgcagccttaaatcgcttcatcgcccgctcgatggatatatgtcttcccttctacaaacttctacgtggcaacaaggattttcatttggacgataagtgtgaatccgctttccaagagctcaaatcctacctcatgagtggggcgatcttagccaaacccgaagtcggagaaaccctatatctctaagtctcgctgtcaagtttggcggtgagtggggtattggtgagatatgaccgtgggaatgagaaacctatcttttacaccagtaaggccctgaatgacgccgagactagatatccgaccttggataagctaacattggtagtaataccgtccgctcgaaagctttggcctagcttccagtcgcataccatagtggttttcgccgatcaaccactgcaatcagcacttctcagtccgaatcaatccaggcgaatctcgatatgggccatcgagctaagcgagtacgccgtggagtaccgatatcgctctagcctcaagtcgcaggtcctatgagatattatgaccgagctatatccggatgtgatcgacgaggtcctagacgagaattggatactttacgcagatggctaatcatcattacaaggtttcgatctcggaattttactccaatcaccaaccggggagatcctagaacagtcacttcgagtccaattcaaagcatcgaacaacgaagtagagtacgaagcacttctggtaggactttgccttgcgaaacgtcttggagccaggcacatcaaagccttcagtgactctcagctcgtagttagccagttcagcggagagtttgaagccaaaaatgaaagaatgcgagctaatctttcattagtccacggtctgtctaaacaattcgaccagttcgcgctggtcaaaattccctgaaatgacaactctacagcagacgctttagccgccctagcctcgaacacgaatcctgacctgagacgaacaattcttgtcgaaagtatagcgaaaccaagtatcgagctgtcaagttcgacctgcgtgatcgtagatcccgtaacggccatggattcgaacattgacgcaaccgatgcaccaggaatagaagtcgacccagaaccttcatattggctagat

SEQ ID NO: 931 - DNA, 1594 bp, Arabidopsis thaliana landsberg
  unsure (1)..(1594): unsure at all n locations
cccttaatggctgcatcgaaattcccaaaatggtgagaattgtttagacattatatctgcttgacttcacttgttttgaagtatttattttattttgtaatactcttagttctttacgcaaaatgaaggagttgtttggtttatttccactattttggtttgctctaataagagagaaaaaaggaagaaaattgttacggcgattttatagctttcatacacctattgaaagtccgaaacaatgttagcactagattcagcaaagtctattatcagagaagtaaagaaaatacattagagcaaaccaaattaaaatagtggaaataaaccaacgattcaacaatttataaattttctgtgacttttcagtgtcctccctcatgcataaacagatgaacattaggcttatttagatcaaattatttttaactcatattttttctaaaacttaacaattaaaacaaacctgtcttcccataaattagtaaatgttaatttaagttaatatcaatattaacttataaaatatcatggtcccaacattattaatttataaaagttttacttctaaagtttatatcttctttctacatattgcaaatttgtgaaaaaaaaaacatattgcaaattttgattaataaatttacctttatttagggtagcacttgtctttacccgagaaccctaatctaacacacacgtttaagaaaaaaaactaatctcggtgaaagagagagaggaaaatatgaatttttacatatccgaaacagtaaattaacatgtggttggcagacataaatgttacatataaaacgaaagcatgttagaatatgagttgataatggttcaatgaacacatgactcaatatatttttccttcttatttgcatatctctatgtcaatatatgttaaatcataatagctacatgattattcatgattaacataattaattgcatgattaaacatgatcaacatatagctatntaatattttttgtatttcatggcatgaacacactaaataaaatcaaatcatattttctatatccataaaatgagaagatcaactttgtttagttttttttttactcagatatgcataggaataagcaagattaatagaatattttatttacatgaagttgaatttgttctttaactaaaactacataaatgcgttttatcaaaccagtcaaagactcataatgcttctactttaacgtatataacgattctctacatcaaaaattgtcatgaacaattggaccagaagcacaattcccacgcacgttgaagaacgattcagtagatcgtaagatgagattgtccgcctctatatacagagtagcgaccaagtaacctagctaggcaaatatgtaataattgcctaatgatctcctgtagtcgaatgtgtgtcatcatctcctttagccattgactggactggtggagtcagtggcaacacaattgatttctttgattttgttttgggtggaatagtgtggtttaatggatagagagcgaaacgtaattttggaccaagcaataaaactctgataccaccaaataatagctttggtttttgtcgaag

SEQ ID NO: 932 - DNA, 773 bp, Arabidopsis thaliana landsberg
caccattttttttagaacatcttctccaggaagaaaaacgtccgaacgacattcctttcaaagataattatttaaaacaacacatgcaagtactaactccgcttgtggatcttatatggaaagggaggtgctgacttgaagatgagaaatcttgatttgaagatgccaaaaatcctctctaatttgtttcccaagcttgaatgacgatgggtaaacaactcattttgattgatgggatctttaccttgtcctctaaaatcttggagatgatacagagttctaaaaaattgcgactattggcgaattcatagtcaactaaataaaaaaaaattctgtaatttaaagcatacgaatataaataggataaatacaaattaacaactaaaaaaattattttgtcataatgtaagcaaactacctttaggaacttttaatttgttaagacatcatttaatacttttgcgtcatgagctgaacctttccatccacttagaatttatataaattctaaatcaaaattgtaaaacattttgtgataattgtcctttttgattacggtaactagtcgtttcttttcccgttatcattgccaggatatgtgttccatcaatagctcccacacaatccttataaaattataaccaaaatattaaaattttctaaacttcaaagataaaagaaaaataaaattaaatccatactttaaaataagggtaaaaccatgtgctgtcttttatttttgtcggcacttcaagtcgtggtttagccatgta

SEQ ID NO: 933 - DNA, 4366 bp, Arabidopsis thaliana landsberg
  unsure (1)..(4366): unsure at all n locations
aaagaaaatgagagattgacatgattttcggatagtgtatcggggtaggaatgtttcctatgaccccattattatacattatttggaatgatcaattacaaaggttggaaaactgtcgaaggtgtcgatccagtatgcgagaatggtcgatttatcatggtatagttcaagaatgagtctagaagaatcttgaatgttagcttgtttgatgagacccatcgatgaaagcctggtggatatagttgtggaacttaggtatggaatctagaaagttgtgtaagcgtggagagaagtacatgttggttaagatttgattagacttgttaggcatgtggatttagtttggatgatcatggcaataggctagagaatgttgaagttcctttgttttcaaaacctcttccacgggttcggcttttgtgttttgcttgagggcaaacaaaacctaagtctgggggagttgatataactctatttttactgattttagctacgttttaggtataggatttttagtgtttatgttatttctcgagtcttttagtgtcttttcaggtattctatgcagtgggacaacaatggagatgaggagacattttggagcaaaagttaaggaaaaggaagctaatgacgattccggattccagattcaggcagagtgtcgatcaacacacttctggtgacgatcgacaccagtttcggcctaacaaagtccattatgctttcaagtttacaaaagtggaaatttgccccaaaagacttctctatttgcattattagtccatggacgttttataggatttatatatagttttagaggtcgttgtttagacctaagttccttttatcaagttctttgcaatccctattttcagagacataagttattcatcatttgttttcagagattcattcagttttcaatatttcagagatttattcagttttcaatagagtgaagagatcctttcttactcttatcttatttgctgtgtttatactttgttactcaattatgttgtttgtttcattcaatatgtctgagtagtttgcttgttaggaatagggtttctcattggggattcatatggtttagtatattgcctccttttctaggttttctgtagaattcttcatctttgattatacttaatggtagatctagagaaattaactagatcttgaatccaaacaatagatatgcccaccataggtatctgtaattggatttattatttgattaacctggtttataggtgtgtaataagaatcggtctatctagtaaggtgaacaattgaactcgtttagaatgcatgtttaggtttaagatctctcggcttctccggttattcttagctataggcatagggagtttcgcggaacaccaccggttattccataattagagtttgagtttaaaaatggttcgataataacctagctattattagatctactaaccaatagtttcctgagaataccctgtttctagctctttatttaatcggttaccacacaatcaatctgctggctttttactttgctctcattttatttcaatcatcacctactagctaaatctcgacattcaactatttgtttgaacaaaagaactttgtgaattcgatccttaaatactgcgactgatctcttatttgagagagtagttcttagggtaatttgaacgttatcagcaaccaacagagaattaacaacttaatgaaaaacgctctcaaaacagatggacattcacaaacacaaccgggtactaagctcaatcaccaactcaaaatgatatttataccaacaccgccggttactaaggacaattactaactgaaaatgatacactatccaaacgcacccggttacgtactcaattagaaactactaacaattcaaaattttgattcaaaaaataaatggattaggaatatcatcatcattcattagtcattagtcacccactttgttggcgtttagcttttgccattagaggtgttcttgtggaagggccaaagtttaacnnnnnnnnnnnnnnnnnnnnnnnnnnnnnnnnngtaaccggagaagcctgctggagtacacggtggagggaaatcctcggctggcattgcaaatggacgtatcatcttctccattgtctcgagggtcaaacatgaaccaacctcttgaagcctttctggtcccattatcggaagtgtgtgttctcgaagcaatgattctgcttcctcgtccttcttctgatgttatgtaacataaacaaaaaaatacacttctttttagtactcgggactcatttcccatccatagacaaaagggtctaaataagcttggctctttacctctaagggagacaaatcagctccacggctaaatgtaagttcaatgcgcaatcttttcgggtcttcaagtgatacctgcatccgttttttacgtctagagtcagacactgagagagcatatacatatattgaagcatgtgtgagagtcaaagggaatgtaatgttaaaacctcggtgttctcaaagagccttaggacaatgtaactcatgtaatcgagttccttggttttacagagacgttctaaggcgttttggcaaatgaggctttcttctcctaggagagattcatcaaggttacagtatcgaaggacgttcatgagcgaatgaatatgcgattcctgttccaaatcataccaggcataaacattatagtttcactcatagacagacttaaacaagcaatggagcaaagaggaaacttacagatgtgaagtaaagtcgagtcctcacatgacgttcaggtgtcttcacatttgcatacctaaaagcgaaatgaaaaccaccaattagtagccgaaataactatctatataagagtgagagagaaagcaaagactattactttggatctaatcggtatttggtttctttatcatcatcttcatctttatcacctgtgccaggtcgtctcaattcatcgctattgataaatagcttcggttgactatttctatcttccctttgcgaggcggataatgacaagacttgttcttggctttctttcaactcggcaacgctcagtgcttcttctcgagtattcctcaagtctatcaagattttccccattaagcgccgagcaatcttttgttttattggaaaaaaattatagaaatgataagttgtgagatcccctggaaaaacaattgttagagaggaaaataactactcttatcttagattgtcacctttgaaccgattttaagcttttgttgcggattgatgccatactcatttgggattacaccatctgcaagcaactgcaaccacataacacataacttagctataatcgagcacagtcaaccatacattttagagatgtaacaagaaagttcattgtttcagtgcaaactatgattaaagtttcaggaaagggaaggaggaatttcagtttgtttacctgtgccactttgaagagttcatctaatccttttagatcgagatgggaattatgtaacaggtcgtacctggtgagaataacatattacggcttattcaaaaacgagtaactaaagctaggtgtaaatctagagatacactaaaaacaacttacttgcatgaatcgtaaacatccggaatctgtgtgatgtcaaatcggctgcaattaaaattaactatcagtgctactcacaaaactttactggaaacaaagagatgaaaattttgagaagcatcgctaaaatccaaatccgatgataaacttactcttttctttcattgtagagatccctagcaagttttatccaccgagcaaacatcagaaggaatccttcactaccacatggtaatccagaagcaatccgatcactgtcaatgtttgtcttgccaagggcttttgcttgatcatatggaggaattatatcgtatggctcagtgaggttctcgtcttcatccattgcaagtagtcttacttgttcagtcacattcttagttaatttcacctgattatttagaaagtaattcaacagataagagttttttcctggactccagtaaatcacttgtgcgagggaaaaaatggaagagaaatgcaaccataaagcgagaccaatgtgcacagtggttgttgtgcaaacaaactcaataatggttggtgatctgcttcacattagcaataaactactgttagatggaaaagtatgagtaccagttctcgtaggagttcatgagcgttgggaggaagtccagctccttcagtcatccaagggaaatcttcagaggagacttggtcgtcgtctatcatctttgtgccagaagataaaatctctattctatctagcttgcagggaaagaaattaga

SEQ ID NO: 934 - DNA, 2060 bp, Arabidopsis thaliana landsberg
catacccataaaaatatgatagttaagctttctatagcaaaagagttagtacataatggtgtctttaatactcgaactttgttccactttgattataagacatgacatgacatggtcctcctggtgaatatatgaaaatattaggctaaccttgaaataaagtaagccaaggtccacctcgcaaataaaatgacaagataacttcacaaataatcacagaagaagttcacctggtaatttaaaagataaggtttgccttaaaaaagagaggtccacctcaaaacataatttaaataaaactgaatcgcctccaaaataaaaacgcaaggtgattggtttttactaacaaatgcataaaagctctcccagacgatcaaaagatgctaaaagttttcaagacgcccaaaacctaattctctgatccggaaaaactatcttaatttgtttgaactctggtgtctaatactactcgaacctagatggtgagaattaccttcttttactactagaccaatgggcatttgttgaattgacggattcgttgtagctcaataaaagactgacgagtccagaggaactagataggttcaaaggttagggagatgatcgaacttggaaatgatgtggagatcttgcttaagcaagaatgagttgtttgttatagttttgcatagagatggagactataagagtgttgtgtctattttctatgtgattgttgattgtggtttaaaggtagaatcgtgtatcgtatttccagtgggcggaaaggatcctctcactgagtaattctttactcacccctttcttttccctttttccccaggtcgcggtgagaatcgtgtgaagtcgctcaagtccgtcttgcttatggtgtattttgggaacctcaggtttatttctactatgttattttcttatacgatttattaaagagttttcaatgatttaagattatttttttaagacaattttgtatttgaattaagaaagttgaatagaggaaagatataaataaagtgaaagtacgccgtctcaatgttgagggagacgggcgtgacaaatggtatcagagcggaggttaaagtcaagccactgctgacccggaaggttaagtcgaagagttttcttaaaagatagattttaacgaaatgtttaaaaataaagagttcttagtataagaagtacgacttgatatttagttttgttaatcagaattgttgtgattgttctcatattgatgtttgtttggtcagaatggcgcccttaaggaaaagaggacgtgttgcgaaccaaagggttaaccgtgttgaggatgcacccgctgatggataagctcaaccaccagtagttgatgttccagtcggagatcaggctaccatcaatgcatcctgttaggacagatcaagggatgagaggaatgttgaagagtaatgaaaccgaatccgtcaggcaacaccagcagctgcaggtgctcagcaaccacaagaaaatgttctacctgagcaacaacaggccaccacttccaccgccaccaccatcagctcagatggtagggcctgcgatttcttactaggagataatgaaggtcatgaggaccatgggcacagaatactttactggtggtattgatcccgtcaaagcagatgattggaggaagttgttggagaataattttgagaatgctaggtgtccagtggagttccaaaaagacataatagttcattttctgagagaggaggcgagtcattggtgggatggtgtactggggaacacaccagtgcagcatgtgattttctgggaggattttagggaagagttcaacagaaagttttttcctcaggaagcaatggatagtttggaggatgacttcgaggagcttcgtaaggacacaaagacagttagagagaatgagcgggaatttagccatcttagcaggttttcagtgagagctggaagaggagagcagtcagtgattcgtagattaatgagaggattgaggccggacattctgactcgatgtgcttcccgagaatttttcagcatgatagacttggttg

SEQ ID NO: 935 - DNA, 4236 bp, Arabidopsis thaliana landsberg
  unsure (1)..(4236): unsure at all n locations
cattcaatgatctggagccaagcctctgcgataaacttgagctgagattctgatgtgcactgtatgtcactaagcttctctgattgcattttctgcagatcccccatagctttttgcctcgacacttgattgcttgcccatcgtttatagtaatgagtgtatttctctagcgagttttttgccatctctcgcctcctttcagcctcatcatacaacccttgttttttagccgcctcataccggttgcaggcataatacccaccactactttccccgtgttttgtccatgcgttaaggcagagccaacaaaactcaaacttacaaggtggtgtgcatgtcatgtgcatacatccatgattcttttctattggcctcttacactttggacaaggcttcgaattggcaagtatccaattcatattttcagattcagtgctgttctttagtatccattttccaactgtgtcacaatccacaggacggtgagcctcttcactgcaattccagcaaaagctatgcgaacacaagcacgaaacatcataattactttcggtcccagcagcaaaactaattgcatgctcacatcctggggcaggacagcacttcatctctctgttgacttcaacataagacctaagaaaatatctataatacctctacttgtcttccttggaacacaagttatcgatcatatctcgaccaatggccgcaggacaacaagggtagggacattttagcatcaaacatcctgggccatcattgatgcttgtgcttatataacccgtccaacatgtagcgcagaatgggtgaccacaagaaaccgatatagtttcctcaagagggtaggattcaaagcatattccacatgtaaactctctgccatcaggtgcaggtccctctaatatgccaacagttctgcgaactctctcctcatccgcaaaccattcatcattaactttactgagactccagtgatagtgaagaagcaaaagacttgcttggacatcggttatggagaggacaacggaaactcgcccaacatcatccttctgatgcctgcgcatatcttcttccttgagaacaacataatttgtctgagagcgatgggaggcgatgatggcggcatcgtccgtgtcagcctcaccaaacccgtaatcagtttcatcaatatcgttgtcatcatcggtgccggcgctgtcaaaatcataatctaccgagtccatatcgtgggcattgagcatatcatcatcggaatccatcatctttaaataaagatagagatttagcggaatcagacgaaacccctcttcctttctcgctggaccaagtaggaaccctagtggacttacaagtttcgctcaaactaagtttttctcaggccttagcacctattttatacttataggttgaggctatacaacagaccaatttccaatcctaaaactaaatggaatacacaatttcttttttctttatggaataggaaatttttgttcgtcttcatgtttcttccttttatgaaaagtaaactcttaagacttctagaattggaaatatttgatttgattgaacacaaacgacttcttgaagtcttctccaaaaacctacatatgtttcataagtgctggtcctttttggagaaaaaaatgctaatgggggacaggcgaatttgatgcataaaacaaagaccgcatgctttcaagcaagaaaaagtcgcatagacataagtacaacaaggattaaaagcaatactaaaataaggaaaatatattttaaaagatttgaaatccgcaagtagtctatagaaaccaacttaagatctgtactagcactcgtcgtcttcttcgcacgcttcctggatacagactcgtagtccccgtccgcgtctgcctcggacgtttctctaggttcagattcgtcttctttctcagattcagattcagattcagacgtttctccggattcatgtgaatacatgtggattttgccatcctcttcatcgctagatcctccattgttgcctcccttggtttcgtccgtcatctgatcgacgtcttccgtgtcacatattactccatctgttccgtcatcgtcttctccaaacgctaggtatcctcgtctgatgctttgtggggtccagatcttgacaccacattcaataatgtcgaagtcttcttgtaatgcgctgctgaattcgaacaccatctctgtgcctgcttcagaacggcccatacgtagcaagcctgagtgaaatataaatagatgttcccttcgacagtttgagacatcaactatatcgaactcctcgtcgtaagagcatgattcgccgttgatgcgacataacagttccgactcattactcatttttgtgatatcatggttaggggaaatcacgacgcagaccataaattgggaattaccacccaatgggagaagaatggacaaagaatttccttgggctctgtgatcaaactctgctggcacttctcttcctggtaacagaaccgacccggtagaatccgatgatcgtcggattattgcttcccgtgcttctccacccaatttaaagcaattggtgaaactgaggcgcgcacttggagtgtataaagggctagatacactctccagtgattcacaatcttcagcctctagggctttgattgaacaagggagatctggcaatgatgctagtcttgtgcacccagatagacaaagctcttctaactgatgaagagctttgatgcaatctggaatactctcaatatcagtatagcttaggtttagatgtctcaaactcgtggggagttgtgttaatccctggagcttttcattgtggctcatatcgagatacacaagatgacaccaagacgcaattgatgcaggcatatcttctagctctgtgttgtctgatatatccagtgcttcgatgtgccttgaaataactggaaattttctcaatcttgagcatcctttcatattgacttgcttaacggacgtcaagttcatgtgagctggaatgacttgtaggtttatgcagttattcatctccaaccactctagtttatgcagatgcgcaaaagaggatgggatctctaccaaactctcacagttatccagataaaaatactccagatttgtagcatttgaaagatctgggagttccttcaaattcttggactcagtcaaatccatatacttgagatttttaaggtgctgaaatgataagaaaaccacaaaacaaccgagggaaagagcatcatataacctgaagaggaagtacacatatatatatatttttaagtacaacaccaacgtacttgggttccttcccatagcttctcgaccaggctttcccgcatattgagttctacaagacattccagattaaatgtaggaggaagactcttgcttgggtatgctgcccaatgcagtaaccttagacgaggtggaaactccactttctcaggtatgtgcactctgttattcccatcatctctacttttgtaaacatggagaaatcgaagatcatgcagtcttttgaaagcgccatcacatatagtcacttcactgattcctgatgtatcaaatgatatgccagacacattacagctagtaccctatacaaaaacaaattgtcattaaagcgacttgtttagattgtaaagagcaaatgaagaaagaggacttactttctcatatcgaaggagatcgcaaatctcaggggcatttattaagatttgtcgtttccaaggctcctgtctacgaatggcttgtctacccacttgttgtagtaacttgtgcatcactatttgtccagtgcgatatatctctatcagagatttgttaactaggattttcagccagtttccgacatccaagttaccatcatcagcaagcatggcttccacaagatcacggtctctgtagttgaagaaaattgcaatgtggagaaatagcatttgatcattttcatgtaacctttcatagccgactcttaatacgtcatcgatttcttgaccaggattagtttctagcctatgcactacaaattcccattcgtcctgcttcttcccaaataaagatgaacccatcacacagagacccaatgggaggttaccannnnnnnnnnnnnnnnnnnnnnnaagcttctcgaaagcatcaggtgcagagctttgttcaaaagcatattaacagaaaatttcaagagcttcttctctagatgggaatcctacatgg

SEQ ID NO: 936 - DNA, 8204 bp, Arabidopsis thaliana landsberg
  unsure (1)..(8204): unsure at all n locations
ttccaaaccaagtcgcacctctttttccctctgaccttttttgagcagggtgtgatttactgatgccttgccccattttcaatttgccatcaagtgatagctaccaaaccctgctttttcaggatatgcatgctgatgccaatctatttgcctttgcagtaacagaatactcggattattttgaaatggaaatcagtgagagtcctagggtcaatgtcttttatcagggagcagtacttttccataaaggtcaggtttattttttaacagaccagcagatgcgtcttctcaaggaaattaaagcgttacctgtgggtcaacaaggaaagaaatacctgcaatttgatagcagtgatcgagacaaattggcctcctgtctgactctttttatccagatgggcaccgtttcagctccagaacgtctacaaatcaaaacttttgcgccctctttttactttgacagggaagaagataatcggattcgtttagaaattcagtttgattatggaaatagacaggtatctagccgacaagagctagaagaattacccttttcaagtgacgcagacttagaagaaagaattttccaagtctgtttggctgcgggctttgaagccgattttcaatcttggctttcagcgattgtctgtgcgatctcggagcctctgttagcttgatgccactctctgtggcaagaaggttagagttcattcaatataaaccttgtgacctgactttgatccttgcggataggtcttctagaaaaccgttcggcatgctgaaagacctaccagtcatgattaatggcgtagaagtgcctacagacttcgtggtgctggatatggaagtagagcataaggatctcttaatactgggaagaccctttttagcgtcagtgggagaagtgatagatgtcagggaagggaaaataagtctcaaccttggaaagcatatcaagttgcagtttggcatcaacaaaactccacaagggtcaaccaaagatggaagaacctctggaaatgatagagcgatctcaggagaaggatatgagactgaaagagtgaaagaacttagaaagaggtctgataagcagaatgaactatagagaagctagccaacgccattgaggaacttaggagtaagctgaatcagatgcagaaggaagctcaacctaaaggcgggattaacactatcccgagaaaagaattcacttcaagatggtctcaagatacagattatcctccagaagagaaggaagcctattttgaagaaagggggattgagtattctgctgcagacctttccagggaggacgctgaatatgatgatggtatcagagaggattatgcagaccctctctacagttcattttcttcttgataagtgtgtggagtcaagctagagacttaaaacaagctcacttgggaggaagtcccatgattatccttgtaaataatttttagtttcttgttatttttgatttgttgtgtttgtggttctcagaaaaacaaaaagggagtaacgtgaagttagagtaaaaatttaaaacttttactctactgatgacctaaagatcgagtacattggtcgagtatgagtgatgtttaaaacccaaaaaaattttaaatcatcattttactcgaccaacaggagctacagagtcttccagggagtttatcaagtttaccgaagattgcgggatttcctggagtttttctagtgaacagagaatatagagaagagacaagaagacaacgagggacccactgctgcagccatgtctcccacgctccccacaaggtgataacgaaatctatcctagtcttctccactccactcgacctccccttatcccatcactcgatcccatagccttctctcttcaaaaatgcaacctccccatctctgcaatcccgtcttcactcgacttcttctccatcactcgacttcaacgccatcatcatccgtccaaagcagcactcgacctcaccatctctcttcctcatgcactcgaccgcttctctctcgcctttcacagccacaactcccatcgcctcttcaccaccgtctcgagctaccactcgacgattcctcgccaccaccacctctcaatcgtcttaaagcactcgacctcttcaccacttgaccaagcagccgtttctcctcctccgagtcaatcactcgaatcaccgctcctctaacaacactcgacttcttcttacatcatctcatcaccaatccgcgactctactctcatcattcgctactcgaccttgctgtttggttcactctaccgcagctcctgcataacctcgtcgttttcaccactctctctccatcgcttcactcggccctccataatcactcgaccagctacccagaaaacaaaaaaaatattcaaaaccggctacggtttactcgaccggtttactcgacggtttactcgaccagtttactcgacctgtttttggtttgtgtcgtttgtgtttctggttttgtatgaactaacgtattaacgtttatttttgagttacatttgctttcaggtttcgtaatgattaactacagtggagaattctctatggaccctgattacaatgtggatgaagctgagtcctggtcagggatgaattcgaacgctctacagcccgacgtaatcagagaagagctgaaatcgccagaggaaagagggcgatgtcgagtagatatgagctgattgatgaggacatcgaaactgagtatgagccagagtcatggcgcaaggagacgaagctgctgaacaaacccgacgaggttacaatggaagagtatatcaggttcattgagatgaatgatttctggggaacgcgctatccgtgctatgagactttagcccagctggggttattggaggacgtgcaacatctgttcgagaactgtcatctggagacactcatgtcttacccttacgctgcctataaggaggagacaatcgagtttctttccacgctgaaagtggagatgtatgagggactcacagactttgagctggataccaaggggttaggcttcttgacgttcttagtgaatgaatagcggtatcagctttcgatcaagaagttggaagaactgtttggtttccctagtggaaagggaaccaaacctagagagcaggagattctgcatgtccctgcgaggcattcatcattcaagcctcgtgaatctgggaggaagaggaggaccacactcacttgatctagcagcaggagcagacgacttctgtagtctcgtagtttacgcgaccgcggtgctggccgcaacagaaggagagaggtcgagtatcctcagagcggtgctggccgccacagagctgataaggtcaagtacccacctgctggagcagatacagaacaaggcggttcgtctatggcctcggagcaatcacaagcagccattgacgagcaactacgttcattcttcacctgaggtaagcgcctcacttcaccattgtattatatcatccgttgcgatttgtttcttcattttgtttctgtgattggatttttcttgagtactctcttccaagtttattcgcacagtggactgtgtgatttaagtttgggggagggctcaggaagtgtgtgttgcattgtatatattcttgagtctgcattcatctaaggcatagaaaaaccaaaaaaatttgaaaaatttcagaaaataatttcacaaaaaagagtgttcatgtagttgcagtacatttaggatcgagtctagagtgtttcatttaggattgttgcatatgcataggggataatgatgagatagccttgtaagcattttggttcactggataaactcagtgccctcgttgctagttgtctattgcgtagtcaatgaatttgaaataaaactaaaccatgcctagattgctctactcgaccacactgtcatgatctgataccattccctatcaatttgaacctgaatctgatctttaattatcatgtccgcatcaaatttgaactcatggataccctaaaatacttggattttcttattcattttgatcactcttgttaatccaagtagctgactctccttattagagcggttaacccaaacccaaacctagactttctttcaagccctatatcacttgtgagtgtttgtgaggtcttattccgattaagcttggtagaaagtgttaggttcgtaacgatagagatagtgtctcatgtagttctagttcgcatttttcggactagataggactaggtgggcgcttatactttgggttgggatgtgtttaaaagaaaaaaaaaaggggttgattcattgataagaaaaggtaaaagactctaggtgaagtaagctaaagaagcagaaaaagtctaataaaggttttgggatttgaaaagaaaagaaagagttcttgttagctattgaagatgggcaaaagccctgggttttaaaatgttaaaaacaggaaccttagttgttaaagaaatccaaatccgctagatgtatcaaagtgttgagaaagcttctcctagagttaaaagaaaagaaaagaatgattagaaaagggcttaaaagattcatgaatgcaaagggtagagttaagttcatatattgggattggagattagattaccattagagcttcatttgatatactttgggtagatgggatcttatctctatatacatagcttgggacttaccttaagcattctattaaagcttaatcattttttgagagatcccctgttactgaagcctattctataagggaccatctttgtctcttgaccttttaccttagccaaatgagctcattgatgatgcattgcttgactcacgctctaaaactaatgaatgttaaagggattggtagatttgaaaacatgtataggtcgagcatatgagtcggattgattgataaccaggcatggctaacgtttttgagtagaattcgatcatatcgcagcttagaactttcaacttggacattgatttcatctggtttatctagtgctttggctctgagtcctccccttcaaacctcacctccggcttgttcttaattgtttgcttgagggcaagcaaagactaagtttggaggagttgataagtgtgcactttgcctgttttgagcatccatttgtcatcactttatcatcatatcataactgttttataccatttctgatcatttgtcatcactttgcatgtttaggatagttttgcatgcattttgcatatttgtgttgttttcaggtgatttggagctgttgacgagctaattggaagaagcggatctgatcatgtcaaaccactcgacccccaagttgagtagatgcttcacgacctcaacagaccactcgacccccaggtcgagtagacgcttcacgacctcaacagaccactcgaccccctggtcgagtacaaccatgagagtcactcgatcatatcactcaacccnctggtcgagtatcatcacctccaccacctgaccctaactcgatcacaccactcgaccacctggtcgaggaactccatcacattcactcgaccacctaggtcgagtgccattcttaatccgtcccaatactgtgtcgttttgagtattagggttttagaatattttgctataagtagcatgtattttacattttcgacactgtgttgttgacgtttttgtaatccgaatttctcttaatctattcagtattcagtatttgcttttgattttatttactaagttgttcatcctgttatcatcctgcaattactctgttgctatcatgttttcattcttttcatcgtttatgttctctgcaatgatgcctgagtagtgactaggtttgtgaggatggttagagtagtttaaaattctcagtatgctaggtggttgagtttgatttatagatcccttctagattagttgttgttcttaatgcctattgctttctgatcaactaaaatttgagtccagacatttctgcgcccaaaaggtgttcaatgaaatgtctgaaccaataattccagagattcgtggctttgtaccaacttattggttgcagcgagcgttttggctttaacttgttgattcgtaatgcatgttagttagctctcgtcaatggtgattaagtctgggacttgtttaacttaagggtctctgttgcggtggcacttagatttggttatcgaacttgttctctagggataatttattgagcatgtcaatcacctgtaaactgaggaatcgaaactactcaattaccccatcctcgcgaattctttatctgattgaagtctttgtttactctactgttgtttattgcatcttgtcatctgttgtttaatttctgcaattctttcttgttactcgacctatcactcgaccacccagttgtctggcaacagactgtgcagtcgagtatctgtgttatactttctgtctgctactcgacctgtcactcgacctcacccagtgctctgcaaagagctgtgttggtcgagtattttattgtttctgtttgattttctgttttctgcatgttcacttaggactgctagaacacaccaaaacctgttattgcttggcttgacttagtgacttctgatcacatcttgattgttagcatcacactcatttggattgacaaccttcagtactacaacgacatgatagtgctttaggattaattgatcttaaaagcctattatcaatttggcgccgttgccaattgggtgtttgtttgttacatttgagatttcagacttgcttagatcaagttctttttcaattttcaattcggttgctaattatgtgtttttcttgttgtcttcttgatccaggtacacctctgctgtatgcaaactcgatcaacaggcaatcagaacctctttttcaacgacaacattgaccgcatagctcgcgaactcagagaaaggagaaacacagtcaaccttttaccccagaaaccactcaacatggctgacaaacaaaatcaacagaatggccctacaaatattggtgttggagatgcaccaaggaaccaccgtcagaggaaaggaattgcacctcctgctatccagaacaacaacttcgagatcaagagtggtctcatctcgatgatccaagaaaacaagttttatggtctacctatggaagatcccctggaccatcttgacagctttgataggctctgtggccgtacaaagatcaatggtgtcactaaagatatgtttaagctcagattatttcccttctctttgggagacaaggcacaacactgggagaagactctgcccccagactccatcaactaatgggacgattgtaagaaagcttttcttgccaagttcttctctaacgctcgcaccgctagattgaggaacgagatctcaggcttcacacagaaaaacaatgaaactttctatgaagcttgcgagaggtttaaaagctacaccactcagtgcccccatcacagtttcaagaaagcttcattattgagcacactctatagaggagctttatcaaagatcagaatgcttctcgacactgcctccaatggaacttttctgatcaaggatgtagcagacggatgggagttggtcgaaaatgtagcacaatctgatgggtgctacaatgaagactatgatcgctcagtaagaggaactggaggaacagaggataaacagagcaaagatatcaaggctctgaatgaaaagctagacaagctattgctcgctcagaagaagcagatacactacatcacttatgaagagcacttccaaatgcaaaaaggggggaatgatcaaactgaagagctgtgctacatccaaaaccaaggagggttcaacaagggctacaacaactacaagcccaacccaaaccactcctacagaagcactaatgtagctaacccccaagatcaagtgtatccaccacaacagaatcaatctaagccttttgttcagtacaaccaaggttatgtgggtaagcagcagttcaatggaggataccaacagcaaaatccaccaccaggattcactcaacaaccacaacaagacccaactgctcaagatcctgaaattaagcaacttattcaatagatcatttaaggacaagctactggagctatggcttctgacaagaagatagctgaattacacaacaatattgattgttcttacaacgatctaaatatcaa

SEQ ID NO: 937 - DNA, 954 bp, Arabidopsis thaliana landsberg
ttttttgtgtgggggatagatattctacgtaagaggcgtgtcataaggacatcgaacgtgcatttggagtgctgcaagctcgatttaaaatcattcgtaaaccagctggcctgtgggacatattcgagttggctatcatcatgagatcgtgtatcatattgcataatatgattgttgaggatgaacgagagacatatgctcaacactggacggattatgatcaatttgaggcaagtgggtcgagtacacaacaaccattctcgacccaagtgctactcatatttgcaaatcatgtgcgtgatagatccgaattgcgtgattcaaatgtacatcacgaattgcaagcatatctagtcaaacacatatgggcacaattcagaatgttcttgttgtctgcttattgtatttttgtattttaaatttgtgttcattgtatgtgttttagtaataataatttcttcttctcgttttaattatttgtaaaagtttttaaaaatattatataaaataaaaacaaatataaacacaacaatactttataaaactatttaatatttaattcttttaaatttaatttgatattaacgatggttaataatatgtaatcacaaaaaacataaacataaataaaatgaaaaatatgaaataaaaatggtaggataaggtgttgtaattttattaaacaaaaccattgtaaggataaaaattgtgtaggtgttgaataatgatgtggaagagagagaagatgatgtggagtgttaaaagtgaaaaagtgggtgttgtaaatgagtagccattgtagatagcctaataatgatcttgtctacctcacttttggtattggtgtcaatatctgcttttctcgtgcccaatcccatcatttaattcttgtaagcaaataaaatcaattaatttaaacaatgagtttgtagaattgcagttgtgctttggggc

SEQ ID NO: 938 - DNA, 7524 bp, Arabidopsis thaliana landsberg
  unsure (1)..(7524): unsure at all n locations
cgggcccgatgtaggtttacccttaaagcttctttcccttcccattttctactgtaattttcagtagatgtttaattcatttttcgatgtaattacagctaaagaaattatacatctaaacactactgatgcatgaaaatcaattcttttcatcttacttaccactgttgtttttcttgactcagcaaatctttctggaccatctactacagttttatctcaggttagaatctgaaaacattactatctcttatcttccataagatcaaagtacaacattaatattcctaaatttttgttctggtgtgtcaaaagctgcaaattcttcactcaaacttgatattttctctatttcctagctagtttgctaaaaatatggtttcttgtctgaaaaatgtttcagagttaattcttgtcatttatttctctgcagacatttcttgtctggcaaattcttttctccattatatttctcgggaggagatatagaataaatcaaatattgggatgtactcttgtagcatttggtgtaatcgtcagtgtagcaaggttcgccagcttaattaacttgcttgatactatttaagtgacttggtttcttctttccttttgttagacttctcaatcgacacaacgtaaccagttttaacaaatttcatccatgttgagtttatatactactttctcatccatgttcagtgggtcgggtgccgctcattcatttaaagatacaggaatactttggagtcttcttatggtgttttcttttctgcttcaaggagcagatacagtaatgaaggtttgtcaatcattttctaattaggtcgccaacttcaagatgttgggctcttctctttaacggtacatttcatatccttgcaggaagtcatctttctagatagcaaaaagcgattgaaggtaattataccgcggaaccctttaacaacattcgcgagtgttggattctgaaagaaatctgttcttattattacagggtgcttcacttgatttgtttgttgtaaactcatatggttcaattttccaagtaagaattcttagtgtagctcttttttttttatttacattgaatgtgaatctctttgatagctaatgtgcatctttttgtggtaaacccaggtcatatgcattgcgttgcttcttccttttctttcaaagctttggggcataccgtttaaccaactaccgagctatatcagagacgggggtgcttgctttctaaatattggttctagaataacaggtagttgatgctaacgctttctgctccagtatctctgtttttttcctgtgtaacacgccaatttgggtatgacacaggatgcgaaggggctccccttcttcctgtaatgtttgtcatgatgaacatggcttataacatctctcttctacgcctcatcaagatttcatctgcagttgtgtcgtctctggcatccaccgtttcaggtacaaaactttgtctcattgtagccttgccatgctttcatggaaacctacttcttcagcgaattagtaattaccaatgatataccatcatcatctatgtgatatcttataagtcaacaatgctgtaccaatcctataaacaaccaaactttttttggtcataaattttggtggaatggcataggagttagcatcatttataagcagaagagaaacatttgtaatatacagaaccttgtttggctttgtcgatgcagtgcccatagcggtgtactgtttcacgcttcccctaccataccttggggtggcatctacactaccaagggggtttgttgcaggcacaatcatccttgtagtcggcatgcttctatatgcttggacaccatctactaacacttccgattcaattatcccctcacccccatccacatagcggcaggaaaattggtttttgtaacattatttggtttccttctctcttctcatcttagcatatgctctttttttgtcaaataagaaatttttttatgcattctttacaaaagaatggttagttttcagttttgcttttcaaaaactatgcagaggataatgtactttgtaatgatgtatatcaattatcaacatattttttgtcaacagcatacaatttgcggatttgaatttaagttgatgacactaacaaaaactactgaaaaagttcgaacacaaaacactaatcagtatttgtggatcagaggcccatattattcagtcttctttgagtggttaacttgtaaacaactctcacacttggactcgttacccaaaagaacccataatgtttagagtgaccggaactctctcggcggcatcatctccagcggtggcggcggcgtctttctccgccgctctaagactttccataactcccactctcgctatcgcctctcctccccatctccgttggttctcgaagttttctcgtcaatttctcggcggacgcatctcttcactccgaccacgcattccttctccgttcccgattcgactctctggtttcccggctctcaaaatgagaggtacaacaaaacatgaactgtatcaaagacttgactgcgagagcatcttctcagatttctagtaggaacgaatttacctttactctgatctgatttttcttcaaaattcatgtgcgattaccgttgctctgtgaactgtgtatatctgaattattgattatttagtttctgattgggttgatttctgattatcttttgttttttcagcttcgtttagcagtgggagtagtggaagtagtgcaagtagagagattctggtgcagcatttgcttgttaagaatgatgatgttgagctctttgccgaactccaaaagaaattcttggatggtctgattcttgaatccttttttactcgtttgatatttcaacatacatagtagctaggcatgtaagcttttatagttgtttctgccatgagctttgtcgctgtggagctgaacttatattatgtgtcgcaatgtctatagtcaatggcgtctctgcttactcgattttaattggttttggggtttggttagcacatatcatactgacacatatatgaatttttcattactcgactgtcactttgttttgtttgtattagaagattaaggctgtctactgttttttcaagtaactgtttcttgtgtaggagaggagatgagtgatcttgcggctgagtattcgatttgtccttccaaaaaggacggtggtatacttggatgggtaaaactgggtcaaatggtatgctctcttttttataatattctctatttattttggttatattgttgcatagacaccttcagatctataggacccttgctgtcttagccttgatatttcacaaacaattgggtgatgtaacagtccctggtgaataaagtttcagtattgacatccatgtgcaaatggaagtagtaggatgtaaccaatgataaagtaattccaaaatgttttggactttggcaagttcctgctgcgatatgaacatggcagaccaattaaaattgttttcaggtaccagagtttgaggaagctgcgtttaaagcagagctgaatcaggtggtgaggtgtagaacccaatttggcttgcacttattgcaagttctatctgagaggtaattcttctgaaaactatcctccgctgttagcgacatttactatctgactgttgtaaatttcttgacgaaaagttttatattaacagagaaccggtgaaagatatccaggtagaggagctgcattccaaaatgcaagatccagttttcatggatgaggctcagttaattgatgtcagagaacccaatgagatgtaagttcctttcatttctcatcttgacatacttttccttcttcaatgaagcccaatggattagcttcatactttctcaacattatgattcatgtgtatcttgctgagtttgattgctctgccatttagattcatgtgtaccttgcacatttttatcttagaaggaggacaaagtatccatagtcaactcacatttgctttcttctattctgtttcactacttgttgtaccagagagatagcatccttgccaggattcaaagtgttcccactccgccaatttggaacatgggcaccagacatcacttcaaagctgaaccctgagaaggatacatttgtcttggtatgtatatcagcctcttctcaactgttagatataggtatactgtatctagcctagcacaatttagaggtgttgtaggttggttagagagcagttagtgagggctgggcttattatgggtgtcccagcagattgttttgggtatttatctggttaggagttgagagcctctcataagaaatctaagatcatctgaaacaaaggaacctctgatgttgaaatgactttttaaagttcttctctactaagtcgcggcctttgttacagtgcaaggttggtggcannnnnnnnnnnnnnnnnnnnnnnntacagtctcaggtaaaaagctttcctgctcctttaaaagtatatatatatatatatatatatatatatatatacatatgcaattatgatatcttcatggcttgttctcttgttcctcagggcttcaagagtgtgtacaacattactggtgggatacaagcttattctctcaaggttgacccatcaattcctacttactgaaattgagcatcttagtctctttttcttgtatcctcctaattccaaattagatttgcaaattcgtattcaataaactatataatataaggttcatttttgagaatatagataacaaatttagaatattacaggcaagtccgtattaattctccaggaaatgctctcaaccttttgtactaaatcctaaaataaataacaaaaatacagagacaggctgcttttggttcctaaagtccctcccgatcattatcgtttgaacttgaaggccagcaaaacgaaaaaaaacttacaaaaacagaaaaatgctattcatagccatttcataagcaaaaaactcctaaattttcttgctaaagaagaaaccaaaaacctaaaagaacagacagaggaagaaaagatctttaatattttttttatttctcttcctggttgagaacttttacttcctctccccttaattgcaacaatgggaaattgttgctctcatggaagagattcagataataacaaagaagaaccgaggccggaaaatggaggcggcggtgttggtgccgctgaagcctctgttagagcttctaaacacccgccagcatctcctcctcctgcaaccaaacaaggccctataggacctgtcttaggtcgacccatggaagatgtaaagagctcatatacattgggtaaggagctaggtcgtggacagtttggggtgactcatctctgcacgcaaaaggccacggggctgcaattcgcttgcaagaccattgctaaaaggaagctcgtgaacaaagaagacattgaggatgtgagaagggaggtgcagattatgcatcacttgaccggtcagccaaacattgtggagcttaaaggagcgtatgaggataagcattctgtgcatttagttatggagctttgcgcgggaggtgagttgttcgacaggattatcgcaaaggggcattactcggagagagccgcggcttcgttgctacggacgattgtgcagattatccatacttgccattccatgggggttatccacagggacttgaagcctgagaactttttgttgcttagcaaggatgagaattctcctctgaaagccaccgacttcgggttatccgtgttctacaagccaggagaggtgttcaaagacattgtgggaagtgcttattacattgcaccagaggtgttgaggaggaagtatggaccagaggctgatatttggagcattggtgtcatgttgtatatcctcctgtgtggtgttccacctttctgggctggtaatgatttctgtttccctcactacctgtcaaaacaaagaacagggctctactgattcattaattcatatttattttttcgattacagagtcagagaatgggattttcaatgccatcctaagtggacaggttgatttttcaagcgatccatggccagtcatctcaccacaggcaaaagacctcgttaggaagatgctcaactctgatcccaaacaaagattaaccgctgctcaagttctcagtaagcagctcttatcttaaaagctcctatatatatttcattgaactcttcttgacatttttgttgttttaaagatcatccatggatcaaggaggatggagaagcaccggatgttcctcttgacaatgcagtgatgtctaggctcaagcagttcaaagcaatgaacaactttaagaaagttgctttacgggtaattaacattcttctcaaaaccatatatgtattgtaataaacaatgcgagtcttttggtctatatatctcattggcatcatcaacaaacaggtgatagccgggtgcttatcagaggaagaaatcatggggttaaaagagatgttcaaaggaatggacactgacaacagtggaaccataactcttgaggaactaagacagggacttgctaagcaaggtacaaggttatccgaatacgaagtccagcaactaatggaagctgtaagtactctgttctttcttttgtgtgctatttatccattaagaaagatgtagagacctgatcttttctgtgtttgtataggctgatgcggacggtaatggaacaatagactatggggagttcattgcagctacaatgcacatcaacaggctcgacagagaagagcatctctactcagccttccaacactttgacaaagacaacagtgggtaagtaattgagcacatgtgtaacagttctgatacaatttgaaaccaaaaccaaatgatgctctgttccttgcagatatatcacaatggaagagctagagcaagcccttcgggagtttggcatgaacgatggcagagacattaaggaaatcatttctgaggttgatggagacaatgtaagcctctttcactatcacaaattaaattgatatgaacatataacaacaatctaataatacaaaacattttttcttataggatgggcggataaactacgaggaatttgtggcgatgatgagaaaaggaaacccagatcctaatcctaagaagcggcgtgaactatcattcaaatgacaccactggaacagataagtaagcacataagaacatcaagaagaaggcttgggttgctcatgattcaccaagagagaggagcaaggcttaaaaatgggattagggaggtgtttcatgttcgtgaatattttatgcttgtctactactgattttaagtttcagaggtttctcaatgtatcagaattctttttcaattcaattgtatgtgcattagtggtgtttgttaatttaacgggtgagtaaaaaagtaaaaggcattagcattgaccatggcagaaaagtagaaagattcatgattttgcattgtaactagatccta

SEQ ID NO: 939 - DNA, 2129 bp, Arabidopsis thaliana landsberg
ttatactgctattactttgttcgcttttattttcactactaccctgctagtttaatctcgatatttatctcattgtttgaacaaaagaactccgtgaattcgatccttaaatactgcaattgatctcgtatttgagagagtagttctaggtaatttgaaccatatcacagatgtctggtcaatgaatggagaggagtgagtcgatgaatttctcaccagtttatgaaaactggagtcatcatttcggtgcggaagactgggtatcgtatgttggaggagaaggcgatgagggatactattatcccaatatgtaaggagcgcctgattgggatgtttctggaactacactggaatactccttaccaaggtctgtgcactatagcacatctgaagggtcacactcaggaacaagaccacatgttcctgtgtatcaacccactacacacccaaatccgtcgctgccaagagaagttaatgaaggaaatgggaaaagtcataatgttcaaagtgtgctggagactcaacatacgttgggaatgattgagaccttgttgactcaaatgattcaacaacatcaacatcaacaatagatgcaggaaagccagcgtgctgaatctccttcggctaagttcttaaagttggttatgatgaagaaggatctgaagtttaaaggagagcaaaatattgttttagcggataagtggttaaggagcctggaaatgaattttaaaacttcaaggtgcccggaagactttaagggccacatagtggtacactttttagatgagtatggtcgagtttggtgggatagtgttgtttcacgatatcacgaccagcctatcacatgggaaatgtttaagcaagagtttgagtctaagtattttccaccagagagtgttcgggcgtatgagcaaatttttacaagacttcagagatatatgtacaatggaaggaatgctgaagcaatgatggtacgaaggtttctaataggactaaggcctaaaatttaaggacttcttcaggctgtgacttataccaacgtgagtgaattgaccaaaagggtcgtgaatgttgaacaagggattgagttagaaaagggagagaagttacgggagaaaagtccgaaggcaagaaggggaataatctagaatatcagcctggtgttttgaggactaatcagtcaggaggacgaaaccagaataatgatcgtggaaagcctaaggttggtaaccaaggaggacgtgtaatgaccacttacgatccgagagcctgctatatgtgcggaaagcctggacattttgcaagagattgctcaacggtttgtacagactaaagttacaaatatggcatttgttacttgttacacttgtggggagtcgggacatgtgtcaaatgcatgctcgaataagcatgggggactacagggtaaccgagtgggagcttgtttcatttgtagagacctagggcattatgctaacgcatgcccgaacaggcaaataaagcagtataaccaaatggttaaccacccaccgccagttcagaaagctaagggaccaccggtaaagaagcaagccactctagcaaatgtttatgccttagatgtagaacctaccaaaccttcatgacccgcaaaaggtcccgtaacaggttagtatgggttcttactttttcttgtttatgtgtgtttgagtaattgattgttgtctgcgtagtttactagtttaaatttgcatacatcatttccatatgcattagggacattaattgttggttgtaaccccacgcatgtattgtttgattcgggagcgacaaatagttttgttagttctgacgtggccgataagtttaaccacgggtatgagaaaagagaggtgaatgttttggtacataccgcgggaaatcagccacccatgcagacctgaattgtgttaatagaagttctagtagtaatccaggatacgatcctactggcaaaccttctggtaatgccgatggaaaggttcaaagtcatccttgggatggattggttattgggatatcatgccaatttggattgcgggcggagtagagtagtgttcgaattgagaaattgaccacaactcacttaatgggaatcaatccaagtatgc

SEQ ID NO: 940 - DNA, 1319 bp, Arabidopsis thaliana landsberg
  unsure (1)..(1319): unsure at all n locations
tgttgagacacttggtccctaaatttgggggtcacaaacaggacgagacaaaattcttgcggcctagtagcctgactttacagtataatttccagatttagtatgtgaccaactaaacccatccctcaagtaagtacgacttggacggatccctaagatgagtactcaatagggtcaatcaaggcttggagccggttcagtttccacatctttgtattttgatcaattaaatcgttaacatagagatggggatccctcatgttaagaacacttttggcggaccgcggaggaatcgtgggatctagggtcttccgtgatgcaagttaacatgccagatcctatggttcttcaaagtcccgaaacaagaagaggcttagcagccatgatacttctccatccataagaggggagattagaattacaaatatgtaagagatcgctatatcgaaagtatctcctctcaataccctgcttagaagagagtttgagaatctaataagacgccaaagttgcttagctataggtagatgaaattcttcaatcgttctgaaacccaaaccaccctccgagtgtggggtacaaatcttatcccatactatctagtggataccattgctattttcatnnnnnnnnnnnnnnnnnnnnncaatggcactactcaactttgagttaatagcctttgggaaaaggaaacacgacatcacatatgtcggaagggcctgcgctacaaatttatttaataaagacctctttgtcacctttcgacaagaatttggctaaccaaatattaagccgtttttgtaaatgaattttagatcaatgaattttttcaggtaagcccagagaggtccccatgcctccatccttatggattcccaaagttgtttttacagaattccgatttagattgtccacatcatgacaaacattactgaggacttggcagtatttaactgttgtcccaaaacctcaccacaaaaggcgtagaatattaattttctcttggccttgggatggatctgctttacaaaaaatgaggctatcatctgcaaataatagatgggaagtggatggacttgccctggaaatttgaaggccttgtatttgttcatttttaaggttcgtgagcagggcttccgtacacagaataaaaaggaatggagaaatagggtctccttgttagatttcccttgatggtttaatgaaacccctcggtgccccatttaggaggactttttatgaaactaaggagatgcaaaaactgatcaagtcaacccatttctgagggaagcccattttaacatgagagctcgtaagaa

SEQ ID NO: 941 - DNA, 2917 bp, Arabidopsis thaliana landsberg
ccttttttcttcctgtaacaatacggtaaactacaaaattcataagcccttatattttactcaaaaactctctttagtaattagctggaaagaattactgtaaatataaatctgaaaaggaaaccaagggaacccataacccagcgacaatgagcagatagagcttagagaatacctgaagcttcaaaattctatcctcaacggtgtcttttatagttatgcgagttacagtaactggccgagtttgtccaatacgatgtgcacgatcaatcgcctgatcttcggtagttggattccaccaaagatccaagagaataacatgacatgcagctaccatattcagcccaaggtttccagcttttagcgacatcagcatcacctttacctaataaaattttttttgcgcttttagagagcttcaggatcaatactccatgaacattccatatttcagagaaacgattagtatattgttttagaaaacatatctaagatatttacatcacttacatctggttttttactgaattctttaaccgccctgtctcttgctgctagactcattgtgccatctaatcttctgaattcaataccactttcaagaatacgcagctcaaccaagtcaagcataccagtccactgagaaaatattatcgtctttactgccccctggctaggtgaagatgagtgaagacgcattggctctacaatggtaacatcatcgtcatcatatggccgtgaggaagatggcatttgaccatgctgagctgagtttggactgtctggttgggaaagcgactgcaggatatcgaggacagctttaatttttgatgaacaaaagtctcttttttgaaataccgatctatcaagaccattatcatgagaggaactacagcccgaatcatcagaagtgcaatttctaagagaagattcagagaaaacaacatcacgcgcaagctgttgtttgcatctcggtacagggcacgtgttctcatccccagttatgtattctaaaacacattcatagcaaaatatatggccacacaacgtaacaacaggtttttctggtggctcctgcgaataaatatgaaaaaaaaagaagcaaagatagtcaggacaagacctaagaactagagaatagtgagcctgaggacatgctatttctaggtctcatttactctgcacttctgcacttacatggcagacacaacagatgggagacgattctaagcgactgagcaggctaactagatcctctttagggagttttttaacagcttcttctgatacttttccaacagaatctgagttatatcttttaacaagttgggggtggtcacaagcttggcgtagtcgcaaaagcatgagaagaatgtttgcatagttttgattcaaagttcctgcagcagcatatgcctgcagagaaaaaaatatcatctcacatacttgacaggaaatcaggaatcactgcaaaacatttttttcaacgaaaatgcctccataacctatgtttataccatatcaagttgctagttactacgtaagtatcatatttttcaaaaacgtgcagatcacagctataaaccaaggataaactgatagtttggagagcacagaaagagcaccttgaactgagaacgggaatcggattcaagcttcacgtagaaagaccgctcctctaccgaaaagtccacctggctcaaattaattgtctttggtggtagattaattataggctggccatcaagcaatgttcctagatcgcagatcagaagaagagtatcaacttatcagaaaccctcaaaaacaacacagttacttgagggataagaggagtaacatgaaaaatatatcatctaaaagcagaagatcagagtaaaatgaaatggaaaaatgcacaaaccgaagaatagtatcggacttaactttaggactatcattaggtaatggctcaggtaagatcacagctaatctcattataaagtatctaagatataagcagatataataagaaaatgcatgacatatgatataccacttttgtcaagtcctgtccctcaccaatccaaccactaaaaggaatagtgagatagctaaaacacctttcgtacggcgtagcattatagcccttagaacagcctgaagcttcttgtacccttgaagggaatttctggaaattggacccttaatttggcggcagaatgacttgtacacagcatatggatcatattttagaaacctgaaatagctgtataaatcatctattgtattttgtattggtgttccagacaaacaccacctccttttggctcgaagaccgcaacatgctcttgccacctgggttctatgattcttaattgtttgagcttcatctagtacaactctgaaccacccaacttttgctagagtaccagagtcagggtcagatgaatcgccagcattattgttaccttttttcttcttactcttcttagtagtacccactacatttttccgtttcttattgatggagaagccagaagcgagaccatatttttcagaatttttttcatcattctcatcgtcatcaaccaggggttgctttggaacttcatttgaaacaatggcgtaagttgtcataaccacatcatattttgctagttcaataggatctttggtcctgttaccgccgtggtatattaaaacagaaagtttggcttcatcagtaaccttctcatcaagttctcttgcccactgccgcacaacacttgctggacaaacaattaaagtaccagcagctggtctctttctgttgaatttgcgtgttgaagtactcgcttcttctcccttggctttctttatgcctgaatcaccattcacaccactaccatttgaagccttagactctggtttctcaaatgcattttctgactcatca

SEQ ID NO: 942 - DNA, 3880 bp, Arabidopsis thaliana landsberg
aaacgtttatttaattttatacatgcgaattttgcagagaacatcaaacaaactacagattcgcatctttactcatagaagagaagctatcctttgcttttcttctacacaaaaagttaacaaaatgaattttagtctatggtaaagtgattattgactcatagattgaaattatgaggaacacatagacttttttgaaatttagtaccttttcttggaaggttacgttacatatccgtaacattctcgctgtgttaattctttatcgattttcattgctaagaagactatattgacaaacacacacatcatcttaggtttaagaaccaaaaaaaaaagaaagccacatacaatctgtgttctacaatactatatagttttgcgtatgatcatgatcatgatcatcacttgaaagaataatctctgattctttttgttgattcactcactcccttgtcgtgctcatgtccccgtctcctgcttttactttctccttgggataaatctgcaggtttttaacagcgatcttgagtctataattcttttcacaaagttaagattcatatcaaggatgcataacaaaacaaaacctggttgcctttgtcttcgttaagattcaatgtacggactttaagctcgcctctgcttgtcgttaactcgtctaaaatctcagcatcgccttcttggacgcctctcttcgagtcattcgactgtaaaacaagtttattttggcattaaattcaacaaattcaaatattttaggtcactgtcgatgccttagatgacaagaaaacctccatggtttagtccaaagtccgggatcctcaaaaatgtagatattgctaagatatggactaacccggaaagacagttccagcgggtttctcggagtaccggggatttcctcgtactcagcggcatcgagttctcggagatgggccgggttaaagagcttcgggagaatgtactgtctgatagctattaagaggaagaaaggaaccggaaacatgattccagccaccggaatccacgtcaccccatagcacagcccaaagtagaatatctgcaacagtgtgaacgcagccattgacttgtaaggaactttctccacgaacgacgcgtgtgctccctccaagaccctgaaaacaacaatgcatgatcagtctttgaagagaaatctgaataataataacttgaagaaaaaaaaaacagatcattttcagaacatatacttgaatctccggcttgttggaacgaagagaagcgttaagcgttcgaagaattgatttcccgggaggctgtcgatggccatgtaagcaaagtatccccatagaatggaagtcggtatgagcttaatggccggcatagccaacactgcacctgccacaagcagtgactgcaacaagttgctaactctctgctcgttgactcgaacaggcaagtaagcgtcaaggtgcttctctggatcaaaaccactctcctcgtctccctctctttcttcatcattgctcttcattactgcttctttcagatcttgaagctcaattatcactgatggatctgtctgagcctggtttttaaaagcaagagcttatgattattctaaattaaatcttgatttttctttcaccggaacattgaattatgagtctactacttacaagtggacttttatccatttctatgaagacttcttgcatattctcgtacacttgtgaggatgtttctctcttcctgatgctttctttggctgtctttaccatcttcctccggatcaactgaaaatcaaacaggttcattaagaccagcttaacctgaatagtgagtggatcaacaactgagaagtaattaaacctgtcgtttaagaacagcaaggcttttggtatgcataggagactgagggaggactccatttgaaggaggcagacctagcaatccacatatcaacgtctgaaacaaagacaaagttttagagattttaacatatattttcaatgttttaaaggtagtttgattgattataccatgaaacccaacaagagaatgtcatagtgatacgctgaaggcttcttgaggttgaactccttctgctgagcgagctgcgaggcaacgctgtggtcaaagaagtaaagccctgcgatcatcaatgcgggtataaatgccgcaaatatgtaacccggagagacttttcccatgtcctgtacagaccaaatccatgtattaaaactttaagtttggctcggatgatgaatcaattatctttagtgtgctgtgtttttgtaaccttgatgacagtccaatgtgataaagaaggagagtcccatggtaaaggactaaagagtcttctcgggacaccagaggggagttttgatggtgtactaaaagacaatgctgtccaaaccacaaccatcaaaggaactccatagtctgcgatgaagcttctgtaccatccttttcaagaaaccagaaacttttagaccgatcatacacagaaatgaccaccaaagcatgagaaggttcatctatcttacctgttccgtatcgccaagaccttgcttttcgactcttcaaagcggtgtagagaaggccaaaggtgaaaatgaggccgagaagtccgtttgtatagagccactcaaacttatacttttctagttttgagtcctcatcttttggcatcccaaactcactcaccatacccttaatggcttgttgaatgaacagaacggagatcaacataccaaacagctcaccagcaaccctcgtaaaccggttaatgatatcagccgtattgaggattgccattacgaacagtaacagagccgtccacacacaaacccttccaatttaacaaccaaacaaaaccataaagaaaaaccacaactttacataaaaaagaagaagaggagaagagtcttgtggagtaattaccaagcagcccaagctaagtagagttgtttgcctaattctggtcttcctatagcgaagttgtacaagtaaacgtacattaagacagttggttctgcaactccaagtatcaacagtggttgtcctcccaatattgagtgtattactccacataacgctgttgatgctaacgtttctactgtgctcaacgctccctctataatctcctcaaatttaattcaaaacaaattcaaatttgtttttttctcttgaaatcagagaatgcaaaactaaaacccctcccaaaaaaaaaaccagaccaaacgtggataacttgaatacttttgttccactaaataaacgtgaacacaaaaccgtaaagaaagcaaagaaagatgacaactttgagagagataagctcaaagaaaaagacctgtgtcgcggctgagttgctccccaaaggcgataaccggaagagcggaagcgaaaaaaatatatgttgtgggtgctaaaatcctgcaaaacctctcaaaatatcaaaactttgttctatgtttgtgtcagatagtgattatgtaagagtgaaaccagtatttaagtacccgaaaccagaacggagaccagcgacccagtcttccttgtaacacaaggctcttcctctaagatctgctactatacctctgaatagcctcttcgagctatccactctttcttcctccatatccagaatccctcaaagactccagaactcgtcgcctctggtctactctttatatgacctaaaccacaaaaacaggaagctatatattatgtatgacatctagcaatgactttaaatctagcattttgctgactacatttaatacaaaataatcttcatattatatttttctaaatttgtgacgattccagtctttttccacctctcaatagaaaaagaagattaagctgttttatcttatgtacttactagaat

SEQ ID NO: 943 - DNA, 2818 bp, Arabidopsis thaliana landsberg
cagttggagaagggcgtcaagccatcgtgagggaaggtgggattccattacttgttgaaactgttgacttaggatctcagagagggaaagagaatgcagcttctgtgctgcttcagttgtgtctgtacagtcccaagttttgcactctggtcttgcaagaaggcgccatacctccgcttgttgccttgtctcagtctggtacacagagagcaaaagagaaggtatatactatattcttcttctgcggttacacgaaaacacaccaagttcagtttcttattgatcgagatatctgaatagtactgttctttgcaggcacagcaacttcttagccacttccgaaaccagagagatgcaaggatgaagaaaggtagatcatgattcatgaagagataccattttaacatttccctcgggaaattattttgctagaaatttttattttttctttcattttgccaagaacattagctggagaatagtgtcttctcttctgtctcggtgtctccttttgtgttgggttcttgttatgtaatgtgttaatgttgctgtgtagtagttatatgtatgtgcaatttgtgagtttcgagtatatataggcaatgaagttctactacaaaagatattcccaaactctaaacccagtattcattatatatctatcttacattcctccaattgtttcgactgcttgtggttgtttctttacagacaaaacaagtttaagcttgctacgtaactacttgtacataagcattggattgatgtcaaaatttgttctttaccttggctttggttgtgaagcaaaagagagcaagggctgaatgagtctatgatgtgatggactaactagaaacatggcctgtgatcgacgcagcatctcagccattgatggagtctgataagcctggacaaagctcgaactgtcccttgaatttcccctcgctgttgctctttgccatgagtgtgagctaagtccagaaagaatataagctcttcccgatgcctcgtacatgtgactactcctcattctaccttgcatttccttcagttccgagtccaaagcaacacaaaacctgtcacatgattttgctgcaaccgtctctgccaaaaccaatctaaaattctcaatggctttaacggctgcctctaaatctccatgctctgctaaagttcttgcttgggccattgcctctgcagctaggaatctgtttctttgcctgaccacttcgatgggaacaactttttcttcagcaacatattctggtcttcgaatctgaagcacgtgactttcaagcgttgtaatctcctttgtcaagggattaatgtagagacatctcagctttagcaatggtgtatgtccatcttcctcaacagggatgttgatagaaaccaagaaatccctctcttcatcagcataaagatcaccaagatcaaccaaccctgagtggccatcaccagttacaaggctagagtaactcccagcttttatcgagctaagtcgaacatttgggctcacaccttcaatttctactcgtagctcctgcactgcaacgcttaaaagtccaccaatgcactgtgcaagagcatcctggatcacagactcactttcaatgaaagaaaaggttccaccagagacttcagagactgagtgcatcactgaagcatcatgatctgatccaaaaccaaaagagtgaacagaaatctgaggaagcatcaccttgtaacttggatcaggatggttcgtagtatatgtatctcgcccgtcagacaaaaggataatgctggcaacagaatttctttctagcctatcttccataaccttggcaccttttctaagaccatcgacaatattggtcccaccatttgcaaccagtgagttaacagcttgaagggctagctgtcttccagcatcagacattcgggttaaagggaagagacgtcgatctgttgaagagaaagcaatcactgagagcctatcactggacccaagattttgaatcacaaaacccattgctcgtttcagaagtgctagcttagttcctcccatactaccactgatgtctagcactgtaactaaatcaattggcgctcggcgatactgagaaatctgatcaccagtaactgctttgagatgcactagtacatcaaaattctcacaagacttggattgtggtacagctgagacctctggatacattttcatgtccatcattcgcacataatcacggttctccttcttcaagacttcagtttcaccatcaaaaacaatctgctcttctaaccgttcatcatcatcgaaagtagctggctcgggatgcccttgggttatagctcgttgagaaggaggtaagcagcggaaaaggctaatggctgcatcattattgcacctgtcaaaggggtaataaggaagatccaaactcggcttctgtatagggatttccttccatttagctcggcacactgggcaaacttggttgccatgtttcacattcgaagcaatgcaatgaaaatgaaacatgtgcgagcactccgctgtgaaaattgcatgtccacaaccttctttcatcttgttcaagcatatagagcaagtctgctgtttaagaaagtaggaaaaaaaaagaaagaaagatcatcagaagaagacaaagaatctcacatgagaccaagtgctatttaaagaaaccaactaccacaaaaatctaaaagaagaaagagtccatgatctttggagacaaagtactatattctattttaaacagggcaaagttgatgataaatgttctataaggaatataaggcttaactgatacaaaat

SEQ ID NO: 944 - DNA, 8613 bp, Arabidopsis thaliana landsberg
agttttgcttggtgaagcatgacggtttacttatatagtttgttctctagatctagtcttagtttaagttttcttcactaattcaagatgaacttgggaagtctagacgaactggatatttggattagtttcggtctcgggagaattctcttcgttgttgttcacagatgatcggatacttctctgacgttgattaccggtgatcggaatctttcttcctgagtgaatccaaagagtcattgtttgagtgaaggatatgcttacacgtggcttcaatggcgtcatctttaaagggtgatatagtttctttcctcgtgttcaattactcattctttcatcgtttgaccatatctatctcctggaccacttgtgtatttcaataaggcctttcttttgtttactttgggccagctgtcatttaattggtttgctttaggttaaactcagaaattcttagctagtattcgatctttgttttgctttgtggttaattttctttcaagctttagaccatcctcaatggagggatctaagatgaatggggtttgtaagaaaatattataaaaatcaaaacatagagaaaagaagagagaaaatgaagagaggctcttaactaagagaatgaagagaattttttaatactcaactaaacaacctaagccacatgtcttttatacattggttcatttttttataaaattaaaatttaattatataataatattacaataaaataatcattttgttgttgttaagaggtttataataaaagcttatgttgaggatgctcttaggatctcaatggttgaggctctagtaaaagatttgggtaagattagattgcactcatggctccgttggtttgctcgttaagtgtaaatgttcttagagcgggggttaagtgagagatttagttttctcccttttagtattttatttttagttgaaattttctgctggagttcctcttttcatgagttccttgttagtttgatatgtttcttttgagtttgctaggaccgtttaaaagcttaggttcttattttggtaaaaaaaaaaacagatggaatgcagtgttaagggttgaaactggagatattgagttaatctctcttgaggaccaccagttgttgaaatgttttcaagacaatggttggttttcatatcgccctttctcatcagatcaagaagctgaagcgcactactattaccgtctgtagtgttccaagtgctctcttatgtggtttgagattattaaaagtttcaaaatgcaaaatatgtaatcgagtagaatgtgttgggctaaacaagtgtttggcattccatgtatggttcttttaaatgatacataaagttacaccttgagaaaagagaaaaaaaaatttaattgtgtctaaattcaaaactcctattttatgtgttatgatcttgtcacaagcttttaagttcctttactagaatcttgacatcaaccaccaaaagtttcccatagtagaagcaacaacgatatatattctgcaagttatctctgtcccacttttgcaacattgggctgtcgaatgaatttttacgaactaaattgtgcgcgctaacaaatacaaggaagccgttcaaatctaatgatacaagcaactccaaaacaccatctttattggaacagaagctaaacctcatatagatatatcaacccaacaccttccgaatcgcgtccaccagctcttctcttcttgaaagatccacctgcatcacacataattcatttagggggcctccaaaagctcagttttctctagtgtttgagttcataccttgtttagaagattagcaagtccttgtggcagagcctgcagatctgacgaattcccaatctctgcaagttgattcagcagtttctgtgttctcaactcgctcagcttctgctcgtagttactaacattgtctttccatgtaaagaacagttggtcgtccgtccaagcttcttctttcccctttgcaatctcggatttgcggaaccagtcctgaatcaaacccatagcagatttatatgataagatgtctccagaagcttttcttatgttcctcactagagagctctctgcgattctccgatagagctttttatagaagaatgaccgcgagccgctccattccacaacacttttgatcacaccttttgcagccattctcatggaagtgtcatggagttcagcaaatttggtagcgatttgggtataaactggtaaaagttgcttctctcgggttttaatctgtttctggagaagctcgatgtttgcatatgccttgtttcgcttggcatcttggatatttgctttcagattgattagcgtctggtccaaccttcccatgcactctaacagctctttccttctaaattttatctctatcatcccttcaggctcaagcacatttccacgagcggtttcatcagcgtacatttcaatataatccgaatttatctggctatcaacaaccacccatgctccacctcgcagttctcccatcattgggatgtacacaaacactggctgccgatatgttctcagattttctactatagctgaacccgcctgaagtattccttcaaaaagatctctctgcccacctgaaaaacctctccagtttgctatgataaacaaaggaagctgttcccggttgaaatccatgagcgcttgagctgtcttggctgctgaatcaggaaaccagacttgccctgcttgcggaaccactctttcatgagagtcaagctgtccaggatctgctgggatgacatgcattacagtctgtgtctcgacagcaacaactccaatgggtattcccccaagcttagctctaccagtcactaccgtccttgcccagccttcaagagtctcaacaaagctatttttatcaaagataccaccaagacatataccagtataatcgttaatcccagctatagcaaatcctggggcacaagagttctttgggatatactccacagttctctccggtggatctaaaggagcaagaacaggaagaggaccacccacatactcaggaatgtagctcagccaattgataattgctgatacgccttcaagatcatctgagactgtaagatgaacaacaccatttgtgcccatgattttcgggccacccagttgcatgtgagagctatagacctcacgcccaagtaacttgttgagtgtagagaagccagtcaagatgatcggctgatcaagtctctgtatgcaccgcatacctaggcgggcaagataagcaccaattccaaccgttcttccactaacaaaggttaaagtaaaagtttcattgtatgcctttgagtaagcacccgctatggccccacttcctgttaagttctctacaccaataccatcttctttgccaacgatcgtatcaatcacccacctagtttccccactagggagctttacttcatgggcaatgacagatgatccaatcctttcgtggtcttcagggcttaggtatatatactgaaaaccattctcaggggaaatttcatccgaccatccaactttgaagcaggctttgacttcttcagcaaccccaagtcgggcaccagaatttgctgccaagtaaatcaagggaagcttcttggcacaagcgagttcagtaacagcaaggaaaaacgcgtcctctctaggaccaaaagaaccagctttgaaggtgacatcattcgcaatcacgagaagtttccgccccataggaaactctggggtcgacatatctaggcaccaggcaaccattccaaagtcgttgagaccgggtggtctttcaaccagatctagagatgtacccgaagaaccttctggttttgagaatacaagctctttaacattgatcagagtatccttatatggtttcttaactcctgggtgttgtgatgcccacaacagttccaaggctgtcccaaatgcctgaaaaggaaagaaataacataaggggggttggaaatagccaaaagagtaagcgtatgtgtgaatcttatgaattcagtaacaaaccaacgggaagtcatagcaataagtagtgttactcctccttgctgctaaacgttgcctgtcgagatatcccaggggcttatattgatcactgattggggtttcatgcaaaggtcccttcttggttattgagtggtagattaaactgtttcttccaggagtttcaacttctcggtatatctgaaatattaaatcacagcaggtaagtcatcgagatgtgtactcttactctctgtattgcttgtacaaccaaattttttgtaagcggaacttacgtggacagtgcatgtacggcctgtcacgtttgcaaccacaaccctccaagcaccacatgccagtccagaggacaccaaccacagccgcacttaccactcgcacacgcccaacctatgcattctcactccaacagatctatgtatctctcgtgctgcttcttctaagatcatttcaactgtagtttcttcatcctccgcattcacttcaactctcctgtaagaaacacgttgatattattaggatattgtctgacattacaaacaataacttgtcaaggacacagccatagcaacctggggaaaggcacaagatcatctatctgctgctcacgcaatatgcaaagaaacatatgtgcgtgatctggtttcattgcagcattatgggcattcagttccagttcctccatggcatccatcaaagacctcagaacacatttcgacgtaaacgccatggagatcagtgtttggctaagctgcttatcctgcccttgctgcaatataaatccatcgttcattgtagcctgtcgaacaagagatctcaggaacatcctcttgattggcactggcttgtctgtaacagtatacagatgccattgacgatctcgagaaggcgtatattgtatatttgagtatcctttcagcttatcctgcatcagacaaacagtaaatagccattaaaaagaatatgatatgctttaacaagaaattcatcgtcatgatcataccaactcaaggtaaatggacagaggaggttcaagatgacgcagcaacggctcttctacataatactgtttctccaacgaccaatggaaagaatgtctcattgggtgttcgtccttcatctcgctgaattatacagctgattacaccatacaccgcagaacagatgcttgaactcacttcttcctctttaagatttttggccaacttgtttactctttcctgagcttggtcttcatccccactgagataaacaaaccagaaatgataacagattagctagacactatatcaccaaagctagtttatactgtgtcaagtacctgtcctgaagcagactcatctggttgttgatgcccacaatagcaatgtgcatcatattgccagataaaggagctccggcagtttcatagtcgttgtgctttgtttctctcaatgctgcacttattatacttggaagaaactgcaaagatttgattataaccatagccccccattttctcttactacgcttctcaaccaatcctttttcagatgtgtcgtgatcgtctaagccaatgttttttctttccatatgctcctctaggaaatcccaggaagcaagaagaccagaacggtgccactgcatcctcacgctatctttaacgacgtagggctgatgacaagagtcgggttaaaatgaagtcaaaattttctgtaatcaattgcagtacaaaaagaattttgaacaataagggtgcggaagaatgaactcgaacctggtataatctgcgaatataagtctcaacaacccgtctttgaagtgtgtgatcgctatggtcaaatagtcccacgagagcgtcttcaacagctaaagatgcgcttacaagatcttctattctttcattaatggcacttttcctcttgggagtatccatattttctccgtcctctgtaaacatttctaactctgaaaggcttctagcaatgtttgaacgaagctcacttagtttggtctgttcaagtaattgactcgccttgagcgccaactacacacacaaactgatcattagttgagagtgtagacaaaaatattataaaacataaagcaaccaaacgcacctcagagtagttagtatggttaagtgttgagaatcgaataagtttatctctgtaagcagcaggattagggtaaacaagctgctccatgagccggagaacgagtttgtttttgttttttatgccctgaaaagaagaaccaattcagtgacatagtcatgacggaaagaaaaacctggtctgagaaagatgatcacagacctggtgtgagagcactatatccacaattttcaacagatctttcttgtatagctgacgcatgcgttctataacatcagcctattcaagaaaaataaaatgattatttagacgcctcagacatcgctagtaaccaaaaatctgttaattagctattgagccatataataccagcatgttatcattgaataattcttctactgatagatattcttcaaagagagaatgaacaataacacgggcatgactttctctaccaccttcataagattttgcaaggctcatcaatggttcaatgagcctttcaagggcacctctctctttctcatcacaagaagataaatgtgcctgttgcaagaagtagacagaaacaattcagagagtaagaaacaggatggtaattctaatggaagaaataatagtcaattacctcaagaatgccttttaaaagtttggcagggaaatcggtggtcaaagagtttctggaaatactctcaaattccctatactttgattctagctgataaagagttttatttagatatgattaaaagtcttgaactcaaaacaaatatcaatatataagaaaccggattatgaatactacacaggtgtttaccatgttcctgagatttttaggtagtcgtgtcgccagaactgcaaagcactcttgccactgaagaaatgggagttcagggctatcaaggcaattaagtaagtcttgaacaacctgcaacgtatgagctatctcatagtcaaataatctagtagagaagttggatcaaataggaaaaacaaacagtgtttacctcatctactttatgctcatagccagcaagaatcatgcgtgcagcatttaatgttgcggcacatctctgatgaactctaccggatattgcagttggaagccctaatcttgggaaacttccatggaagggttcggcctttcttacagcagaaggatcatcaagatcaagattggcgataagttcaccagcctgtgaaaaaaataatggatgggttaatcaatttaaacagaactgtaggctttttgtttagcaatgaagtgaacctgcatggcttgtccttcagacattttaaaatggataactcctgaagcaggtgaaagaagtggcatgcacatcttcatgacctcaacttcggcataaggcgtatcagcgtcaatattgctgttgtcagaaaccaaatacctcatcaacttgcacggtgtctcagccattaactttgatggatcatggtcattctgaataagccaaaattgacagacagcttaaaagctaaagatgacttcagagaaacgtgaagtaaaatggtaaacacacaaaaaaattagcagaaacctgtagcaaacaagttcttccatcaatgagaagacgagttcctgcagcttcttcctctgcatatatcacatggcttttgccatccaactgcaatgacagtgaaaacaagaaaaggaagtgagattctccagaagtttttttctgcgcgacacatgtatgtccttgtcttgtagtatagaacaaaggcagaaaacttgcctgcatcaacagacctccattacgtagagtgtgtatttctgctaccacttctgacttgttcattcttagcctgtaggttcctgatccaccccggactacatcaatctagaacagttatgttcatgttagtaagcctggtaacaatatcttcagcgcaaaaataatatggcagaggaaaatacgaaattgcagagacgtaaaattttgatagtaggcgaataccgtatatttacttccttcaatattcagagacacttgagaatgtacaagagatatatgctgcaagttaagagagaaaaagtaagctacaagaacattactagaaaggcaaaagagatccctggtattggattacctttggagggatttgccccttctccagataaccaacgtaatctgaaaccacagcagcactggtcgctgatgctttctggacagatagaacatttcgtcaccagatagaaacttttcaagacaaataaatctctgagaaagaggttcttacatagagagctccgccgacaacagagagataccatggaggcctctcagctctgacccgcatagcaatcctactatccaaccaaccagtgtgaattttgttatcacggtaatcagaagcctggttgacaattgaaatgatcttgtcagggtattgcatacacagagtgtaagtttgtgtgcaagaagaaacgtacatgtaaaaggtcgatagtcgaa

SEQ ID NO: 945 - DNA, 1393 bp, Arabidopsis thaliana landsberg
ctgaagagaatatggcaccctccagatgatagagattgggtgagaatctctttgaccatgtttggtgaattactgacctgagtaataaactattgcatccatgtagctggcttgatttgatgtagtaggtatgttgtgatgggtgtaacgtatgggacgggttcatgctgaatgcgacaacattacgaatgagcgctttaaggtgcagttatacatcgccgtgcatcttatgttttgattttgtaagtatgaaagactattgtcgaatgactgttctaatttggttatcagcacaacaattactattgccctgattgtaaaatccaacatgagcttgcgccaacaatattagaagaacagaattcagtgttcaagtatgttgttaacatcttatgttctctcactttagtcttctggaaaaaaatatcttctcctgcttttattatttgcactgttctattgttaattctttaatttgcaaaatatcctcttcacaacctctttgggacaggtctacagaaaagacgacaggactgagctgcctgatgcgattactgtagtctgtaatggcatttttttttttttttatctgaaaacgacaattctgcgttctatcctaggcctctgttatcattctcttgttgttccagagattagaacaacacttttatcttgggactattgttttcagaattgagtgcaagtgtggttaagtgcaagtgtggttcatgtgggtcaaggaagcagtcaccaagtgaatgggaaaggcatacaggctgcagagccaaaaagtggaagtttagtgtaagagtgaaagacacaatgcttacctctataaaaatgggtacatccgttatgtcttggaatattgagagaaaagcaaaaacagagtaagagacatttgtctcagagacatttgtctcttttcttgtaaagaagacaagaacaaaactttgttttattaaaaatgaaacttgttgttttactcgactagatacacacacttatgtacaggtcttaggtacataaccgaccaaactaaacattgtgactgttgaaactaagataaactgcccaaactaaagttacgactcttacaaccaccttttgctataacatagaaacttaataatcaaataacatattaccaaactcaattataaactaacattatgcttaactctctcataaacaggccctaatatatacccctgaattttccatgcaaataagatattacagattgtgtgcgtccgaaatccaaacacaagccgaacagagtggtgtatttgattctcaatctgcagcaagatgatggcttatatacagtagatcaaacacaaaggtatgcttctagggatcttgtttattattggacattggagagtcgttc

SEQ ID NO: 946 - DNA, 15412 bp, Arabidopsis thaliana landsberg
  unsure (1)..(15412): unsure at all n locations
gaaatacatgtaactaagtcgtagctatacatcttttaaaaatttcgaaaaaataaattacgaagctgtggccacgttttttattcgtgactgttcgtaactattttgtcatatagctacgaattttaatactcagctacgaaaatttatgtggttatacatgttttttttactagcaagcagtcaaaagcccatcgaattgagcaaaaatcttgcaagatgatctcatagaaagaaggtaattagtctcacaaaaattatgatggcaagtattgacatgaagaatcaagataatcatattacaaatcaaaaagtagatgtctaagaggaaaccgtcatgaaaaaattcctttaccctaatccacgtcaccaatctacgtcatttaccctaatccacgtcatctgaaaccgaaaattcctttaaaactttcagtttctatttttccccacgaaatttcactgttcatccgcgcataaaaaacaaacatcgctctcttctctcgttcagtggatggaaccctaatttcttcgccgttctctatttatctcgtctcttctggccgaaactctttcggtggtatcgaatttcaagtcatcaaaaatcaaaactcaaatcaaagagatctatggaattctacatgattcgttacaggtttgacttgaatcaagaatagctactcttttactttgattttacatgtatctcgtctcttaatcaatccatttggaaacatttctacttctatcaatgttttgattcatacggtttagtcttcctcctatgtatccttgatagtaggtttttactcaattaatcctaaaacactatcctatcgttgtagtattttaggtgtcaatccaaatgggtgtgatgcagacagatgagatatgatcagaagttgctaagtcaagccaagcaataacaattttgaggtttttagcagtcccagaaaacatatacaataacagaattactaaaattactcgaccacaataggctgatgctagaagcaggatgtggtcgattaacaggtcgagtaacagacaggaaatgagacaactgtactcgactgcacagtctgttgccaaacactaggtgtggtcgagtaagttggtgataacaggtaagaaatgcaaaaagtgagccacatgcaatgagaacgattaaagcgatagcaatgcacccggcaaatcaaatagacgagaaatccataaggatggagtaatcaaatggagtggtatcctagcctattcagatggttaacaagcgcaatcaagctatctctagacaacaggttcaacaacagattaattcactcgcgtgatagaaatccttaagcaaagctagccaagactaattcccattaacggaatctaactatgcaagcaataagaaccgattgataaagtcaatacacactctaaacggccaatcccttaggatagatataaatatcttaggaactagtggatcaagcattccatcgaacacattctatgtgtaggaatactttggatcgaatatctcaggaaagaaataagcagtaaacacaactagtcctaaagggattcaatcaagtctaaaacttaaccattctacacactacggatcccacaaccattctatctcatccctaagaattctaagtcactactcaaacaacatgcttaaagacataaacgcaggtaaacgataatattgcataagtaaagagataaagagtagtgaaacaagatgacagatgaaatcaaatgcggaatctaaataacttggaaaaatattgaattacaggttgtagaagcaaaagcggcgcagccagagtaaattaaaacagaaaataaaactgaagcaaaaactcaatgtcgactagatgtctccggacagaaccctaagacatctatttatacaaaacgaaataaaatgatagtagacgggccaataacctaatcgcccggcccatagaatgataatgggctgagatgggcttcgtgatccgatggaggtccaggccgcttccaaacactttgtcttctcctcttctcttccttgtgctcagcttgtctggttgagtgcggatttgagtagactatgaagatgtgatcgagtgtccggtcgagtgatggtgttggtggtgagtgatgatactcgaccagggggtcgagtaacgtggtagagtgaacagccgagtgaggtcaggtggtgtggcgaagtgatactcgaccagggggtcgagtggcgtcatcgagtggcctgagctgaggatactcgacctgggggtcgagtagatgggaagaatggctccaaagtcactcgaccagggggtcgagtagatgggaagaatggctccagagtcacgacctggtggtcgagtatggtgttggatgcacacgacctggtggtcgagtatgtcttctagttctaggtcgtttcttccaatttgctcgcaaacagctccaaatcacctgaaaacaactcagaaatgaaatatgtatgcaaagctatcctaatcatgcaaagtatgcaagaaagatgagaaattatataaaatagtgatgaatgatacgaaactggactcaaaacgatgatgaatggacactggaaacatgcaaattgtagacatatcaactcccccaaacttagtctttgcttgccctcaagcaaataagaagacatagttgaaggagaggtttgaaggcggggactcagaaccaaagcatatgatagagcaaataaaatcaatgtccaagttggtagttctaagatgcgatatgattgaattttactcgaaaacgttagccatgccttgttatcaatcaatccgtctcttatactcgacctacacatgctttcaaatctaccaatccctttaacattcattagttctggaacgtgaatcaaacaatgcatcatcaatgaactcatttggctaaggtgaaggtcaagagacaaagatggtcccttacagaataggcttaagtaacaggggatctctcaagaatgattgagctttagtagaatgctaaaggtaagttccaagttatgcatacagagataagatcccatctacccagagtataacaatgaagctctaatggtaatcccaactccagtcccaatacaagaacttaactctaccctttgcactcatgaatctttcaaactcttttcatatcattcttttcttttctcttaactctaggagaagctttctcaacactctgatacacctagcggatttggatttctttaacaaataaggttcctgtttttaatctttaaaaccaaaggcttttaacccttcttctttagctaacaagaacctcattcttttctttaacattcccaaaacctttactagattttttccaacttctttagcttacttctcctagaattctttccctttccttatcaacaatgaattcacccttttcttttaaacacatcccaacccatgatataagcgcccacctagtcctatccagtccgaaaaatgtgaactagaactacatgagacactatctctgtcgttacgaacctaacactttctaccaagctctatcgaaataagacctcacaaacactcacaagtgatatagggtttgaaagaaagtttaggtttgggttcgggttaactactctaataaggagagtcagctacttggactaacaagagtgtttaaaatgagtaagaaaatccaagtattttagggtatccatgaggcgcttacctcagtcgaagaataaacggagttggtcgtcaatggctgcctgtgattgctctcaggccgtagacgattcgccttgttctatgtcagctccaacatgtggggactcgacctcatcaactctgtggcggccagcaccgctttgacgatactcgacctctctttttctgttttggccagcaccgcggtcgcgttaactacgagactgcagaagtcgtcctctcttgctgctagatcgagtgagtgtggtcctcctcttgaacgttgcgaagtgaccaccatatgctgagccatggcaatgcagcaggataccttctacttcatcttctgagacgcatctcctgtagatcttatctttatagagagtgtaaagataaggctcatcccagtagtaatggtgtatgtctctgaaaaaattcttcctttcataactggtcaagttgggaggctccactccgcatgccaaggaattgacgtgatcagcataccatggagatcctccttcaacagcgttcagttggtggaactctctcccactgcagcatgaaatgacacttttcccaattgagaacaaggttcggctttttgcacctgggcaataccctgccaagattcaacaaacatgaggagaaagaggggccatagaccgaaaaatcgtccatgaagacctccaccatctcctcgattaaatctaaaaatatagaggtcatacacctctgaaatgttgcaggagcattgcataaaccaaatggcattctcttataagcaaaagttccatgaggacatgtgaaagtggttttctcttgatcattagggtgaattggtatttgaaagaaaccactatatccatcaagaaagcaatagtatggatgattggctaagcgttcaagcatttgatcaatgaatgataaaagaaaatgatctttcctacatgcagcatttatcttcctataatcaatgcacattatatgaccagttatagttctagtaaggatcagttcatccttttcatttttaactacagtcattccaccttttttagggacacaatgcactggagaaacccaagtactatcagagatagggtagatgacaccaacatcaagcagtttcaaaatttcttttttcactacttctttcaagttgagatttaacctcctctgtggttcaatgctagaataggattcgttttcaaggtggatcctatggttgcataaactaggtgaaattcctttaatgttggataatgaataaccaattgctctcctatactttctaagctcagataatagcaggttcacttcatcatcatttaactcagcactaatgatcatagggtaagtagagtttggaccaaggaatgcgtaccttagacctttaggaagttgtttcagatcaaccttcggtgccttgagttcagaccagtcatctgaacttgggatgatcggctccccaaattcgttggcagacaaggtcgagtagctggtcgagtatgtgctcgagtgtgcaggttgaactcgtgttgacccttcttcgctcattaccattacctccgttgctggtccattaaattcctcaaagggttctgattcttccatcgctttatgggagtctaacagcttctggtatcccaatgtttccaaatgcagaaacccatcttcaccacttttggttaaagcactgttaagatgatcttcttcnnnnnnnnnnnnnnnnnnnnnnnnnnnnnnnnnnnccatttcttcgatccaaaagagttgtcgttctatggtaggcttcttcatcgcgtctttgacatcaaaggtcatcctaaagtctttgccagggattagatcaatcttccctttcttgacatcaatcatagctcctacagttgctaagacaggtctccctagaatcaaagggtccttgggttcttcatccatctccaggactacaaagtcagttggtatctccacagcttcgatcctgattggtaggtttttgagcaaaccatgagggatccttactgacctgtcagctaggatgagagatatattgcaggatttgtattgagtgaaccccaatcttttggtgatagagagcggcatgagactgactgatgctcctaaatcacataggcatctgttgaaagccaatggacctaaagagcatggtatagtgaatgaaccaggatcactaagcttcttaggaatgatcttcttctctatgatagcactgcattcatgactcaataccaccatcccttgcactgcttgaattctctccacgatcaagtctttcagaaacttgtgagagtctgggattggctctagagcgtcaacaagaggtatccgcaactcaacctccttaatattcttggcaaacatagccctaaacttatctgccaacgctttcttgtgacggccaggaaatggaagttgtagtttgtaaggagtaggaacaaagaccttttctttgttcttgacagcaactggttttggagcagttggtgatgccactgggaagataggtcgagtggttggtcgagtaacgtggtcgagtggcagcccgagtggttgctcgagtggatgctcgagtggttgctcaagtgacaggtcgactggttgctcgagacttaaatcctccccatcttgatcttcactgtcctcagtgattgtctttggttcctccctagttggaagtgcttttccactacgcagtgtgatagcatgagcatattcttttgggttctgaattgctttgcctggtagttggcttgtctgttttggagctgaagaagatacagaatgtccctgtaagtatcggactttggtattcagtgtttccatcttgacattgagatcattgtagctacactccagcttgttctgtaactcagatatcttctttgccatctccatggagccagaagcttgcccgtgaagcagttgttgtaccatttgtttcatgtcagcatcaggagtagcaggaccttggttttgctgaggtgcaaacccaggtggtggttgcggctggtaattcccctgaaattgctgcttaggagcaaaaccttgattgtaaagaacaaaaggtttgttctgaccttgttgttgttgtggaggatacacttgatcttgaggattagcaacgtttgtgctgcggtaggagaggttggggttgttggttttgaagttgttataccctttgtagctgacttcttccaactggttaccctcccatcttggacctgatatttttcgtcatcaacaaggaagtgcacatgcttttgctggctaagaagaatcctgtccagcttgtcatacagcgctttgatctccttcctgtgtttgtcatcagagtcagctgtgcttctgacggtcctatcgcagtcctcgttgtaattaccatctgattgaacaaggttctcaaccaattctcagccttcttcaacatctttgttctggaaattcccattgctggctgtatctagaagcaaaaaaatgtgtggtagaactcctctataaagagtgctgagcagagaggctttagtgaagccatgatgagggcattggttggtataacccttgaaatgctcccatgcttcatagaagctttcaccagccttctgtaaaaagccgaagatctcgtttctgagtcttgcagttctggcgttagagaagaactttgatagaaaagccttcttgcaatcatcccaagtggtgattgagtcatggggcagattcttctcccagatgtgtgctttgtcgcctaaggagaatggaaaaaaacggagcttgaatccatcttcactgacaccattaatttttgttaggttgcagagcctatcgacttcatcaaggtggtcgagtggatcctccattggcagaccatggaatttgttcccctgaatcatcgagatgagaccactcttaatctcaaagttgttgttctagatagcaggtggtgcgattcccttcctctgacggtgatcacgtggtgatctccagcaccaatgttggcatggccattttgctgattctgttcttcagccataacgagtggttgctgaggtacagggttgactgtggttctcctttttctgatttcgcgggctgtgcggttgatgttgtcgttgaaaaggaggttctggttgcctgttgaacgagttcgcatacagtagaggtggacctggttttcatatgtagctttgaggtgcgtccaagtgtagaataagcaagatttcccttgtttggtttcatttcgtgcggtccttcagaaggtattcaacaagtagttcagcgaatagttctgccggtctgttagcaagtacatcagatatatgtacttgtgatatcaacgaatcattttcttggtaaatgattcctgataataggtttttagtcagttatcctaaaacaccaatcatgtcgttgtagtattttaggttgtcaatccaaatgggtgtgatgctaataatcaagatgcaatcagaattcacagagtcaagccaagcaataacaggttttggggtttctagcaatcctaagtgaacatgcaggaaacaaaaattcaagtagaacagtataaacactcgaccaacacagcttgttgccaagcactgggtgtggttgagtgacaggtcgagtaacaaacagaaaatgtaacagggatactcgactacacagtctgttgccagacaacaaggtggtcgagtatcaggtcgagtaactagcagaaaatgcaaaaactaaacaacaagaagcgtgatgcagtaaactataatagggtaaacaaagaaatcaattggatgagaaattcccaaggatggggtaattgagtagtttcgtttcctcagtttacaagtgattgacaagctcaataaattatccctagacaacaagttcgataaccaaatctaagtgccaccgcaacagagaccctcacgttaaacttgtcccagactcaatcaccattgatgagagctaacctaacaggaattacgaatcaacaagttcaagccaaaacgctccctgtaaccaataccttggtacaaagccacaaatctttggaattagtggttcagacatttcatccaacaccttttgggcgcggaaatggctgggctcaaattccaattaatcagaaagcaatagacattaagaacaactaatccagaagggatctatcaatcaatactcaatcacctagcatactaagaatcctacactactctaacccatcctcagaaacctattcactactcagacatcataacagaaagcataaacgttgaacaaattaaaaacttgataacagcagtgtaacagcatgatgataacagaatgaacaatagtaaacgaaatcaagaacagaaactgaatactgaatactgaatagataaagagaaatccggattacaaaaggtttagaacacaaggtctgtgaaataaaactagataaaaacttgtttgcgaaaatgtgaagtacatgctacttatagcaaaacattccgaaaccttaatacttaaaacgacgcagtattgggacgaattaagaactgtactcgactcaagtgataaagtgggaggtcgagtgaatagctggagtcttcttttcttccttgtgctccagtgtatggttgagtgcggaatgaagaagactctgaagctcgcagtcgagtgtgtagtcgagtggtagtgatggtgatactcgacttcaaggtagagtggtgagatcgagcggttgtctggtaatggaggtgaagacacttgaccccgaggtcgagtggtaaggtgaagtggtgatgtcctctactcgaccagggggtcgagtgaggtggtcgatcgacaccagtttcggcccaacaaaaatcctagacgctttgaagtttatagaagatcaagtttgccccagaagatttccttatttgcattattaggccctggacgtttttagggtctatatatattgtttttagacctaggtttcttatatcaagtcttttatcaagcttttgcaaaaccctattgtgagagacataagctattcatcgatttgttttcagagtttcattcagatttatatacagtgaagagatcccttctttccccttctctatttactgtgtttaagctttcacactcaaatatgttgtttgcttcatccaatatgtctgagtaatatgcctgttaggaatagggtttctcattagggattcatatggtttagtagattaccccatttgctaggttatctatagaattcttcatctttaattgtgcttaatgctagatttagagtaattaactagatcttgaatccataggtatctgtagttggatttattatttgatgagtctgggtgtgtaataagaatcggcctatttaataggtgagtaataagaatcggcctatttactaagatgaacaattgaactcgttaagaatgcatatttaggttgatagtttctttgcttctccggttattattagctatagatatagggagtttgcggcacgcccatcggttattccataattagagtttgagtttaagaatggttcgataacaacctagcattcattagatctactaaccaatagtttcctgagaatacccttttcctagctatttattaaaccaaatcaatctgttgtctttttactttgttctcttttactttcactattaccctgctagcttaatctcgatatttaactcactgtttgaacaaaagaactccgtgaattcgatcctaaaatactacaattgatctcttatttaagagagtagttctaggtaatttgaaccataccaaatttggcgccgttgccgaaattcttgggaatcatcattgagttttgtttagagatttcgtctagtttttacttctattttgttactcacgcgtttcttgttttcttcttttctgtgtttcaggtgtatgcctatgcaaacaaggagcacaaaatagaaggagcttatcaacttgtctgttctagacttgggaaaacttgaacgcaccaaacgaaaaactcagaaattagcaatgactgacagagtcatcagagctgatgtagaaggagttttgagagttgaggatgggcaagcctacaatgaggctggtcagagattggatgatcatggactcatcctacctgaggacgccaatgaggatcaagcgcgcctcaatgcgcaaatagctgccagagacgcagtagggctcgctgtcgatcgacataacagaggtgtcgatcgacaccatcgggagcagcacgacgacgcgattggtgtcgaacgacacaatagaggtgtcaatcgacaccaacaccagattcctgcagctattcctccagctacggaaccacgtcgtactcttggggatttcaacaggccagacctgttctatgctaatcgatcagcgattgtacccccaccattccagagaaacgactatgagctgaagccttgctactttgctttagttggccagcatccgttccaatgcttatctcatgagcagccaatggatcatatcgagcgatttgaggaccttgttgtcagcatcaaggctaatggagtctcagaggactacctactgtgcaagctcttcccttattcacttgttggggaagcaacttcttggctgaagcaacttaaactaggttccctcaagacttggagaagcatcaagatagccttcttgaacaatttctacgatgatgctaagtatgaggagttgagaaacaagctgtctacctcacacaaggttcagctgaagctttcaaggctgcttgggttcgtttcaaggagtaccaacgagactgcccacatcatggtttcagtgaggtacaacttcttggtacctttttcagaggagttgattggagataccagatggctctagatgcagcgagcaatggtaacttcaatgcacgttaccccgctgatgttacctctcttatagagaatcttgcttgtagcaacaacactaaaaaagctgacttcgagaggaaaaagatagttgaagctgtttcaggcaatcagatggcaaaggtgaattctaagctggattcggttcacaacttgcttacagggaagaagcatgtccactttgcagctgaggatgagaccattgagcgtgagactgagtcagaagagggagtattctacatcgatggtcagggctataggaaagagagaaaaagagttcctccaactacactcaaaagcctgctttccagaagacctttcctcagagcaacttccagaagacatatggtaattcagctaccaagccctccctcccccccctcccctccaccctcagcagagacaagaatggaatcgatgcttgagcaaattctagagagccaaacaaagcttgttgtggagtttaatggcaagtttgatgctgtctacacagatcttaatgggaagatcgacaatctaagatctcatatatattagccttctcctacattagcatttatcactgcagtcacactgcgaagtggaaagcagctaaacccaattctttagcgtgaacgttcagctcagacctcatctatcccagttgtagaaaaagcctcaatgtcgattgatacatcagggtgtcgatcgacaccaattgatcttgacggctctgtatttcctttatcgtgtggatacgatactttcacagaggaggaggaacttcttcccgatggtgtcgaacgtcacccacctcatgtcgatcgacaccaataccacataggcaacccagtgctgacgtttgacagagcaggatcgatgccacacaatagtgtcgatcgacactcacctagtggcgatcgacacaagacttaaactgccccaatatgccttgcatctccatctgttactatacaagtctacacaccacaagttccttgtctattacctcgacagtccaagtaggagattcctgagatgcattgcatgggtatcatggatgagattctacttcagttgcctccagttgatatagagaagttgtcaccctctcttcaaagtgatatgatacgagatgatgctccagagaagcaagatgacaagacaaagataatggttgtgtcagaacaggtactcagcaacagcaagcgtccacatgaggccaatttcagattcgttgctgagaatcaatctgtagagatggtgttgatcgacaccatcacctgtgtcgatcgacaccatcacctgtgtcgatcgacatcccaaacgggctaaaccagaattgtataatgaagctgctttgcaagttcagatcacttttgatatttgaggacatgttgccacgtcacccacatcacctctactccttgatccacctcctaaacggctaaggtactcatttcctcctaaacctcctgatttcatcaataagagtttaaaatttccaaaaactgttttacggttaagcaagccacgagtttctcgtcgagcacttattctttcttttgatgattgttcaggaaaccggagtagaccacccatacctctgtcctgctctgctgacattcctcacttccttggtagaccgcacacaccgactgtttatacaccaccttggatgaagcgaggttctactaggaagtatttacttcctccatctgatccacctgatccccaaactccaccaaagtaaagctaatgactctaaacaagcgcttagtgggaggcaacccactggtttgctttttcttttccctttctttctttcttttcttttatttttgactaggtgagtacccacgctacgcgtgggttgttattttgaaaattgtttaaaaagaattatgcttaactattttgattactaatttattttattttcgtatatgttattatgtagttaataaagttatattcattttatgtaattatatttgtatagttagattcacttttgattcaaatatcaattatttttttcatgtataaatcttcttatctatatacccaaaattctaatcttttttaactatcaagaattacttacatcaataatatatgatacaatgatatgcaattatgttacttatttggtttgaaagttgcctaacttgattctaagcaaacaatttattgtttcatgtattctctcctaatctaatattccaatcacatcatgataaactcatggctaagtattagattgacataattttaataacaaatgtataactaactactcatttgctttaaaaaatttcacatgaaaaaaaaaaagaagcaaaaattaaacagtcttttaaatcaacacttttaggtttctctctttacatttgcatatggctatattggagagagtgtcgtatattgaattttttggtatatctaacgtctcaaaagaccattacttaaaaaacatgcatgttattattaatgttaccaatttatcataaagcacaaaaagaccatgatcatatcatgtagaccaaaaaatgtaataataagaaaagattaagttaaaattactaaattaaaaaaggttaagtagcaaataggtaagttgcaatacacaaaattttctagccgttatcaaatactgactattaaaaaagagaatattacactgtgggacacttttacaaaaatatttgtcgttttaggcacttccaaaagagaaggcactttggcttgttaaattgtccaatttgccctcaatcttattttctctttctctttagcaatatttcttttattcttcaccatctcttttacgaaaacttctcttggtcctctctctatttttccagaatcaaaattaaatattataggacaacttttatattcataattcaaaattcaaatttgaatctcatagggtttatcatcatcctccctatctctcaacaatctaacggtgacacaaaacaagactatctttgattactaacccccactccgtttcctccgtagcttccaacgtcacctcctccttagccacctccctcacggccaccactaccgtatccttttccaccacaacctctactatgtctctcgtaatcaccaccgcctcctccatttccgccaccacctcctccgtattcattaccgccaaagaataaattatcttaattggatagtcatagccgttggtttttttaagattgtgatttattttgcaatttaaatctttgttttgatataaacttgagattcagttcctttaaaaaacttcttcttcttcaacaatggtggcttgatttgatttttgctctctctcatgggtcaaatttgtttcatctacgtagcatcaagattacggttaatcgaatctcctgttaaaatatggacatgatatatagaatggatatagataagtaaaaatgtttcccaatggatatatttaaatggactcgttataatggacaccaaaaaattgtttgttaatttttctttcagtttgcagagacctccatctccaagaccttatggacatagaacttttaccaaattcctaagatagatactactgtacagaatgatacatatagaatggtatacatattatatgttaatcttataagtataccatcgggaataacgttgtcgggaaaccatcagaagaagataccgaccgattttcaataaagttctgatgcaatgcatgtcatcaatattcgttagaaaattgtcggaaaatatttctggacgaggatctgacgatcattt

SEQ ID NO: 947 - DNA, 2318 bp, Arabidopsis thaliana landsberg
attattctggtggcgtatagataaatgttggttgtctgtggtttaggaagattaccatgagtctgcaaaatgtatcaaagtcaagcaatgcccttgagggtatccacggggttcatgtcacgtctcattctcccttctcatttgagaagacaactcaagttagtgactttcagaccaacaccaaatcctttgtcatggaatcaaatcaaagactttccatcgagtatgttacataacattaggttgtgacattctcagcttttgaaacggtttcagttactgatttggtttctctgttacagacgtttttggcagcaaagacctccatgcttaaggccaatctgttgcagcattcgcggtacgcttcttgttttcggtcttttatctttccaatctcaagatggttgatcggtctttttattatgcaatcgaaacatatgacaggtgaccagagtgtcttagaaacagctgctaatgtggctacttcacttcctttcatcttcctcggaatgcaggcaccaaggtaaaatgttctctttgcaaatatcatttcaagtagagtttctctgacaagatactatcccatgtaggaagaatctgaacacaaaggtgtacgcaaactccctaattggagttggaattgcgtcgagtctgtatcatgcctctaggggaaagttgaggaagtacctgagatgggtagattacacaatgatagccacaacaacaatagtaagttccactcttcttaacccatctccaaattcttctttaaccaaatataaccgattaaatctggttatgtggacagtgtctctcaagggctctaaggaatgagaacccaaaatttctgatggctgcatcagctttagttctaccttttcaacctctcatggtctctgccgttcacactggaatgatggaggtcgcatttgctaaaagaagcttaaaggatccagatctcaaaacagctcataacgtacacaagatgtcttccttgctaggaggtgctctgttcatagctgatgatttcttccccgagacacctttccttcacgcaggctggcacctcgctgcagccattggagttggaacatgcaataaacttcttgagtagatcatttccaaaattgctattcttagaacagtgaaacaaatggtttctctgtttctcctaatcagtcgacattactaagaagcatttctagacttatagtcagtaatctctatgtaagaagtagatcatcatcattcccaaacaaaagagattattgaattataagaacttgttgccaacagtgaagaacaatcataacaattgatccaaatgtcagacaattgcagacaacaaaacaaagaggaatcataaattctatctctttaacacatcactcgtgaagtgtagccatgatatcttcatccctatacaataggaacctgcaaagagaacgaaacacacagtgagaaatcgaaaatactgataaatttcactctcggaggaattacatcgaacaggttaagaacatactctttctctccaagcttaacttgagtaccaccaaattcaggcaaaagaacattgtctccttccttaaccgaaaccggaattagattccctgctctgtctctagctccaggaccaactgctataactctcccggaattcaactgtgtttaatcaaatccaacaaatttctagttcgtccaatcgaagaaatgggtaaagatgagaattttaaagaaattcgtttacctgagatgatttcttcggtaggagaatgccgcagacggtctttgacggtgggagaattttctccaccaatacacggttgagagtcgggatcaaacgcttcgccatttttatctgattcgacgacgacgacggagatcggattacgaaaatgttgctctgcttaatttcgctaagatttagggtctagggtttaagcacaacaggtgttccgggtttttaggttattaaggttacttggactttacgtggcccaggcccattcagtatttctaaaattattgagtcaatccctttttatttgactcgtttcatgttaataaaaagtagggtatatgcattaattaattcaacatttttcattaattaggtcaatggtattgacatgcattaaagttttactcgtgatgtagacaaataacatttctcgttcagtaatttatgtacaatgtgtttgtgaaaccgttcgataaaacgttattatactaaacatcacgtcatatcataaaaccacttcattttttttataatcttccatctttgttctttttataagaaaagcggagtcgct

SEQ ID NO: 948 - DNA, 5318 bp, Arabidopsis thaliana landsberg
atccccggtttttatttttattgggtcaaacagaaactttgatcgacgcgtggcgtgggaaaataacgtatcaatattttgggctttttaggtgatgattgttttgtaagctttttgagtgatgattgtttgatgggcttattaggcgactgttttatgggcttttagttaattgcaccctttgggcttatgtactctgatttttttgtttggttttttagttgtatttgtaatttctgttcgagcactaaaaaaggggaacattgtcccaattgttctttcgccattagtaccaaactaaactggagatcaatatatagtattagtatgattgattgtctattggggtttcgtaatcatcgcgaaactgcagtataaaattcgaaagtttggtttaggcgtatgaaactttattgcaactctaatgaagtccgctcacgaactcttgccactttacggcagctccgacaaccgtcaccggcgacatttctcgacacacgacgtgttgatgctcgcatcattaaaactggcttcgacacagatacgtgtcgctccaatttcatcgtcgaggaccttctcaggagaggtcaagtttctgctgcacgcaaggtgtacgacgaaatgcctcacaagaacactgtctccaccaataccatgatttccggttacgtgaagacgggtgatgtttccagcgcccgagacctttttgacgcaatgcccgacagaactgttgtcacgtggactatcttgatggggtggtacgcccggaacagccacttcgatgaagctttcaagcttttccgtcagatgtgcaggtcttcttcctgtaccctgcccgatcatgtcacctttactacgcttttaccaggctgcaatgacgctgttccccagaacgcggtcggtcaggttcatgcttttgccgtcaagttaggctttgataccaacccctttctcactgtctccaatgttctgcttaagtcctactgtgaggtaaggcgactcgatttagcctgtgtgttgttcgaggagattccagagaaagactctgtcacgttcaacacccttattacagggtacgagaaggatggcttgtacacggagtccatccatctctttcttaaaatgcggcagtctggtcaccagccttcagatttcacattttctggggttctcaaggctgttgttgggctgcacgattttgctcttggtcagcaactccatgctctgtcagttactaccggcttctccagggatgcttctgttggcaatcaaattcttgatttctactccaaacatgaccgtgttcttgaaactaggatgctttttgatgagatgcctgagttggattttgtttcttacaatgtggtcatctcaagctactcacaggctgatcaatacgaggcatccctccacttctttagagaaatgcagtgcatggggtttgatcgcagaaacttccctttcgcgacgatgctgagcatcgctgctaacttgtcatccttgcagatgggtcgacaattgcactgccaggccctcctggcaacggctgattcaatccttcatgttgggaattctttagtagatatgtatgcaaaatgcgaaatgttcgaggaagctgagttgatattcaagagtttaccacaacggaccaccgtttcctggactgccttgatctcaggttacgttcagaaagggcttcatggagctgggcttaagttgttcaccaagatgagaggatcaaatttacgagcagaccaatcaacttttgctactgtattgaaagcttccgctagtttcgcttctctgttgctggggaaacaactccatgcattcataatcagatcagggaacttggaaaatgtgttctccggaagtggcctggttgatatgtacgccaaatgtggttctatcaaagatgcagttcaagtattcgaagagatgcccgatagaaatgcagtttcctggaatgctttgatttcagcacacgctgataacggagatggagaagcagctattggtgcatttgcaaagatgattgaatctggtctccagccagattcagtcagcatcttaggcgtcttaactgcatgtagtcactgtggatttgttgaacaaggaacagaatatttccaggcaatgtctccaatctatgggataactccaaaaaagaagcattatgcatgcatgctggatttgcttggcagaaacggaagatttgcagaagcagagaagttgatggacgaaatgccctttgagccagatgaaattatgtggtcgtcagtgttgaacgcatgtcggattcacaagaatcaaagccttgctgagagagcagcagagaagctcttcagtatggagaagctcagggacgctgctgcttatgtaagcatgtcaaacatctatgcagcggctggggaatgggaaaaagttagggatgtgaagaaagcaatgcgcgaacgcggaatcaaaaaggttccggcttatagctgggtagaagttaaccacaagattcatgtgttctcatcaaatgatcagacacacccaaacggagatgagatcgtgagaaagatcaatgaattgacagctgagattgagagagaagggtacaagcctgacacgagttcggtagtacaagacgtagatgagcagatgaagattgagtcgcttaagtaccacagtgaacgtttagccgttgcatttgctctgatcagtacaccagaagggtgtccgattgttgtgatgaagaacttgagggcctgcagggattgccatgctgcaataaaactaatatcgaagattgtaaagagggagataactgtaagggatacaagcagattccatcactttagtgagggggtctgttcttgtggtaattactggtgactcagcattatatagaacaaagtgctagagtaggttctgtacgtgtttcattcaattatttcgatatctttctttggtcttgggattgagattttgtaaccttaactgatgttgtaggcagtcctaatcatatattcaaataggaaaacttattgattttccagtacatctcccaatcaaattacattatattacacaaggagaatgggagctttgtttcctaataccagtctgacaagaatcataacatcaaactagctagtactttcagaccttgcaggttgcacctagaggtttcacgaagaggcagcgatgtagccggtcgggcattctgagactgcttcacaagtgtctgtctcaaagaaggccgagtggagagccttcacacaatgctccgcctcatcatcattcactatcagtgagatgtttacctgatagcatccaaaagtcagacgagtgtgtattcaaggggtaaaccttttgtacagaatcatctatattgccaaagaagttgaaagaggtttgaccttagatgcaccttgggagatcatctggacattaatcccattggttcgaagtactcggaagccctgtttgttgttcatcggtaagccactatgactatctatatattaaatcatacaaaccaaaccagagagttaactaaccttctctaatatgaatgatgatctctgaacatttccgatgagagagataattgatctgtgtcgaagcagatttacaacagcaatcttctcaagttcctccaccacctgatcaagctcctgtcacatggccaagaattacagaatacaagatgagtcttgatttgattttctgtgctccaagaacaagtggtacgtagcctgaaagttctctcaaagaaaacaacacagatacaaagtcacaagcttacgtgttgaattaactctctgctacagaactttgaaggatccaatgtcaaagaaatgctaacttcgctggttgcaacaacatccacagatatgcccaacttttcaaatgtggaaaacacctacagagatagaaagtgtgagctgggagggcgggaaagggagtatcttgtcatcaattggagttaagttggttaccttggcaaggaaaccatattggccgagcatacgggtgctagtgatgtccaacatggtgacattacgtttcagaacgatgctggtcaatacagcctaggagaagataaggaggaagaagaggtcatggtgatgttgtacgtggtataaaaaagggtaatactagtgatgcaatttgacttcacgtaccttgctcatgtctcttgatctggtgatgacagttcctggagcagtgggattgtaagagttcttaacccttacaggaatgttaccttctcgcgctgggcgcatggaaagtggatgcaacacctgcaatggaagaggtaaatcatttggtcttttggtacaacaagtgttttatgaggttggttacctgggcaccaaagtaagcaagttcagcagcctcatcaaatgtcaagtgtggaacaggttgagctccgcagtaaatgttaggatcacaagtcaaaactccatccacatctttccaaacctgcatgcaccacatgacagtagagtatatatgttttgcaaaatcacatcttcattgatagacaataacccccggatataatggtacctggatctcccgcaaacctaaagccttcccgatcgttgttgcagtcaaatcgctacctgctctaccaagcgtagttacagcacaagatctccatccctgcacaaactcaaaggtggggccttttgttttcaaaattctaaaaatgtcacaacaaggcgtgcacgagactcgtaatcaatcgttattttatatacctttccaaggaagcctgtgacaacggggagtgcattttccttgctccagtcaccaagtaactttttcgaaaccgccgggtatgttgcctcaagaatatcagcattagtgaagtcatctgtggtgataatcccgatctcaaatgcatcatactgcaaaaacaaaactcatcgtcaagtcacgaaacaatctataaggtgatcaatctaggtaacatatatatacatacctgtcgtgctttgtgcccaattttgttcaggtacgcagcaaatagcctagtggacatgcattctccaaatgaaaccaagtagtctcttgagcgtaaagttaattccttcatcattgggacgcctttaagaagctgttccagtccttctagatgttctgcaataactgctgtttccactccaagctcatgagcagtcctggacatggtacaatttgattttcttgaatcatgagaatatagcaaatttgagttggaaaactttacgtatgaaagattcaataaatctgtctgttttttcttaaaaaagaaaccttatatggagttcctttatata

SEQ ID NO: 949 - DNA, 5864 bp, Arabidopsis thaliana landsberg
ggctttctgagtcttcttactgttgcaatttacaacattgtctacgtggcgcctgtaaacccaatcaaataaaaaagatatcaaaaatcaaatacaccgaatttaaaagtatactagattaaaagtatacaccgaatgtacaatataccacgaaaggacgctttctatgtttcttttgtcacgaatacaccgaatttatgtctatatatgttcacgaagatagcggatattttactaaccattttccaaagatccggcgtcaacgtagtagttgaaacgtcgatgaactcgaccgggttggcacgagaataatcaggcgaattacattgtgtactctcgcccacttcaacatgtttccgatattgaggatatgattgatatcctagattgctactgtcatggatacacatatgtaaagtcgtatatactctcattcattacgttgatgtaccctagctactcactcttgtatatatattgtgattctcactatgtaataaaatcatctcttctataaacatctatatggtatcaagagcttagatccataaaaaataaaaaaaaataaaaaataaaaaataaaaaaaaatcgttctcgtcaacaccaacatggctactcacgctgaagaaatcgttctcgtcaacaccaacatcctcaacgtgaacatgagtaacgttaccaaactcaccagcactaactacctcatgtggagccgccaggttcatgcgctcttcgatggctatgaactcgccggttttctcgatggctctacacccatgccgcctgcaaccattggcacagatgcggttcctcgtgtcaatcccgactacactcgctggagaagacaagacaagctcatctacagtgcaatccttggagccatctctatgtccgtacaacctgcggtgtctcgagccactacagcggctcagatctgggagacacttcgcaagatctatgcgaatccaagctatggtcatgtcactcaactccgtacgcagctgaagcaatggacgaagggtgccaaaaccatcgatgactatatgcaaggattcatcactagattcgatcaacttgcgcttcttggaaaacctatggaccatgacgagcaagtagaacgtgtgctggaaaatctgcctgatgattacaaaccagtgatagatcaaattgccgccaaagataccccaccgtctctcacagagatccatgagaggctgataaatcaagagagcaaacttcttgctttgaactcggcagaggtcgtaccaatcactgccaatgtcgttactcaccgcaacaccaacaccaaccgtaatcagaacaatcgtggagacaaccgcaactacaacaacaacaacaatcgctcaaactcttggcagccatcgtcttctggctctcgatccgataatcgccagcccaaaccctacttgggccgatgccaaatatgtagcgtgcaaggacacagtgccaaacgctgccctcaacttcatcaattccaatcaaccaccaatcaacagcaatcgacttctccgttcactccatggcagccccgcgccaatctcgctgtcaactctccatacaatgccaacaactggcttcttgacagcggagcaacccaccatatcacgtcggacttcaacaatctgtctttccatcaaccttacaccggtggtgatgatgttatgattgccgatggatccacaattcccataacacacactggttctgcctctctacctactagttctcgctcactagatcttaacaaagttctatatgttccaaatatacccaaaactttaatctctgtgaaccgattgtgtaatactaatggtgtgtcggtggaattctttcctgctcattttcaggtgaaggatctcagcacgggggtccagttactccaaggcaaaactaagaatgagctatatgagtggccggttaatcatcacgccatcaccgctttctccgcatcaccatcaccaaaaaccgacctctcatcttggcattatagacttgggcatcctactttatctactctcaaaaccattgtttccgagttttctttacctctttcaaattcgtttcacaaacaattgtcatgttccgattgtttgatcaataagagtcacaaattgccttttcacttaaacacaatcacttccactcaacctcttgaatatctctacacagacgtgtggacgtctccggttacgtctattgatcattttaaatattatttggtgattgttgatcatttcacgagatatacatggttgtatccattgaaacaaaaatctcaagtcaaagaggtgtttatagcgttcaaggcacttgtggaaaaccggttccagacccgcgtgcgcatcttatactctgacaatggtggcgaatttattgcattgcggtcttatttggcggtacatggcatctctcatctcaccacaccaccacatacaccggaacataatggtattgctgagaggaagcatcgtcatatcgttgagacgggactcactctccttactcatgcctctgtaccaaagtcatattggccatatgcgttcgctactgcggagtatttaatcaatcgaatgccaaccgagtcataaacggggtgtctccttatgccaaactatttaagcaatctccaaattacttgaagcttcgggtttttggatgtgtatgttttccatggctacgaccgtaccgggctaacaagttgcaagagcgatccacgccgtgtgtgttcgtcgggtattcactaacgcaaagtgcctacttgtgcttggaaatacagagtggtcggctctacacttctagacatgtgcaatttattgaaacgagttttccttttagctcgccggtgttgccgtcatccaccgttgttgctgaatcgccaacctcgcctggtcaacctccggtgaccgtgcccactcaaatagctcattcttctctgcctccgtgctcggttcttcaccctccgtcgccagctcaaccatcatcagtgtcacccaataacgcatcaccgtcgttgtcgccaatcgctccgtcgtcatcaccacacagctcgtcgtcgacgtctccacctgtgccacaattctcatctcctccaaattcagaacgggcctcattcaacaagggcccaacaacatcaactccaagcccaaacaaaagcccaagtcaaccttcctctacaaaccaaagcccaatccacacaagcccaaatccaaatatcacaccaactcaaacacgttcctcctcacacaacgacacgtcctcatcacaaactacaacctccggtgaatcacctcctccaccaatcattccaaacttacctccaccattacaaaatgaccatcccatgagaacaagagctaaaaaccaaatcacaaaacccaaaaccaaattgagtctatcagaattcagaattctcttgctgatacatcgttgtttatatacaagagcgctaatgcatttctttatgtgttagtctacgttgatgatatcataatcaccggtgatgcgtccttgataaagggattcaatgcttctcttgcagctcggttctctctcaaagaccttggcgaattgagttatttcctcggtatcgaagcaacacgcacaaagagagggttacacttgatgcaacgcaaatatatcatggatcttctcgccaagacgcacatgctcgatgctaagccaatttccacaccaatggctgcgacacccaagctttctctattctccgggacggctcttccggatgctaaagaatacagaatggtcattggcagtcttcagtatttatcttttactcggccggatattgcatttgcggtgaatcgtttgtctcaattcatgcacaaaccaacagatgaacattggcgcgctgctaagagagtattgcgatatcttcttggcacaacatcacatggtatctttcttcgggccgatgttccacttactgttcatgctttttcggatgcggattgggccggtgacataggtgattgcttatcgacgaatgcctatattgtttactttggtggcagcccgatatcttggacatccaaaaagcagaagagtgtttctcgttcctcaacagaagcagagtaccgtgcggttgctaacactgcctcggagttgaaatggatctgctcattgttgtccgaaatgggtattacgttatcacgggcacccgttatttactgcgataacatgggcgctacatatctctgtgccaacccggtattccactcgcgaatgaaacatgttgctctagactatcacttcgttcggggtcacatacagtccggcgcacttcgggttacacatgtctctaccaatgatcagttagcagatgctctcacaaaaccacttcatcgtccaaggtttcaagaaatcaattccaagattggagtcaaggaactgcctccatcttgagggggtgtgtaaaggagaagtatagttaaggttataaatgtaattattcatgagctaaaccctatggttaagcctctatttatattgtaaatcattcctatcaatatacaatataacccacgttcatactcatcacaatcagaaatgatgatgaaaactttggtgtgaaacctctgacttgttacatgaactaatgaacaaatttgtaaaattgttatattagagtatcctaaaaaatatcgttctgaagcgactaagagcatgattataggtgatactcataaagtatcactaaaaattgtttagtattatttataatgtttgtttaatagatatatatatatatatattttgtttttggtaaatctgagcaatcagaagatggtacgtcagatgatactagtatcacaaatatcactggactgacactgatcaacctcattccaattgttttatcaatataaaaataatttttgcacttgtgatactatagaaatatcactcatgtacatggtcttagttttcccaaatgtacacttgtattattgaaactagaaaagaacccgtgatactagtaaatcttttatttattatgttgtaatttaaataaatatatatttagatattcaattcaacaattaatatctcttgcatttttatttatcaaaaaaaaaaagagtacaaagcaaaatattcagagaaaaatagagtccataactccatatatgtttgttttcttaatgtcatttactcaattatttttcatatataagtaataaccaacatatagctgtcaaaaaaaaaacccaacatggttggaaaatggtcacaaataaaacactgctaagtttgccaaaaaaaaaacaaaaaaaactgctacatgcaagtggagctaccacgcaaagttagaggcttaaacacatttactaaaaagtaaaaatttaggtacgaaagttccataacttctcaccttctctgtagtcgaagaatctgaggattgataaatgttttaaacaaagaagcacaacaagcgtaagaaaggcgcataagatctctcgaagataagatcccaagatttggagaactattccgattctctaaccatgttcaaaggtgaaaattaaaaagaagacacgaacacctgaatattctttgataaatgtacttcttttcacatctctaggccagccagtaacttcgattcaagaactcaatcatcccaagagatcaaagagatttacacaagatgaactagtttacaagaggctgctcagaagaaaagaaaaaaatggtttggttagtgaggaatcatcttgattaatttttcattctaataaatgaacatattattgtcaaagaaagttatttcgtggcacccacaaagaacaagtttagagggctaaaactttgattatgccaa

SEQ ID NO: 950 - DNA, 1576 bp, Arabidopsis thaliana landsberg
gtctctacccatatatataaatgggcctctcacttaataagcccataataccctaacatcatggagttggaagagggtatataaatggccaattagggttttgtacgtgctctcactttttctctcaagtggttcggagctgtttctaagaaaacaacaggtagttcggatcggagctacgcttgcaaaactcaaaacatggttcgtcatcctctaatctctatctctttcttctgagcttagtgattgtttacatctagatagttccttaactcgactctcgtttctggtgggtttgtgttagagtgacttagagaatgggttttgttagcaatttgattgattcgataacttgtgaatattatatgcatcatggtgattctccttagatctgagctcattagatctcaaatgtgtcgctgatttaggtcatgatgatgatatacatagcagtagagatttccttaataataacatctcttaacatttattttgttaaattttttaggcgtggggtttgaagaagcatctgaagaggcttaatgcgcctaagcattggatgcttgacaaacttggtggtgcatttgtatgtcttttactctctctcttcttgtctcagttttgattcaattttatatatatctcttgggtttgtttgaataagtatgttcatttctggttccacacaggccccaaagccgtcttctggaccacataagtcaagagagtgccttcccctcgtccttatcatcaggaacaggttgaagtatgctcttacctaccgtgaagtgatttcaatcttgatgcaaaggcatatccaagttgatgggaaagtcaggacggacaagacctaccctgctggtttcatggatgttgtgtctatccccaagaccaatgagaacttccgtcttctctatgataccaagggacgtttccgtctccactccatcaaggatgaggaagcaaaggtttgttctcctcttgtcattgtttagttgtcttttagagtgatacttgacatgatggggatatgttgtgttctaacattatgtcttctatttgtacagttcaaactttgcaaggttcgatctatccagtttggacagaaaggcattccttacctgaacacttacgatggtcgcaccatccgttaccctgacccgctcatcaagcctaatgacaccatcaagctcgaccttgaggccaacaagattgtggagttcatcaagtttgatgttggcaatgttgtgatggttacaggaggtagaaacagagggcgtgttggtgtgattaaaaaccgtgagaagcataagggaagctttgagacaatccacatccaagattcaacaggacatgagtttgcaacaaggttgggtaatgtgtacaccattggcaaaggaacaaagccatgggtgtctcttcccaagggcaaaggtatcaagctgactatcatcgaggaggccaggaagaggcttgctagtcaacaggctgcttaattttgtgattttcagttctttgttatgcttctttagacgttccatatttactagactcacttagactctttcggtactct

SEQ ID NO: 951 - DNA, 3168 bp, Arabidopsis thaliana landsberg
tgacatgagcatgtggaaagcgaactcattaaactcatcccttgctagaaccaaaactttcagagacgggagtgatacgaactcgggctttgtcaaagttacttcagagagctttaaagaaaccaagctctcacagttgtaaatttctcgatctatatgcactaaagggcatgtaacatcgagatgctgaacttttcgcttaataaccatgtagataaacacatccacatccccaacgagatccgaatcgcatcttaacttaaacttgtttacgatacggttggatctcagaaacctatcgataaacgtagcaagagtatgtagaactttgatctctcaaagttgttaaggatcggacaacacagattttactctgttttgtcttactctatatttctctgtttttataaaacgaaaaccacacattattagatatataaactgtatttataagtttacatgacacgctttgattaagggacacgtctctagaagacaactcaatgtagagacacatacacatgtaaatgttttgcagttaacaattctattcgtatctcttcgatgtgtgatacgaatatacataaaccagttacttaactatataatatatctcttctaaaataagatgatgacttgatcacttccaacaagtagatgccactgaaacgagaaacctttcgagtgatgcattccacaaaaggaaacatagaccaaatcccaacactgcagactaatcgatacagtgaaatagaactgacgcgtaaaactctgagctactaaactgtaaactgtctacagctatcattatccgggccagaggattaccgtggttaagttttccaattattgtcattttacagttccggttccatttgttctcttctgtaactttggtttaatatttgctggttcaattattgttatatgtattgggcttgacccaacaaaatctatccgggctgagcctgtaatattttttgttttttcttttaagatattataatacattttttatattaagttttaatctagtaaatgttcattgcatcgcacaaactctaataagttagttttataaaccaaaaaaaaaagtaattaagagctgttgacaaaaaaaaagccaagtaattaagatagaataaaattagtttattttattggagagcttacataaatctcatgctagaaaaatagattcagtcgttcaaattgctgattcgatttcaatcattatttgcaacaacatcttccattaatacaatttccatctctgaaattatcgaggatacagtcatgaaagcattcaaacgttccgtaccttattgtacatggtgtagagcatacatcattttttgttgtatcaatcactgtaacacatatatcactacaagaaaacaggcgacttgcgacggaagatttcgtcggtaatccctcgcaaatcgttaatcgcgagagatttgcgaggaacagcagttcctcgcaaaacgcgtctcgcaaatggttaacagtagtaattccctcgcaaattttgcgacgaacaaaatctctcgcaattagcgtgtgaggctctttgaaatctctttcaaaaatgctccggacagtggctgctactgatgtgtcatcgtcaaacctacaaaacaagattccatcagacagagacaagtgacttatcattatgtaaattaacttagaatgcaaaacaagtgacttatacttaccagaaagttcccggaggacggttaggatctaatctaggcaaagatgcacgcccaggactttcaagcaactcttccagtgtcatgtcgttaagcctggcagttagaggattcgaatgattgactgaaggttgaggcgaatgattttgcggttgaggagcagaaccatccggatgattagaggtcagatcggttggcatcagttgtgcagaggaacgacgagtaccattgacagctgaggtgttcccttcacttacactcgtgtgcggactctgttgctgctgagacagataccttgtataatcgttcccggagaagctcatcttgcaaataaaaataagacattagtaaagagacaatcaaactcaaattatgaaaccctaataagatctaaagagaaaatcaatcattaaaatgaaactctattataaaagaatcacaattagtcgagatatcctgtgggattaaactaaaaaatttgcataaccaacaaaatataaagttgtctaatgctatacacatgctcatcatttagttgtttgttaaacgaaaccctaatcaaatgaaacataacaaatcgattgagtaaacgaaaccctaatcaaatgaaacataacaaatcaattgagtaaacgaaaccctaattaaatgaaacagaacaaattgattgagtaaaagaaaccctaatcaaatgaaacataacaaatcgattgagtaaacgaaacccaaatcaaatgaaacagaacaaatcgaataagtaaaactaaaccttactaagatctgcagaaaatcgataaggtttcaaatagaaacatttctttaccttgcagatcgatgtgagaggagaggcggcaaagaagaccgagttgtcgtcggagaagaagaacggagacggaagagactcgatttcaaacctccgaaattagggtttcctggttagcggcggctatctggatctcctcgtagaggatgtggcacgacggagaagaagaatggagaagaagaacggagaagaacaaaggagaagaagaacggagaagaagatccggagaagaagaacagagaagaagaacagagaagaagaaaattttagggtttcggtgtgtgcggctaggtttgagcgcagctcaaacacggttgcagtgtatatatatatttaaaaagcctcgcaattccctcgcaaattttgctacggacttgcgaggaaacgacttattagggttttcaacttatttgcgagggatttgcgtctttcatcgcaaatccctcgcaaattgctagggatttgggaggtcaatagcaactccttgcaaagtattcaaaaaacaaaaattaataaaaatatccaaaaatttcagatatttaaaatgagaaatttattaagaatttataagttttgaaattacaaaaaatctttaaaattataaaattgaaagtgtatataaatcat

SEQ ID NO: 952 - DNA, 3313 bp, Arabidopsis thaliana landsberg
  unsure (1)..(3313): unsure at all n locations
tctttctcatggatcctttttccaaaccgccggtttcattaaaactcgtctagatcgttcgattcttcatcgtttcttgtgattttaggctctaatctcatcagaatctcatcctatatcttccccaagtgtcattttcatcgatttgcaacatggctggacagaaaaagaaaggaaggaagaacgttccaccaccttcttcctccgccgctcatcttcgccgcagctcttccacccccgccggctcacatcctcaaccaccggaatcttccactgctgctcctcagcctccgatttaccgattttcatgtccaaaactagctagtgtgcagattccttctcaaagagtttgggaaaaggatatcaatagagaatccgttaaaggtgactataatgcctggatgagtgtagaaatttggcctactccggttgcacattttagtttgatgcatcgtttgatgatagagaaatatattttaggactgctagatgacataggtttgggaaccatttgtcttagacaatacgatttgtatcatgagctagttagacaattcatggcttctattagggtctactatgtgaatgacatgaaacgcaatgctaaggaaggagctcttatcttcttcatccgcggtgttagatatagtctaccactgagagagagttgtgtgacatctatagttttgacaatgatctcactggagttgcactacctggacagtttaaggatgctcaggttttctggagccggtttggtaatggaacttatgattccaaggacgcagtacactcaaagattcgtcaccctgttctacgatatttggttaggctgattagtagcacattgttgtgcaagatggagcctggcaagatgagactttctgagctgttgttgctctatcatgctgttcatgatttcttttctgatagtttgggatttgaggaggttgaccgcgatgtcaactttggcgctgtatttgctcatcacttggtctcagtcaagaccaagccctttacaggtaaagggaagaaatctgagagagttggcagtcttcttactcctaaatttgggcactttcgcaataactttgagggagaagaggtcaaaaccacgagattcactatggatgatagttatcttaagaactctcactggctgaaaggccaattcctttggtgtttcaaaggtgagacaaggcaccatatgattcagttacctttccctgcacttacagagattacatgagaccatgaggaaattggttttcattcccatccttcccttctacactccgcgccacgctccaggagacagagaggttcagcttcaggatccgcacttactcagaccgaggatgagttcatcgaccctgctgggggtcctcgagttggctcttcctcttcaactctcccatatcagctgccttctcctcttcctatcccgatagagccacatgtctttcagcactatgtcgtcgacagtttcaaaagcgtctagaacgccatagctacactctctcacttcggttgtgttgctcccactcatcatcgtcgtcgctctcccgcacccacctccggctcagagcatgaggactagccatcctccctatcttgctttgttttctaactttgtttttgctttatttcagactatttgttatttgttttggaacttgttgcacttatttttctatgctttgttggaactattgatgtgtgttttagtgatttaacagtctatctggatgatccatgtgaaaacactaaccaaagctctacaacaatgagctgaattcgcaaagctatgcaaaaacgaccacagtgtcgatagacaccaccctggtatcgatcgtcaggtggcaactcacgtttctctaacctttaagttttgattatttttctttcaattcctctagcttaataattctggggacaatgttatttaagtatgggggagtcagttactaacttcatcttttcttttttaatgagtcagttgtgtcattctaacttagatagttgttttattgagtcaaaacttttgtctaaaattatgatctatctctcgatttactgcctggattgcttaagtactgcagattcaaatcaatatgactaatggaaaatccataaagccaaccaacaaacttaaggacgtctattcccaacataatccacagaggctggagctaatctcactgctcttccttttacctcatcaaaacggttagtgttcgtgggatttgactccttgttcatacctgataagttgacaaatgtgataaaaagaaagtattcctctccccttataaaaaaaaatatgagagattgataggatttttggatagtgtataggggtaggaatgttttctatgaccccattattatacattatttggaatgatcaatgacaaaggttggaaaaatgccgaggtgtcaatccagtatgcgagttcccctttgtttactatcttaaaataataagtctggggagagaaagaataccaaaaaaaannnaaataagagaatggtcgatttatcatggtatagtacaggaatgaatctagaaggatcttgaagtaagcttgtttgatgagacccagcgatgaaagcctagtagatatagttgtggaaataagatattgaatctagaatgttgtgtaagcttgcgcagaagtacatgttggttaggatttaattagacttgctaggcatatggattttgttaggatgatcatggcaatagactagagaatgttgggagttcctgtgttttcaaacctcttccacgggtttggcttttgtgttttgtttgagggcaagcaaaagctaagtctgggggagttgatataaccctgttttcactgactttatctatgtttttggtttaggattttgagtctttatgttatttcttgagtctttttagagtcttttcaggtattctatgcactgggacaacaatggagatgagaagacattcagaagcaaaagctaaggaaaaggaaagtaaggacgatttcagattccagattcaggggagtgtcgatcgacacactccaggtgttgatcaataccagttttggcccacaaaagtccatgacgctttcaagtttacagaagtggaaaattgccccaaaagatttccctatttgcattattagtccttggacgttttatagggcttatatttatatttagaggtcattttttagacataggttccctttatcaagttcttttcatccctattttaagaaaaacataagctattcatcccttattcttcagagattaattcagttctcaa

SEQ ID NO: 953 - DNA, 3004 bp, Arabidopsis thaliana landsberg
gacttgtctcctgggctcagtcacttgttccaagctcgctctttggactcctcttgattatctccaaaaagacttatctcctcttcaggtactcgttataatcattccaatttttttcataatcagtaaaattagtaaactagctagtcatttagagatttgtaacataaaaataagctagtgctaaacattacatgctaataataattcgagtaattgaaatattctgatatttggaaacagtctggatgctgcaaaccccccatctcgtgcgtttacaacacggacacggtgatacctcgagcgcatcaatgttatgcggtggaacaacgcagcgacggtgctctgctatgattgtgacacgtgtagagctggcgttttagagactgtacgtcgcgattggcacaaactctctctagtgaacgtcattgttgttattttcctcatagctgtttactgtgttggctgttgcgcgtttaaaaacgccaaacgccctcaacattacggcttcccttatggacgttacggcatgtccaaatccagacctggatgggaacagtcctggtgagattaactgcttagagaattacaatattttttttcattgaatatacgtttataggtttgttctcttttctaatgcaacaattatttttattattttcgcggcatgtaggtcaaggtggtggcatgggagagatcggtattagtgaaaaatatttatgttaatgttttcgaatatcacggttcaactttttggtttccaatatataattattgattttgaacagaacataaattttttataatgaaatttctaattcgagaaaaaaaaatttagtcacttccgatccacaaaatctgagttaagaaattgaaaaaaaagagctaaatgatttatgtttatggaacattattttaaatgttattttaggtagtcaaatgggttatctttgggccagacattagtcattgaggaggcccacagaggtatagaactagagtaacgaagccttgccttgaagacaataatcgcttctcccacatcggaagtttgaggatggatactcgtctgtgacatagtataaataaagaacatggtcgaagcatgcaaattacttacctggacggggtcaactcgtgatcaagaagacgagtggcctaggctagtgacttccattgcacataacggaagggtgcatagcttaaggtcttcccatgtggaagagcctgcgtcattatttgtggcagagggggtttgcgttcgcgcagcccctaccattcccagttgtcaatcttttgttcatgaatgaatacccatggcctaggctagtggcttcctgcacttgaggtgcgctaagcctaaggtttccccaaatggccaagtgggagatcctgcgtcattatttgttgccttggggggctgcgttcgcgcggcccattccatccgcaatagttcaatctttttagctctctggtaactgttataacatctgaggtctttctttaattgttcacgtttttggtggagctattttattgaaggttgttaatttgactttggagatgcaatcttctaatcaaatctccacgtgagaagcgaggattctctcctcgtcattatttatccttcccaattagagtaatcacacttttctgtcacatatgaattattaaaatcagaacttaagcgaaatccttcgaccactaaagacgaaaatccctaacaaatctcagagtttgtgttaatttctgggttccttacatcttttccagaagaaaaaaagctgaaagatgtggttttttggatcgaaaggagcatctggattctcttctcgttccacagcagaggaagtcacacatggtgttgatgggactggtctcactgccattgtcacaggttttcttctatcaatagtttcatgcccttttgcgacttgggtttgtctaaagttgtagacttttctataattctgaattgatttcatatgtagggtagagattttttacttttattgtttagacaattggaatttgatgtttttatgatcagggtctgtttttggttcggtcaaccctaataaatatatggaggtcatcactgtttgttgttctaaagtttgtcttttttttttgccaataagtaacaagcttttgctcacaagaattggattgctatgtttggtgaattttaaagtacaacatgtttgggaccatttgatctgcaaataacatgtgctattagaaagttacatatatatacatacttgtctctgtttcagctgattctaagttatgttataatcacacactatacaatttctgaccaaaggaagaaaaaaaaaagatttgcttgtagatctcgtttcaatacttttgtgaagtgctgcttccttattttggttagattgagtatgtagtttagtatgcacatgttctgtatcagcctatcagggtattgaaaaggctaggaacgagcttaatctattagttgatacaacttaagaaagtgagatttctgaacatgttggatcctcaagttttgttttgtttgttttcatgttttttcaggagcatcaagtggtataggtgtagaaacagctcgtgttcttgcactgcgtggtgtgcatgtggttatggcggtgagaaacactggcgccggtgctaaagttaaggaagatattgtcaagcaagtccctggagctaaagttgatgtcatggagttagaactcagctcaatggaatctgtcaggaaatttgcatctgagtacaaatctgctggtcttccactcaacctcttgatgtaagctattgaaatatcgtggttcatctatagccgtttggatttattgacgtttatgttttgacttgtctcaattttgtaagcaacaatgccgggattatggcatgtccttttatgctctctaagcacaacaccgagctgcaattcgcaaccaaccatttaggtaagtatgataaccaaaccaacactatggcttcgtcc

SEQ ID NO: 954 - DNA, 4741 bp, Arabidopsis thaliana landsberg
cctcaccatcactccaccccatttatttccccacttatagatattttcattaaatttatttcataaacttgtatctatggatagtcatatcttcacattaccataatatagaggttctctttttaccactatccaaagtccccacaatctttatcatctttttatatattttggatctcaactctagcccttttctattggttctcaaaatttattatagacatatagtaaaaacaaatgttaaatactttggacgtaaacattaaaactaaaaaggaagtaatcataagccaacaagtttattaagatggaaattattcaaatgttagattactgttattatgtgaatatgtcacacttaatttacttacatgcagagagagaacaacattggtagtaataacgccgacatatggcagcagcagcatgatacgcaagaagtcgtgtcgtttgaacattttccggcggaaagttcaccggagatctcccatgacgtcgagagcacagcatctactccagcaactactgttggagacagaaaacacgctatggctgtagctatagccactgcagctgctgccgaagccgcggttgcagccgcacaagctgccgctaaagtcgttcgacttgccggctacaaccgccagacggaggaagatagcgccgccgtgctaatccaatcgcactataggggttatttggtaattttctatccctaaattttactatcaaatcatttccaactctcatttgtcaataacatgcaccctcgaatataaccattttacaatcaaattttaccacttctcttacccacaaatatcgaaatgcattttgcctagaatccgttatgactataattcatttcagtattatcgctaaaccggggtcagtggaatttcgtgttttagtatacacaatttattgactaaatttgtttttgttttttttttcattgtaaacttgcagtaatgccaaaccagaaatcttaagaaacattctaggttattcaaattatgaccggttttgtgttttttttttctttctaggcgagacgagcactttgtgccttaaaaggactagttaggctacaagcattggtccgtggcaaccacgtacgaaaacaggcacagatgactatgaaatgtatgcaagcattggttcgtgtccaaggccgagtcagagcaagaagactccaagtggctcatgaccggtttaagaaacagtttgaggaagaagagaagcggtccgggatggaaaaaccgaacaagggtattgatatcaatacatactaaatcacccaatatgtatgtacatctataattagtggtgaacctaatatttgtatggttaagtagggtttgcgaatctcaaaacggaacgagataagccgaagaaattacatgaagtgaatcgaaccagtctgtaccaaactcaaggaaaggtaatgatgaaaaatcttaggtaccattttgctcacgtttcaatgtttttcttttaagtaattacactattggcatatctttttaggaaaaagagaggagtgaaggaatgatgaaaagagagagggctctagcttatgcgtacacttaccaggttggtcgccactctgtttctgttagagaaaaattccctcttaattgtcataaaatatgctatgcattataggtccttaaacatctcataatagttttggttttcatattgaagcgccaaatgcaacactcaaatagtgaagaagggattgggctttcttctaatgggcctgatagaaaccaatgggcttggaattggcttgaccattggatgtcttcccagccatacactggccgtcaaactggtccgggtcccggtcccggacagtacaatcctcctccgtatccgccttttccgacagctgcggcaaccaccacatctgatgatgtatcggagaagacggtggaaatggacgtgaccactccgactagcctcaagggcaatataatcgggcttattgatcgagagtatatagacttaggatcatatagacaaggccataagcaacggaaaagcccaacccatataccaagctatatggctccaaccgcatctgctaaggctaaagttcgagatcaaggcccaaccgtcaaactacaaggaacttcgtttatgccgtattggaactcctcgaccaaaaacgggtcggttaatggatcaggttgtgattcgtcaagttcaggtggagcaataacaactggttatcccggtcctaggagtccgaacccaaaatcggatatccgacgtaaaccggttagtcctagtcaaagtcctaccgggtttggaaagagaggctggaggcatgatcattagaagaaagtatatgtaatcttgaataaaaacttacatgtgtggttggttaattatcttgtttgaaatatattttccctgttacataattgtatatgacattaataattgaacatgtcttctcaagtttttaacgtcgcggtcaaaatctactttgatttccttaaataaggtcatatcggattggtttggttgaaccgaatataccaggagtatatggccaacaaaataagctcaatgagcatacaaaacttggaaggaggctaaagagttagttttggtaaaagaaaaccttaatgtcctcacatcacgtggttaacttaaagaatgctcacatctccggatacattgtaaactatttgatagatctttcccatgcaaattaaacagatctctagaatacacatgtgtagagttgtcttcgagttatgcgcaaacgagaagactagtcatgaagtgactccaatcccaacagaggctttgagtctttggcattacaaggagaagagtgaagactctcactcaaagacaaggacgtcacgtggttgttgcctacaaaggaactgtgttgttttagatctagctttaatgttagaacatttcaggaaaacttggggacaaagtgcagaaagtagttgagttgagggtgtgtttgggagctagtagattcgtgccttgttgttgtacaagcacaagagagagcttgttgcctagaaaggaactgtgtcgttttagatctagttttaatgttagaacatttcaggaaaactggggacaaagttcataaagtagttgagttgagggtgtgtgggagctagtagattcgtgtcttgttattgtacaagcacaagagagagctcgttacaaaccttattctagtggattccgggacaacaagtttcccggcgtgaatagggtttcattcagagacccgaacacgttaaagtctcgatcttgcactttactttctctccatatttctttgtttcttgttctgttttctagttctcttcaaagttctttacaaacgagtgttaatcaaagagatagagtgagtttattccgcaaagacatgagttttatcaactctaaacctcacaacatgagatcataatattgaaaactataaagataaaactcgtgaactttctcgatgagttgtaatctttttaaaaaatctatgattgccttttcagattccttataaagaacaaacaaaattctaaaagataaataaacatatatgtagacagtttattagtgttttcaaaactaaattgatgaaaatgatctgtagatgaaatttcttggttcacaagtttattaacttgattatttaagaagaacaaaaaaattcaatgattcaaagtttgaattcttttaccgaaagtaaaaatgcaaacaattgaccaattctttgaccaagtttattatagcttattattgattagtttgacagttacacatcatattttcatctctacttcatcatcataattcttagttcatccgcggtggcggtggcgacaaacgaataacacggtttattgtctgatcgtggcttgggtttgggtatgttttcggataacccatcatccgcggtggcggtggcgacaaacgaataacacggtttgttgtctgaccgcggcttgggtttgggtatgctttcggataatccatcatccgtggtggcggtggcgacaaacgaataacacggtttattgtctgatcgtggcttgggtttgggtcttttttcggataatccatcatccgtggtggcggtggcgacaaacgaataacacggtttgttgtctgaccgcggcttgggtttgggtatgttttcggataatccatcatccgcgatggcggtggccgcgtaggacgaccccaaccgtttgttgtctgatcgtggcttgggtttgtgcctgtttccatcattttcggaatactctcttcaacctacattatttttttggtttggtgaaaaaattcacgatggttatcatatacagatctattttgaagtgagtgaaaatgttgattattaatcagagagaaaattaaaatctatgacaaatgtgaaatgtacattttggttaatgatactgcttaccatatttagtgaatattggtcggtgtgaggaactccatcttcatggctctctccaaaccctaaaagcgaaaatggaattcaataaacaaccatattaatagattataattgtgaaaatggtaataatcagaatagatctttgatattaaaaatgtaagactattctaattagatgatataaaccattctcaaattacttgaagaacacaatggaagaaggagcaagaccgacttgaaaaccaccagttgaatttttgaaaacttgttttttttcccgaaaaa

SEQ ID NO: 955 - DNA, 4694 bp, Arabidopsis thaliana landsberg
gtttttgcaaaacttcagaaaaaaactagttgaagttgctagtgataaatataatttattcatgattgaggagcctaactcagaaggacctgatcctcgcggtggtgctcgtgttagctttggtttgcttcgtaaagaagtttcggagcctggaccaactacactctggcagtatgtgattgctttaatattgtttcttttgactattggttcctctgtggagttaggaattgcttctcaggtacatgtttttcgctaaagcacgaacatcatgatgtcgttgatctgttattctttaatgcaataatggaagttacttgatttaacagattaaccgcttacctcctgaggtggtaaagtatttcaccgatccaaatgctgttgaaccacctgatatggagctgctgtatccatttgtagatgctgcattgcctttagcttatggtgtattgggaattcttttgtttcatgtaagtaaaaacttatgtgtctctatcgtaatgcttttctttttatgatgttgcagacatgttccttggtagaatgataaactttcagtaattcgtttagacttgtttatttgcaggaattagggcactttcttgctgcagttccaaagaaagttaagcttagcattccatacttcattccaaacattacactcggcagctttggggcaatcacacaggtaataatcctactcatttcttttaagtttatgggacttatctcctgttgaactctaggtaagtcacatctagaagaagacatctttctacgctactatggttcaaaatgcatccatttacttctctttctcaatgcattcgtcttcctctaatgaagtgattcgataacgagagtattggctagtgtagtagcgttagtaaatcattttatttgatttgtacagtttaagtcgattcttcctgaccggagtacaaaagttgacatttcgctagctggtccatttgctggagctgcactctcagtttccatgtttgctgttggtctgttcctatctacagaaccagatgcagctaacgacctggtccaggttcccagcatgttatttcaaggttcattacttcttggactcatcagcagagcaactctgggatatgcgtaagctctccacagctagcgactgttcaccctaaacgaaaaaacctaactccaatctccatttccgttttcctattgattgcagagctttgcatgctgcgacagtttcaatccacccgcttgtaattgccggatggtagcgtcttatgccttggctcatgcttatattattcattagcaattttgacagttttctcttacattgaaatttgattgttaggtgtggcttaacaacaacagcatttaatatgcttccagtgggatgtttggatggaggaagagctgtacaggtatttgctcgtatataaggaatggtgcatactctatttgaaaactagaaacttaatggtgcattcctgactcgtatcagggatggaaagtgttgcagctgattcaagtgtatactattatataatcttgaaaagtagtgtgctttagatgaagtatgaagaaaagggtctgagatattcatataagagatcaaattgttgatattatcaatcacgtctgagacatatgggcatggatcttgtgcagggcgcatttgggaaaaatgcactggttacatttggtttgtcaacctatgtaatgcttggactcagagtggtatgttcaactgttaatgttgtagtgttgatttatacttctcgaacctgctagtttattgctctggcattttcctacttttcagctcggtggccctttggcacttccttggggactctacgtactaatctgccgggtacacaaaatttctaaactctgctacttcaaaaatacgagtcagctttaaaagatgtttctaagcagtatgttttggacatagaacacctgaaaaactgtgtctaaacgacgtgaccgaggttggaacatggaggaaggcccttgtagggattgcactaatcctagtggttttgacactcctgcctgtatgggacgaactcgcagaagaagtaggcatagggcttgtaaccacattttgatgttatcttccttctttgagcagatgttgtagttagggccaatccgaaacgagttttttttgttttggcaatatttagattgccagatataatgagccatgtatgtacactagtgaaaaagtatttatatgtaattacttaaattcattcttcaattattacactaattactttttaaaatggcatattacaatttagttaccaatgagatagtgtacaaaataattattagcaaactacaatttacattgaaatttcttttgaacatatcggaaaatacctttcaagtggtttagtcgatgcttcgagatcattgaccgaattggccggtgggactagtataagagaactttccaacaaattcaaagagtttgatattggaacattttactgcatataaaattggaaagtttaattttggtcttttacacttcctttaagaacctttctcgtattctttgagagtttgagctaagtgcaaaccagtcttgtaatcttagagctcggctatctgatcttgtctcgtctccataatcttataattttactatataatggcggaccaaaaacatattttttagagcaaactatattaaaaatatttttagataaatagtacatctaaaagtaaattaatatgaaccataaaaccatactatatatatgtttagcaaaactatttaaattttcaaataattttaaaatattcgagatattatttataataattagattaatacttaaaccaatgatgaaaactcataaggttttttaaaataacatgtcctaaaactatctaataaatttaaaattatattatttttctcgtctgcagtattttttgggtttaataagtcagtcgttattttgttaatctatattgattttttatttatttttgtcatccaacgtttttattgatattgagcccatgggctatacaactgatgaaaagagaagtccaaactccaacatttacaaccttgattacagttaaaagctctttaatttgattagattaagaaactacgatgccgcatgtataacacgtgttgatacgcgagaaggagagagagatatagtcagtaccgcccaagatccacgattcggtgcaaactctgccgctggcttcacaaatccaccaccgaactcattctacaaagttcgttgttgcaaattcgattgacttccactacttccatctcgaaaaaactgcaagaagatatcgtcaatccttcatcatcttaaccatgattcctagcagaagctacgcctatgacctagttgaggtcctcatcataataattgacaaatatattattttagctcaagattgagtaaagctaacagtgggacgggaagatcaaatatggcaagcgaaattccaagtgagatcttgtagaaatagagagaattgatcttagcaaagaagtaagtcggaattttattagcaaataaccgagagaaaacaaaccaacaaagctgaaaaatattcgattagaatgagaaaagcaatatttataacaatattccggtatttcggaaatcgtcctgagttttttttgttaatctatacaaattattaccacataatatcaaaacaaataatttggttttttagatttaatttttttgaattctaactaaaataagatgacaaaaaaatatttattagtacataatagtcttaaaataatatatctagccaatctacttaatgatcaatctcaatgatttttgttttttcttatttaatttactgacgtcttgacagttcaacattattgtaataattagtatacagaattctggaaggtaattggctaatacaaatagtaacgtggaataattgtcaagatttgacctattttcagacttttaaaattaaagcgatagactttctttttataaaaagaataataattttcgtcggcggccaaaccaaaccaaatcacgttagctcttagctcattttcgctaacaaagactttgttccctttttcctccaacgtacatatcagaaagactctgactttatacctctctccttcttcttcttcttcttcgtcttctctctcttatgtccttgtccaatttccgaatccttcgtgttgaattttgtcttctttcttcctgagttttcccttcttctcttcaagaaaccttgatcaggtgattttaagtcttctcctttacagatctcgagtcgctgttgttccatgtgaattgggttttaaaccttttgattattgatgaatctagggcttatgggtttcgatgaaacaatgagattttgatgaatctaggtagtggagaaacttactgctcccaaagagattttggccatagagtatgaaattcccccaaaggttgttttgatggaagcgaaggttcctagacctaggggaagaccgaggaaacgtcagagattagaggatgataatcgaaaattgaacaatcgagggaaaaagcaagttctggaggttgagcctgcagtgccgatatctttacttggttgttatatgctgaaagattattgatgacaatgaagtttttctagggaagatagtgtcttatgatctgggt

SEQ ID NO: 956 - DNA, 840 bp, Arabidopsis thaliana landsberg
tactagcaaatacaagtcaagtagtatatatgaaaaattttttatactacttgatccattttacccattacgcaggtttgtataacaataatacagcattatgttgtcccacatttgtttttaaagaagttagggggtgattggctatatgctttcaagactttaaaagcagtctaaagttctcacattttgtttttccaattaggcttttttactaatttctcaaaacctttttttcttttttcttttttttttctttttttaaacctcataaacgaggcttttcaaacaaaaaaatattaaagtgatttgtttcttttttctatactatcaaaaaatctacacatttgaattctgaaagcttttttgtttttagaaaagtttccgaagcagtttatttatttatttattttctaatcatttgataacttaatttttttggttagaaaaaaacatggattaaaaacccttcactttttttctaaaaacatgtaaaagatcttcaacttttttattggttttaaaccatagggtagattaaaatatagttttcaatcgtaagatccataaagatattttttaatagattatatgattctttagtctccgtcaaatcttgacaaatataccaattgagctccccacatggctttctttgcattgaattacaaaaacttatgctttgtagaaagtagaaactaatttagaaaagagctaaaagctacaactgtcacattaattctgtttttataaatcatctgcttttcttgtcttcagatataatttgaacattcaatagatttaaggatgttcagttatctggtatttacaagatttaac

SEQ ID NO: 957 - DNA, 1515 bp, Arabidopsis thaliana landsberg
ttactatatgatttaatttagtaatgttgtcatatctttagtactatatgattacaatatcacattggcttgtagaaaatgaaaaatgtcgagttgtgcttggtatctccggaatgttgtcatcctgaaagagcttatgccaaatcattcataagatcatgcattacaaagcttgtcatggtgaatccaatctctgaaaaaaaagatttgagcaaactaaatcaccaaggtaatcatttccagtcttgtgctgctccttggttggtataagaggtctattgccatccatagtagcagtaattgagcatagggcaaagcatcgcttaagttgaggaggaagagagtcatagcttggtttaagtactggaaggatactgttagtgtagcttgagaatttctttgatgcaatggctcgtgcaagaccttacactgttctgcaatccttttcccaattccttctagttcttggttgatttatatttccaaaaggaaatctagagatcagctcccaacattcttcatttggtagatttttttcagcctttgctactgtggagacaatttcacttggtgtggttagaacaatcttgcttccttcctcaagaaactttcccattctgaatctcagaccaaaaatcatccagagcaataagtaaaaatcttctgtttgacaaaagaatctcgaagagatgggtgacgtgtcgttgtgtgagtgggtgaagggaaaatatataaagagaaaataaaaatcgactcctgtgtttctctctctctttgacgcgtttctcttcaaaggctacaccggaggcgatttggagtttaatcggaaccactcggacgagtctccgatgtagaaacgaggaagattacttcaattgagattaagagatttgattattcgatcgaatcaagcttgggtttgttagtaatggcgggaatagctatagttttagatctactgaagaaatctcaatccaagcacagtcttcactcatcttccttctcttccgccgccactgctccctttgcgtcttggtttctcttcgggtatgtattctctctctctctctctctctctgtatcggatttgaatttgtttgactttcactggatcgtggtggatataattattggattgattactagttttctgattttgttcgagaaattagggtttagaaattcacaattgatcatcttctattgctcagttgaataagaaaggttgcagatttatagttttgaattgatcggaatgtgtcacactaattcaaggctatgtcagttactagtaaaggtgaatattttgcgatccagtttgaaatgtagtttatcaatgaatagtttcacgagctctgtttttattctaaatagatctcttgataggtttcatttatgtgtcttttcgatactctcagtgattagcatttcatagagaaataattgtcgatgactcagattgtttatgttacagttcatcggagagtttcgtattgtgatgttacagctggaatc

SEQ ID NO: 958 - DNA, 5891 bp, Arabidopsis thaliana landsberg
cacttaatttggttaatgaactcgttgtctagggataatttattgagcatgtcaatcacctgtaaattgaggaaacgaaactactcaattaccccatcctcgggaattctttatctgattgaattctttatttactctactgttgtttactacatctggtcatctgttgcttaatttctgcaattctttcttgttactcgacctcatactcgaccacccagttgtctagcaacagactgtgcagtcgagtatctatgttttattttttgtctgctactcgacctgtcactcgacctcacccaatgctctacaaagagctgttttctattttccacatgtttacttaggactgctagaacacaccacaacctgttattgcttggcttaacttagtgacttctgatcacatcttgatagttagcatcacacccatttggattgacaaccttcagtactacaacgacatgatagtgctttaggattaattgatcttaaaaacctattatcagtagccgaagtccgtatgagtcttagtctttctatcttctaacaaagattcaaaacttaggtttttaagatctggttatggttctagttgtcatactcactcatacacatggcatctagtaatatttgactccaaaacacgaaccaagcttcttcttgcttctcaaagctttgatggtgtagctaaaccccgtatgagtctttggctttgtatcttctaacaaggaaacactacttaggcttttaagatccagttgcggtttaagttcttatactcaatcatacacatcacatcaagtcatatttcactccaagacactaaccaagcttcttcttacttctcaaagctttgatggtgatagtaggtttttaagatcaattatcctaaaacactatcctgccgttgtagtattttaggtgtcaatccaaatgggtgtgatgcagacagatgagatatgatcagaagttgttaagtcaagccaaacagaatttggttgggtttctaacagtcctagtgttgatgcagaaaacagtaaaaagtcacagaaacgactgatatactcgatcgcagggtcgactgccagaagggaccccgtgatcgagtacaacaggatgacagagagtgaaaatgcagaaatggaccagtttactctatcacgcagtctcactgttagtagactgatgtgatcgagtagaatggttgaaaacagaaaaatactaaaattcaatagcaagtgaatgaagcaggtaagtaaacagagaaatcaaatggatgagaaattcctaaggatggggtaatcgaatagtatggtctccctgatcaattcagttgattaacaaatctcaattaagctatccctagacaataggttcaacaacagattaattcactcccgtgatagaaatcctcaagcatagctagacacagacctaattcccattagcgatctctaactaagcaggcaataagaaccgaatgttaaagccaataaccgctctaaacggccaatcccttgggatagagacgattatcactggaattagtagatccaatgttccattaaatgccttctaggtgctggaacgtctaagactggattccagttgatcagaaaggaataagcagtaaacacaactaatctagaagggattaaatgaatctacacttaaccaacagatttgaccagggttccacaactactctatcccatcctcagaaatcctaatcactactcagacaacatgttcaaagacaacaacatagaaacgattgaagattgcatacttaaaagattaaaggaaatgaaagcaaaatctgaataacttagaagaaaaatcgaaatacaaagttgtaggaatgaaaaacggctactgagtaagttgcagcaaatctctgtaaaaaagtctgtgtaagtctctccctagggcaaaacccttagaggcttatttatactaaaaacgataaggataagaaagcgggctccaagcccacttaacggcccatggacgatgtgatcaagagtgtcggctcaaagcaggcttccgaatgggcttcgaatgggccttctctctttccgttgctaaggttgtctggttgtgtgcagattgattagagggtcgaggtggtggtcgagtaggttggtgacagaatgggtgcttccctctctgctactagtgatcgagtatgttggtggaagtgtgactttatgttctgtttttcctctttctgagcaccaatagcttcaaaacacctgaaacaactccagaatgcagaatgtatgcaagactagtcctacactcgactaaagatgcaaaatgtataaaaatgatggtgaatggtatgaaagatggatgaaactagactcaaaatggtgataaaaggatgtgtaaaacatgcaaattataaacatatcaactttttccaaacttatactcctttattgttgctttaggcgattgcaaattgttcaaatttgtatgttccattttgtcttaatatatatttgctaatttatctaatatgtgctataagtatctaatatatgatacacatatatttcatgttttgctatatatattacttttactatatacacacgcaacgcgtgggacattcctagttgatcttataaactgatgttgattaagaccatctttgttaatatgtaaactattgattgtaaaatatatatttacttagacgatctccatatctaatgttatttttcaaagatttgtaaactctcatttatattagatatattattttggttaaggatattttagttcacggacattgtttagaaaatagttttctctttgaaactaatttagttatggtttggttgggtttgtttgacttttgtttatatttggttgtgagtgtttgatggtcgtttagatttttttatgatattgacaatgacatatacaaaatttaaaaataacgaaataattcgatagatttttaatttaattttcttttatttatccctatattattaaaagagaagtacaaatataattcgagtcggataaattttaagtttaaactgagattggattctaattagctttaattaccggttatttgattaataggatcttttaatttcaatactgattaaaaaagataataaccacaactaatccacctactaaataacccagaaacttaaaaatctgaaatattaatcttgtgaaaatctaatatggcaaatatttttgattttctagaattatgggacatttgaactatgttaactaaatattttccgattgtataaaattatgataaaaaataatttctgattatgggagttaattcgtttccgcttattatggtaactaattttgtataataaagatacgtaatcccatatttaagggaaatattctataaaatatgttacatttatcaaacaaattatcaaaagagattgttaaaaaattatttcccaaaatgtttagaaaatattaaattctttattttcagctaaacctaacgacactaaacatctcctctatataaactgatcaagttactcttttatcacccatcaacaaacgtattgttaagattagataattatctattattgtgtttatccatttatcccttgaagaccacgtgacttgttgcccaagtttttgataagacttatccaatcagctctcccctctcctatatattgacatttcatttgtgaaaaaatacattaataagagaatcactttaataactctcttgtctcctcttcttctttgttattttattctggaatattataatatataatattcaacacgttatcaacacgatcgtctctccgggagttgtctaaccaaccgatcgtctatttgatcaagcatcttttgaggtaacatttaaattatgttaaattcattttaattcatttataagaaattatatgcttgctatttttggagtatgaggttatacctcctccttaatcgaatggtaggctatgcctattcgaaatgccataaatggctcattaattgaatgattatttatctatatagataatcatgtcaaatctagctaatctcgatatcgttgcccttgatgtatcaaacaaaattatatgtcatgggcatcagatattaagatgcatcttagatcaaatgggcttcttagcaccataaatgcatctgaaacgatattaaatgagagcaaagctaaagccatggtatttctacgccaccatctccacgacaatttgaaaaatgaatacatcacgagagaagatcttgtggatctatggcaatcacttaaagatcgtttcgatcatcaaaaatatgtgattttgccaaaagccagacatgaatggctaaatctccggtttttggattacaaaagtgttggtgattataattccgccatgttcggaatcacctccaggatgatattatgtggtgaaaaagtgagcgattatgatatgattgaaaaaacgctctccacctttcatcctggaaatgtaatcctttaacagcaataccgggccaaaggatcgttattccgagttgatgcaagtccttttggttgctgataaaaataacgaactcgttgtgatgaatcatttatctcccccacctggatcagctccacttttagaaatgaatgttgctacatctagtgatgataattggtgaggatccagaccttgacgaggctgtggtcgtggtcgtgggagaggttgtggtcgtggccgaggaaaaggaagaagttttcatcacaatgatttcaacatggataaaaccaacaaaaatcttcatgtgaatgatgttggccgtgttaagaaatgacaaattgaaagcacttaccacagatgcggcatgaaaggacactagtacatgacgtgtcgtataccaaaatatttagccaatctgtatcaagcctcacaaaagacaaaagaaagggatgttgaaactaatctcatcatgataagccgggaccttcctttaaaggccaatcatcttggtatggcagattttctcgattgatcatgaaaacgagaaatcaatgtaatatattatagccatatgtataattatgctatgtatgacaaacgttatagatgattttgtttttgggataatgttttattgtaatatattatgacatatggatagcctatgtcaaaatttaatgaataaatattttatcccagaaaaatgtaaaaatacgagattgaggatgaagatatatgtctggcggacagtgcttctacacacacaatctctaaagataaaaagtacttctcctctctcgaaataaaagactctgctagaagcgtgagtactatatatggccattcaaagataatattaggcttcggcgaatccaattttacaatgccaaggggaactcattttaaagtaaatgatacattatattttcaaagatatccgaagtaatgaatatcatatagagactatcaataaagatggcatcgaatatttttgcttaaattccgagatgcaatatatattagaagaattgtcaatgttatccttcgaattatattgcacaaaaataaatagaatcgcatcaaatgttacagtaaactcgagtgacaatcactcaagtgagtttactagtattgacatcctgattcagtcatgatgcgaaaaattgtgcaaaattctaaagaccatccattaaaacaagaaaatatttaaatttgtgagttttcatgtaaaacatgttctcaaggaaaactcataataaggccatatccaatcaaaattggaagtgaaagacctgaattcttgtcgagaattcatggtgatatatgtgggccaatccaccatggtgggtttcgatgccttatggtataaattgacgcatcacctagatg

SEQ ID NO: 959 - DNA, 1546 bp, Arabidopsis thaliana landsberg
agtgtagtgcccatccttcccccaagataaagctccatgcacaagctgtgtaagcacgagtacactctcaatccaattcgcattctgaacacaaaatgttcaatttcgtaggagatcgcatatagtccggctcacatctttagcaaatcgcataaagaatgactcatccaaagtgaagagagagagataagagcatacgagccttgaaaagagaggtcacttcttctcttcctcgctaaagacaaagaaagtgagataagcgaacacatcgacgggtggtgttgtcgatgagagacactccatatacgttgaaacaaaaccactgcaggatctgacgcatttgaatccattttctctatacaatttacacaagagaagatatttttaaagaatttcccaaagagatctatagaaatttatgtgctctattctcttaagagactaaagaagttgaaagctaaaagacataaatcaatgaaccttgacataaatggaaagagccttggtcaaattctgcgtcaccttgaagcaaacagagagacgaaaaaggagagagcttttaagggattcttcgtcactaatcaaatcctccggaagagacgaccatggaagagatgaaccggaggagaaagctgagggaccgccgtgaagattgggaaggaagaaatcggctgaggagatgaaaatcgaaattgttggagaaatctaggttttttcgggacagagagagaggtgacgaccaaatgatttttatcttttcatcacctttaaccaaaaacgtgtttgaggaaaccaatcaccacgtgccacgtcgtctgattttgagtatcaacaatatcattacaatgatacggctcaggcccaagcatatcattcggtccattaaatactattttctgggcttgtgatacttaaaaaaaatcactggtgttcatggtcttatctttctatcaaaatcctaaattgcaacttgctgacgctttaccggtccaacgtaactttactacaccttggtaacgtgtctaataagctgtatttagcaaaattttaccatgtaatatgtggtttacttttttggcatcatttgtttcgacataaataattaatggaccatcgacgttaatgaacactcattctatattttcttccaaaatggaccatcaaatttaacaaagaaaaacatgtttaaaaaacaaatgtagtttcatacttcgtattgggattaacaactgtcacatgataagtgcaatagttatatgaataattcacgtcacagtatgtcaaatttttatatcaaaattttaaaatcgcaacttgcaaatacaaatactactcttttcccctccatttctattatagtattaaaactaaaaaggtcagaaggtatgcataatttgtgatagaacatttttcttgttcatgaatcgaaagatgacaatatccaaacttcccacgtggttatcattccaaaactgaattacgccgtcgcatataacatatcttattttatttatccatttttacaatttaatactcactctaattt

SEQ ID NO: 960 - DNA, 1792 bp, Arabidopsis thaliana landsberg
aatataccaataaggcattttcaaatttatcatatatggatgctgaatatttaattttcacataaaacttaattttctgccaaaaatatacaaaaggtatggttaatatattaataatattaaaaaatgcagtgatacctaaacgaggatgaagtgccacaaattaagagtgagacatgttgatacccagaaaaattcataaattcatagaaactaataataccaaattttgaaaattaacaaaagacatgatatattatgtttaattgtgaaatttgaatatatgaaagatatgattttcgtcattttaaataaaagtaattaaatgctagctgaaatattttcaatagcatatcttgtaatttcccacataacatatgattattttgcaaacaatattgcacaatattataagattctataatattattactaagaaggaatattctcaatttagaagtgggatttgttacaaatacatgcaatattcttttaccatcagatataatcaaccaaaatttcgcaataattatcaacctactagtatttatcacccgttttacgaacgggtaatgtaatacttgtgactatgactggtactccgtcggacggtcgcgaacgtagaagtgcgatcgtaacttaggaaaattttcgataagaaaatttaaacggacttgtgggtaaatcaaacatagaagaatagtttatcgtggtgtgatttaagaattaagactttgttgatatttttattgggtgattttgaaaattgccctatttttaagtttttatttgaaaaatacactctaccctatttttaaataaaaatacaatattaaatatattaaatgacaattatatctagatttaaaacaaaagaaatatttttaataaatttaaattaaaaacgaatttttaaaagaaaaaaaaacttaatttaaaatcttaattattattttaaactattttaagatgaagacagtttatatattttaaatattaaaatcaatgatattatcagaaaatattctaaagtttatcacttcatatacatatctcactttaactctacattttgttttatcaaaaattctttaattctacattattacccaagttttgaactaatttagctttgtttataaatatttgtaatttcaattataagaacaatatatgtttgtaaatatgatttaacttttctctttcaaagaatattcttttttttctttgtcttgtaacaatatttttttttaaaattaaattcaagataaaatcatatgtaaattgttagttagttacatcaaatatttttaaattaaattatatttttttgttgtcgacaaaaaataacataaaaatctgatttttgttttaaatattaatgtttcaatattattagtaaggatatatttgtaattttatatttcttttatattttaaaaaatatattttaaaagagaaaaaatgggtagattatttttcaaacaaaaacttagaaaataggcatttttccaaattttctctaatattaaacggttaaattcaaatatagcaattgtacactaaataatatatagatataaacgttgtgtatttataaaatacaacaaaataaatcatttatattttcaatctactaaacaaattaaaatttcatttaaaaataaataatatagtcttgcgatgtaccgcggattaaaatctagtatgttacatatgattattgttatttacagataatatatagtggagatatgtgacagagatacagtgagaactatatccaatggag

SEQ ID NO: 961 - DNA, 5655 bp, Arabidopsis thaliana landsberg
ctgattatattcaatgcaacacacacttcctgagccctcccccaaacttaaatcacacagtccactatgtgaccaaatttggaagagagtacttaggacaaaacacatcacagaaaaaaataaaaacaggagatggtatattacaatggtggagtgaggtgcttacctcagtggaagaaggagcggagttggtcgtcaatagctgcctgtgattgcttccccctgtgggtactcgacctctgctccttcgtcgcggccagcagcgctctaatgatactcgacctctcttcttatgctgcggccatcaccgcagtcgcgtaagctacgggactggagaagtcgtgtactcctactgccagaccgagcgagtgcagccttcttctttctcccgagctcccgaggctcgaatgatgaatgcctcgcagggactggtgggactactcggtcactaggctcaggcctgtggtgacttggctcaggccagtggcgagttggctctggcgcgtcatatctcctcgagggcatgtcctgaggaggctctccctgcggaatagctgtggtagaagaggagcagcttagcttgtttgtcagaaacttgatggccttgaagcacttgatgagtagcctatcttgtttcttgcaccacctctgcaacttactgttgtttctgtgagcttcgctcaagctcttggtctcccgcgctagaggtacatgctcactgaaatgatacatgctcgtatcgtactcctcctccctatcctcatctgtctcagcaatctcatcctctgtagcttctattgtagggacgttgtcatcagtcggtggagcgctctcaaagtagaggtaatcacgcgcaggcttgaagtcaatgttttcgccctggagtatggttgtggcctcggtgcagggaagcagaatgttggctgttcgggtcaaggagtgctcgaatttgtagcgatagaaatcgccaaccatatcgtgctccagaaactcacaacgacgcaagtgatctaaatccatcatcctcggatcaagccctggagacgtgagaggtacaccacatgcaatcagaatcggtgtcacaacaccacttacacttcccgttggtgtgcgcccacttcctgtatccacacaggtggatcaacagaagcataaccggtggtgcatcattgaggtcgcccttcaggaccttcttccccttttttctgcggagaatgcccttgagtgcagaatcaatcatctccatgtctttgttagacacggtacctgtagattccgtagattacagaacattcactacagagcattgatagtagcggatcacagggcttcgaatctggttgctcttggacctcgcagagttgagcgccatatcgttcccaatagttaaccacaaatccttcaactcttccctctcgaactttggtgtagtttccttccactggggaagccaaacaatccttccaagcgcttgattgataacctatactcatgaccatacacacagaaccgcaagagtccctatccttcacaatccaactcatcagaggtcataccttggtagagctccacttgcagcgtggagaggaattgaattatctcatcttcatatgctacatacggataagccatcagagtgtccagatgacaactctggtacaggtcctgaacatcctccaacaatccgagttgtgcaagtgtagtcgagcaaggatacctcgtgctacagaactcattcaacttgaagaggcgaatatattcctcagcaggcaatacgtcgggtttgtgcagaagtttggtagctgtgcgagtatgctcaggcatgtactcgtcttccagatcttcgtctagaagctcatacctctctgtcatcgctctcttccctcgggctatctcagcttttcttctgaacctttcatattctctttgttctctctcaggccttgaagatgacgactctgtctcatccatgttgtagtcaggatcaacagaagaactgccactgtaattgctcatgattcccctgtaaaaatttagaactcaaagctcaaatgtcaataggttagtctcaaagatagcaatgaaaccaaaattgttatcaatatgcaatgaaatagaccctattgatcgagtacaattctgtactcgagtagactgagctgttcttgagttccccttagacgaattggatcgagtatcttctccgaattcgagttggaatgctttagtaggtcgagtgaatcgtgaagcctagaggtcgagtaacttctctgaagttgaaaagctctgttgaattcaagaacaagaagccgagttgcttttgcaggggtcgagtgctttatggtggtcgagtgaattcttgaaatcggctgaggcggcgtcggtcgagtgcggctacgagattgggaaacgaggtcgagtagcttcttttgaaagagacggcggttgatgtggatgaattggtctagtatagctaaggaattgattgaagtggtctggtcgagggacggagggaatgaaatggtgacggcggcggggaggtcaagtgattcgcggaggtcgagtgatttattctagatcgagtagttatttgggcggcgattcgtggtgtagagaaattggagtgtcggtggtgagatgaaaagaggtaggtcgagtggatatggttaagtcgagtgaagtttcaaaaagagtggttgagtttgagttttagattatctctccagcttatcctcagcgcgtggcccacaatctgttgactgagaaaatttgcagaaaacttactgtaaactgcatgaaatccctgcaagtatctgtagcttctgttggtcgagtaagatgatgatttaaaagttttaggtttttaaacatcacacatactcgaccaatgtactcgagtgcaaggtctctaggtgtaacagaagattttcaaaattttgtactccaacgggctatacactcgatctccaggtcttctgtagagtaacagttttgaatttttactctatctccacattgttcctttgttcctgagaaccacaaacacaaccaagacaaatcaaaaataacaagaaaataaaaatttatttacagagatagtcatgggaattcctcccaagtgagcttgtttaaagtcattagcttgactcctttactcctttaatcatcaagaagttccttgagatgaactgatgtcacctttggaaggatttgatctgctaagtatttcttgagactttgaccatttactgtgaagtctccactcttaccagctagagtgactgctccataaggacggacctcagtgatacagaaggggccagaccatctggatttaagttttcctagaaagagtttcaagcaagagttgaatagcatcacctgatcaccaacctggaaatccttagtgatgatcttcttgtcatggaaaaacttggttctctccttgtagattttagagctctcataagcttctagacggatctcatcgaggtcactaagttggatcaaccgcttctcctcagcagtttttatgtcaaagttcagaagttttaccgcccacattgctttgtactcgagctcaacaggtaggtgacatgattttccatagagaagattgaaaggagttgtaccaatggaggtcttgaaggctgtcctgtaagcccataatgcgtcatcgagctttgcacaccagtctttccttgtaatcccaacagtttttttcagaattgtttttatctccctattggagatctcaacctgctcattcgtctgtggatgatagggagtggcaaccttgtgctttactccatgcttcttcaagagattctcaaaaactttgttgatgaaatgcttcccaccatcactgattactaccgaagaaactccaaatctcgggaagattatggtcatgaatagccacagcacaacttttgcatcgttggtaggactagcaatagcttcaacccactttgatacgtagtttacaacgaccagtatatacttgttaccgtatgaagatgggaatggacccataaaatcaatcccccatacatcaaagatctcaacttccaagattggattctgaggcatctcatttcttctgctgatattgccttttctcttgcatgaatcacactttgaaacaaactcttgagcgtccttaaacattgttggccaccaaaagcctgcttgaagaatctttgacactgttttgaacgttgcgaagtgaccaccatatgctgagtcatggcaatgcagtaggataccttctacttcatcttctgagacgtaactcctgtagatcttatctttacagagagtgtaaagataaggctcatcccagtagtaatggtggaggtctctgaaaaaattcttcctttcataactggtcaggttgggaggctttactccgcatgccaagtaattgacgtgatcagcataccatggagatcctccttcacagcgttcagttggtggaactctttcccactgtagcatgaaatgacacttttcccaattgtgaacaagatttgtctctttgcacctggtcaataccctgccaagattcaacaaacatgaggagaaagaggggccatagaccgaaaaatcgtccatgaaaacctccaccatctcctcgattaagtctgaaaatatagaggtcatacacctctgaaatgttgcaggagcattgcataaaccaaatggcattctcttataggcaaaagttccataaggacacgtgaaagtagtttttctcttgatcattagggtgaattggtatttgaaagaaaccactgtatccatcaagaaagcaataatatggatgattagccaaacgttcaagcatttggtcaatgaatggtaaaggaaaatgatctttcctagatgcagcattcaactttctataatctatgcacattctatgaccagttatagttctagtagggatcagttcatctttttcatttttgacaacagtcattccaccctttttagggacgcaatgcactggagaaacccaagtactatcagagatagggtagatgacaccagcatcaagcagtttcaaaatttcttttttcactacttctttcaaattgggatttaacctcctctgtggttcaatgctagaataggattcgttttcaagatggatcctatggttgcataaactaggtgaaattcccttaatgtcggataatgaataaccaatcgctctcctatactttctaagctcaaataatagcaggttcacttcatcactatttaactcagcattaatgatcacagggtaagtggagtttggaccaaggaatgtgtaccttagacctttaggaagtggtttgagatcaaccttcggtgccttaagttcagaccagtcatctgaagttggaatgatcggctccccagattcgttggcagacaaggtcgagtggctggtcgagtacgtcctcgagagtgcaggttgaactcgagttgacccttcttcgctcattaccattacctccgttgctggtccattcaatttctcaaagggttctgattcttccatcgctttatgggagtctaacagcttctggtatcccaatgtttccaaatgcagaaacccatcttcaccacttttggttaaagcactgttaagatgatcttttt

SEQ ID NO: 962 - DNA, 7896 bp, Arabidopsis thaliana landsberg
aagcaccactggttactagaacaaaagcttctcaactttgtgtatgcttttcatcaatacgtaatgggcaggggattgtccgatgctaagtgattggttataattacagtatcatttttcgttggagtaatataagtttgtgctagagttgtggcaaaatcgaaagctgatcacatggcttgagtaagatgaaaagcttgccatgcttaactgtattttgtaagcaggtatatcacactgcgtggcgtgaactgtgtgaagcgatggtaaaagcagggtctctggatgaggtcatatatgtacatgagacctacttgttatcgattcagcggcaatgctttgtggttcaagaaaagctggtaatggaccatgaaggcattaagcgacctcttaaaatgcatagtatatatttgaagttgtaggcttctaaaaacctagtgtttggtggtttttgtatagtgggcaatcatcgcaagtcggatcaacatgattctcggtttagctctagaattctactcaatacaacagacactgagcagcggtggagcagtttcagccatcaaggctagatgcgaaatggaaatagaccgtatagagaaacaatttgaggactgtattgctttccttctcagagtaagtaaatcgaaaactgtgtacttgttgtattgtgaagctatatataattgattaatgcttaatgggggatggaacttgcaggtattatcttcgaagctgaatgtgggacacttccctcatttggctgatttggtgaccagaatcaattacaattatcactacatgtcagatactggaagcttgatgactacttctggagcagagaccaactcatccagaccttggactgccaaatctgatgtatgaatggaccgggaaattatcgcaatgttggattgtcgcaacactatcacacgtaattgttcaagcctcatgcttttcttgtgtctggtatctaatttcctgattatgtaatttctgtttataaaagttcactgttttgaattagacattgtacaaaactgctatcaaggtttaaaaaaaaaaaaacattgttaacattcttaacaagaaatcatcaaagtttaaaatctaatcgtgaccctactatgcatagtacatatattaagcattaaccaatacgacaaaagaaaaaaaaaagcattaaccaaaaacaaaaagacgataattaaggttataggttatgagtttattacgaaaagcccatttatggatgcaattaagcaaaccttgttggaggacaaaatggtcaaaagaaagaaaacgtaaaaccctaaaacatttctttaacactcgacttgtctcataaaccctttgtgtttgtagtctctctactctctagatcccatcccatttcttgatcagcctcgcgcattgtgtgcttacacgtaatcctctagcttctttcctcggtattccttgtctaattcgaacttctcttttttttttctgggtccgatcgtttcagtgaaaggcgtaacctttccttcgaatctgatagcattgcaaaatgataatgttagtctgatttttgttgggtgtgtgtcttttgattgaaagagcaggtaatttccagagagattttcaacagaggaagcatgttcgctctttccaaggttttacgaaggtaaggatctctgattttgttcgaaaaactgttagggatgtagctatgtatgtgtcttcaatggcagtgaaacagatttcgagtaaaatttgaaattttgagcatggttttgatttgccattaacatatctgtgttgagttggtattagcacacttttccaacttttgtttttgtgtgtgaattttacagaacgcagagactccgactgggagcttgttctgctgtgttttcaaaagatatacaattaggaggagaaaggagctttgattccaattcgattgcttctactaaacgtgaagctgtgccaagattttacgagatctcctctttgagtaatcgtgctctttcctccagtgctggcactaaaagtgatcaagaggaagacgacctcgaagacggtttctcagaactggaaggttcaaagtctggccaaggttcaactagtagtgatgaagatgagggaaagctctccgctgatgaagaagaagaagaagaactagacctcattgaaaccgacgttagtagaaaaacagttgaaaagaaacaatctgagctatttaagaccattgtctccgcacccggtctgtctataggtagtgctcttgataaatgggtggaagaaggaaatgagatcactcgagttgagattgctaaggcaatgctccagctgcgcaggcgtcgcatgtatggaagagcgttacaggtagttctcttcttactcgtgatttaactttctgtatctgaactggttcaagtgcttaccttcgtttcttttttctgtttgtgtagatgtcagaatggttggaagcaaataagaaaattgaaatgactgagagagattatgcttctcggttagatctgacagttaagattcgtggtttagaaaagggagaagcttgtatgcagaagatcccaaaatcttttaaaggggaagtgctttaccgtaccctcttggcgaattgtgttgctgctggcaatgtgaagaaatccgaactggtgtttaacaaaatgaaggacttgggattccctctctctggatttacttgtgatcagatgcttctgctccacaagaggatcgacaggaagaaaattgctgatgtactattgctcatggagaaagaaaatatcaagccaagtcttctcacttacaaaatcctgattgatgtcaaaggtgcaacaaatgacataagtggtatggagcaaattctggagacaatgaaagatgaaggtgttgaactggacttccagacgcaagctctcactgctagacactattcgggagctggccttaaagataaagccgagaaagtcttgaaagagatggaaggtgaaagcttagaggcaaatcgccgggcattcaaagatttgctctccatctatgcctctcttgggagagaagatgaagtgaaaagaatatggaagatctgtgaatcaaagccctactttgaggaatcccttgctgcaatccaagcttttggaaagctcaataaagtgcaagaagcagaggcgatttttgagaagattgtgaagatggacagaagagcttcttctagtacttactccgttctcttgagggtttacgtagatcacaagatgctctcaaagggtaaggatctggttaaacgaatggctgagagcggttgcaggatcgaggcaacgacatgggatgcactcatcaagctctatgtggaagctggagaagttgaaaaggctgattctttgctggacaaggcatcaaaacagagccatacaaaactgatgatgaactccttcatgtatatcatggacgagtactcaaaacggggagatgttcataacacagagaagatattcctaaaaatgagggaagctgggtatacatctcggcttaggcagttccaagccctcatgcaggcttacataaacgccaaatcccctgcatatggaatgcgagatagattgaaggcggataatatctttccaaacaaatccatggctgcacagttggctcaaggtgatccatttaagaagacagctatctctgatattctggattgagtggtctctctccctacacttttcttctttctgcttgcaagaagtatctcatttgtcgtcctaacgtttagtttgagagagtaacgttaagtttaagaacctgcttagttgctgtgtttttaatgtttctattcggttctttggtgatcacacttcagagaccttcaagtttcatgacatttaggagtacacgaagaaaataacgttttcaaactgcgcggattctataccgcaaaattttacaaagatttagccactcttcttttaagtggaaaataaacagaattattccaaaccattaaaaactctgatgagaaaaacagagaatgttacaataactctgcttataatgaatacagacttactaagacctcaatcaccccaacttctttccttttggggcagacaaaaaaaactcgcaaacactaatcgattgtgagctaagaagacaactagaagtgatcactcagtcactcactcctcactaagtacagtgatcactcagtcactcagtcctcactaaatacaagtctgcttatgaatgggcacatggctgcaagaagtgccttgggacactcctcatgtggcagatgtccgcatcctgagattgctactagcctctgtttgttgacatgtataatgttagttacgtatcaacagagtttaggtgtttgattagatatagagagggaggacttacagagttttcgagttttgaagccatgacttgggaggacttgaggggaacaagtgcgtcttcggctccagcaacgactaatactggtaagttttccactgccttgagaagtgacaatgcattttgagttggaagcaccatctcggatgagagtctgcctatctcgtgaagtgcctcatcccagccttccacatgaagtggtgccttgtatagccttaagacatcggttgtcatcttggcaggatcataccaagctctgcgattcaccacctgagctatttcagtgcgtaaaagcggacgaacaaggtgtttctttcctagtgatgtgtgcagaagtattcttgcaaaagctggcactacttccctcgtcaagcttacattaagcaaaaccactcctttgactttgatgggatcttttgtttctagcaatctttgtgcagccttgagagcaagcaaacctccatcatcatggccaaccaagactacagaagcaaatcccatttcgtggcaaaaggcaagaagcatgtctacctgaaagcatcaacagatccttgagttttaacatttctttctaagagcaaagacaaaaagctctcataagtaataaacatagtccggaattgaacagaacttcacctgattatccagagtgtaagggtttggcatctctctttcttccaaatcctttttatgaggtctggcggttaatccccaaccaggcctatcaaatgcagtgacaacacagccaagttgatgggcaagagaactcatcacatgtctccaagaaaacactcctccgccaaatccatggaccaacactacaccaaattggccgtttccaccaacatcttgctgttccgtggcaccaaaattggacacattgatgccatcctctcggcacgattcttcctgaatatctttgaaaagacgaggagaagtaggaagaccatcaaggagagggtcgtgcaaggaagaagaattgttaaacagactgctgtagctcctatggtggtgatggttgagcttgtttctcgtgaccatgctcaatatattcctgtcaagcttcaaccttcccaccatcgcctctggcatattaagcatagagttggcttcaactgaggaggagatagagtggcgaggagaagcaggtgtgcaaattcttgtaatgcacagtgagccctctgactgtaatgaataagctgtcaagatcagcaagcaatctcgcaggtagctctccgtcatcgttggatactgaaggatgcagctttcgtcttgcctcgccatcaaccttggaggcctttcctaccaaaggaattggagaacgtgggactttctggtaaccagagaagacacttttgcaagaaagaacctgcaacacaatcaataagttaaacaaagatcaaagctttggagcaaaaagagaagaagaagagcatgatgataataataaactcacagcttcagggtcaactctgtgatacaagagtttcctcctagctctgcaacttgttctataagcaacaaccatatgaccaagagcaaaaaccacagatgaaaggaacaaaactggcatcccccaagactttttcagatggagtctttgccttgacggagaggacgaggcttggtcgttaagttgagaatttgcagtaaaaacgcaagcttttactgatagaagaacaacagaaacaacagaacacagcgatacagttccaaggtaagggccatgcgaaagtgcaggagcatcggatagagagtagacacctgttcatgaacagaagaatacaatcatatcgagaaaaagcaaaactcagagagaaaagaaggaggaggatggttcttagttcttacagatgacaaggaaagatctgacgagggagacgagaggaatatcagtcaaagagctcttgaaagcgtatcgactcagatgctccttgaagccgtaacacgtcaaacaggtaaagcttgaaagcaaaaaggtcggaaccaaaacgtcgccgatggctacaagcacaggcaaagacgaaactaacagcgagaccaacatcgcaaccatgaagaacaccgtccttaagcatcttctagctttctctaccatgaaccaacctttccccattcttttaatttcccccaaaatattcaaatccgaaaccggagatcgtttcgtttattccgatacagatccttaaattatgagggagtaggaaccatagagagaagaaacggaaacgaccaacaatccaccaacttcggaggatttcgcgacgaaggtggtggcgagttggccataagccggcggcgaggatgaagagaaaaaagcgaccccttaaacgcaatgagagagagagagagacggatcaaaaacaaaatcaaagaggaaaagccattgctacgattctgaatggaaagcttgaggagtttcagaatcgcaggaacagcgaaacaatgaaggaagagaaaaaaaaagagaaacttttggacgatccggaaattaaacaaaaacctccgttttcttctgctcctttttttctctacaacgtttctttctctctttcaaacacatacagtagtagtacataaattataataatcatatgtagtattattacgaatatttatttattaaattctttttttacgaatattttttgcacgattctgcttgggcctatcagttaccatttaccagaaaagtcttaattggcctaatatataccctttatattataagaacaaacgaaaaagaagggaaatgcgactattacttagctgtattatctattaaaattagtagttttgcttacattcatggaaataatgtttctttaaagagtaaaaatattttctataaagttataaacagaaataatacggtcatgacaggcttgtttttaccctataataagacatgcattttttcctctataaaagtaatttcagcaatttttgtatctgagtataagaaaaataaagaaagaaacaaccgagatgacggttatacccctatagagaagtactgtaacagtgacaacggatagcgggacgaacgaggctgtttctttccttttcttttttttaattattttgtgaccgttaactttcaaacttggatttcgtgaggttttttcttgaagattcttgtcgggaccatttttatttacacagcagtccctacattcctcatcttttccccaatcactgtctatatcttaaattaacaatatgggccatccattaattttatcgcttttcacatgttaattatttgcaaaaacaacttaataagtatcaccaaactatcttgttgtaactagaaaccaattttatgttatccgactaaaatgtcacttgattcaagtcacaaagatcagtgtgatctaataatcaaatcacatgcctagctagttgattgaagaagggttgatgatataggtgctttagttttgttgaccctagaggcaaaccaaatgcatgaaacacaacacacttatagatata

SEQ ID NO: 963 - DNA, 2700 bp, Arabidopsis thaliana landsberg
aggaaaaatctacggtttatttagcgggtgtgccaagttcattgtctcatgagataaaggacagataccattttgatgttggtcatctaccagtcagatacctaggtctaccattggttaccaaaagacttacatcaacggattacaggtcattactagaacaaataaagaagaaaattggatcctggaccgctcgctacctctcttatgctggtcgtttgagcttaataacttcagtattgtggagtacctgcaacttctggctctctgctttccgtcttcctcgaggttgtatcaaagagattgagaaactatgttctgcatttttatggtcaggtcctgatttgaatccgcataaagctaagctcagttgggttgatgtctgtaaaccgaagcaggaaggaggacttggtcttcggcccttgaaataaataaatgatgtctgctgcctaaaactaatctggagacttgtgtctcatgcaaactctctatgggttcaatggatagaaaaatatctactcaaagctgataccttctggtccgttaaagccacaactaataggggctcttggatgtggtcaaagcttattaaatacagagatgtcgcaaaggagttttgtaaagtggaagtgagaaacggacaccgcacctctttctggtatgagaaggcaatcaacagtggctgaggcttggactggacgagcgagaagacgacacagattggagagccttaatcggatcgaagaagctctattgtttcagagacagaaccgttgggatgttgaggacagagtgttgtggaaaagatcaactgatcactatagagccaatttctgcacaaaagatatatggaagcagcttcgttcagggtcgagcaaggtttcttggtacaaaggaatatggtttacccattcaaatcctaaatactcgttctgtacatggctagaggttcacggcaagctcaccacgggagatcgcatgcttctttggaacaggggaatgcagacatcttgtgttctgtgtgacagcaatgtcactgaaacaagagatcacttatttttctcttgcagatttgcagcagaaatatggagaaatctcgcaaaaaacatctacaaatctcgcttctccacaaattggtcgtctttattggttgcaatctcaggacaatggcaaaacaatattgagagctttgtagcccgttacctcctccaaacagcggttcacaccatttggggtgagaggaatgggcgaagacatggggagtctcctaactcgggtactcatctggttcaacggatcgataaacaagtaaggaacagaatctcagtaatcaacgcaagtggagactgccggtatgacaaggccctccaatattggtttcaatctagaatgggaactaactagcaaatagataaaatctctttttaaactctttcggcaaaagtcgctcgatgtacaaacgctatttttcttttgagtttaatttaacattacattcaaaaaaaaaaaacaaatgcctccaagaaaccagagtaaagggtttccaactttttaaccttatgtttagagtttcgggtctgaattcgtcgaacttggtttcacatttaaaagttgattaaccttatgacaacaaaaataagactttggtcatgggcatatatcaattgtctctctctcttatagaacttattttgatgcaccatctttatcaatcattgtctttttgtctttgcaacattcatatctctaagtttgtcgaccatacattacctaagattccatgttaatggtcttatctcagaggaaaacaattaaacaagcgttgcagtgcttgcacccactccattcatctccaatcattctatggatgtatcgattgtgattttattcttcaccaaaactgcgctgaatctcctagaaagaaatggcattttctacataatgaacgtcttactttagttacaagcaagggggattactttcactgcactgcatgtgatagactcttttccaatggtttcaaataccagtaaggggatatgaagttagatgtaatgtgcggttcaatttttgaaccgtttgtcgatccaagccatccctatcatcccttatattacattccaccggtaggaagaaaagaatgcaatggttgcaacaattggtcatctcttgtgcttacgtgcattgaaagtggttctggattttatttatgcttcgattgcgttaggttaccacaagtggtcaaatataaagtagacgttaatcctctctcactatggaatggcgaaatagcaagtggcaaatactgttgtgacatttgtgagaaagaaacgaattcaagtacatggttctacacatgtaatgatcaccgagctagtttgcatacacaatgcgtgctgggaaactttgcaaggctcacgctaggaagcaaattaacatattcccacagatcatatgaggtggtgcgcaataataatgtctcgaccattttgcaaagcttttgagtcgcattgcaagtaccctatcatcttgaagattcttggaacctcagatctatacatttgctctcattatattctaaaagaaaatacagttattacaaccgaatgtagaaacatgtttgatcactttaagacatttttagataaagagcacgagtctcttctctagagctgctctatggctgtgctatggttgctg

SEQ ID NO: 964 - DNA, 1173 bp, Arabidopsis thaliana landsberg
  unsure (1)..(1173): unsure at all n locations
ttttgtttggtttgatgttgatacagacttggcttcatttttttcaagaagcagcaaaagacttgagaaaaggtggatcagaggcaggggctagaaatttggagctggcaacagagcttgaaactgttaccagaaaattagatcagcttcaggaatcggtacaaaggttcaatgaatatttgaatatgtcacttaagatggttcagtctttttttggttttataaaactgnnnnnnnnnnnnnnnnnnnnnnnnnnnnnnnnnnnnnnnnnnnnnnnnnnnnnntaactgaatcaggccgcacgagacacaggagcccttagagaggcgaaagagaaacaacaggagctggaagaagcaaaaacccaagaatatgcaaaacaacaggaggctttacaagcaatgcggttgcaagttgaagaagcaaacgctgccgtagtcagagagagggaggctgcaaggaaagctattgaagaagcacctccagtcattaaggagattccggtattggttgaggatactgaaaaaatcaatttattaacttcagaggtggaggctctaaaggtacgtatgtgtgttttcacgtattggataatccgttatgtattcactaacaaagtttgtaaatatatgttgatgagtcccttaataacgtgaagcggattggttggtttaaatcatattttattacagactgaacgacaagctgcagaacatttgaaaaaagctttctctgaggcagaagctagaaattccgagctggcgacagagcttgaaaatgcttcaagaaaagcagatcagcttcaggaatcggtacaaagtttcaatgaatatatgaaattgttggattaagcttgatattaacttgagtcacaacttgttaaatagattaggactaataactttaggagttatctagagttatattaggagttatctaatcatagtcctaataggtttaggaagtgttattaaactcttatataaggagatgtcttgtgtgacataacttatgagcttttgagagagtttaagagagattgagagtttaggtttcgagagatcttcctaaactaataaagagacttattcttttgagtttttaatctttctcttggattctagagaaatgtcacttaagatggttcaatctttttttggttttataaaactg

SEQ ID NO: 965 - DNA, 1742 bp, Arabidopsis thaliana landsberg
tcggaaacaacttgatgattttttggtttatgttcggttctaccgatgaatttacgagagtagattgtcttttcgcaggtggcttagtgagatttgccgtaattggtggatgagcgtttgtcgttttcagacaagccatgtcgatttctttgactgatgcttcccaatcgaatacctgtaggagaaaacctagaagttgaataattaaaaaattgattcaaaaacgcagaaagagattgaacttacgccgtcttcttcgatggtttctattggaaccctagatcccacccaagttaacaccaaacacgtcgtatccatgatgatttgtccacactgcattctcatttcaagtataacacaataaaccaaaaccgatattatcttctattaaatgtataacattatatcctaaccaaaacctaataaatccaatcttgtgactcatatggttgattcatccaacacacaaaagttcatacatcaatgaatatcccaatttcacgagtagcgccatctttttgttgccattagttcacttgtttgtagcactctaatcattatgtggattgatcattctagagtatattgtggatgctgcaaatctcaaaaaatcattagccatgagagaccaaacataacgagctcaaacttatgtcaaaacgatctagagtgcaaaatgtatcacaatcttaaggaaacctagaactttattatttcgatgcataagtttttaccgaagcgataatcaccaatttcacatacatcatccattttgctttgacaatttgctcacatgtatatggatactcttatcatcgttccttgataaatcttaccaaaactttttatacctcgatataacaataaacatataaagaaagtttgcgtctgaatggacagattcccttggatgacatcaataagtggtggttgagatcgttggtggggatgaatgtatgatggtcgtgaggatcaaaccaagcacggatcatgggactaagaataaagccgttggctttggccaagcactcgctaaaacgaaatcgtctttgtgtcaaacaaatccttcagaatctcgacgactactgctcccaactcgccgaattcgatgtgtcaaaccctaaagaattgctctgcctgtagaacagaacatgctcagagacggaagcaaaggtggtggtggagaagcgatggtggacaatccgagaacaattgtagtgagagatagagatcttggttttggctattagttcgagaaagcaaatccgacgaatgttgatgatgatagttgtacataagatgatgatcggaggagacgccattgaagaaccaaccaacaacaagagatttgatctaatttccagaaccacccatctgctcaaatttgaaacctatgttcttcaaaatttgaaatcggattcggcggagaaaagttttgagaatataattgtgaaaacctctcgagagaggaagaagaatagaagcaatagattgttgagagattggaaagatgatgataaattcaattttgattttgattttcaatattgagatttcctttaaagtttgattttgatcaattttgattctggaaagagagagatgaagaagagaagttgtaagtgttttcctaatctagaatgcgagtattgtcgaggagagggatagttggagggtagtgtagtcaattcaaatagagaaagtgcttactcctttgaaagtgtctaattacggacaaactt

SEQ ID NO: 966 - DNA, 1574 bp, Arabidopsis thaliana landsberg
agtatctctcgaggcgattcctgataaataatggcttgggcgaaccaaagatggtaacactagtgggaacatatggtacgaggatattggctgatcttatgcgggaaagcacagtaagaatgagcttgggaaggggatgggtagattttgcgaaagccaataggttgaagataggtgagtactttacactggagtccatttgggaaaatgactctcctattctcagtttgtatgggccaaatacttccaaaagtgataaaaggaagcgtagagagaactttccagtagcttgtgaaaaagagtatgtgtccactgaggctagaaatagaaatgaccccgagaaagacaagaacacacagcagatgattaatcaagcatcactaagcgaaaaccgattagtgataacactcgtaccagaagatgtcgaagccggtatgctggtaagcttataaaataaaccttgttttagagatcaattatttcttttatcttgaattctaatcaacaacaagaaatgtttatcaaatatcttgcagcgtcttccaagtcacttcatgaaagctaatggcatagacaaagttggaaaaatatatatgttgggtataaatgaaatggagtggtggtggggagatctattgacaagagatggaatcgtatctgtaggatgtggttggagatacttttgtgaatctaatggcgtaaagattggaaagtttttcaccttagaatatatgtacaaatatgacacaaggccggtacttaaattctgtcccaagtccgggaaataaaaataatgtttaattatagtatgttaagattttcatgtcttactctaaagccagtcctttttggttgttaagttaatggagtgtttgttgtttagttaaagatatataaccaaaatggccatattgtttaagtgggctctgttcgtttccctgtcgctggatccagcgacagcgacagcaaccatcgacaacatacattgttcgtttgtctgtcgctggattcagcgaccaattacagcgacaatcgctaataactgtcgttgtgttgttcgtttgactgtcgctataaacagtcgctatatatttttttttaaaataaatattttttgtgctaatttatattttaaaatcaaaatgtaaatcatatatcatacactatgagaaaaaataaattaatatatttatttatttaagttttatcaaatttaataagaattattttaattaaactagaactcaaatcccttgtgatatcgcagagaaaatattataaatttgtttatattttgacagaaaattacaatatagaaaagttgcaataaaagacacaagcgagaaaaaacaaccgtcaatattttttacggaaagttgcgattaaaagacacaaccgttcaaagtgcaaaaagacatttatttaagtttaatttaatttaattctgtttaatttaattatttttaattattttttaatttatatttttttatcgcaaagttgtttgtttgcatgtcgctggatccaacgaccaaaagcagcaactaatcgctgaaatcagcgactgatcgcta

SEQ ID NO: 967 - DNA, 5006 bp, Arabidopsis thaliana landsberg
cgatccaaaagacttgtccattgattgttggttttttcatagctttgttaatgttgaaggtcattttcatctccttccccaggtttaggtcgatttttcccttcttgacgtcgataatggctcctgcagtagctaggaatggtcttcctaggattaatgggtcttttggctcctcatccatctccagtattatgaaatcagtaggaatgtttattgatccgactttaacaggcaggtctgtgagaattccatgagggtattctgactgatctgtcagctaatatcaattggataccgcaaggcttctgctgagccagcaataacttgtctaacttttcatttagagccttgatatccttgctttgtttgtcctcacttcctccagttccactcattcagcaatcatagtcttcattgtagcacccatcagattgtgctagattttcgaccaactcccagccttctactacatccttgtttaggaagtttccattggaggcagtgtcaagtagcattctgatctttggtaaagctcctctgtagagtgtgctcaataatgaagccttcttgaaaccgtgatgggggcactgagtggtgtagcttttaaatctctcccaagcttcacagaaagtttcattgttttactgtgtgaagcctgagatctcgttcctcaatctaggggtgcgagcgttagagaagaacttggcaagaaaagctttcttacaatcatcccaggagttgatggagtctgggggtagagtcttctcccagtggtgtgtcttgtcttccaaagagaagggaaatagtctgagcttaaacatatcctcagtgacaccattgatcttggtaaagccacagagtctatcaaagctgtcaaggtggtccatgggctcttccataggtaaaccatgaaacttgtttcctgaccactcttgatctcaaagttgttgttctgaactggtggaggcactatcccttgtctttggtgatgattctttggggcatcaccagcaccaatgtttcatggttgatcaacattaggtgggtcttgaacatcaactggtctgttctgttgatccatagcagctggtctgtgttgatcacaggttgcctttgctttgatttcttgtaactcacgagctattctgtcaattctgtctctgaatggtaataggtgtgcagaacctttggatcgagtttccatgcacaaagattagtacctataccacaaaaataagcagacgaaatgatgagttagtaacttgaaaaatgtaaaagaacttgatcttaaaagtttatgatatcttgaatgtaacaatgcaacaatgaattggcaacggcgccaaattgataagcaagtttttcaggcctacttatgttgaatgtgtgattcagttcaattcccctaaaacacaaacatgtcgatgcaactatagggggtgtcaatccagtccactgttattgctagcaatcaagatgtgcacagaaacaactaagtcaagccagattataatgatggtgggtttctagaaacaatcctaggtcaggattcaaacaagtaaaaatgagtacttaagagccctactcgatcattgggtcgagtagaaccaaccggcagaattaaaatgcaatcaacaggggatgcaaatagaggatacaaataacaggtaaataaaagtgcaatcaacaggggatacaaatagatctaatagaaatcttaaggatggattcattgataagggcaactctagggttcatcagatggctaataggcaaaaggtaggtacccttgacgatagattcaaaaaccgggtcaatccactctggtgacagagacccccataactctactacttcctaatatcaactctcgttgatgaaacatagaagagcagggtttaagaaacaatctaccaaagccagtaagcagacaagccaatctcttggtcgagtctacaaatctctggaattcgtagatcagacatccatttgaacgtcttttggacgctggacgtctatgatcgaatctccacattagccagcaaaaaccccatagggggcaagcgaatccagaagagtataaacctaaacactaaccacctaactaacctagagattacccttttctaatccatcctcaagaaccctaatccctactcaagcaacattctcaagaacacaaatccagaaattactgaaatcataccaaaatgtagatctaaacaagctaaacaactttacttaaacaatcaaatgcaaaaacgaaatagattaagagtaattaaagtttcaagattcagaaacataaagaaaaactgaaagataaagtctagatcttttggacaaaccccaaaatgatctatttatagtaaaatgttgaaaccctagattcactagaagacaagagacttgaggcggtttgggcgaatactcgaccttggggatcgtgtaaagagggtgctgcaaagtctacgcctttgtgtccatgctccgagtgatcaattggtcgagtagatgcttcttcctctcctatctgtatgcttagaggtttggttgagtggggaatcaggaggatccgaagacgccttgaatgatcaacaagtcatgtagagtaggtcgcccttgatcgagcaaacgggtcgagtagaggatccagtaggggggtcgagtagggtctgttgcctcctctgtggctgcctggatcgagtgaattggtcgagtagaatgctctgctacttccctcctagtttgatagagtagagggtcgagtagaaatccttgtaagctccttctacacctgaaaacataccaaaacatgcaatatgtatgcaatatgattctatatgcctaagtgtgcaaaataagctaaaataatgcaaaatgatatgatacaatgagtgatcactaagctaaatgatgataaatacatgtataaaatgagtaaaatatagtgttaacccatatagagcgtttgaggaccttgttctaagcatcaaagctaatggagtctcagaggactacctactgtgcaagttcttcccttattcccttgttggctgaaataactcaaagcaggttccctcaagacttggagaagcatcaagatagcattcttgattaatttttacgatgatgctaagtttgaggcgctgaaaaacaagctgtctacctttactcaaggtccagcggaggctttcaaaaccgtttgggttcgtttcaaggagtatcaacgggactgcccgtatcatggcttcagtgaggtacaacttcttggtaccttttttagaagagttgattggaggtacctgatggctctagatgcagcgagcaatggtaacttcaatgcacgttaccccgctgatgttacctctcttatagagaatcttgcttgtagcaacaacactaaaaaagctgacttcgagaggaaaaagatagttgaagctgtttcaggcaatcagatggcaaaggtgaattctaagctggattcggttcacaacttgcttacagggaagaagcatgtccactttgcaactgaggatgagaccattgagcgtgaaactgagtccgaagagggagtcttctacatagttggacaaggctacagaatgtttgggcagccacttggcaactttagtggcaacaggtttacagggaaccagagatccttgaactacactccaaagcctgccttccagaagacatttcttcagagcaacttctagaggacttatggtaattcaacttaccaggcccccctccacccttattagagagccgaatggaatccatgcttgttattgagtttaatggcaagtttgatgctgtctacatagatcttaatgggaaaatcgacaatctgagctctcacatgaagaagctagatgtacaagtagctcaaactgcacaatccatcaagcgacaagaaggttttcttccttgaaaccctgatgcaaactctaggaagagctgtaatgtcatcttggtcagagatggagatgatgaatgggaggaattggacactgaagacgagttgaagctcgcagcagcagagctggtgtcgaccgacacctaccagtgtcgatcgacaccctatggaacactattttctgagacgattccatacgaaggtgtcgatcgacactgggtccggactgcaccatatgaggtaagaatcccgatgcagaccgaatctgcctacactcctcctgtcccttatccaaggaagcgtcgttctaagcaggagattcatgctgctaagtgcacaaccatcatggaaaagatcctcacttctcttcctaaggatgcttctaagacatcttcttctccactcaacaggtatgtcaagcgacttgttgacaatggcattagctcagatgaagcctcactgctgacaagggacatcagtgaaatcatgctgcataagttcaagaaagagaaggcacagagagtggacattgcggagtacatccgcaccatcactcatgattagaccactgagaatcttccagatccaggtagctttgttcttgattgctctatcttcacaagcaggttcagtcgctctttgtgtgacatgggatcaagtatcaacctcatgtctaagtctgttgctgagagactaggcatgactaactataggccgactcgcatcacccttctcttcgcggatcgttccaaacgaatccctgaaggaatccttgattttgtggtcctcgactatgagaaagaatccaaggatcctcttatcctttgaagaacgttcctagctacagctggtgctaggtttgatgtgaagagaggtagaatatctctaaaggtttgtgatttggagatggagtttggcatggatggttaagagcttactaagtctattagtagtattgcctctagcacaaccacacctcctccaactgctcagaatcccacaacagagccacacacaacactcccataagcttagctcgccaatgagagttgtagagcaacgatatcaattgacaccacca

SEQ ID NO: 968 - DNA, 1401 bp, Arabidopsis thaliana landsberg
atggagagcagtagaaactcgatcaagcagaacattaactcgggtctcgggacatgtaccattctggtatcttatcgatatgtaaattgctaacacatatgattatgaattttgcctcttaacagtgcagtccaacaccagctgaacttcacaaggtatgcatatgataacacacattgacaagtcgaagaactaatagggctaatccatcttctgtctaatatcatagaaaccgaacaagaataataaataaaagggttttatacccaaaccaaacatccaacattatataggggcataaagaaaatacgaaaaagacttagataaggatttagttccacaagctaacaaaaagactcaaaatgcataataagaaataaaaagacaaaccgctcaagattcagctttgaacatcatcgcttcagttttgttcataagcacagacctctggtaaagtagctcaaactgcttatccttaaacttcttccatttttcctccacttctctcttctcagctccatcctcaacattttcccaacccgcagttaatttagattcatccaaaccacaagaactcccgaacggcaccatctctctaccaatggagagaccttcgttcacaacctttgcgtctgtttcttcaggtttcatctctttgggtgcaactttcttctttgatgatttaccagcaaccaaaacaccgttgctcccccaaatcattatggacaagtcaaaacgttttttctcactctctttagcatactcgacctcatcttctgtctgacccttcttacgcgcattcttcacaaagatattaaacttcttcttcaacctctgaagtttagtaacaatttggtttttggtagcatcgaaatcgatcagtttcttcacataaatgcaaaaagcatcaatatcctcataaggatctcctttggtagatgtgaaatcaataataccttgaagcaaagcgatttcatccgtctcactgaacaatctctgaaacatcttcttagcatcctctgaagaaatcttcttaacctcatcattagttatcggcttcttcacatgctcagtgtccgatgtcttctgcttcttaatagcttcaggagcagcttccttcaaaggacgcttagccgttgaactctcaggtacagtcgcggcagatccagacgtctctggaattggtttagtcccaacaggcttcagcttgatcgtcttagcaggctcggactcgggctcgggcccagaactggactccgattcagattcgccttcagagtcagattcaggcttttgcgaagactcgactttcttcggaacttcaacagaagattcagattcttctccagatgagccagattcttcttcttcactggaaacaggagggctttcgaccacttc

SEQ ID NO: 969 - DNA, 4853 bp, Arabidopsis thaliana landsberg
tgcccgacgagtgtgtcactcagtaaatgaatgaaatgtcttctacttatactgaattttctattctatttttgccaacatgtactgaaattcatgtaaaatgtacatctatcatggtccaataccacataatgcggtaatgagacaacaatcatcttcaggatctaatgttagtctaccaagggaacatgaatttctataattctatcaagggatgcaaggagatttgaaaatagaaaacctgcaaggagatttgaaactggtgggtcatcaagaaatatggatataggagaatcttctgaagatatatagatgtctaagcacaaggcgactctatgaagcataaggaaagagctgtgcgcgggaagcagcgagactcaaatgatgatgatgtggcgagctgcgtttggttgctggagttactagaacgtgatgaacaagtcattcaagatataagcaaatcatggaaagaagatttgaagatatcttagaattaggaaataggttaatgacgcttgtgtcgttacctatataatcggaagctagactttaggtttaggtagccgtcttatctcacaagatttgtgaatctcaagatctaagctagaagctattagggttcttggtgagtgaacaaagagggatacataactgttgatgtgttgtgagttggatagattagaatttggtcagtaacgggttgtgttatcactcagcacagggtaaatctgattaaacagatctggtagattgcttcagcgatttacaataaacaacataagttcttttcaacatatcgatatctctaatattctcattttaatgtgatcatgtaaagcacaaaggacttggaatttgatcaagagcttgtagctgaggaagagcttgaagctgaggagcagcttgaacctgaggagcattttgaaccagaaaatgaacttataacggagaaagagtatgggaaagatgttatcttaacctcgttggttttgatacatgatcatcaaatgggcatgtgtctcatttgtactctttttcccttgtcaagttttgtcccaatgggttttcttaacaaggtttttaatgaggcaaatgattcacattcaaatcacccatttgatgatccaaaccatggtataacattcaaaagttggttagaatatatatgaagtccagccaattttatgaccatcacaagcccaagaagagcccaaaccaagtgagtaatttgctggtcaagaggagtgacgaaaatagcatttcaagagtcattttggagccaagaagtggaagagttgtttttaaactttcaaactagtttttatttcttttcattttccaatgtagtcttgtgagtgtgttccaagacttctctcttctttataaaccccttgtaatctcttatgagaactcatctatctttttataaaaaactctctcttaaaaatagatcatggatccattttcgtatgtcaaattttgatctttctcgacttatcaaaaggcttttccgcatccttttgtggcgtcattcaatcgatcatctcgtctttgagtcgtgtgtcgtctctatttcgagaatatccactccagatcttccaagtgccgaaattgggattgattcctcaccaggatcatatcatctaacaacaattgtcttgccaggataggtatgttattcagtaaatggcagattagtaaataatattaaggttgctgactaactcaaacagaaactaactagtaacagtcctctccgccttgtgcttaggtcaagacgaggtggcacactactactcagacctggacagaccactctgtatggcacctattaatactccaagggtgagtagaattgaccatcttgtaagggggaacatcatagcgactccagaccaagtgatggcgttaaataaacaggttagccggaggatggcagatatctatttgaaagaaacactagtaccaacagtgttgtatgacagagacgcaccaccatattttgacgacctaggaaaagaaagtaaaatattttataagctaattaataaattagaagctaaaatttatgttatcatgtgttatgcagtatacatgtggatatgtgattgtttacaattggttagctgctaatattaaaaattagatgtcaacgagtaactaataagttatctaataacgtggaacactgcagattatctacatcgagcgctactagatgccgactacaaaggtgacgacatctttattggtagattgttcaagaataaggaagactgcacgacaaaacttgcaatacatccgatacggcgaaagttccacttcatttacgccaagtcttgccctaacattgtctttgctgtgtgcgtgagccatacatgcccgtggcgtgtctatgcaacaaaaatggaggatagtgaacgattcaagataaaatgtgcaacccaacagcacacttgcagtgtagacgtaaggggagactttcacaaacaagcatctacagctgtgattgggaaattgatgagaacaaaatacctgggggttggtagggggtcaaggcctaacgagttgaggaagatgctccgtgatgagttcagcctaaatgtctcgtaccggaaatagctatggataatgccatgggctcgacaatgggaagctacgcattgatccagccttatttcaaacttctgctagaaacaaaccctaactcgctagtggcccttgatacggaaaaagataacaaaggtgtggagcggtttaggtacttattttttgccctagctgctacagtccaaggttattcttatatgagaaaggtgatagtgattgatgggaatcatcaggggggccgatacggaggctgcttaattgccctctatatcataaaattaacatcggtattatcaacgataacaacagttgaatggtgttaacaaaactgttagcgctagaatgaaaacaaagcgttacctcgcattttgcatccacatctttagcattgccgagcttgaggaccacgacctgacgaggacctacgacaacggcgggatcttcatcggaatcagaaccaacgacctcatctatttgagggccttcctgtatatcaggtgctgcttccaagacaatgagttgcaatgcgtaaagaagaccttgaaccgccacgcaagtggtagcgagctgtttaacttccctctctttaatggaagtcatcatcatctcgaaagacaatcgcacccaagggtatttcagaaatctctacagatcatcagccatttcggcggtaggcaacaaaaaaccatccacaagagccaaacaagcatatcttaacctaatttcccgatctgttaccaccttcttcttaagcatcgttataactctttcaatagttacgtcttcttcgaggccaaacaaggaactgtaatagggatctgcttcccagccgtccttttcttcttcttattttctacctttggatattttccacacggaaggccggtaacaatcttgaactccctcaacaaaaatcggacaggagtactagcgtaaactacccaaatttcatgcggtttggcaacttccaattgcctactcagtaaaaaaataccaaagctcgcagaaaacgccggcttattcagaaaatccaaaagtccccaagcgaactattaaggacgaaggaccgctcttcatcgtcaagggtgtttataatgccgcatagggtttcgattttgtgatagacattaaccctctcgccgagaggttcttctccaaaggcaatcaaacgattcggtaaatcaacttcacccatctgcaaaaaaaaaagggttttatcaccaacggcagagccaacgaaaaccctaaatcagagcaaattgaaatcaaatccataccatacaagcgaatcccagcggtaaatgagttagatcagatataaaggagtatactgcctaaacaatgaaagactgagcacggtattgaacaacgaaattcctgctatgaaagacggtttactctttcactctttctagggtacttcaataaacgaagataagaacagataagtagagatgaaaggtgacgacgcttcgggtttctagtaaagttcaactcagttcattattaggatcacgtttctccaaaacaaatttaccaaaaagattatgttgccgtctgacacaatactagtctagcggtaatgaaattttcgaaaatataatataggggtattatggtatttgccataggaacagcgtaagataaacagtcgaataacgatcgacttaattttcgagtcttccgagtacagataatgataatacccttattagttttcatatatctaattaaaatcttctatatcgaattatctcttttatttttttttccttttgggtcataaatatcttttttttggtcatcaaatatcttatatataggttcacttttaaaaaatcctaacgtaattatacaaactaaattagaaatatggtacgttttgtgaatctattaataataacaatccgaataaatgacatttgcacttccgaacagttgtgtctattaaaatattgacggttacttttttaacatttgtgtcttttcatcataaacagttgtgtctgttaaattgttgactggtacttttgtacattcgtgtcttttcatcgtaaacagttgtgtctgttaaattgttgacggttacatttttatatttgtgtcttttcatcgtaaacagttgtgtctgttaaaatattaacggttacttttttatatttgtgtcttttcattgacgaaaaattatattatattcgtgtcttttcatcataaacaattgtgtctattaaaatattgacggt

SEQ ID NO: 970 - DNA, 3130 bp, Arabidopsis thaliana landsberg
aacctcagcaaagcatttgaggaggctgagaagaatgccccgtctattatatttattgatgagattgactctattgcaccaaaaagagagaagacgaatggtgaggttgagaggaggattgtctctcagctccttacgcttatggatggactaaaatcacgtgcccatgttattgttatgggagcaacaaatcgtcccaacagtattgatccggctttgagaaggtttggaagattcgacagggaaattgatatcggtgttcctgatgaaattggacgtcttgaagtgcttaggatccacacgaagaacatgaagctagctgaagatgtggatctagaaagaatctccaaggacacgcatggatatgttggagctgatcttgcagctctatgcacagaagctgctcttcaatgtatcagagagaagatggatgtgattgacttggaagatgactcaattgacgccgaaatcctcaattccatggctgtgtctaatgaacacttccacactgctcttggaaacagcaacccatccgcccttcgtgaaactgttgtggaggttccaaatgtctcctgggaggatattggaggtcttgagaatgttaagagagagcttcaggagactgttcaataccctgtggagcatccagagaaattcgagaagtttggtatgtctccatcaaagggagttcttttctacggtcctcctggatgtggtaaaacccttttagccaaagctatagcaaacgagtgccaagcaaacttcatcagtgtcaagggacccgagcttctcacaatgtggtttggagaaagcgaagccaacgtccgagaaatctttgacaaggctcgtcaatctgctccttgtgttctgtttttcgatgagctcgactccattgctactcagagagggaacagcgcgggtgatgccggtggtgcagctgatagagtgttgaatcagcttctgacagaaatggatggaatgaatgcaaagaagacggtgttcattattggagcaactaacagaccggatatcatagattcagctcttcttcgacctggaagactcgaccagcttatctacattcctttacctgatgaagattcccgtctcaatatcttcaaggcctgcttgagaaaatctcctgtcgctaaagatgtagatgtgactgcactcgctaagtacactcagggattcagtggtgctgatatcacagagatctgccagagagcttgcaagtacgccatcagagaaaacatcgaaaaggtcagtgatttgtttaactcctgaaacatgtgattaagtaaccttaagtgctaagtcatattgattgttctaaccttgacccttttttgtgtgttttgttcctcaggatattgagaatgagcgtagaaggagccagaatccagaggccatggaggaagatatggtggatgatgaagtttcagagattagagctgcccatttcgaagagtcgatgaaatatgcaaggagaagtgtgagtgatgctgatattcgcaagtaccaagcttttgctcagacgctgcagcaatccagagggtttggatctgagttcaggtttgactcaaccgctggtgtcggacgcaccactggtgttgcagccgccgatccctttgccacttctgcagctgcagctgatgacgacgatctctacagttagattttgatttcttagtgatcgtttttcttctttctttaacttaaattaggttcttttggatgatgtcgagattgatacagtttaaaatcatctgggtttgccagcttataatcacttgagcaaattatttctatgtttatttcattcacaatgcctttgatcggttacttaacgttaatttctaaggaagttataatatacgagaaaaaaatcaatcgttggaaccgttagaatttggaacgttaacaagctgaataaggaaatgatcaaaattttgtgtattttatttaatttgttaattctgtttttttaaaagaaaattttctttctttcaaagaagaaaataatattattgtaaggctttgaagctgtgagctctgttcagcatcctctctctctctacgaagggactatgtctaagaacatctctctcaagtcaataaatattaatgtaacccagtgatgatgatccaatggtctgtctagtttccgaaacgccaccattttctcttcctctgtagctctgtttcagatgtatctgaacaccaaaaaatatggagaagaagaagagaattaagatgaagaggaaagaagcgaaacatagtctgtgaaacaaaaggtttctcgaagttacctctgtttaagtagatggcgttgtaatgaacctctgcccagaagctcaagaagattactgcagacaacaagagcaaaataaaagatcactgtaataaccagtaagagagaggtatagtatagacaaacaaaatttacagtgaaagaaaactctttacctcctttgaattcttgggaggtaggaagaatttcaatgtaacatgtgtctttgaacgatgttaggacaagaattttcacccgatactgcaatattataaagtttcaccaaactgattaactatgaactgaggaaagtaaaaggaagatcactgcatcttttttttacaagatttaagaatgaataccgcatctgcagctgcctgtaatgtcacatgatcgccccattcgccgctcctgttccaaattttaacactaggctttaacaatagaattggcagcaaatggggttatggagttcactaagagaagatatttgaccgagacatctttcttagataatcagagaagtccataggaacgtatccttgataagaatctggacgagactttagctaaaccagaagatgaaaattgcaaaaaaaagaatgagttcaagcaatttatggaagctaggaaagattctcaagagcaaagagatcaccaaacctgttttactatttgtcgtcgaacatgtttatggcgatctgcggttttgtacagttgatcagctaaagcacggaactgaaaagaaaaagtcgggagagaacattcaagataaaaaatgatgactaagaatctaactattcttccagaacgatctgcgtatgaagaagtatactg

SEQ ID NO: 971 - DNA, 4665 bp, Arabidopsis thaliana landsberg
gaaacgctagagaagaagtatgagagcctgaacaagtatctatgatcttagaaagatctatttttctcaatttgaacttctttgtattgcctattatcattaagtcagcgaattgtgcgattataactcagccaaaacgtacaatctgattaaatttataataactcggccgtaacgttagactaactcatccacaactcaatactatctctaccaaagttgaagtaaaatataataactcagccgtaacgttagattcactcaaccatacatcaagttaatctacgataagtccgccttaacgttagaataacaatgattgagtcacatgtttaactcagccaaacatcaagttaatctacgataaatctgaaagacaaagttttcgaatcacacacgcgagtataaaataaaaagtgaagtttgaaaattgaaaagacagagtttatgataacataggataaggagtactggaatccaataacatacatataatataattgaaaataaaaaatgaagatacaatcacatcaatcgccatcttcattcttcatctgactccgaaattggacgcccggtggatccataccccagtttctcccaatcaatattactcaccgggcgttcacgctgcgctctgtaggccttgccaacctgctccagcactttctcgatctcctcccccacgttaaatccgtcccccatcctctgcactctccttaagaccttaagtttcgcttccttctcatgtagtttgagatcgagcaagtgtgcttccgccgtctcccttatgttgctcccgatgtaagagatgacggatttgaaacgcttctcctgtttatacagctttagggtggggctgtcatccacatacgaccacttgttgggaccgtcatccacacaccaccgcttgtttgaacctgaacctgaatctgatgcatccatgatctcggaatggttttgtttctcagagaaaggacaagagaagaatgaagagttgtagttgctaagaatagacaagtgaaaagacaagaggaaaccagtgtatatatagtcctctaacgacgtttggtcctctaacctaacgacgtttggttctctaatgtaacgacgtttggtcctataacgacgtttgggttattgactattcgggtgtcgtaaaccggtgtatgtatagtcctaaagtcacatctggtttatttgatgggagggaagtttgggtttgacaagtcaaccaccacgttatacaaactcagccaacaaacgatttgtctgatgacaagtcagccaccgcgttataataactcagctaaacatcaaattaaacaacaataactcagccgtgtagcacgatttgagcgatgataagtcagccttcacgttagcatatatcagccgtaaaacgaatcgagcgatgataagtcagccataacattggtttttgttataattaacataataatagattcatacggacataattctggatatcaatcctaaagtgtaaatacttagtacaatcacatgctaaaattcctaaaagatacagacatgttcgaaaaagcaaatcactgctcaagaaactgaaggggcattcttacaggtagttcatcgaagatctctgctgccatcttaacccgtagaccctggatatttgaatcagtaatgccatcaaaacaaacaccaagcaataaacagtcaagaatctttaacgtgtaaacgccgcagtccccggtgataatattttgcgggacctttgtcatgtgcctccgccggaatgaaaattggtcgtattgcgggatacaaacttcgggaggaagaatttcactcatcatctgtggaatcatcctcgtgaacggcctacaagcttccaggatttttccatcgctaatcggagtatgctctccgacgatgcaatcatagcaatcgatgtgagacctaggcaagttcacgtgaagggtcacccaatgattacctccggtttggtggacaagaaacaagtgatccacatctgttattcacttcttatttgtcgggtcttctccagccgtaccgttcatccaaccttcatacggggtatctctgaaagaaaacctcttcggcttcatcttccactgtccgtaatccctagtccacattgacgtgaaccacgggtctagaatcatgacgcgttcgctgtagtatggggtaggatctcgcaggagcctcgtggtgaggactttcacatacgcagcaatgtgctggacaaaaaataaaaccaagacaaaacacaacattaactcagacgtaaccaagtaaaactcagccttaacacctaaataaatcagccattatctactgtaactcagacataacgacacgataactcagccataacattagccaaactcagacagaacataacaataacttacatcatcacccatccatccatgtttctcgtctggccagttctttctttcggccatgataacagagtagaaatccacctcgtctatcccactttccaacgattttttgctaacatatagtaaagaaagttaatatgcacaaatactgtaagcatgtcgtatttaacaacttattaaggtataaagggtcataccagtcggacttgacaaattagccttaagcttctgcactttggccggatcaacctgtgccagaggatcatgattgcttgtgaaggcagacaacccttcctcatgcagctcagcccgttatctccaattactggaaaagtgttagtggtcattagatcgggtttaatcaatgacctcccatccggggccagcttaacagtttttctcctcgcatcttttactctctgcagcctctcggtttcctcctcatcttgggttttttattgtaacctttggcacctttggaggcacctttgtaggctcctttgtagcagcctttcttcctcttttatttgaggcggctagctctttcacaattagctcttttaagattttctccttaactttagctttcttctttggtgatgtcttcgctttggtatttctcctcgccggcgtcgttgagcgtaaacggcgggaactaggagacttctcaatgaaatcaatatcagcattgtttccatcagtggtcttagcaattcgctatcaagattcctactaacctcaacctcaacaatatcaacatccttctctaccaccgaatctacaacttctttctattgcataaacgtaaagaaaactcatgcattaaataacgaaaactcaagcctatgtataaatataactcaaccgtaactaaataaaaagttataactcagccgtataatatgaagataactcagccgtaactaaataaaagttataactcagccttataatatgaagataactcagccataactaaataaaaagtaataactcagccattagcttaccagaggaggactattaacatattggttatttgtaggtttccgtggaacttttggtgtctgttgagtttggggtttagggtggccttgctcctcttgggttgaaaacatttctctaataaccactctagagtttaatgttgagtatgctatgccagtttggccaattaggcttaccccaatgaccttcagatgctctttcatctgtttgacctcattctcaatagatccaaaccttctttcaaactttgcatcaatcctctcttctacttgatctccaatcacatccagacgggaggacatttcttttatgctagtatcaacggtgtcaaatcgagagtttaagggagagatcaagttggacaccacatccacgagcgactgctggtctccctgaccatcctgctcacgagaacgaacatcctcgtcctcatcagattcgacagctacttccttcttcttcttcttcttcttcttcttcttcttcttcttttctgcatctttctcaagagaatcaacatgctcactgtgagagaccttctgtttcttagcgggagattcagacacctccgcttctttatcttttaagagtttcttcttcttctcactcgtcttcacatcccaataacctttaacaagcttaacctcgtgtaagtcttggatcaagttatcaagtgctgggtcttctaattggtctggccaaaaatgaaccatctcgcttaactcagccttttcaaccattgtacgaacacgcagctacaacaggagagataataaaacccatcagtatgtttaactcaaccatcacttaatataactcagtcgtcacttaatataactcagccattatagaacataattcagtcgtaacataacatatttgccaaaaaaaaaagaacataactcagccttcacagagaaaaataaaacattaactcagccgtaacatacatatttgataaaaaacagaacataacagagccgaaaccgtacctcaccaccattcgctttgatatcttcagcaatgacctattctatagttgaacgggtacggctgccaccccatctaagcaacggaatctcatccgcgttaacagcgttcccaaaacgctcggcgatggtgatgattgactcatacgcccaagcctgcaacacgaaaaccagaccactgacggtgtacgtcttgccaataggcctcagcaactttatagaaacgacaagggcttcatatgctgcccgaccccatggat

SEQ ID NO: 972 - DNA, 3806 bp, Arabidopsis thaliana landsberg
cgtgattttcgggtagctctaacatttttcgatcaggtgtttagaaaaacttggcgacgcatgagtatttctttttaatcagctaatcaccttttataatttccttaattacaaatcattaatttccgaaaagtattcatttccttcaatttcccactaaagtttgatcgtccatacataacctccttaatctctctgtgttgccattataagcagatcaagaatcactcattccacatcatttcaccattatcatctttttcctccatacaaacacacataaaacgatgatatgcgaagatgcatatcagtatcagcaattacatggacaaaaggatcacatgatgacaatgatgatgatggacttgagtacatcaccaccatcatcaccactttcaccatccttatcgccaaagtcaccatcatacaataacaacgaggaagagagactagaggttgtgaatttgagtggcatggcattacaatctctcccaaatccttccctcaatttggcaaatatttgcaagcttgatctctccaacaatcatatcaaggttcatatctctatgcatacactcatacacagtcagaatatatgtttctaatgttctttttgggggtttgtctatgaattgtaacagaaaataccagaatctctaacagcaagattactcaacttgatagcattggatattcactcaaaccagatcaaagctcttccaaactccattggttgtctttctaagctcaagatccttaatgtctccggcaactttctcgtttccctcccccaaactattcaaaattgcaggtttcacacctcaaccaaatctggaccaaaccaatcatatatgatgataatgctgataaattcctctgttttcttttgttttggattttccaggtcactcgaagaactaaacgccaacttcaacgagctgattagattaccagacaacataggcttagaactaaccaatctgaaaaagctctgtgtcaactcaaacaagctcataagcctaccagccaccatcacctgcctcacttccctgcgtgtcctcgatgctcgtctcaattgccttatgatcctccctgaggacctcgagaacctcatcaacctcgaaatcctcaatgtcagtcagaacttccagtatctttctgctcttccatcttctatcggtcttctcctgaacctcctcgaactggatattagctacaacaagataacagtgttgcctgagtctattggatgcatgaggcgcctacgaaaactgagcgcggaaggaaacccactcgtctccccacccattgaggttgtggaacagagcttgcatgcggtgcgagagtatctgagccaaaagatgaatggtaaactggtgaacaccgcagcaaagaagaagacatggggtttccgtaaactagtcaagtacgggacattcaatggcagatcaagggtttggaccagggaagagcgagaagggctcatcatgcctgagtaccgtcccattgatatcctaacttccaccaagtttcctgtgacgtgctcacctcgacgtctcttctccccaagaacctatttcagcagataagaacaatgcacacagcatacacaattttgaatctatcaatcatttacttaaattcatcactaaatgtataaagtatgtaaatacacagcattcagatttcattacttcttattgtaaatcatgtaattaaaatcataaataacaattttgaccgatatttcttttacatatattctgtgttggaacttctttgtgaaattagaaatctgcatctgcaatattattgcagacctcaacttccaagccttagtcaacaacacctgaagcaacaaagcgatccaacaaaccaaacttcaaaaatctctactttattgtttgtgttgtcatataactgttacagaaaatttcccattatcttcttcaacgcaaaattcaacaataatgcaagtgcagatactaacattcaaagctaaattctcattatcaaacaagaaacacataagctttagcaaacaaacaaaacaaaaagtcacattttttctaatgatcgatcttatactaaagatccaattacagaattgaagccaaaagtgatctaaccctctaacggagataaccagggatcttaatgcgaatgaagagcatactcataacataagcaatcacaatggaggagactccagctgttgcataagatgctttaacactcttagctcgattcttatccaatgccagatccaacattatgattccaatcccaccgagtacgaacatgaatccggaagaaagaccttcaatgatgtattgaccattgacccgacccgacataaacacgacgggtcttactgacccggtgattggatcctgtgtcgatccgatacctggaggctcgacaatcacgtcgtagacgaaaccggagacgacgaggaagtaagtgaggagaatcagtgagaagacagtcattggagatgggagagtgaaggaagggagcttgagacgaagacgtggtggtcggaggaaggagaaagggatgatacggagaatgtggaagatcggatcgattgaggattcattttcgtcggagccggtggctagggtttgtgaatctgatctcggagccattttcgtcggattcttcagcaattagctcttcgttctcttattatgtgagtgaaacagtttcagagttggtttgtttggaaacttggatattgttatccgctatatgaatacatttgcacattgtgccgttttagaaaaaagttaatattaaacgacacgtagtttttgatataagggagagtttcaaaggctttctctttctcggtgttcctgttgttaaagtctgagacttggattcgattaagttgtgtgttcgcttggtttctctattacaagagtttggttttgtgtagtagttgaatcagagatgagtaagagacctccgcctgatccagtggctgtgcttagagggcaccgtcactctgttatggatgtttccttccatccatcaaaagctctgcttttcactgggtatatattaattagtcgtctctctcacttgtgagaaattctcgagtcatttattgtttttatttatgatgatttggtgcaaaattgaagctttgtttctccagttcagctgatggagagttgaggatttgggatactattcagcaccgtgcagtttcttctgcttggtttgtgatttttgatttttttaattctttgtttttgtgatcattataaagtagctagcactcattgtatctattgggatttgtagggctcatagtagagcaaatggggttttagctgtagcagctagtccctggttaggagaggacaagattatcaggtaaaaacgtaagcaatcatgctttcataatcaatctatatacggaaaatctgagctagttactctgatggttatagccagggaagagatggaactgttaagtgttgggatattgaagatggtggtctatcaaggtgaatatgatctccccttattcgactttttatgcgtttgtttctatcgaactataagtctataaccaatgattcttgtgacatacttggcagagacccattactaatacttgagacatgcgcctatcatttttgcaagttctctcttgttaagaagcctaagaattctctgcaagaagctgaaagtcactcacggggttgtgatgagcaggatggtggagacacaagtaaagatcaacttgctgatgatagtgaacgatctgaggaggattctggtttgcgtca

SEQ ID NO: 973 - DNA, 2450 bp, Arabidopsis thaliana landsberg
tgttcaacgtttgtttcactctccaattcaggtaggaaacacattccctctttgtttctccgtaagaagtcgaacattgtaacttaacattctcgctctgtttctctgtaaggtcaccgttccctctctgtttcactgtaacttcaggtaggaaactcgaaactgtctcctcttatcatcacttccctttgatttctctcatgtctcctttttaccatcccctttgatttctatcaaatctctctctttcgtttcttaaactcttcaaacgaacatatgcctaaaaccctctcaataatgttagctggcaagtcaagatgatgaaaaaacctcgcaagaatctaataagttttgctagaggttcaagacctggtaatcctaatagcatccggtcaacgctaatcgaacaatgcacatcattttctgaacatagtcggttcttaaactgtactaacggaagttgcgagaagcctgagaatgtcatagagctatttcaagacttagagtactgtctacaaccgttaggagatagtccaacgaaaaaatcggtcggttttcgattcactaactcctgttgcattccagtgatatttaattcatacacaacttattatcaatacgcttggcactaaccggagaatcatcaaaaatacttaagtgtatataagccaagaagatgtgaaggtaaagactctaaaggagaaagaggatattagaagttacatagttcatcagcttttgcctggtttggtatatggagactctaatgctaagtttcaaagattttgagatgcttttgatattacttttgatagtttacttgagattttttgtaatgttggctctcatggatgtgattatcattatgatttgctccggtccatgtttatttgttcattagataaaaaaaaatacgataaatataaaacattttgtagtttggtataatgcatgtgtttcatagaaagaaaaatattgtgatttcaactcttctggttaaggaccggttatgatctgttacttcattaatttgatggtgaaggagcatttagcccaaccggccggtttagatgttttactctctattgtggaaacagcaatctaatttggttctgtgagatcactacttgtcttcttcgccagattatcgccgttcgttcagagaaaactttttccgatacacaaaatcggaggaagaagaagatgaagctcaaagtgtatgcggatcgaatgtcacagccatctcgtgctgtcctcatattctgcaagtaaactccttcttcttcttccttgttaattcgcaattcagcacaaaaaaaaaattgattctaatttttttttgtttcaagggttaatgaaattcaattcgatgagatattgatttacttggcgaatcgtcaacaattatcccctgaattcaaaggtttgtataaataatcagcaaaaaggtttttttttgacatgggtgaattcggatttcgataaaagttgaaacttgatttggtctttacagtgagatttgagtctttgtttctcagatattaacccaatggggaaagttccagctattgttgatggcaaacttaagctctctgagaggttttttcttaacacaaagttgcttcctttgtatctaaaccattgtttatgaataatcttaaccgttttcgcagtcacgctatcttgatatatctttcctcagcatacccaagtgtagttgatcattggtaagttttcgtttgacacatgcatgttcgtgattgcaaaatgcaaagtgtaatcattttactttgttattcgttcgtttacttttaggtaccccagtgatctttccaaaagggccagaattcactctgttttggattggcatcacaccaatttacgccctggtgcaggtattacattttcatattcataacaatatcggtattgagaagtttgtagagtcaaataggaatgatcagtttcatgtttctggttatttcagctggatacgttctgaatagtgtactaggtccagctctcggtcttcctctgaatccgaaagcagctgctgaagctgagcagttactaacaaagtctctgaccactctagacactttttggcttaagggcaatgccatgttcttgctcggaagcaaccaaccatctatagctgatctgagccttgtatgtgaactaacgcagctgcaggtactaaaaaaaacatgttctttatcaaacattgtggagcaaaaaagttgccttcttatctctgttatggcttttgattgtaaaatttgtgtaattttataggttttggatgataaagatcgtcttagattgctcagccctcataaaaatgttgaacaatggattgagaatacgagaaaagcgacgatgcctcactttgatgaggggcatgaggtccttttcagagccaaagattgatgtcagaagcagcgagagat

SEQ ID NO: 974 - DNA, 637 bp, Arabidopsis thaliana landsberg
ctccatctttgcttgcagtgactcggctctcgctttggcagatttgcaagtgaagcgctattgttaaaatatgcaccaattctcttccaaaaagcgcatgctttatgttcattatcgacaattggatccttgctagtatttaaccaagcactaataagaatggcatcttcagctcgactccatttgcgtctatgttttctacgatcggttgtgttttgaacgaggtttggatcatcactcttctcaccaatagtactaaattggatactgtattatggaagatccatgaaattggatgagaaattaagttttttcttcccccgatgaaagtggtcaagttttttgttcttacatcttagattgaggacccagtttagatgcggttgccatctctcgctgcttctgacatctatctttggctctgaaaaggacctcatggaccttatcaaagggaggcatcgtcgcttttctcgtattctcaatccattgttcaacatttttatgagggctgaccaatctaagacgatctttatcattccaaacctataaaattacacaaattttacaatcaaaagccttacagagataagaaggcaactttttttgcttccacaatgtttgataaaaacatgttttt

SEQ ID NO: 975 - DNA, 4821 bp, Arabidopsis thaliana landsberg
tcggaattactactcatttctttagctagagatggggaattcggagaagaaaaataagaagaaatcgagctcaaatcgggaagaagaaattggaattttcaaacttagggtttgattttggggatttattagattggatctttcgtttatgtcacaaacgacgtcgtattttgtcaataacggagacgtcgtatttggtcaataacggagactccttctctgtattttgtaatgtcatccgtcacgtagacatatctaggccatgtggctgttataaatcggccaaaccacgaatgtttctttctttagccatcagttggtactatcaattaattcacttattataatcactttccaactagtgatcatgaaattagctaatgtttgtactctttataattgatccaacaccatagccatacattgttaagctctagttaacttccattcctagaagtttaatcaacatagattgtcaatggactcttagtgtaaaaaaattattctgttttgatattatagatcttgacattaatagaaccaataataatgctagtatacaaatgagcctattcataacatttgttttttctcataactcggccaaaccacaaaatcttcctgtataaatcagccgtaacgtagacatatctaagccatgtgactgttataactcggccaaatgacaaatgtttctttcttaagccattagttggtacaatcaagtaattcacttattataatcactttccaacaagtgatcatgaaactagctaatgtttgtactctatataatttatccaacaccatacccatacattgttaagctctagttaacttcgattcctacaagtttgatcaacatagattgtcaatggactcttagtgtaaaatctttattctgttttgatattatagattgtgagagtcaaaactcgcacaatagaaattgttttaagggtttcttcaaagagcgaatctttgtgagattctcaaagaacaacagaattgttgattaccacggacggtgttcttgattatattgttgagataatgatttgatcgtacaggtgtttagaaatatagatagtaagtgttttgctttcaaagtcagagcgtttttgatagcctgaagttgagtgcgtttttgtgcctgtcccttttgtttgtcccttgaggcgctttatataggacttcggtgaaccgtctctcgcgatattcttggaagatttatctttatcttagaggcggtggtggtgattatctttatcctttagagactttcgcgggatcttctccttatttgataatatccttagagatttcccaacatcatttcgcgggagatggtattttgattttgcacttgatctaagtcttctgttcgggtttaaggttttttggccttggtacaaagtttcccccgagccgggcgcatcttgtcgggttgtagctagatggctcgtttcctggggttttgcgtgggccaaattgtttactcgaagtacttttgaggttcgccttcgggatggttccctgagagtatccgagccgtttctaaggtcgggtcgggaggctctttgcaatgatcccgaggtgttttcgtggctggctcgggatggttctcctacgtgatctccgaggtattactaccaccggctcggggtgtgcgtcctggaatgacacccgaacagaaatatcttaaagattgatttccgaggcgttcttggagtctgtttggttggctcggttccttcgaccaaatctgaccccaatagtttacccccctagctcattgtctttgtctgaaggcgacgagtttcatgagtttcgtcgccccagccggccgtacgtcttctctattcgtgacctctggcgtttcggcttcccgaggtttattcgacggtcaaacttccatatatgcgtgaccgccttctttcttgagaagtggaaaagtcttctttattcccgaggtttgcgcgcgtgctttcttcttccgagcttacgcgctgttgatgtgttttaatttcttcttgggacccaacgcacctttatatctctatatatatcgagttgctcctcagaattcatttatctaaagtttccgaagaaaaatgtgaggtttgcttctttttctctgatcctgatttctttgcatcgtttttctttttcctgtagccctccgccgttgtttagttagcatttgatttttccggtcataaaaattccatcctccggtcctcatttcgtcagacagttccgagccgaggatgagtgcttcttcttccaacgcctctctctcggcctccacgggtagccttgctgattccagggattctaatcaccgagatgatcttcctccgatttataaacgcagaatggtctagacttcgtccgaaggttctgatgctgcatcgtcttcgaacgcgtccgaggtgactccctttacggctcgggagaatgccactgctgatatcgctcgtgagttggattttccttaggatcccgagccatcccttatccgaagacaccgcgctccagtcgctaatgaggctggaacgtcgaattggcaaaacgcgcccgagctgttttttccggaggtaaagatagagcatttgttctttgggctggacgagacggagaatattggtcaagcgttcgagcagtcggcttttgagaaagccaaaaagaagaaacggaagaaaagcaagaagatggtgaggtcggatcctcccgcctcgtccttgtgtatcgagcggtcattgtcggatctaagagctcaattcggtttcgaaaatgttactcttcgcgttcccgacccgaggctgattccccttgagggctttttcactttatacgacggatttttctacctttgctttctcaggttgcccatcgcgaggctgattctggactatgtgatttcgtatcagatagccctttcgcagataacagcccgatcactaagacatcttatcgggatattggtgcgtggttatgagactgagaagagggtcgcgcttgcccaccttcgaaattacttgcaaatccggcgagttccaaaatctgaggtggataaatattacatttctccggccaagaacaaaaagattatcgaaggtttcccgagcaaggatgatgcctacaccaacaaaatggggacttttgggtagtttagatgttctgtgattgagttgtctgtgcccgaggtgattaccatgatttatgctaatatgctttattttgttgatctttctttgcagatcgcccgattaggtttctcgaaccgtgtcccaataacctcatttcctgtcatcgagagctatcggcccgcaagtgtcactggacaaagcacttctctcgagaccgagtttaacgagtgcttaaattacttcacggcatttgttctccgtccagctcggaatcctctgaccaccgaaccgagttttttgtggacatgcagacctccaaacccactattcgagaggtttacgagaaaaagaggattgccgccgagagggaacgtgcggccgatgagaaacacgtcgaagaagagcgcggcgatgctgaaggtatagatgtcaatcccgagccttccgcggctcgggaagttattccttagactgctgcgcccgctgaaccgggacttgctgagactgacgtcgtcggtctggttactttctgagccgcttttgaatatggtttcaggctatgggttcaatgaatcagatggtccaatcttacgattagctgagagcaatctgaggatggattttgaggtcgttcgctataagcgaatgcttgccgaggcgaggcggctaagagacagcgaggtggcttgggctgcgcagaaggccaggcgagaggcttcaaaggtctttctcgctaagtttaaggtggcctaggggaaggcagctcttctcgaggatgccagcgatcagttcatgcacttgtctcaagctcgggcatcggccaatgtgttttctcctcgggggattcttgttaactcgaattcgtcgaaatgcttcgccagattttgtacatgagccagataggcttccattctttcgtcccgagccgtatattctccgttgaattgatttgcgacaaggtgagagtcacaaaaaggtcgaattttctctatctttagaccccgagctagattaagtcctgctatgagcacttcatactcagccacgttgttggtagcctcaaagtgagacggatgcccacgcccgaaccttgttttgattacgagccatctacatgtagcagccaagttgtgtcgagcgggttctcccgtgcctcctttgtgggtagttcgatgattaaatctgctaggacttgggattttgcacatgttttgttccgatactcgatgtcatattcgctgagctcgattgcccatttagccaggcgtcccgattggcttggactgtgtaagatagcgtagagtggcatggattccattactacgatggaatggaattgaaagtagggtcgcagtttccgagctgacattaggactgctagagcgagtttctccatttgcgggtagcgagattccgcgccggtgaatgtctacgagacgtaaaaaatcggtttttgttcacctctgtcttctcggactaacactccactgactacagtatccgacatggcaacatacaagtaaagtggttccccgattatgggtttcgcgaggattggtggggtcgccaggtactttttgagttcctgaaaagcttcttcgcatcgggtttttcgtcatcaagacagatggagattaccgggtcagggatcgatctcgtggattctagt

SEQ ID NO: 976 - DNA, 3490 bp, Arabidopsis thaliana landsberg
cttcagtttctcaacaacttcagtttctaaacaaattcagtttcttaaagtgctaaacatcttcagtttctaaacaacttacaatttctaaactttcttaaagtgctaaacaactttagtttctattagtttggaccaaacaacttcaggttttaaacaacttcagtttctaaagtttcttacttcagtttctaaagtttcttacagtgctaaacaacttcagtttctaaagtttctaataagtttggaccaaacaacttcagtttctaaagtttcttaaagcgctaaacaactttagaccatattaacaacttcagtttctaaagtgctagcttgtaagaaggacaaattcagtttctaaactaaataagtttggaccatataaacaacttcaatttctaaagcacttagttgaaaccctctaaaatagcacgatgatagaagaactagaaactcgttaccttgtagtatatctcgaggcctgtggaattggtgctatcatcagtagcagaaggacctgatgagtttctagagagctcgatctcgtcaagctgtctctgaatttcttcatccccggcatttgccttttcatccacatatgtgccatcaactttaccatgagtctctctaaggatgcggagcatcgaaggctcaataccttccttttgccgctgtagaaaacatgtacaacacattaatgacacgtttacttattaagaagataacaaaatgtaataattttgaattcacttacaattatgtttcggagttgttcataagatctagcacatgcggtgtgtcgatgtggcccaaacccgtcacggtcggagagtcgattgggagaggctgtcttgctcttcttcttagcttcatcagtgctccaatactccaacatatcctgccatgtgtcctcacttatccattcaggtttattcccggaagttttagccttagagatcatgtctctaaggcgggcagcaactacatgataccagaggtgatacacatcattcaaatgaattggatcccaatagaaagattgctgcaaaaggagaacaaacaatttaggttacaaattagaaagataacgtaagttttttgatgtatttggtaaaagatatcaaacttacaatgaagtctcccaaccattggagtataggatgatggggaacagatgatatgttgaaccatggaccatcaaagtgactttttattgcagctacaattgcacgccgaggaccattgtcgataccaaacctcaaatccagaaaattaacaaattagacacaaatagacgttggaacaatatacaaatcagtaacaattcagttaaatgtagaaagtttcgtttaggattaaaaaacaatcaagttttgttttactcacgtttcctgttttactcaagcaaatgtaaaccaattaacaaatttacttgagtcaaacacaattattaacatgatccaaatcagtcaaacaatttcacaagttcagagataatgattagtgaaccaaatcatattttctgttaatcctaatcaagtaaataacaaagtagacaagtcatttttatttatgttgtataaaaaccaaagacataaatttttttttttgaccgcgcagagatacaattaataaaaaacaaacaatcaatttgattatttcatcaacttaaaaaccaaaaacacaattattataatgatccaaatcagtcaaacaatttcacaagttcatagattatgatcaatgtgaaccaaatcatattctctgttaatcctaatcaagtaaataacaaagcagacaactaatttttatttctgttgtataaaaaccagagagacaaatgatattgatcgatatcaatcatacaatttttcacaagttcagttatacacaagtaacacaatcaatttttccacatctcatctatataaaaaccagtgatgaaatttataatccgacactaaaatcagttatacaatttgacaagttcttaaatacagaacataacaaagtagacacacaattaattagcttctttcacatatagaagttggagcaatattcaaatcagaaacaattcagttaaatgtagataatttcgtttagggttaaaaaataatcaagttttgttttactcacgttttctgttttactcaagtaaatgtaaaccaattaacaaatttacttgagtcaaacacaattattaacatgatccaaatcagtcaaacaatttcacaagttcagagattatgattagtgaaccaaatcattttttctgttaatcctaatcaagtatataacaaagcatacaagttatttttatttatgttctataaagaccagagacaaaattaataaataacaaacaatcaatttgattatgtcatcaacttaaaaaccaataacacaattattatcatgatccaaatcagtcaaacaatttcacaagttcataaattatgatcaatctgaaccaaatcatattttctgttaatcctaatcaagtcaacaaagcagacaagagagacattcacatgtaccacaacgttccaacaggtctctatgaatgaagaaccggcatcaatctccttgcttcctgagcttgcaaggcgtcaatggacatttgaccatggttaccccttccacggccacgtccacgtcccataaatgcagccggaattcttcctcttccacggccaccaccaccaattccacgaccatctccacggccatctccacggccaccaccacggccgctaccacgtccaccattaccacgaccattagcacgtccaccagagccagaaccaccagatccagaaccaccagagccagaaccaccagatccagaaccaccagagccagaaccaccagatccagaaccaccagatccagaaccaccagagccagaaccgccgccgttaagattcatcttgcacaatatacatcaaaaaagactagaatagttagtagggtttaactgatgaaaaaatctttggtaaaacagatgaaaaaaattactgtttttttttttacatctagggtttctataaaaaatcacaaactcgtcaaaaagtcgatattaaaaatctcccttggttcaaacattatacagcttcaaacaattgcacacgcaagatttatctgggaaaaaagaaagaagctcgaactataaaatcaaaaagaagaaaaccgcgacttaccttgaagttgaagaagtagaagctaagaaaacgtcggagatggagtgatgacgagagagacaggtcgttaatactagaactaggttacgggtctgttcgagagagagcgatcgagcgtcggagatggagagaatatgattcgactacacaacaactttgatgaagctagaaagtagtagattctcagatcagaagcgagtatttgtggggatttggatatcgagagatcgagatctcacatgcaagatatcatcgccgttagagagaagagagaagtgagaagagag

SEQ ID NO: 977 - DNA, 2220 bp, Arabidopsis thaliana landsberg
tacggcttcagccggctgggaaaagaatataacgagcagagatggaagaatcagccagattgacatatcccttttcaccgacatccgcgaggttgacgtggttagggaacatcataccaggaaaggagctaacaggtacacaaaatggttcagactttgagaggaaaatgcagagatctccaatatcttgagtgtaaacagcgtttcctttgtcgtctagcttgaataccattaaagcttttgttttcagtttcgacatacctctccagacggccttcctataccacttaaccaaaaatgtttcaccggtggttcttgactccaccaagtgttcgcttttgtagcacgaatccatcagctcttgtttggtttttgtcagcttgggaaggtttttgaaccgcaatctttgaaacggtttttgattgtgtgtgtggagatcccatgatccaatgatatggcctccagatccgagtatgcgaaacatctcatctttcttcgaaaacatgacacgagaggagtagaagcaagggtttgcgattctgatgttgatccacttggagttactttgagcaggtctgaaaaagctgagttgaggtcccaagaacttgacagccacaacacattcctcgtcctcaggagaagatgatggtgacaatttgagtttggcaacgaggtaaagttacaaaaggaggcgacgaatattgtattggtactgctatatccgactcccatgtacatgtatcatcaaagaaagataacattccgtcgtgaatgaaactagctgccacgcaggggtaagctgaccacattatttcacatttatcctcagtaaccttctttgccaaacaagtgtggcgaccttgagtcacgactccacagccgttgatggaagaaggaggaaattgcagtgaagaggattagaaaccattagagagaaaatgagaggaggatctcatcaacgcaggttggcctaggcacaacttgaaaggctggttgagaaacagagacatgataaaatagtgaatgatcgatcttagcaaaaggcaagagatttgggaaaaacaaaacccttattgaagaattcggtagtagatatactgatatgttaacttttagtcgctacattattaatacagaggaaatggacttgctcaccaagtttaccgtctccaaattaggtaaggtcagacacattaatacagatgaatgaacttgtaatgtaaattgattcgttagtcttttttcatttacgccacaaaaaaaggaaaagaaaaaaagaagaagatttgcatatgaataaaacttgtgagttgttgaggcatttggtatttgagaagaaaaaaagaagggaattaacaatggaaactttgatagatgtgatcatctttagtttagaaccctaaaatgcttttacacagatgcttggaaaacgtagatgcgaaccctagacagttgtgttttaagcgtttttgttataatagaacctttgcttcgtcaggtggatgtgaaactccagaagtcccaagtgtcgccatttttgttgaaaaatcttgctaaggatttggggaaaagtctgaactgagaagttttggagggaagcgtagggataaaggaagggagaatcatgggcttaatcatcatgggctaaaccatcatagggccaatattatgggcctgtatggccaaacgtaatgaatcttcttatttaaaagctcaaaatcagtttactaatcaaagtactagactagtcccctaataaaattgtaaatgttgtcactaagcacctctgaaacattctttagaaaaagtcataagcagtgcacgtcggttatattgtttttctttctaagccaaaaggcaaaaagaaaaagatcagagaagatgatagctgctttagcaaatttgatctttttgactataagtttgttgtctagttcgatttcttatgtgatcttccatgttgccgcttgttcttttgttctatttgttcaaacattcaagattccaggagaagcaattaatgccttgatcaagcttgtaagagatacagccgagtcttttgttcccaaattgtgtaaggtagtagttgatgtaatcagtgaaatgtttactatcttgtttgatttggcgaaaggacgagtcataagaattgcagattcaatctcattgaatattggtgatgtgagggagaaaggaatgccatggtttgaccaatttcta

SEQ ID NO: 978 - DNA, 2668 bp, Arabidopsis thaliana landsberg
aaaaaaaagcaatgattataaaaatatgaaatcttactaccttcggttgatcttgttgaatcaagctgtttttgaattgatagcttgagacctagatggctaataaactcagagaattagtcggtgttctcaattagaattgatgcaacatagaaaacaacaccaagttccactttttataagtcttgcaacgaaatcaacaaaccccacttgatgttctatgtccaaaaccaacaccaagttccaaattttatctctcttttacacaaccaaaaactttaatcaaaaaatattcaaaaaggaatcaaaggggtcgagaagcaaagctagggtttccgagtcgggtcaaataaaccctagtagagcgattcacccgagtctcatctactacgacatcagcatgagtttctaaggcggcgctagggaccgatgagctaaactacccatcgatgcataaacagataatgaaatcgtcatacgacagaggagacgatcgaagcgttggcgattttttacccgacagtgacgaatatctacgtggctagggtgtgggcagaggaagggttgaaagtggagatcttgccgagggtttgagattggtggggcttggagagagataagcatttcctgggttttgataaagcaggagattagggtttcgaagattgagatgatatcaacttccgtgacatgggataattcgagaaggcatctcgtgagaagcacgattctgttgttaaaaaaaaaagttagcgaatattgggtgtgatttggtagtacatgtgttatattacttatgaattaaattgacgttgaattatgtgtgtaattgatagttgattctcaaaaaatttaaagtttcagttgtgttttgactttttttaaaaatgtgacaattttggtctgactcaaagtgtcatcaaaagcatgaccaatgccatgtgttcatgtgcatccaaaactgaatgtctatcatgacgaatgaaagaacttaaaatccaatgttttgataatccaaacaaaatgcattattatatttaatttatttttcgaaatacaataggggctcgatatgaaatcaaagacaaaggagattattacatcaatgtgactaaacaagacccaatgtctcaaagagaggtgctatagaacttggtggcgaaagaaaggccttcctcggataaccagtcgagactctcaacggaaggttgtgctcgtgccactttagcaatagccttgtgttcctcttgagtacctccttctaggaacactcctactactttcccatctttaacccaatacgtcccaaactttggctttggagatttcgggtcattatctccaaacagtacagattctccaacgttttccccatagaattcccacgatagtttgaaaaatcgagagtagaaatagggaagataatcgtaatctgggatcgttttcccttcttcacccgctttgattgcctgcaaaacaccatcattagtatatatagaagagtttggtatattcgactatagaatcaagctagtaaatgctcgtactttgactgcttgtgcagcagatttgcgagcattgtcggcgtgttcaacacgcctcgtcccgccatacattttcattgggaatgtggctacatctccaagtgcgtatacatcagccacacttgttttgaagaacccatcagtctacaatcaaaacgaataatcattaatcactaattatggtaattgacaagagctctgtttttctccggtagggtaaatcataaacctttattccacccttctcctcttcaagttggcctttgaagagtgaggtggccggtctagcaccgacaccagcgacaactatgttagcttctagggttcttccatcctctagtttcacctcagtgacctctccatctgagttggtgctaaatccagttgctacagttcccttgatgattttgattcccttgttggcatagtaactctcatagaatgaagctatctcagcggtgaaaaaccggtgtactatacaacgataaaacagaggaaaatctgttacgaatacagtgtaattatttagctaaaatgttttttgttaagtatcaacttaccaagccaaggttctggaaaaaccatggtcacttcatgattattagcccttagagcagaaacttatctcaagccctaagaaaccgccgtcaatgatgacggccctttcccctttgcacatatagttccatagccaaggcaagctcatcactatcctcgatttctcttaggtagaatatattcttaacatctgcttcttggacgccaatttctgacaatcttatgttctgcaaaaaatattagagtttctcgagatgaactaagaacaaagaacagaaagagagaggaagagatcataagtattttactcacagtagaaccggttgcaattagcaaagtttggtacttgtaaattttgccatcatcactaacaagtgtctttgaagcaagatctgctttgactatctctgtgcccacaattagatcaatccctgtaaaatttgaatatctcagatcaccaaatatattgcaagtgaaatcacagagatttctcggagaagacataaacaaaacattacctttctctttgtaccagttagggtactgcttcgcttctccagttccag

SEQ ID NO: 979 - DNA, 4823 bp, Arabidopsis thaliana landsberg
cccgtgcttaagtgagtcctttgacgttttggacgtctttctccggtggatggaatcctaagcacttttgttctacccttcttctttttccgaggcagaggtaataccttcaacgctttgatatcatccgggatatcccactgtgatctatccgggactaaataatagtcctataatacgccaatgcccacaattccgcccaataatacttagaaaccaattcatgtaattccatacctcgaggtcttgttgtatcgctatcgaatgcaatgaaagcggctaacgcgtgaatacatggatatttttgtatatcaaacacctttgcaactgcaagttttgaagtgcaagttgaccaaatattcgttcccttcaactccccggacattgtactcgagccggaaagtgtttagctctgtcacttttagtttctcagcatccacccataaatcatgcaagtagttctccactaaaggcacaaacttattatcaacagatcctgaagcggcatctttgcgatgttcattgaaccaaaaagaaattttggccatgttcgcatctagcatgggtattaaagaatacttccttgcattgagaaaaacagaattaacgattccaacagttcctggtgtccaaattgtatcgttcccctgggaaacaacacctagcccatttttttgtcacggttgtatcctccaaataataggccgcagtaggatatctcaccttaaaagttctatactccctccaaaattctgccatggtataaatccgacttaactccatgaatttccaagcgagtacgtctttgttgatgttagtggcatgacctttgacattttgggataaatgtcaaacacaatacccgtgatgagccgcagaatacacattacgtatgcgtttgatgaggcttgaatttttgtcactcataaataccaattcaggagtatcaggtacaacatttagcagcttctcgaagaaccatccccaactaacatcattctcaccgtcgagtacaccaaccgctatgatataatgatgatgatttggatcttgagctgaggcaaatactagaacaccccaaatccgttcttcaaatgtgttgcatccacaattatcacttttttcatcacttgaaagccttcaatgctagctcccaaagctatggataggtactggaatttccccctctcatccaatttcagatatgttattgtaccttcattcgccctcttcaacatgtacaaatagcaattgatgtccttgtagctatcttccgcgctaccttttaaatcacaaacggcttgccttttccctctcaggtggagtatgatatcttcacatctaatttcgtctgaataagctccatgataaccttaggaggtggagtttctaaaagaccaggaaaaatatcatgaagaagagctgctactaattcaggggtatatttcctcttcctcatccttgtaatactcttactaatccggaaacaagtatgcatattgttgtactttctaatagagtaaatacttgcattctgaatatttgaagctcgtatacgtcaaccacagtgttctttaaaacaagccaaaacataccgctccttatcagactttttgataacataactgaaactgttagcaaatgcacctttgtccaccacttcctgcaatgctgccatgcttggaaattcttgtcgtaaagtcaaaccaataccgtcttcccaattctttttttaaactgactagattctacaacagttggaggctcaacatattcatcacccctatcatgacaatcatcacgtgatctaaactcatgatctagagtatcattaatctccacgattgccccattgggttatgttccttgttcctcctattcacccgtcacgatgtcagcattatctttcatttcatcctcatttgaatccaattcagcatagttcttaccaacagaacttgtattgaggagctccactctcgacagttgctcagacaattctggtgcagtgatgacgtccacattcaaaaaaaatctacggtaattttcacctgaagatatatagacaccgacatcctcatcactaatataaacctctttagttggtgccaacatcactgcattgtacttcatttccaatttaaccttacttgcatctaatccaagcttcgtacatatcctaccttctaacatggagagagttatacataaacttctaatgtgcatatccaaacacaatttgcttaatctcaaatctaattagaaatccaaaacttcaattttaagctctatgcagctcgagcaacatgcctttactttctatcttgacccagctcgccggaggagaggttacagctacaatggcgactgaaagagagagagtccgacgatgagaggagagcgctcgagctgagagagagagagagagagagacgacagagagagacgagagagagcgttttttttttctttcccgttttcagtttttttttttctgaaactaattaatttaaaaagagaaatgatctcataactccctttctgcaaacaataaatctctcaactcctcttattatctctatatccctttctctgttaatgagatgtgtagagaccaatttacccctcctccttctttctctaatattcattttaaaattaaatacttttagaaaagaaaaaaaaattgaaaaaaaaaaaaaacagaatcccccaaaactctctctcctctcctctctctctcctctgaagctcgagctcactctctctactcgctcaatcatcgctctcttgccggaattcgctcacaattgttgccatatccttatctccggcgagctttgtcgacatagaaagaaaaggtaagtttctcgagctgaatggagcttaaaattgaagattagaattaagagattttgtcaattagatttgagattaagcaaattgtgtttggatatgcacattggaagtttatgcatactgattgggttgaatagatttttaaatgggtaagaaatggattccaacaactgaatcatagtgaattgtagttttgaacccgaaaccattcgattgagaaagaatgtctcataactccctttttgcttgaagaaaatctcatatctcccctgaaaaaacagaacctatttttgatttaatttaaatgcgtaaatgaaggattttaccaagatatcctatgagaattgtgatatttacatagtgaacctggatctattcgatccagacccgacccatttatctcaaatggataattttgctggatctctcattttttaatttgaaaacgaaaaaaaacaaaactcactcattgaaatcttttctctttctcttcgatttctctttcactcaaagaaagaaaccgctctctcctctcctctctcgattctctgtggaaaactcagagaaaactcatctctttcacttcaatcttctcccttctctctcaattctcaacaagaaccctaattttctctcttttctctcagaatcgtttctcctccttctgtaaccctaaccctaatgccgccgaaaacaatgccgcctctaaagaagaggaagagaggagttggaacgaaggagaagcctgcaccggcaacgaagccaatcgttgctgtcacgaaggcaacgatggagcctccgacgacgacagaggagccatcaacgacagagcaaaatctggtcctgaccgtagtggaagaaggagagaagtctgacaacaatgatgaggaagaagagagtgaaaaagaagagagtgaagaagaagagaaagaagaagaagagaaagaagaagaagagaaagaggaagaggagaaagaagaagaggagaatgttgccggagaagagtcctcagatgatagtagtagaagcttgggggaagagacctcctccgatgagaatatggacgatgagactgtagtggaaattccagcggctatggtaaggatttctcaagtatttgaatggtgtaaaactggtagaacagggtaatactatgatttgtggagaatactatcaatactaggaaacaactacgtgtatgatttctggataatactgttattactaggatataactatgcgtttttgggtcatactgtcaatactaggaaacaactacatgtatgatttctggataatactgtcattactaggatataactatgcatttttgggtcatactgtcaatactaggaaacaactacgtgtatgatttctggataatactgtcattactaggatataactatgcgttttttggtcaaactgtcaatactaggaaacaactacgtgtatgatttctggataatactgtcattactaggatataactatgtgtatgattctatgtaccatcggtagtaatatgaatgaatgtctgttgcaggagatcgacgaggaaacagaagcagtaccacccttgagtatgtatttcccgccctcggaatatgtgaagaaaatcaagctttcaactcggtgctatattcacgaagtgttgactacattcgataagttggagccgccgatgagcaagtccgagaggttatggtttgagaaccatcctagtttccaacatatcttccacatgccaagagacccgaaccaccgacttatggggatgtggatgctccttcttcgcacggcgtgcattgaaaggaagaaagaagtgtggttcatcgtcaatggcgttccaatccgatatagaatattggaacacgcattgatatcgggcttcaattgcaagaactataaacttggctacaaaaatacggggaatttggatttcaagaggaagcatttcaagg

SEQ ID NO: 980 - DNA, 2655 bp, Arabidopsis thaliana landsberg
  unsure (1)..(2655): unsure at all n locations
gtctccaatcgcggaggcgagactggtggagaatggtgtttgggatgttgttcaaaacggagtctcaccaaatccaacgacggatccagaggtagcggcgactattaaggtcgaagatcttacccaatggagaaatcgtatgattgaagacaacaaagcgctcaagataatgcaatctgctctcccagattcggttttcaggaagactatctcggttgcttnnnnnnnnnnnnnnnnnnnnnnnnnnnnnnaaggtaacgataacgaagaagctaaaaagctacgtagattagagaagcaattagaaaaccttacgatgtacgaaggagaacgaatgaagtcgtacttgaagagagttgagaaaatcattgaagagttctttgttttgggaaatccaaatatcggatgataaggttatcgcgaagctgttgacttctctgccacggtcgtatgatgattctgttcctgtgttgaaggaattcatgactttgcctgaactgactcatcgcgatcttcttaaggcttttgaaatgtttggatcagatcctaaaactatgcctcaggagttgatgaagttcataatgatccttagaagagcctggtctgagcggatgtggtgtagtgcgtgcgagacgtacaatcataaccaagaagactgttattacaaccctagggtagtgtacttgggtggaggcagaggccaatgctttcaatgtggagaaagagggcattttgctagagattgctgcaatactaggaatctgcaaccaatagatcggaagagagaagtcaaagatgattttacatatgatgaggatatgtggatgctatacaccaccactgagaatcacatgagtccgtatgagaagtttttcacatctttggacagaacatacaaagctggtgttcaattacccaacgggaatgttgtcatggtagaagggataggagatgtcaagttcatgatggagggagtgaggatgactatcaaggatgtgcttttcgttccttggatcaacaaaaacatattgagttttagtcggatgaaaaagagaggttattcaatggaagtggatgacggtgaatggatcattcgggacaggactgggaaagtatttgttaaaaccttgcgggaagagagaggcattgctctgcgtttgcagatgattgaaaggtattcactttgaataaatttagtagtagacttactctttaggtggctctttcacgtggtttcagtttggatttattcgtctaagaaaaagctaattctcatattctgctactgcaatatgaattagccctggtcttttattgggggtttaatctagctttctggaaagtagtttgtattcactttgcattgcttttgttaactttgctaatggttaaacaacttaataatgaaaggatttgctttgggttttcaggtgattgaaggtaatctcacttcttaactagcggcatgcacaactatgcataaatttggtagtagacttaactcgtaaggtatggacaaaccaagtgttttgtgtgttatgtttgttccattttcagtatgttcatgtaagaaaagctgattttaatctagtagtcaaaaactatgttgttattcacaatgctgtgcgtcaagctttgttaatggtgagaaggaaacaatttctagtagaataatgaaagggttgttggaaaattgatcaaatataagataacataccaaacttgagaaaatttacctaaatagaaaggagatagacatgaaagggctagggtattgtttagccgtaggcattgtgacataaatctgtgcattcaaattcacacttaatccttggacaatgaaatggttttctaagtttattaatatgtcacgtttttcgtctttacaaagtgcaaatactcaaatattatagatcaatgtaatactgttccggtcctataaatagattttatatattcagtgctatgttatttgaagtaaaccaagttctaagatgactcaacgaatgctttaattatcgttcagaataaattctgctttaattatcattcctcttagattagttataatctcagaagtccaaaccaacaacaactggtagtattattcatggctgcagagaagcttgcgtgtggtgtacggtttaattacttaactggaccaacccactgaaattgaaccaggcttaaccaaaattgatttccctaacaataataactaaaccgattcgaaaactccgtataattagtttttgagaaataaatttaacatttactatattaatttggaagggatccgagtcacttttaggtttattatgtattatatgtctgtatatctattctccaatttggttaaaccgaaccaagaaataaaccaaaaccgagccactactcaatatggtgattttgcagttgaactttagggtttatggttaaagcataaagctactatataaatagtcaaatagaatgagttttggtagtcgctttgctttttccaacagatctacagagaaaaagctttgactacagtagccgctatggcggagaacttactagacggagtctccgatgactatgactatgaacattggtctccaatacgctgaactagactggtggagaatggagtttggtatgttgagcaaaacg

SEQ ID NO: 981 - DNA, 1611 bp, Arabidopsis thaliana landsberg
attacatcattaaatgaagaacgatatggaaatcgatcgaatttaacaaaattctatataaccctctcaactttcactgaattatatcgttcagagtttattttctctttgagaaataactcaaagcttctttttctttctttctctgtgtaaacaaaacatcacaatggattcttcaacgtctacgaagaagaaaaccaaattgtctgtaagaaaccaaacttgtttcaagaaatcgtctctatcttcttccactgcaaaaaagaccacgaatttgtctatgagagaacagaccatggtcgtgacggaaaactcatcaagacatggccggaagatcaatccaaggttcgagacatggcagagaggtttagcatattacacaagagagaacgatgcaaaaaaagaaccaacctttctctgtttctacgtaagcagatcctccacgacaagaaattgtcagagaaagtctattaatgtatatagcttagattgttgtatataagcttagtttggttagtatagatttcatgtagagtctgtacaggttggtattctataaaccaatcttaattttggtttagaggcttatggtttaggccaatgtcagtttgtatataaacccccaattgtactcttttgctaattaatgagaatgagattgttttactaatatggtatcagagcaaaatatctctatctcagtcccgtaacaaacttctccgattatttctcaccggaatctcaccagagtttgtgcatccggtcattcttcttcttctcttgaacttctacacgtttttcatttcgtctcctttgcgattcagtctctttggttagctgtttcgattctccatgggtaaacgaaatggaaaaagtgttcgtcggagtagttcaccggatcttcctgtcattgcttcaccgaagattcatgagcagtcttctggttcatcagcgagagctccaggatcctcgattcctgctgcgattcatcaacaagctcaatacagctcatcgcgtcactttgaggtatcagattctcctgataatagtcacagtccttatcatcttgttagctccgatcatcctggtttagtcctagctccagaactgttagatggaaacaactatggaacctggattatagctatgactactagcattgaagctaagaataagcttggatttgtggatggatctattccaaaacctgatgatgatgatccttattgcaaaatctggcgtcgttgtaacagtatggttaagtcttggcttctgaatagtgtatcaaaggagatctatacaagcatcttgtattttcccacagccgctgcaatctggaaagatctctatactcgatttcacaaatctagtcttgctcgactttacaagctgcgtcaacagattcactctcttcgtcaaggcaatctggatttgtcatcgtatcatactcgtactcaaactctttgggaagaattgacgagtcttcaggctgttccacggactgtagaagatcttctgattgaaagagagactaatagagtcattgattttcttatgggactcaatgattgttatgatgctgttaggagtcaaattctcatgaagaaaact

SEQ ID NO: 982 - DNA, 2561 bp, Arabidopsis thaliana landsberg
ctcagtgacatcaataagatcctcaaactcaattctttggcttcatactcatcttcttccacatcactaacttcaccatcccgaagattttgcctcacgagtttctcctcttcatgcagagacttccactgcatcacccatttctgccactcttcattcaatgccctcctcttctctctgtcttgttcactcaatagcaacgacacgtcctgatcctctgcctcatacctcttgctgtaattcctcaggttctttgctatctcttcttccttctccgcagtcaagaatgatgccggtcttggacgccaagccaactgtgtaaccaaccatacacaaatattttattagacatctgaaaatggatgatgctagtttgagaccgagttttttattgttacatacctggaagaaatgatccttcagtatccggtaaaccatattcccattgaaagaccatatggtgaacccattctccatctcgtggactgttgtcactgaggttgcaacgtacctttgaaaataaaaaaaaagtgcaaacaacatcagcaattggtgaaacaaagaaaaaccaaccaatggactggtttggttttaagtcattagtaccttccagttgggtcccattcgatatctgtggccatgaagtgttcagctgtggccattgtctcgagctcatccacgttgaaaaattcaagctggccattgaaaccttttaacccagcaagaatgatgtacttgcctgtgggcgaccagaagagggcattggcttgtttggccttcaaagttgcgagctttgaaactcttccagtgttttgtgcagtcttcatcgagtagaaactaacatccggtcttggctggtcaccatgaatcacagcaaacctgtgacccttgggctcccacgcgaaagcaatgatcttatcgttcttgttatccagctcaagaacctcgattggaatatccctttctttgatacggaaaagctcaaatccagagtatgtactcttcttagtttttgtgtatcgatcaaccttaacagcaagatactctccactactctgccagtacatcttgcagtcgctcacactgaagagattcttctgcctcagctctaccttactcgggatttggactagagcaacctgaagaatgggatatcaacatgtaaatacaaaacaactggcagagaaacggaagattattgaggtatcagggcttttcatttacataagaaataaaagaaacataccttggctggttggtttccaccaccttgttcaggaacaaacaatgaaaggattgaatcagtgggagaccagcaaatatccacaacattatcaaccttcatggatttcttgtctattaggctgaaagtctcagtctcatagacagagatagtgtttttgctcagcttggcaaagtatttatcatcttttccgccagcccatctgaaaaaagttggcaagatatcaacaaatttgcataatagtggaatagaggagagaaattgactattatttttagtacattgacatgcggttgaagaaattacctgaaaacaggccaagaggcaccagcaacaccaccaggtcctccaattgaaaactcatcagcactacccttgaaatctctcatcatcctcccggttctcacatcaaagaccttaatctctactttctgaaattttgacaaatatcagaattctttgcatagaaatgttatacgaataaaagttggaaagaacagaggcaaagatgaactcacacttgcatctctcggattgcttggttcttggctatggtaagttacaagatatttctcaccaggcgagaaatcaactagtttgacctaaaacggaatcaacaaaagaagtcaattttcagaccaacacaggaaaaacggaagtactatgtagcaattgaaaggaatttcaaaccattgaatgctgataacgcatgagacgcgtaaatgtatcagcaccaccccaaacagctgccccctgcttgtgaagtgtcacaaggtatgtacctattggagaccactgcacataactctctgtccaatactgcataggaagacaacatcattaattcagatgatggtaacataaacatataacattgctctaaactgacacagatgtaacttacagaacgcttatgaacaggttcaggcttcttctgcctagcatcattccagtaaacttcagtatcatggccaaaacgaatgactagctggtcccgggctttgtcatcagtaagccacttctgcaaattttcctgaaaaacaaacaccatataagtatcaagaccaagcacctcaaaaggctgcattgaataaaaaagaataaacatttaacaaactgatgaaattattatttattggttactatacatcaaatacgtaaacagatcctaacactaattcagctggtaaacacataaatcactgaaatcattcagagaacaaccaatatcaagaagtacacaggcgcagtggaacttattcaaaaacatataatggtgtcgctgaaagagtaatataagataactaaacttacccag

SEQ ID NO: 983 - DNA, 2187 bp, Arabidopsis thaliana landsberg
  unsure (1)..(2187): unsure at all n locations
tcttgtactaacaaaacgattgtcattctactgcancatgtcctaggtctagcaatcctcggtcaatgccantgacacaagcaatcatccgggttagctctaattatacgcttgttgttgcaattgtttactttgaatctctgttttctgacgctctgtttgcaggaggaccaaatatttcttatgaagccgaggcctctgaacgcgtcagatcggctaatgccattggtccaagcccacagataaataataatactgctgcagggaggactccggggttgatcaccctgtccacaagaatgtacgtatttctgcatttgcctcttccaaagaaccgttttattctgcaaactcgttgcttgtgttagcatgtcatgtatagtattactcttagaacacttcatggttccctgaaaactgattttaccagtatcgctttgtcaattgtcatgaattaatgaaacaatatattgatcttcgagatgagttcccttgactgttattttactgaaaacccattgcagatgaacatgccatccacttcattatctcctgcgggtacctctaaaagaaatgtcggacccgaaacctcaaattttgggtttgggagcgggaataaaacctgcggttggacttcaacattcatgtcaccggggaaatgatgcaaaaaagttggagtatatcattcatctgatctgctgagcaagattatgtgtgcctttgggtctaaactgtgatttctgcagtgaaaagctctagactgaggttgaagatctgaatggagtttttccatgaacagcttactgtttgacagaaggcatgaagattatgtttgctttccttcaagattctcacaaatgactgacttccaacctttgtataaaatcttgcaaccgggcgtgtaatttggttcttgtgattcattctcccaagtttttttctataaaacttacactgttcgtatttctgtgcgtagttccctgtgttggggcataacctgggtttgctgtgtcaccaacattgtttgcagaaaatcaagagcaaagcatcagcagcttcagcagagatgccttcaaaggcttgagtcaagagttgcttgtggcagggacatgtcagcatcaagctaatgcgcagctgacgagaatctaaaaggatacgtgatgggctccattagctatggctacttggctagcttctgaaatgctccgagaaacacttccccctttttttttctctgaatttcgtattcagttaaatgggattctgtgtttgatttttcttactcgattttgtgcattaaaaaaacttatatccaaaagcttgacttgatccaaaaatgcataatcaattgctattatttttaaaaaatccgtataaaatcctagtctcaatattaaaatacaaacacctagaattgatgatataacagatttgacgatttggtagagaactagttagtggattagatttttttatagctagctataacattttcgaaccttcatcattttgcagacctttaaaacgggaatcatcaaatcatccaccgggccagcgtgacattacgaaattacgtaaataccctcgtgtttgtttataaggtaaaaaagattggcggacccaaaatggtgtagcagttaggtgtacaatctttttttttgaaggatcactactacggctcaaacaagcctgggtccatgtcactaccaccgatgtcagtcaaacaaaaataataatatatgttttgagttcctctaatttcaatcttctaaacaacaaccctaaattgatatctctatccttgcgcttgatccagattcggttgtgatcggagctgccatggaacgtatcatcggcggaaagtacaagctcggacggaagattggcggtggttcctttggagagattttcctaggtgtgtgttctcctctgttcttgtccctttggttttccgagtttgctttatgatttgaaattgacgcgtcttctgtttgttgttttcgcaactacgcacgtctataccttcgagattcgagctgttaagatcgtaagtcccagctcaatttgccttgagacgaatngaatccatccaatctggagatttgatttggatctgctttgtctcttaattgactttgtttgaattgccttactctaaaatgatcaatgttttaacttcgggttttt

SEQ ID NO: 984 - DNA, 1670 bp, Arabidopsis thaliana landsberg
tgtgtcaacagctacttgaagaaacaacgttggagattgaaagatgagatctttccaaccttgtaggagtatgaagttgtaaagccgaaagtcatggcttcgttcatggaacttttgctggcaaacacaaatacgttagagactttggttgtacagttgggaagttgcattgctagatcaagatttaaagagctgtttcagatcgcactcacgctttctcacgacaaaaaggtctcagttatgctcaagcgaagcaatggctgatctcattcaacagctttatttatgggtggattctcaccttgttgctatatatttatttaggcatcaaataaaaccgaatgtaccaaaccaaaaataaaactacaaagactgattttattcgcgaaagaatgaaatgtacaaggatttgtttctttgtacaaaatcaacagacttatctgatacttgcatttgtgagaaactataacatgtggaatatcaatatgctatagtttcatagtgtgataacttggtctccttcaagctctgatataacaatcaatgagtctcccatttcgagggaaagaggttctgtctttggaaccggattgattatctgcaacaacaacaaaaaccgagtttgtgaagaggaaatgtctggttgccgagtaataacaaacagtacctttttaccgccttttatgtagcctatggcaacttctctccttagccaagctcgctctgaaagctccgtgaatgaagggttctcgccctctttcatatacagttcaatgtcctgtgtgttcaaagcaaactcaagattctcagaccagcaaggattgtgaatattgtaaaagttactggcaaaaagatttgaagtaagagtgtgtttttcttgtttaacctttacgtatatctcatcaccctctgcgtccaaaatgtccttccatacctcgtttaattcgctgttttcagcaactgattataaacaaaagagtattactattgttcggattgcgtgtagatagacaagaaacaaagatcgagtagatgaaatgtaaccttgtgctgttacaagactcataacttcctctgctgctatgaatgtcaaggacggcttgagtcttgttatctggtatggttttgtatcatgttttagcaacttaaccgtaaaaaagctaacaggaaaagaagaggaaaagcctttgaatacctgcttgccgagttttgtgtcgacgatttcagaggctagattatgtacctaaagaaacaacaatagtaagatgaaagttcagtgaagtaggatgtgaataatataggcagtagcatttatgaggttaatagtcactaacattaccttcactccaagcttgttgcagatggtttcagcaaggagaagagtgtaagcagattgtttgtctgccctagatggatctataagacatcaaactattcgttagtttgatcattcattatttccaaagatagaatcaagaagaataaatcatgatgcttacctccaagaagcaagtctcgatccgatattacaatgatagtcagacgaatatcttcttcacctttttcatatttattttgcatgtgcattatactttcctttaatgtatcataatccatatgattcccaacctgcaaaagattgaaaaccatcaataaacaataaatttgaa

SEQ ID NO: 985 - DNA, 2562 bp, Arabidopsis thaliana landsberg
  unsure (1)..(2562): unsure at all n locations
aaatctattaaagatatttcgaattgtgtaaattcggatgtattttattctgtgatctagagaaattgaagggaaaacttacttgggtagcctttacatggaaaggcctaaggcagctcctcacagtagttctgtgccatactgtctatttgtctaatgtctatatataaaatgttgactttatatttggcttttcattagagaataccaaaaacggccataaaagaatttctaaaggtgtgacccaaaacatacgagatcataataatatacccacataatcaatacacataacacatggagacgtgaatcataaacaaatcggagatcatgcaattgtgattttttttttttttctattcaagcttaaatctaatcgttattcaagttttttttttgtatttttttttttttttttttgagtttatttcataatgtgtgtttagaaatttgatatctgtaataattattaagttttataaaataaattattttaaaaataaatttattttatttttaaaaaactcacttaaagagaattagacaataaaaactgtaaggactcttcaacaactctaaactttaaaattatcaaaatttagtattaaacaatgtgaaggacttcttctaaggtgccaactattggacatgctctaaaatctcatttcttatttaatttttagttaattactaaagtttcaatttcccatctaactatatgaaacaatttgaaagagagagattttaaagactgatcaaagctcactttatagtaagattggtaaatgcatattaactatatggagttctaatatgatggatccttatcaacccgtaaagaagcttaattgctcttttgttccttttctagcgacctctcaagcaacataactcttgaagagatatcgatacaaaaagagtgtacaagtctttattagaaatgtttatatatctgtttttagattatatattgtatactccgcttgcaacagcacaataagagccagatctattacaattccatatactaaaccacccatcaaattaaacaattaacacattttggcaaaatacatgtgattactaagttctctctccaactagagtggtgcacaagaaaaataaaactagtcaataacttgtcacacttccacatacaccatcatcagtgagtttcctcaaggcttggagacgagcttagatcctttttttccttctcaaaaatccaaatgatatattagagcttttggttttcttggcctatttagcttggaattacatggcaatgaactttttcagtcttgacgctttctgatttttcaggaatatctaaggcgaataaaataaacttaaagttgttattttcaaacatactctatctaaaaaatcactcatatatcttactaattgactgtctccaatctcctttgaattaatataaaacatagtccattaataataaatcataggctttggcctttggggtcttgacgatttaataaaaaaatcataagttttctatttaagttaagcatgacgattttagtgagacaaacattcactttccatgacttgcaataacattgcaagcacgattagtccaagttgaaaatgtagtacgtaatcggtcttgtaatgatggtaatgctatgtatgtcaaatgtgagtgtggattataattttagaagagatattccttctacctgtattaaactaatgtgataaaaacgggtaaaagactatgtattactgtttaacttaaatgtgaatcaatagagttattattcaatgtataacaaaatgtgctgatttgcaatttttaagagccaatatatatagagcattaagttcagtgaacttttgtaattgttatgtgagaattttctacttcattcagttttcgtcttcattcatcaaatataatatgcatgtgacttaactagcaagacatgtttgaaagtcttttcacacagtgactacggtgagagtggatataccctcttttcccccatcaatagccaatgcgttacttttgatctttagtctctatgaaactaaataagcatatatttgtaagaagaatattaaagtcactttggaaagctattacacacaaacacgttactaaaggattttgaactctgtcgtgtttcctggnnnnnnnnnnnnnnnnnnnnnnnngaactcaatatcttttcgtttattcagataacaacaaactgtagcagagacgttaaagccttctgaagaaccgtaaaaagaaaacccatcaacaagttacttcatgagaaaactgaaataatagatttggtgtttccaaggtttaagagaaaaaacagactctagactcaaactctaaatcccaaacaacaactagactataatttgaggtggaatatggtaaggtgccccgtttgtacgagttacaccattgatggagtcaaacgtcagagacgcaattgataattcgtcgacatcacatatatcaacgcagttagggaacctggagctgctagcacagaaaggtttagactttgagagaaaatgcaagatctccatgtc

SEQ ID NO: 986 - DNA, 4264 bp, Arabidopsis thaliana landsberg
  unsure (1)..(4264): unsure at all n locations
tatttgattaatactaaagatgagggaaccgaaataggtgtgggctgtgaaggaggtgaataagcatttgtctgggacaagcgatggtgtcgatcgacaggggtgtggtgtcgatcgacactggtttggtgcacctctcatatgcgggctgagctgtaagggcctttgatgttggctctagattggaaatctgagcagccttaggagatgtgtctttgggggtgataatgttgctgataggcaatgtgaattttgaatcatccatgccaaactccatctctatatcgcatatgttgagagagatcattcccttcttcacatcaatcctggcacgatctgtagctaggaaagttctaccaaggaataagagacttcttgagttcttcatcatatgtcaggaaccatgaaatcagaaggcatgaggcaattacaaactctcacaggcacattctctaggataccttcagggattcgtttgtaacgatccgcgaagaggagagtgattctagtcggcctgtagttagtcatgcctaatctctcagcaacagacttaggcatgaggttgatacttgatgccgtctcacacaaagagcgtgctgaacgctgcttgaagagatagagccaatcaagaacaaagctacctagatctggaagcttctcagtggtctgatcgggagtgatagtacagatgtactaagcaatgtccactctttgtgccttttctttcttaaccttaagaagcatgattgcactgatgttccttgtcagcaatttagcttcatcggagctaataccattgtcaacaagtcgcttggcatacctgttgagtggagtagaagatgtctgagaaacatccttaggaagagaagtgaggatcttctccatgatggctgtgcacttagtagcatggatctcctgcttagaacgacgcgtcctcggataagagacagggggagtgtaagcagactcaagcttcatcagaattcacacctcatatggtgcagtccgaacctagtgtcgattgacacttgaggtgtgtcgatcgacaccgtcatatggaatcgtcttagagaagagtgttccatagagtgtcgatcgacactggaaggtgtcggtcgacaccaactatatagtagcgagttctagctcttcttcagtatcaacttcttcccacacatcatctccatctctggttaagatggcattacatgtaacaccccactccctcattcgatgggctattttgttttggaaatatgagacagcccatttagagtccaaaggcatatatatataccatcgttgttgggcgcgaatgaaaaataaagaaaaccttgagaaaccctaaggcataatagtgggatcgcagccgccgcctccgagtaaccaaacagacgacgtcgtggtgagttttatttattggatcaaagaaaagggaaagagctcatgggtggtggtggaggaagccgagactaattgtgacactgttgtgtcatgttgacgtgttgtcttcatcgagagatgagagagagagagattaaacacaatcagagaaagagaacttgatttaagatagagtgaatttggcctgatgagaaagagaaagatgatcgaagagaagtaaacggagtagtggagaaggcgggatgctttggatgagaacggatcgtcaccaccgcaatggaggaaaatggagagaaagagatctggttcatgtcattaaggagaagtgagatgaagcagttcttagtaaaatcagagattgggcaaagaaaggaaggaatcagatcacgagtaaggtgtatatgttaagatcacgatatcaagaatctatagccgctgacaaagttggaatcgagtttatattcaagaaattatgcacgtttctttcatgacaagtaactgaaaagtctgtcaaatctaggaaaccctaaatgacagttcgagatggcttgttgaagacaacgtttggagcttgtaatgaagtccgatcatgctgtaaatttgtggagttattcatggtactactaactacatattcaacggtgggattacatttctaacggttggttactgatttatgcatatgtttctgagacagaattatatagagtaaatcgtaacgagttttattgtttgatggcgcaaacgagctcggttagagctgaagctttgcagaagctttaattactcgtgtattgaggtcctgatcgaaggagaatcaagatagagcttaaatttgtctaaatgaggaagaaagagaagtgtgttgtcatcttcaactaggctaaggtgagggtggtatttgcgaaacatattatcattttcttttgttatgcttcttgacgcatgatatgtagccttagatctgattgcataggataagattgcgtcatgatatgacttgatgattatcgatggatatgtatgataatgatgtttgactatgatatattatgtatgagaatgttaagtataagtatgtaaatatgatgattatgtatgtttgtataaaagactagggagaatcgagctatgggtcgtggtctccctagtattgtggacagtgatgggccgacgggttacatgttggtcaagaaaggctgacgagcccggtatgcatgggagtgtctgagccacgagggtcaacctccactcatgaggttctagttgtcacgaggatgactagacctaaagatatatatatatatatacgtatgtatgtgctattatggataagatgattgttatgaatgagttattagaagttaaagcatgttaggttgattgcttgtgtctaagtttatatgttatgaagatggttgtatagctttagaaattgttctatgtttcagtgggcagagttgattcctctcactgagtattctttactcaccccctttttccccttttttctcaagttagtaagcgtgaggagttgtatgcaatattttgttcgtgtgtgaagtttaaagaaaacgttttttgcaagatcagatgaataacatgccgtcttagtctacatggcggngcgggtgttacatttggtatcagagccagttaaagccactccggttccgacccggagggtcaatgttttttaaaaaatcattttatgaaaaagattttataaaaaaaaaaaattgagtgattgattatatgttttgcttgatctatgattgattgccttgattgaattaaagtattatttgattaagtgaattttcatatttgcttagtttctttttgggaagacttaattacatttcttgtgattctggagatgtaatttggattctcatgttctctttgctttagtatggcgttaagaagtgacaaggaaggatcatggtagccatgaaaggctaaagggtaagtttatcgagaacagaaatggaagaaagtattatcagagaataagagcttagagacatttaaggtaagacggatggaaactgtctaagtcatagacatgtaaagatgttaacttatcaatgatggggaaggagccctggaaactattgaaaaaaaggaatgggaaggaaaccaaggtcaagtgcctcagcacatgtgagcctgtacgaacatgttgaatgatagttagtttggaggtcttgtttgcctaagtagtcgttttgttcgcaatccttctactttgggctctaatagtgatcagtgcttatgcgctagagctcgatggagatggacaagttatatgttcttttaagcagtcataaaagtagtgcaatggaaggacacacgtggttggaaaacaagtgttgattttttaaaaacagtaagctgaggttttaatgaaaggtcgtcggctagtataccgtaaatgtggatgtggtgtttgctagagctccaagtaaataattttatatgcaaaggaataaccgccaaaattcgaggacgtatttcatttaagtgggggagattgtaacaccctactccctcattcgatgggctactttgttttggaaatatgagacagcccatttagagtccaaagacatatatatatcatcgttgtttgacgagaaggaataataaagaaaacattgagaaaccctaaggcttaatagtgggatcgcagccaccgcctccgagtaaccaaacagacgacgtcgtggtgagttttatttattggatgaaagaaaagggaaagagctcatgggtggtggtggaagaagccgagactaaatgtgacactgttgggtcatgttgacgtgttgacttcatcgagagatgagatagagag

SEQ ID NO: 987 - DNA, 2792 bp, Arabidopsis thaliana landsberg
ccttgtacgagaagttaatgttattggcagcctccattgcatgaccacatggtatcttcagtgtatgatatctcttgcaagtgcactgcttcttttctagatcaacaacattgctagcacctagcttcccaactacctcgtagctccagctggttaccctcccaaccttgcttccacttgatgttgtcaagttttttgaaatttgcttgtcaacttccggaggtactggacctgaatgtgcttgtgacttcttccgacgcgcgttgaaccaacgtgttaacatagacctaataaatctaagcaattccacaatatgtgacgatctccccttgcacaacgccttgtttaacgtttcagcaatattgcaatctgattataaagcgttttaaactttccactcgtaaactcatatccagcggttttcactatctgcgtcaatcctctgttcttgaacttggcttgtatattcctacataggtgaataatacatgcaccatgatgtgcttgcggaaataccttcttcacccctacctttatcgatttgtgcctatctgataatatagtgagtgtgttgctgtcagctattatcctctccaactttgtaaagaaccaagtccatgcatcatcgttctcgctatccaccacagcaaatgctagtggatacacttggaagtttgcatcttgaccacttgctgtgagtaaaacccccttgtattttcctttcaaatgtgttccatccacaaccaaaacccttctaagatgcttaaaaccttgtattgaagcccaaaagctaaaaacatatataaaaacctctctttcctttcatcttcaatatcaggttcggtttctatatgtgttatcgtccctggatttgttaacttcaaaagatgcaaatattcagccaaattgctttacgactcttcatcgctcccgccaacatctgttaaagctgattccctagctctccaacactttttgtatgatgcagaaaccctcaaatcttctagtacaagttgctgaagatccatcggaacaggaccagcagaagcttcactgtattttgccttaaatacagatgcaatcacctttgatgttgctttcttcacgtactgccttctagtctcaaccgaacatgtgtgttgaagctgcgctttcttaatttcatagtaacatgtgccattcattaaagttgccaatattctccaatcacatttctcatctgagcaactaagaacaaaataattccatttcgttcttgtttgcttgaaatgaaactgattctttatcgcaaatatagccaatcctatttgttaatcttctttgctcgcatacacttttccctggtatatacctttaccatcatcatcaatgtccaaatcaggtaagttatcaacttcatactcgatgtcctcaaacaaaggtgggatgtcaaactcctcgtcatccactgcctccaactttttgacctcattactcgtttcctgagagcttccaactccaccgaccatctttcctttcataacttgtggggtcttttttgtatgctctgtctttatactttcgccagccccattcacatatatagcgtgatcaaagactccgctgccagtacagaaaaccacttcatccggattggagcccacaaccttattgttagacccgtaccttacatttaaaccttctgttgccatcaactcattagcattggagccaccataatcatctgttaggaaatttgaccaaaactccttatcatttccgctaaagggcatactatcttcaggtttttccgtgactgcttcaacttcctctgtatcgttatcaacgaaaaacaacttttcaacatcattgttaaaaccttcgttatcagtatcattccgtgacgatttatgcccactgttacttcctatgtttgcttctgcttgttccaattcctccatgaattcgtcatcacgaggagtcaacacaattgtaggagtttttgaacccacagacgatatatcgcgaacagatgtgacaccacttttaggcgtttttgaaccacactcttcctccaaactgctttgacgcggtcgtttagtgctactatctcctcgtgtatcaaaactctgtaaatcttcctccatttcttcaaacttcacaaacaagtttagacccatgttttctctaagggtctttagatagtattgaagtccaacctcgcttgtaaccaaaaccgggggagtcttatcctttgttgcaaacatgttcttattcggtacagagtaacttaacagaggatttaaacccttgacgccaaactcctgtagaattgcttcgttcaacgcaaccaatgttattccctcatgaattggtacaacccttgagaaaagttggttacatatctccaatttccactctccagtcgaagaacaaaaccactctccacatataaccatgatatagtcgtccatcgatccctgtacatataaacgaaaaaaagatttggttatattctgatacccataacaaatagaatgcacggattttcgttttaatttcatgatatcagttttcaacaatcgtacctccttggacacgacagttgaccaaagatcgatgattgaaacccagaatcttatgtgtttgaattgatctcgtgtttcagtttttttttaactcggaaagcaagggaagttacaatgtttcatctcggccgtttaatctattgaaatccgaccctcgctcgtcacgcacaaactgttttttctaaaacgaacattataaccgtatattttaaaccaataccaaac

SEQ ID NO: 988 - DNA, 2483 bp, Arabidopsis thaliana landsberg
acctcttactcgacataaggatccaaagatgccatgtaaatagcacataacgatgtgcactgtctctatctttatctgatagtgtcccgcaatccacaccttactgctagtcaccttacttgggtctgtactctttttttctatataaagtacatacatatcttagtaccatttgattctaacaagaatacaatatatatagatatttgacaactattattaccatatcatcagctaaacgaggcattcctttgcagctggtggtgtgaggaatctgattttgtctcatcttcctgtacttgttacttatttcctacatgataaatatcaacgcattaaatctatcagccatgacatataaacaagaaagtagttagttgtaaataactaaccgtgaaagctgcgttagttttgctcctaacccaagtgttccacacttgagtggatgggatgttgctgggttttaaatctattatctaagcaacagtcttcgcagcacttacttctgaaactagccttgacttccaagccctccagatatttcccatttgcttaaaaataacaactctctgccattcttcttgcaagttaaacctcccatacatcacatacaacaagcaaaagtcacacttgtttcatatatgtccagccaaaaattgttgcatataaatatatacttgaatttcttcccacattgtttgtttagccactgcatcaattttcctccaatcagcaagtgtaaccggaacatgttccctcaccaggacaccatgaaaagatgataatgttattgaaccaggtccaacatgatcaccaaagtcagtgaaagtaactgaaaccttttcattaggattttcagccactttacgcatctttgtgggtcctcttttctttctttctttctttcactctttcctgcgctactttacttcattcatcagtgttgctaggaattgcattatcttgaccattggcaacaccatcttcttccatattggcagcttctacattcttctgctgttcttgtccagtcaaacaagcttcttacttctatctcagaatctctcttctcatcttcagacattgctttctcagtctgatcagcctccggtactgttacatccttgtcattacccttctcttcttccacaacatccggtgtaacatcttctacctcatcatcttgcggtgtcacatcttctacctcatcatctacaggtgtaacatcttctacctcatcatctacaggtgtaacatcttctacctcatcatctcgagcagccattttcttgcttcttcttgtagctagtttcattgcttttcttttcttattcacctttaatgttgttgcaggagcaacttgtggtgttatatcttctacctccaagccttgattatgtctactacgacgagaaccaactttacctccacctcttgtctttgccatttctgaaactgataaatgaagaacagtttcaatcgaaacccaaaaatcataatcgaaacctaaaaacataacccaaacaagaaatgtgccaaacttcgacatgcatgttcctcgaaactaacaaatcaaaattgatacccaaaatcacaaacttccgcatcaatgttcacacaagccaagaataagaaccccaaatcaaaattgttttccattccaaagaacaaagaactatgattgaattagaacatacctattgaagattgcagggagataaatcgagtgagataaagtgcgaattagatggagtgactaagaaagcgagtgagattgagagaaatcgagtgagagttgcagattttgagctcaatacctcaagaaaatgagaaatcgagtgagctagggttgtttttttagatccaaaaattacctttccttaggcaaaaaaatgagaaagttattttttaggatttttttttattttgctttagccaaaatttcactttttccctcttaccattttcaatagcgggatactaaagattagaaccacaaaatttccccgcgtcaatttcattatcccgctttaataatttatagcgtttacaatatacaaaacgctatctttaaaacacgattaagtcaattatagcacatagataaacaacgctatcttattatgctatcaatacccacatttcctgtagtggtggcaaacttttgatttgaacatagattaagattaaaaaataaaacattcttaaaccattacaaaatagaatagaatccaaatattaagagagatagaaagaaacaaaaagaacagagtttaacttcaaaaaagaaaaccaaacatacaattcatcatagctttagttctcctcaacgacctccatattaggatcgtcctcatcatcttcaatcatgtatctgcggctgcatttcaaaatcattttgggaattagtaatgttaacaattaaagtttcaaaaaagccaatatatatatacttacctgaaaattggaatatcaatttcttc

SEQ ID NO: 989 - DNA, 1611 bp, Arabidopsis thaliana landsberg
ccctacttcgctttaaccgatttatcgagatcgaaaaaaaagcggtgatggcaagacgtcaacctaaagccttgcattcaaaggataaatcatacaacgaacactacgaacctcgtcagcattatgataaggagtatagtaagggagataagggcaagaaagcagcaacttacgcaattggttgttcggaaagacaaccttctaaaccgtggaacaagtattatcgagagactgatattaaacgtaactcggcctacagtgagttccataaaatctctagtcattcgactgatgaatgtcgacagcttcaactactacttctctcaaaattcaagaaaggcgatctcgacgttgagtgcgaacgatgccaggtaacaacgcaaaaagataaaatgaatctaccaatctacgttggcagaacaatgcattgtttcaattttgccgtcttcgataaaccgatcgtttataacgtcattctcgggatcccttggttgcataaaatgaaagctggcgcttctacttaccatcaatgtgtgaaatttcttactgcacatagaattcatactctaagaagcgatccgcttgttgctcgtacatgtttaataatcgagcgtcaacccagaaatgctaaagcctccatgataacagagcccactcctttatgagatgaacgcatagtcccgaggattgagtcggtaatccaagttaacattgttgtaactgatcctcttcaatgtgttggtataagcgctgatctaccacaacaattgaaagacgatcttgtacagtttcttagctagaatgtcatgactttcgcatggtcaatggaagatatgacgggtgtcacaccggatattacctgccatgaacttaacgttgattccacattcaaaccgatcaaacaaaaacgacgcaacttggtttggaactactcgaggtaggatcaatttttgaagtatcccgattggctaagcaatcatgttgttgcgaagaaaaaaaatggcaagtggcgagtttgcatcgacttcactgatctcaacaaagtatgtccgaaagatagttttcccctcctgatattgaccacctcgttgaagctaccgccggtaacgaattactgtctttcatcgacgcttttttgggttataaccaaatacttatgcacaagaatgatcaagaaaagacggcattcattacagatcgagagacatttttacaaggtgatgcctttcggcctaaaaaatgcaggggcaacctatcagcggtaagtaaaccgacaaggctcttcttcccgacaaggatccggagtcggcgtacaattggaatctcctacaagagaggggctagaacaatttttcagactcgcctttccagcctccaataacaaagccaaatacaaagcgattacgaggcaaaaaatgaacgaatggatgcctatctcaaggtggttcgcgacctgtcccacagttttaagctctttgaactcaataagatcctaagaagcaccaatgcgtccgctgacgcgctcgttatacttgtttcgacatcttatctagttctcagtcgtattatacctgtcgagagcatcgatcaacctagtattgatctttctct

SEQ ID NO: 990 - DNA, 4631 bp, Arabidopsis thaliana landsberg
  unsure (1)..(4631): unsure at all n locations
tgatgatgaagacattaggggagaagataactatctccatattagaagataggatattgacgaagcttggattatatggaaataaggttaaattgcatatgaggtacaacccaccgttgttcggagtagggaaagagatgaacatttatgatgatgaggatgtccttacttatgtaacatccgcaaaaaaaaacgcaagaactgtttttgttgtggaggagatctttaaatcgccggagcaattgcccgaacaattgtgtagagtttacgagcatcaaatatctgtaatacagatattcttctcgattagaaggtacaataagatgcatagttgcactcggctaagtaaagatagtagtaggctcaggaaaaggaaaggcaatcaacaattagtcgcagctctccttcatgatcattttccgggacagttggaaactccggttccaagaattatcatggagctagttcagacgaaattaggtgtgaaactatcatacttgacagcgctaagggggaaatatcatgcgatttatgatttaaaaggtagcccggaagaaagctacaaggatatcaattgttatttatacatgttgaagaaggtaaatgatggtacagttacttatctgaaattggatgagaatgataaatttcagtacgtattcgtagctttgggagctagcattgaaggttttagagtgatgaggaaagttttaattgtggatgcaacacatttgaagaacggatatggcggagtgctagtgtttgcctcggctcaagatcctaaccgtcaccattacatcatagcgtttgccgtactcgacggtgagaatgatgctagttgggagtggtttttcgagaagctaaaaacggttgtacccgatacttcagaattggttttcatgacggacagaaatgcaagcctcataaaggccatacggaacgtgtataccgcggctcatcacgggtattgtatttggcatttgtcccaaaatgtgaaaggtcatgctactcacaccaaccgagacgtactcgcatggaagtttcaggagttaagtcgggtctacgttgtggcggacttcaaccgagcgtatgacgggtttaagttgagatatcctaaggcgaccaagtatttggaggatacaaccgtgaaagaaaaatgggcaaggtgttgttttcccggagaaagatacaacttagacacaagcaattgtgtggaatctttgaacaatgtgtttaaaaacgcaaggaaatactcgttaataccaatgcttgatgcgatcatcaaaaaaatctccgtttggtttaatgaacatcaaatggaagccgcgtctggatccttagaaaataagatggtgcctttggtcgagaattatttgcatgatttgtgggtttttgccgagaagctgaaagtggtggagctaaactcattcgagcgtgaatatgtagtcacatgcgacaaaggaatagattatacggtgagcttgcttttgaaaacttgcagttgcaaggttttcgatatccaaaaatatccttgtattcatgcattagccgctttcattaacattatggatgatgaagatcggagaagaggtttggagttacatgatttggttacaaaatattattgggcggagttgtgggcattggcctattataggactatttatcttgttccggataggtcgcagtgggaagtaccagatgaagtaaaggcgttgaagatagttccgctgtctaaaaaaccgaagaaaggaaggaaaaaaatgctaaggtttccatcaaccggggaaaagcggccaaaacgacaaaggacgcaaaacaaaaggcgtccaaggcaatcgtgtcaatggttattatttgggaatacgcctatctgagttttttactttgtttctacagtgatttgttgtttttatggtatggacttactatgtaatactgtatttccgcttctgtaatactatgtctgtttctattgtttttttgtaatactagttataacaagtaatatcatgtctgtttctgtcgaatttgtggtcatattagaactactggtaatattaagttggtcttatggagttcgaatttgtttacctcaaaactcaatgaaaatgaatacagtgagttattaacagataaaaatgtattattaatcatttatacttaattaagttagaaattttaatattaaaatttttaacttatctttagtagactcaatacaacatatcccttatacttttaagctcacttttaatattatcaccaacttaaaatgaaaaattcatattgctacatatatttaatttataattgcacaaaatatttaaacctctatatttataaagttccatccagtgtactactaaataaacaaattgtaaatataggaaatattgctaaacatgaaaaacatggaaagtaatactatttgagaaattggcagtaccaaaaccttaggaaatactatgctgtaaaaaggctgtgcacatgttcaaatcttaaaaaaaacggcgcttggagaattattttttttgttttcccccaaaatttttggcgcctaacaaattttgagattccctccgaaaccaaaaatttcactttttattttttcctctttctttttcgatctgttcttacatctttcatctttcatcttatttcctctttttctttcatctctcatctctcttctcccacatctctcatctctctctttaactcgaattctctcacatctctcatctttctttcatctttctaccatggatagagagtgtgagagagacccctactacgatgatttgaaagcggcgaagagagccattgagcaaatggaaatggttgcgatgatggaagggattcctaagttttgtccatgtggtggtagcattgtcgatactcgaaaagttgaaaagagatactaccaatgcgagaagtttaaggtatgttgatgtagagcacgagtttttcaagtttttgtagatctagatccagatctatttggtatttcaaagtatttcccgttttggtaatactgcttagaacaagtaatactgcacaagtttttctagtttttgtagatctagatctatatttgataatatttggtactttgtaggatgatagaactgattgtatgcacatccgtaaactttgggataaggctatggaagaagaagtgagtagcttaagggagagtgttgattacaatcggaagaaagttctcagtcatagtatctcatagaagaaatgcaaaaagaattgaaagcccaccgtgcagagattgtgaacgtgagcaaagtggtattccgtaatcctatggctccaaagaagtaatgtgttatcctattgttccttaatcttattgttaatttgcttgtaagactttccatatgctttgtaagactttccgtatgctttgtaagactttccctttgattgtaagacttttctttgattggtaatactatggttgttcagtttgatatttccagtatatctcttagtagtaatagcacgaggtatttcccgtatttcagttaacaatatcataaaacatcctaatacattaattgaatccaaacatagttttacgagtacttgcgaaatcctaaaacaaattcaaagtacaagaaatcaaaatacaaatccggagaaattacacgaataattttcacacgttattagagtttgcacgggttgaacgggtcactcgtttgggcacaacaggagcagccgcattgcccttggttgttgcatcctcctcatctggtgggttctgagacatctgcattgttaatttagttaaaccttggtattacgcgatattaccaattgtggaacagtatatccggtattacccagatttatcttggctttcatctcatccataaatgcttcgaacgttgcttgttttttctccatttccataagcgccaacaaagcttcattcagcttgtcattgatggaatggagcttctccattacatcaactaacgtcgggtctcccggtccaacagctgtgggaacttcctcttcatttggggcttccattcgtgcctgcacatcctcgtgtacacctcctcaaatctaatttcacgcccttgaccaagacgcttcatccaactatcaactacaacatcgtgcttatcaacatcatcctctactcccgtgatttcagccaaaagaggtacttcttcagccttctctctaattatactctcaatgacctatggaaataatagacaatgaaatataagaaaaaaatagaaacatatttgctcaaggaataataggaaatactaacctcagttgttccgagtacatggttgatttgctcaagggtaaaccctttcatctcggtcctcttgaaattcaccttgcacatccttggacaaccggcatgtgcaccctctttttcttctatgaatctttccctaagtgatggaatggcctcaaatgctaaaaactacacaaaacacatgaaatttaattgttagcttcaattacgaaaatgtaacaaggataaaacatgtgacttacctcaaagccggggggcccccnaaaaaaaaccccccccccaaaaaaaaaacccccccccccccaaaaaaaaaagagggggggggggg

SEQ ID NO: 991 - DNA, 3528 bp, Arabidopsis thaliana landsberg
ggacggtccaagtttcttcttctatattattgtattttatagaaaggaactatgtaagaggtgttacattgtatctaatcttctgttactctatagtgtattggagaatgtagtacggcaagctagacaaatttccgggaggaatccaatttttccgagacaaatttccaaacgtcaaactattagcgaacgtatctttcacactctccatcacttccctctctactggagataatctctccagtgaaatccctgaagcagcttcctcaaattccctcatacaagcaatctacacaaaaccaacgtagactgatttttgcaggtttcaagtataagatgttttaagaacaaaagtgagaaagattaaacttgttttaccatattcatgacttgggactcgagaaacggttctcagtacagtttggtaatactgatcctagcataccattccatgtaagctccatccaccacattgccaatattcaggtgaaaataactccaacactatatacatatatgagaaacaatcatatcttacttcacctaaataccgaaatctctcataaaactaaaaccacaaaaattaaaatagtaacatgtagcaaagtcaagcagccacaaatgttgctctgagacttaagcgaagcattaccaatatgccggtaataacaagccaatgcagatgctccccaagcaaatataatatcccagcttgatcaaaatcttcaaacaaaggcaaatacttaacagagactttatcaccatcaggcatcagtagtagcaaaaatggtactctcaataagatacaagagataagctcgagtatgacattcaacaacgtcaaaagaagcatcttcaggacactcagagaaagttctcttaagccaattaagcttaaccctagaacaattaacttctttattagccgcagatggtaacttccctaaaagtctaccacacatatccatagcaacctcatcaccaactttagaaccaacaatgggatctccatcaatctcaagtccaagtactaaagcaacttcgtctaaagtggctaccaagagagatggatcttctgcacttcgttgcacctaaacaaactagctgcaggattattttttttataagaagccaacaatctcaaaggtcgagttgataaatttagagactaccattagtcgaattgtcaagtaacaaaaattattttagtcctcccaaaacaccagcaaacctatcataggatctatcataatcgtactatgtatcttacaagaacatactgtttttggataaagagaccaaaaaaagccttagggtccatagtaaaagatacaagtatgggagccaaaacatgttaacgagtcttgtggggtttagagactttcttttttcgcttcttgacagatttgggtgttttcgtcttcctagactctcgtttctcctctttcactttcttcttgtgctctttccttgcagctttcttgttttcaggacccaattcttcttcactctcttctccacttccctcttcctcttcttcttcttcttcttcttcttcttcttcttcttcttcttcctcttcagcattcacctctatttgctgctcgtctactttaggaagagcatccttaagccccgttatcgtttggtacagcatgtctcctgtgtcctgcccgcttgttatcttcgctacatcagcctctgggttgttcacagcatccagagatttcggtatgtatgactgatcatatcattacaaatcgataagataagatagttctacagagatagttcacacatcaattctattgactggatacacttcacgaaccttcatgaatacagaatccgcgatttcatcctctacggatatctctcctcgctctataactttccgttggacctacccattgttacataattcattaataaacgttacagctttaaacctgacaaacttcaagtagtaaaaagttagacattacctcttccaaatagctatcaacattttcgtctgaaattgtcgggtcaactatgaagtcaaatagctctcgtattgtcataacagccacaccatgttttttgaaaaaatcctgcgtgtgattgtaaatccacacatcagacaccctattccagtcaaatattaagcattgttaaaacaggatactgttaacacttaccgagacatggtcacaatcttcccgtagaaagttgagtgcaagaggatggtccagatccacagattgagaaacatcaattatataaaggtgcccctgaaaaagtcaagataatatcattatatttgtttcgttttgctgccacgaaacgatcaaataagtgacccttgtagagataaatcaaaactcacctcaaaataaagtatgttatactcactgagatccccatgcactaatttgcacttctgatataatactcgcatttgaattatcaactgaaataagaagagattaatcgtgacatatcaggtctaagtaaagtattacaatgatacactcaggaccctctaaatgagaaaataagacatacctctaagtaacactcgcgcaacttgtccagagacaatgcggcatccttgagacgcggtgcagcccaaccatccctccctgtaaattataaatagataaaactatctttggtagctgaaaaatcgttacttcatcaatgaaatatgctaatgaatcagagtagagtgttgcgtggaaatgagtgattaaaacagaagataatgcataagagcgaacctataaactccatgactagaacatgaaggcgtagaagtataacagctggacacctaattcctgctgcatgaagcctggcaatgaaacatgtataatataaccaactaagaaattaccagaatcattgttacatatatgtgaccaaaagtgactacttctccggcttctgttttgaaaataacaagataaatcaaccctacaatacattaacaagattccatatgaaaattgtaggtattacctcttgagatttctctgttctttttcagcccatgtcttcaccatcttccggggattgtgacgacagtacccatatctaaaacgataatctccttgtacatatcgatctcgatccctgaaatcatcaaagttgaaaactgggattaagttaagagtttttgaagaaatgataaacaacattattcacgtaatagcttacttaaaaaccagaacagatgtcttgtacacttttattgcaagttccgaaccgtcagattttgtggcatgataaacattagcctgaaaaacaataaaaagagagtactttcaacaaaggattccaaacagatcatcttcttgactaaatagctaaatcatcaaatatgagagtagtgaatgtgacatacttctttgcctgtcgaaatacatccattaacatcgttaaacacaccccggttaagcattataaacaaaaccatacgagtccttggatcaagagcctgcagcaaagaacaaaacaacatctacacaatgcagaaaacgtctt

SEQ ID NO: 992 - DNA, 4496 bp, Arabidopsis thaliana landsberg
  unsure (1)..(4496): unsure at all n locations
tatatcattaataatgcaagaaactttttcacaaccttttaataaattctaataatctttcattttctagtatcaaatattactcaaaaaaaattatattatttttaaaaaacattattttgtttattaagaatatatatacctatatatatatatcaatttatatctatacctattaagaaataatacttgtgtgctcgggtattagttcgtgatcggttgtatcctgggattcaaaaatcgtgatgtccgaaaagcacttacggccgatttattaaattaaggaaaaagatatcatatcttgcctccgtgatatactttctgtccttaattactgttattgtaattttattgttatcgttattttagtaaaattcgtacttgtttctcaattcggtttttgggctcctataataccaatgcttatgtcctcgattgcttgtgtaggactaagtacatttataaagtgcgctaaatccggtcttgtactgtttgtcaagtacattaaactgtcaattactcttgcatattccacctgttgcacaggttcacccgagtttttggtcaagtgaagttgaggatctactggagtttttgcagtcccattagagtaatgcttgaaacgatcaagtatcttctcagcatagtgggtttgagacaaggtaatgccttcatcagttctgatgatttttatacccaaaataacatctgctagacccatgtctttcatttcaaaatatcttttgagcatgttattagtttgatttatgatatttgtgttgctccccaagatgagcatatcgtctacatataaacataacaaaatgtaccatgttggagtaattttgaaatatatgcatttgtcacattcattaatggtaaaaccattagacatcataacactgtcaaacttctcatgtcactgcttaggagcctgtttgagtccgtatagtgacttcacaagtttacacactttgtgttcttgttctgggataacaaacccttcaggttgtttcatgtagatttcctcatccaaatctccatgtaagaaagctgttttttcatccatttgatgtatttcaagatctcgtaaggctgcaatgcctatgagcatcctgattaaagttattctcgttatcggagaataggtatcaaagaaatttaaatcttctttttttcgaaatccttgtaccacaagcctagccttgtacctatcaatatcaccattcgttttccttttaatagtgaaaatccatttactctccaatggtttagaaccttggggtagatctgctatctcgtaagtatgatgttgcaagataaagtctatttcagtattgactgcttccttccaataaggtgcatcangggtagacatggcttctgaataagttcttggtacgttttcagctaaaaacgccatcaagtaatcatcaccgaaagatttctctttgcgagctcttttgctccgcctaggttgttcttcaggttcctgttctgtttcttcaacagtaatagtacccaaagaattgtcctcagcttccgatgttgctgcaactcgttgatcacgagttcgtttttgagttttcctacaaggaaaaatatcttcaaaaaacgatgcatttcttgattccatgactgtattttcatggatatctggaatatccgatttataaacaagaaatctataagcattgctgttgtgcgcatatccgatgaagatacagtctacaatcttaggcccaattgtgacctttttgggagggggtacagccacttttgctagacacccccacacttttaggtatttgtacgagggtactgtacctttccaaagttcatatggtgactttgtagtcaccttatgtggtttcctattaaggatgtagttagtggtaagaaaagcttctttcccccccccacacacacacacacatgttctaggctaaccctgattcctgcaacaatgcattcatcatttctttcagagttcgattctttcgttccgcaaccctgttagattttggtgaataaggagcagttgtttggagtataatacctttttctctgcaaaatgcattgaatggctcattatattctcctcctctatcacttctaactatcttaatagttttcgagagttgattttcaaagttggtcggactcaaagttaatagtgcttgttcatcagagtaccagagatcagattcttcctcatgttttggaacatgcttcacgttggaaagggtgatagtcattcccgaagtgagcttcaagaccaccttactagtgccttcaatcttggagtgagagacattgcccatcatcagtttgtcgtcagacttgcacttctgataggtgttgaacatgtctatattgatgcagatgtgggtggttgctccactgtcgtaccaccactccattgggttttcatcagtcgtcaccacatttgcttcagtgaccaccgcatagaggtcatcttcagtcaaattcgcttggttagctgaccttttcccttagctttgctgcaacactcactcgccttatgaccttgcttgccacagtaggtgcacttcccagaattttttttaatatcaccttgcttcttaaagctagtggagggtttagatgacattatctttggaccacccttgttaggtttttcacccttgttgttataaacaactttggctttaccctttatcttgtactcagccacatttgcatcatgagctacgaaacaagatttgtctctctcggaagactcattctgcagcctagcgatcaagttctgtaagctcaaaggctcttgcttgaattcaggaagtttttgaaatcactccaacttggaggtaacttctcgataatggaattcaccgtgaaggtttcacagatcttcattccctcatcagctatgccttagactatcaattgcaactcattgacttgatccatgatgggtctcgagtctaccattttgtagttaaggaagttcccagtggcgaattttccagaacccacattgaagactttgtacagtgtttccaaactttcccaaaggatcttgctagctctcgcagtgtggcgattttatgagcagcggatcgcaggatacaatcactataagatcggtatcgcaacacacgatagcggaatctgcaaacttgaaacaaacgatatactcttgacttactttgagaagaaaggaggagagggagagagtttcgtttaacttgtagcaaaaaacgagtgaagagaatgagaggaagaggtgttccaaatgttacaaataatgcaacaaagcctcataagtattttctccaaaaagaacattggttattccccaagagcccaagctcaagcccgacccgacacggcgacagcgcatgtgtgttgttgcataaaggacttgcatctccaacactatagtgtcacttcccaatagctagtgaaccatgttaaatggataacactatatatactagaggagaatcttcaaacatccaatgtgggacaaatgtcaatatttgttattgtaaactttcaagctaaacactttagatctcaattactcattcataataacttcaatatttacatgtaactatactatcttatagtgctcattacaaggaatccaaagactctatcatccggtcattccggtgacgtacatcaccggaaaagtcgccggaaagttggtcggagccacatatgtaaaattgagttccaactgcttgtacatgaagcttcatgtttgttttatgttttgttcatctgttgttgtttaattgttgagtcatgaggacgtaaccaccatggggttgaaccgttgcagatccacttcgtcgagacgtcatgaaccgtcgagtgtaaacgccggcaaaggtaaacggcgaaggttacacttttgttttttatttttttggtaaaatgttaaattgcgaaggtttacttgtgttgcttttgttaattattgaactagggaactaaaccaagtaattaaagtacagaaaaccggtgacgtaatattatggtcacgtgaattgaattatggtgtggcttagcatagcgtgtttgggcgattaatattaaattcacagattaatttagttattaaaccggttctaataaatataattaaggagacgccaaaatctattttaccgagatttagggggtgtattcaatcaaacatttcaagtaatttgtgttaaaataacaaatcctatattattcaatcatggatttttacaaatctcataaaatttaatgttattaactagtgattctaaaatctacttaaaaatcccctgttattgaaaacattttaaggattggatttgtagtgacttgaagagacttaaatgaattttagtggatttccttagttaaaaatacagaattttaaatcgcatagttttaggtggaatttgagaagattttaccaagattataacaacgtccttaaattcccccaaattttcaaaatcaga

SEQ ID NO: 993 - DNA, 2357 bp, Arabidopsis thaliana landsberg
gaatctctatatctgcgtcaaaactattataccatctccatctacctctcagaatctttctctacgcttcttcctttttttagagagattggtttgtcttttacttctgggatctcattgaaaggtatttttacataactctggatttttagaagctaatctagatgttaaactgcaaatctctattctcccactgtctttcaaatctccatgtctctatctttgtttttttccaattattcatgttagtcattttaaataaattctgggttttgctaatagttttcaacttggattactatttctgaaaatagataagaaattatgaaatctctaggttttttaatatttgatatgagctttctaagtttttgcttggtagaattcgagattgataacttctgaatttaaatgtgtttgtagtgtacttatggatgagccatatgtggatcgttcaagtttacctgtgctgcatccttctcgtttgaataaagctaaattgtatggatttttccctaaattccattgattattttcactaagtcttaaactcattaactaatttatttcaatgaaacaggtttaaacaccacactcaagtatcaaatagtgtaagaaaggtcattcaaagttttaagggaccatggtattcttggaaaagactgccacctttctacaaacgatcatggttttctttgtttaagtgatttcaatgttactcatcatgtgtgatatactttgtttatgggatgattccctcaattatcaagttgaaagagagtttaataaaccctgaaaacatacaaagccacatgggccaaccaagcacacagacccgaaaaaacaaggaaatacaagaaaacgaaaattacaaaacgcaagcctagaagcccagacgaaataggcccaacaagacttgacttccacctgcagacagaacacgaagaacagaaagagggctgaataaccctgtcgagaggagaagcgacagaactcagtcctgaaacagagcaaaccaagtaaccagcaaggagttccccaaattatttggattagtttttctcgaaagaggatcaagacgagattgaatcaagagttggatttctttaatgatttgagtgtcacaccgagcattggaggtatgaatccgagcgttgcgctccctccaaagtaaaaagatggaagcatgacaaatgagcttaattataagggataaattcctggacgaggaggcagatttcacctagaggagagtatccataaaggatgaaggaggatagagacccgccctccttgtaaagaaggtccagacagcttcactaaacgggcatctgaaaaacaggtgatccctagactcgttccccacgttacacaacacacacagagctggaacagaaaaaccccaactccttaatctatctcttgtgtgtaatctgttccaagctgcaacccaggctatgaaggcattttttggaacccgatccttaaaccaaatagacttgtgccactgaacttgagcaccaggaggatgcaaagctaaccacatcttcgcagcagagaacgatctagttggagcatgagcatcagccttccacaaataaacgtcatctttagtacaacctggtatgctcctcacatccggtacacagctctttaacaacacaatagtggggttgcgaatcctgctcgaagacagccaccacacatcacctctcagcgcatccctcaccaccgcatttaaaggcattcccactgagatagggccaactggacccgtgatatcaatgagaggaccaagacctgtccagttgtcttgccagaaacttgcggtttcccctgaaccaatatcacaaatcaggaaaggtcgagctaaaggtcttagcttgcagagcttcctggaaagccagcttccagagtacgacgggtttaaatcccaaaaacatttgtggccaatgaggttaattctgacccacgaaacccaaagagaccctgcagcagtaaacaacaaccaaatatgttttagagccaacaccttattcaaatcattcaaccggcgcaaacccaacccaccacactccttctgagtacagagaatatcccaagcaatatttgctccccttgtagaatttggagctcccttccataagaaggcattacacatctgttctagcttaagaagacactgatttggcaacatgaaaatggagacccaaaaattaatggttgaataaattacagacttcagcaactgtaatctgccggcgaaagataaatgcctagcagtccatgtagagaacttatacttgattctatccaaaagtggctgataatcatgtttcttcatcttctgagccatt

SEQ ID NO: 994 - DNA, 1975 bp, Arabidopsis thaliana landsberg
  unsure (1)..(1975): unsure at all n locations
tttttactcttgggagaagatgatacaaaagcttttgacttttgatagtttttctctttttgactcnttctgttgttcttatccgacgagtatttgcgtcgtctttgagattatgatatattttacttggttctgctacttttagttattggaatagtaagagacgacgcaagtaagaaaaaacaaacatgtatgcatgctttcttgaaattcaaggcattccaactaaattagataaaataaacactacaataaaaattagggcaatagaaagaagaaaaaacgaacacttaaactagaatatgaaatccaaatcataagtaactaaagcgactaaatataggaaagcggaaagggagatagatgtaagcaagctacacaggaatcattattcccatagtcttatgctgaaaattgagaacaatgaatttgttttcaaactgatcccaatagagcttcagaacatcgccttctacgagatctaatgaatgcttcatagtactccaaccagtcccgaaataatacttcatgtcgtcaattcttttcagggtaactgtgtatagatcgtcttccattatgtcgtggacttgcacttcaaaaccgttgtccaaaccctcatctgtgacaccattcatcctcgtgaggacagacatcacttgtgcttttggtaatgccacattaccaacaatgtcactctttgttagagtctttgatatcatcatagccccgtctagttcatctctggcataattcatcttgctaaaattttaaccctagatcttttgatagtagaaagaaaaattgtttatgtcttgtgttcttagatgcaaaacatatttataggaggcttaacccaagaagaaaggaaaatacaagtgaaaaggactccaaatcttccattaacaaaatagaaatttttcttatcgtaaaaaaggagattgtttaataatttctttaatactcccgaaacggaaaatgggaagagagcactgtaacttggaaagaaagttattgattcaaggcatcaaaatgaagctgagattttcttaactttagaaaagaacattgatacatttcgcagtcatatggcagaaaaagagtagaagttccttccaagaggtaactaccatcagatccttggaggctatactactggccatgcaaaatctcttagtttcattcaaagttctatgtaaattatggttttagctctaattccttagaagccaccataagtgttttcttaatttaaaaccgaagtttaaattcaacactacgtcgctgcttcagcctatctttccattggagaagtcctaccatggataatatatatcgaagaaacacatgatagtacaatagtttttcccagacgtcttgactaccaaagtgtccacacaacggcttctacatccatcacacattggtctagagttaccactgttgggtacaataccaatacttgtttttgcaccttcgtacatcttgatcatatggtttggcttcatgtagaccttatctctcagtaaacatgtaacatgaagagtgacagagcaatagctgcatgtgtagaaccacttttgtgcatctatttctgattcgcaaatctcgcaccaatactggagatcttttgtcttttcttctccacagcaaagagtgagtggatgtttatcgtacttgtagtgagccaccnnnnnnnnnnnnnnnnnnnnnnnnnnnnnnnnnnnnnnnnnnnnnnnnnnnnnnnnnnnnnnncttaatccggatgtaatcttacaaaccatgcattcaccttcggtcaaattgaagaagagagggtgatcatgtggatgacagtcatggattataggctcaggaagcgaagcacaccttgcatctagttaaaagtcccaatccttttcgcaacgcttgtagatgaaactacttcattgtgggcaacaaccacaacacgcgaagaaacctaggtcatagtagttag

SEQ ID NO: 995 - DNA, 3821 bp, Arabidopsis thaliana landsberg
  unsure (1)..(3821): unsure at all n locations
tgggaaatgtgttcatgaatcttaacactctcattgcatatagttgagcaagccattgaggatgcgggctgggttcatatgattgcaggcgaaaccccgtccagacactgtttgctatctcaaaagcacctttattagcacttggttgttccatgataacaaaccaatttggcttgttctttgtaaaactcannnnnnnnnnnnnnnnnnnnnnnnnnnnnnnnnnnnnnattggtttgtttagagcttgaatgacttcaaaacaagaagccctctccaagttgtgccaattcataccatctgagtccattcccaacttttaagttttgcttcaaacaaaaagtgtacctagagtataggctcttcgactatggagtaaactgaaccgtatgaatccctaaccacccaggcagctccagatagaggttttttccgaaaccatgcaaaacctatgttacattttagctctccaaatttaggtgcaatacatctttgttccagagaatcttgagctccagtcaaaggaaatccatttctctgagccatccaccattgatgtccttcttcaaaagcttttgttcctgtttttccataatatccataaaatccaaggattaacatatccgatgtcttgaggaactgtctaggcctgtgaaatctgcaccaagtgattcatattggaataaattgaatctctaaaaccatgcactagatatggtacattcaataatgcccatacttgtcttgctaatggacactgaaatagtatatgactaattgttccagtgtcctcttcacagaacaagcaaccatcttttggattcacacctcaattttttagcatgtcttctacatcaagagctcctttcaaagctttccaaataaacatcttgatttttggccccgttttaatattccatactttttcaaataaaggacttagagatggtcttgattcagcttccgtgaagagttgtttatgcgttttcctgctacacaaatcataaccagatttcacagtatataatccatttcttgtgtgatacaagaaaacaagtcttttgcgagggaagatcccgtagctaatccctcgcaaatcgctattaccgagggaattgcgacgaatgtcaatttctcgcaaaacgctcgtcgcaaatgagaatcggtagtaattccctcgcaaattttgcaaaggaataaatgtctcgctattcactcgcaaatataaatgtagcaaattcattgcaaactttgtgagggagttgcgattcatttatctgtagcaaacctgcgatagagttgtgagttcatgtattcgtagtagcaaatccctagcaaattttttgatggatttgctaggtttatgcgacgctcttaattattttgtaaacgtaattactgtctgtgtttagcttaattaatgatcttcttcattggtttcttaatttaatctaatcttaactttttatttaaggtaagaaactaatttggaaacttatttgaaagcttacactcataatttaaagactcaaagtagtttgacattcaaatacaattttgaatctagcaacataattatacaatttttcaattgtatagggtttgtgatgagtgacattaaaacagagtgtagcaagtgccttagaaagtgtgagatggagaggatccagtgtttgcctcagctccatctgtttcagcttcgacagtcacatgtgcgatcccagcagatgtagcagttgtggcatttggcacctcaggtctcaggttggatctgacaggtttagtcctagaggatctggctcgaaagagggcagtgaattgaagtctggatctttctaggcaaggtagtcgaagtacacatcaaagctagtgatcttctccgcttggtttgcaattagagcttctgcggcagccagcttttgagagagttcaatcgaatcttctcgaggaacagaagaaccaatgtgagctgatgaggcttctagctgcaatgaaccagccccatatatcctccctttcttctttggagccacctaagagaaactcaaaaccaaaaacaaatgccaagtcactataacataatgcaaccaaaacacacaaaaacaaatcaagacaatgccgagaaactattacataatgcaaccatgataagctaagtcacaatgccacaatgctaagacaattgcaaccaaaacacacaagaaccaagtcatgacaaaacactgaacacaatgccacgttacaatgccacaatgccaagttacaatgccacgttacaatgccacaatgtcaagttacaatgccacaatgccaagtcactattagtaaatgcgttgacaacacacaaatacaaagtcagacaaaatctaacaacacaaagccaagtcacaatgccacaatgccaagtcactattacttaatgcattggcaacacacaaaaacaaagtcagacaaaaacaaacaacaaaaagccaagtcacaatgccacaataccaagtcactattacttaatggaaccacaacacacacaaaaaaatcaagacaaaacacttaacacaatcccaagtcgcaattcagaaactatatagaagagagagagagagagagagaatttacagcagcataaatcttgttcttggcctgaacagataaaccccctgaagctgcgctctccgtcgtgttgtcggaacacagctgaaactcctcctcttgaatcctagatgacacttcattgtagatctcctcggaatttttatcattgaaactaccatcaaattttctatgtgtctcatctaagagcaaaagaaaatcttgagtagtttcaccggtcatctcacactaaaacataaacaaatcaggttagttgtttgtgtaaaaaagttgactaagtaagggtgtaaaataacttacatgttttttggcacgggcttggtaagatgtctcgccaaaccggtgtttatgaatcccgaggccatccggatcatgtaatcttgcattcctactattgatactctttagttctgacttaggatctcgccaaaaactaataagaccggcccacactacaggatcaaaccagcgaggcattgctacatctcccttttctctccactttcccttccaccgacaaacttgatcagtcatcctctccttcagctttgcttcaaactcagtcttaactctcttgtttattgttttatcccaattatacatttgctacaaaacagacacaagtgacagcaaaaattagacttaatattacaagaccaatagttgtaccaaacaaaacacaaattatttaacttatatcaaaggtttcaaaccaacgatcgaccactgcttctgatgtctgttaccaatttgcatgaggttctttgaaatctctttcaaaaatgctctggacagtggctgcaactgaagagtcatcgtcaaacctacaaaacaagaatccatcagacagacaaaactaaaaagagacgagtcctagtaaagagaccaaagcctagtggcttaccagagtgttcctggaggacggttagggtctaatctaggcaaaccagcacgaccaggactagcaagtagctcatctattgtcagatcattgagtcggacagctagccgagtaatgtgattggaagaaccgcgaggggattgattgaaaggtggaggagaagtaccatctgcttagtggtttgaattgattggcgtcagtggtaatgtatggcgattactcggaacccgcgatgtgtttccttcactacgaggacgcttgtgatgttgctgctgagaccgaaccangtataatcattcctagagaaaga

SEQ ID NO: 996 - DNA, 2308 bp, Arabidopsis thaliana landsberg
ccttgttttgttatcaagagttgacttgatcatgaaagaaatttcatttcttgagttgtatatataccggaaaaatgaatattattagtaccagaaaaccgctatttatctaataatacgatagcgtttagaaaaacgctctgactatataatagctaactagaagttgactagttgagcatgattgatttaagctttctttgttctcatttttttttccgataaagggaccataactagatttgtatatttttgaaaatgtcattgtctcagtaaagactcacaatattgttgatatccgtttttacaggagggagacatttaaccatctagccagctggctagaagaggcaagacagcatgcaagtgaaaatatgacgacaatgctcattgggaataagtgtgatcttgaagataaaaggacagtgagtacagaggaaggagaacagtttgctagggagcatggtcttatattcatggaggcctctgctaagactgctcacaatgtcgaggaggtaaaagcccccatgcattcattcaaatgtttaggcttaaacagagatctctacacatgctttctctagtgttccccaacttcttgtatctccaccagtttcttacttgttccactccagtcctaacacactaatagaaagtctaaatcattatgtcgacgtgtttcgtgttttttaatttttggctaggcattcgtcgagacagccgcaacaatatacaaaaggattcaagatggtgtggttgatgaggcaaatgagcctggaataactccagggccgtttggtggaaaagatgcatcctcctcacagcaaagaagagggtgctgcggctgagatgggaaacatatgatatagaaaaatgtgttttcttctttctcttgttgtaatgtatttcgttttggagttcaatttagcgactgtgttgtggtgagtttcagaacagattgacaatacatgtttttgtctattcacatatctaaaatgaagatgtgttttgcgtttctaagaaatgtagcccatttgcatggcatttgaaacaatggtaaggatatgattgaggttaaactggccacgtgtgattccatttgccaagtcgaaggagaagtgtacattacaagattcagagatatacaacaattagagcattttcttcaactttgtttgtcaaggtgaacgatgtcttctatggtttactcgctttaggatgtaatgccgcagtcttttgctaaaggcctccaatctttccaatttttcgtgtctaggcttctttgcatctgtttcacctccgttcttaatcttcttctccttactgtcttcttcttcttcttctctactagaatctcttggctttcgttccgtgtttacatcagcagttttctcgacctggaatgtaatatatcagaaacgaaaccccatctcaccaaatatcaaaatgtttcataaaacagattcaaagaacattaacctgatcaccctcgccagctgtcaaactctcatcttcttcagtgcctcctagtgaagagcatctgccccagctttccctgttggagcttgtaaatgaacagccttcttcaaactgatcaatacgctttccctgccaaataacaatcaaaatacatactgtgaccagggctcctaaggcaatacttgagggtctttaacagaagcttcaaaactggtgtatggaaacatagttaagagctactactacttcaccatttattatggtttttacacatgctccagttacctcgaagttttcagggtcgtccacgttgtgatcattatcttccacaagcacggtatcctgtttcattattgatagattatcaaaagggatagaccaagcaacgggaagaaaattctagcaagaaagagaacaggtatactgtatctatcatgggcatagcttctgaaaggagctcattcgttggctttgtggttagaggggcaggaggtgcagaagaagaacttgcaacatcgatacatgccgaacgaagaccagatatgatctcatacagaaaactctggcagtacaaggtgaccaagcagttatattctggggcatgaacattaccgcgctaactttgatggatactaattactattcgttgacgactgagatcaccacttgttaaccatcataaacatatagccgattgtttagcgagtctcgcaggatgtctaggcaatgtctcaagtttctatagtactgaactgcacaaatataccagaaagcaacacatgactgagtgttaaggtagctccatggagtgcaaaaaacatgatccaaa

SEQ ID NO: 997 - DNA, 2286 bp, Arabidopsis thaliana landsberg
aaaattatatcccacaatcgaagacttcaacttcgaggataaatttctggggcatctcattacgctcgcttatttttctccttctctaaaaggatcacattgcgatatgaatttctgagcatcccgaaacattgtaggctaccaaaaacctgcttgaagaactttggatactgtcttaaaggttgcaaaatgaccaccatagctggagctgtgacaaatgcgataatatatcaggaacctctgttgcagcaatgcatctcttataaactccattagaataatgcttatagagataaggttcattccaataatatcgcctaatctctctcagaaatcttttcttgatataatctgtgaaattatccggttccacatatgcagctaggtaattaacaatgtcagtataccatcgagctactgcaaaaatcatcgtcttttgaaaagtgatagtctatcaacatagacgaagtgtcgatcgacactaaagctcgattctgcatctcatcacatttgcagtcatcttctttagctgtatcaatcatgtatatgttctcctcaggcaagaaatcattaatagggatatcatcatcgatcctaatgcgtcacaaatgatctgcgacactattctcaactcatttcttatctcttacctcgatgtcaaattcctgaaaagcaaaatccatctcaaaagtcttggcttagcatctttcttttgcattaaatacttcaaggcaacatgatctgtgtgaacaataaccttggatccaacaagataagatatgaacttctcaaaagcaaacaccacagctaacaactccttctctatagttgcataattcctttgagcatatcaagtgtcctacttgcatagtagatggcatgaagtttcttatctttcccctgtcctaaaacagccccaactgcaaaatcactcgcatcacacattatctcaaaaggtaaattctagtccggagcttgaactattggagcactcactaaagcattcttaatctcattaaaagcagcatgacactcagaattgaagtcaaacttcacatccttagcaagcaaagttgttagtggcctggcaatcttactgaaatccttgacgaacctcctgtaaaatccaacatgtccaagaaaactcctcacagatttcacgctatctggtgcctgtaaacttttcataacctttatcttggctttatcaaactcaataccagcacctgaaactttgtgaccaagaactataccttcctgaaccatgaaatgacatttctcccaattaaaaacctaattcttctcttcacatctagctagaactttgcaaaggttctccaagcatgcttcaaatgaagacccataaacagaaaagtgatccataaaacttcgatgatcctcaatcatgtctgtgaagatcgacatcatagatctctgaaatgtcacaagagcattacaaagaccaaacgacattctacgataggcgaaagtaccatagggacacgtgaatgtggtcttctcctgatcatcttgatggattggtatctgaaagaatcctgagtatctgttggagctggattcccctccaggaatccacctgcaaaaataccaagccagcccacaaagcccaccaagcccaccaagtagaggacctacgcagctgatgagcccacataagcgaataggtacttgggccagataagcccggtcacctgatgaagggagataagcaaataacaacttaagaactgatgaggagatattcgcggaactgacctactgaatatccaggaggatctccgaatatcccggacggagctaccacgtgcgtagacctatgtaagggagcaaggacgactaggaagacacattcaattcagcttacattcacacacatacttttacacttgtaatctcatttcacattgtaaaagctttgtcataatcaatacaaaaattccattcgttcttagcaatataactctcaaggtttcagtgaagttatagacctcctttctcataatctcaattacaaatctctagtgtggatttcagaacccatatttgacaccgtctgtggggacggaaatagatcattccaacaccgaaactaacacatcaattgtgaccaacgatcatggatcccaattcatcaaattcaacgggatctggcttaccagttcagatcccgaacgatgacgctacggacgggcacgtccaacggatctcctctcggaatcaggttgatgctgtctatacgctgatcggagaactctcctaaacttg

SEQ ID NO: 998 - DNA, 2052 bp, Arabidopsis thaliana landsberg
tataagtcttatattattgtttgactgactttttcgtttagcgtttgtttttacgtaaaatattcaatggatatgtctattttggaaacaggacataccatttccatttagtatttatttcattttttcattataaccataaaatattaatatatagaaaaaaacgataaaaaaagaatcgtttggatataaaagagtaatttcttttttgtatatttgaagggacttgttttattgcgcgaacggagacgaactctaccattgtggaatggacattggctgagctacttcataacccaatagctatggctaacactaaagttgagaccaactttattgttggccaaatcgttacgtttgtgactccaatctcttagagttttcttaattgctcttagatgaagagtttcacgttactgtacctcaccatttgagttagtttaagtggaaacagtcatagtcatacttgtttttgttatttgttctctctccatatgttttcttgctttttaattgtcattcatctgcagaggttaaggcattactctgaacctatcaagaaaatggtgtataaaattaaggaacttggcaagagaatcaacgatctatctgggtatgtgcacattctttactcattaagtgttgggcttatattgattactgaattttgcttattggttgtgatatatggttattgggatgcttatatggatacttgcaggtatcaagaagtttgataaaaaaatcttgcttgtatgataaaaaggttgtctctgtttgtcctttttcgtttttgtttactttagaatgtgttgttccatgattacttcttaaaatcttaagttaattagttttggatttagttgttgtgctcatcttcattgaaaggctgtgaacttcaaagaagaagaagaaggaatgcaaagtgtacgtggccatagcaaccatgagttttttcgttatctcatttgattgctttgtattttgttttcctctttagagataatttgttccttgtttcattgaatttttatgttaaaattttatatcaataaaatgatttggttttctatatattatgaattgaatattggaattcaaattttaaattcaaaaattttaaatttaaattctaattgcattgaataatatcattaataacaaaattgaaatgctattgtaaaatctaatatttcagcaaagaatgcgctataataactaacagtacaatagcacaaagaaaatccgctatattacgtcttcgacctactatgacggacgatgatagagcgcttgttaaaacgctatagtatagttagatagcgttattctttttgctaaggaaagtcaatattctgggagtggtatgttagattttgaatgcaacacaagaaagcaaaataattggatcatattatgcttgaggagatggctgagttgctgctacttcggattgtggttggtcatgtggttcctctgtttgctcttgtgctccttgtgttgtaggtctttgagctttaagtgttttagctagagttgtagttttagaagtttgtcgttccgtttcttttccgcttcatatgtctcctgatcaacaaaatcatcccgagcatgtcgatcgacagaagcagatgggataattggaatagaaccaacaccataataccgtccctttttattctttggagtagcctgaaaaatcaaacaaaaacatatgcatatcacaaaccacataacatttcaaagaactatactttaaattcaccaagcccatcatcaaacaatcaatcttaatagctcaaaaggttcaatgatgcaacttatattcaatgatgcaattgaataagacttaaaaactcaaacaagattgaaaaaagggagaacgtgaagaactaactagcatgttgcagttttataggctgagacagtttaaaaataatacctcgaacaggatttgaattcttagcaagttgttgataatgccaccagtgctcgcccagaatcacctcagagaaagatgaagactccttgctcctaagaatcttggcctga

SEQ ID NO: 999 - DNA, 4163 bp, Arabidopsis thaliana landsberg
gataattcctttaccggtgaaaacttcatcctagaagttgagagctcagacaccattgacaatgttaaagctaagctccaagacaaggaaagaattcctatggacctacatagacttatctttgctggtaaaccgcttgagggtggtcgaaccctagcacattacaacatccagaaaggatcaactctgtatctggtgactagattccgttgtgggatgcagattttcgtcaagacccttaccagaaagagaataaatttggaagttgagagctgggacacaatcgaaaatgtaaaggccatggttcaggataaagaagggatccaaccacaaccaaacctgcagaggctgatctttcttggtaaagagctcaaggatggttgtactcttgcggattacagcatccagaaagagtcaacacttcaccttgtccttggtatgcagatatttgtgaaactctttggcggtaaaatcattaccctagaagttttgagctcagacaccattaaaagtgttaaagctaagattcaagacaaggtaggttcacccccggaccagcagatactgctttttcgcggtggccaactccaggatggccgtactcttggggattacaacatccggaatgagtcaacccttcaccttttctttcatattcgccatggtatgcagatattcgtcaagacattttcattttccggtgaaacccctacctgtaaaaccattactctagaagttgagagctcagacaccattgataatgtaaaagttaagatccaacacaaggtaggaattcctctggacagacagagacttatctttggtggtagagtgcttgtgggtagtcgaacgctactagattacaacatccagaaaggatcaactatccatcagctatttcttcagagaggtggtatgcagatttttatcaagactcttaccggaaaaaccataattttggaagttgaaagctcagacacgatcgccaatgtaaaggaaaagatccaagttaaggaaggaatcaaaccagaccaacagatgctaatatttttcggacaacagcttgaagatggcgtcactttaggggattacgatattcataaaaagtcaactctttaccttgttctccgtctccgtcagcgtcgatatgacttttgagttttttttagcgctttggtttgtttttttctctcgttatgttttacgttttgatgggctcataaatggtcttttaccattcaactttaaagtcttatcaataataattttcttatttttttattccgcagtgtaaatctcaattaccatcggattaatcctgataatgcacaatattgttatcgaagaagcaagagctaatgtttaattcatttagtcggctagttcttttttttcttttagttggctagttcttagtattacaaactcttggataaagtttatagtatacacccaaacacatttaagaagcaaattattgaagtaaaacattttaagattagaaaaaggatctaacattgcgtttatagcaccgatgcatgttttttggaattatatgcaccaaaaacgccgaacttataaccccacacatcatttcctcaataatttaaaatttcatgaaaaattatgaattattgactcctatcttacttctattttgttacctactatattatccatttcatatatgttgacaagttgacaatgacggtgagctccacaacaaccaaacaaaaaagtttttcttttgttttaaagctccaaaaaactgacatgaaatcactgggattagatcttattgtctcccattaaggcaaatttcattagattttccctttttggaaataattttcttttcgatttatcaactatagtatatacctttttttacccccaaaaacccagggattatatatacgtaaattatttacatgcatgaatatgaatagatacagtaaattagttgttcaataaaatatttaaactttttgctctcatctccaatgaggacgccacccacgttctctgttcgttagccatcacactgtcaaatggcagcttgtgtcaatcttcttctttcacagttcatgaacttcacctccaatggaaacccgttgctctctcctctttctctctctcattctcctgtatttgcccaaacccggatccggatttggatcctccggtccgattgcggcgtcgttcggcggctctgctttcttctgcgccattgacgctagtggtcgtcaagatgttatctgctggggaaagaactattcatctccttcttctccctcttcttcttcttcttcgtcgtctattgcttcttccacttccgcaagctacaacattccgtcaatggcggttctttcaggcggagacgggtttctctgcggcattttgtcgaacacttctcaagcattctgttttagttcacttgggtcttcttcaggtatggatcttgtccctctagcttacaggactactgcttactctcagatagctgctggaaacagccatgtctgtgctgttagaggagcttactattccgatcacgattctgggactatcgattgttgggagataactagagctacgaacaacaacagcttaatcgccaaggagaatcctaacttctatgatcagattgttagtaatctcgtcttcaacaatattgtttctggtgatgggtttagctgtggtggaatcagagatggtgggatgctctgttttggtcccaattcttctaatttagggtttaacacaacttctgataacttccaagtcttagccgccggtaaaaactccgtttgtgctattcttaatttatctcgagaggttaaatgttggggagaagatgaatcttttgtcaattctccgatgaatgattctcgattcgtctcgctaaccgcgggtcctcgccatttctgcggaatccgtgaggataatcatgaggttgagtgttggggaaactctaatttctctttgattccaaaaggttctggatttaaagcaattagcttcgtctgatttcattgtttgtggcattagagaagaggatcttgttcttgattgttggatggttaatgggttcgtccacattagcttacgatcctccgttagagctctgcagtccagggatgtgtagagctggtccttgtaatgaaacagagtttgctttcaacgcaagtatactcaatgaacctgacctaacgagtttgtgtgtaaggaaagagttaatggtctgttcaccttgcggctcggattgctctcacggattcttcttgtcaagttcgtgcaccgcgaactctgatcggatatgtacgccttgctcgctctgtcaaaacagttcttgttcggatatatgtaagcttcataacagcaattttccagataagcattggcatcaactacagagacttgttcttatcatcgggtcttgcgcatccgctctattgatcattataattggttgctgtgttgtgccacggattgtcactagtcctaataaagaagacggagcagcgaatcaattcaaatcttgcataggaaagcccgatttagacactgatcagccacttgaaaatgtatcccctgctccatcggtaacgccttttgctcaagtgtttagactctctgagcttaaagacgcgaccaacgggtttaaagagttcaatgagttaggcagaggaagctatgggtttgtctacaaagccgtgttggcggacgggaggcaagtagcggttaagagagcaaacgcagcaaccataatccacacaaacactagagaattcgagacagaattggagattctctgcaacattaggcattgcaccagtgtgaatctccttggttactctaccgaaatgggagagaggcttcttgtttacgagtacatgcctctcggtacgcttcacgatcatctgcacagtgggttttcgccattgagttggagcttaaggatcaaaatcgctatgcaaaccgcaaagggtcttgagtatcttcacaatgaagctgagccgagaatcattcatggcgatgtgaagtcttcgaatgtactattggactcggaatgggtggcgagagttgcggattacgagctcgtgacatcgtcgaacgagaagaatttggacatcaaaagagatgtttatgacttggagatg

SEQ ID NO: 1000 - DNA, 2577 bp, Arabidopsis thaliana landsberg
tccctttgatgcttatacggagtttgatttgttagaacccttgtcaccactctgtttatgagataagtggcatgacgaacagcttctccccatagatagtttgacatcttcataagcttcagaacactccttgtcatctccattaacgttctattccttcgctctaccactccattttgttgtggagagtatggtgccgtgagatgtcttgttatgccattttcttcacaaaatgtgttgaactcatgagagacaaattctccacctctatctgttctaaacgttttgatggttgttctgctctcttgttcaactcttgccttaaacctcttgaatttctcgaatgcttcacttttttctttcaagagaatagaacacatatagcgagagtgattgttaatcaacataaaaatttatctgttccgagcacttgtagaaggtgtgatggggccgcagagatctccgtgtattaactccaaattatgtgtagcacggtatgatgtagcttgagggaaacttctcatcagcttgtttcccaattaagcatgaagcgcgggtttctctttcaattaccatatgaggtattccggtaacaagatcctttttcaacattgtcttcaaggtttcatgtccaatctgacctagacgtgaatgccacttagatgaattattgaggaccatcgtttgtagccatttggaagactcaatctccatgagtaccttatacaaacgattcttagaccgtgttgctttgactagcagctttccatctttatcatggatagtaagtaagtcatctctcattcggacatcacaccctgattatgtggcttgaccaaggcttattatgttgcttttaagatcaggtatgaagtacacatcgacaagaatcttcttcttcttgttcttgcttataaacaaaacggatccttttccctttatattagtgagtcatctccaaagcgaacttttcttgtaacagattcatcaattttggtgaagaacgctcgatttcctgacatgtggttgctagctccattatctaagtaccacacattgttttcacccgaatctgtctcaaactcgcttggtttcacgtttctctcattgagatgcgtaatgtccaagcttgtcgcatcggtaacaagtaactttagatgtatcccgctcttgtctatagccttgatatccaaaccgaccgcgaccacgacttcttcctctttgtcctcttcctcttccgttgccttgataagattgtgagtcatggtttgcatacatgagctccccttcattagcttgatcttcctcttcatcacaaattctttcttcatagactttcatcctccccactatgtcttcaaagcttgtcttgttaaggtcaaggacctgttcaagtgaggctatgatgtgtatgaagcgtttccttggtagactgtttaagaacttcttgactaactttggtgcctcaatcttctctcctaaagctgcagatttggtggttatctctgaaagtctccctgcaaagtcttctattgtatctgtctctttcatcttagctttctcaaattctgccatgagagtctgaagtcttgcctccttaactctttctactccaacgtgtttcgtctttatagattcccaaacttccttcgcagtctcaagttctccaatttgaagagttaaagactcgggtactgattggaagatgagggctcttgcgatgtcgttcttgtccacgtcttctgatcccggttcaacagtatcccaaactttgtgtaccttgagcaacaacctcatccgcatagtccatatgttatagtttgtagcgttgagtaaaggacattggatggaaactgagctcgtttcttttaacttgctgcatgtagttaccggaactatatctcccatagtttgattctctgaaacaaaacacgactttgttattgttttagagttttgttgagaattcaatattgctctgataccaaatatcaaattatagaacaagagaatggtgtatataaagactcactctttattaatctttcggaaacttactcaaaacctaaagctctcaccaaagctctcaatctctcaaactctaaacttctcaataggattaccacaacttggtatctctaattatatgaacgcttctagtcattaaataactcctaataacattagataactactaaatattgtatttagataactactaaatattgtatttagatatctcctaaatacaatattatcctaaatctcttaggatttggatggcttatttctcaagctaacttcacgcttatcaacaattagcacaatatcgcagtcgggggatcaaaacagatctagtaaactaatgagcttaacttgtgaccagaaagaatcgttcgtgtagaaacaccatagcatgttcgaccgcgaacggtcctgttgctatcttttacaagcatgtccatagaagaacctaccaagacatgactgtgacgctttgaacaaacgcgtcagctaaaactgggttagtgaagacggacggccttaaactaaccgccggatgggaagattctgcct

SEQ ID NO: 1001 - DNA, 7193 bp, Arabidopsis thaliana landsberg
  unsure (1)..(7193): unsure at all n locations
accatattcccttggggaatttgctttcagcgattgtctgtgcgatctcagagccttagttagcttgattccactctctgnggcaagaaggtttgagttcattcaatataaaccttgtgacctgactttgatccttgcggataggtcttctagaaaaccgttcggcatgctgaaagacctaccagtcatgattaatggcgtagaagtgcctacagacttcgtggtgctggatatggaagtagagcataaggatcccttaatactgggaagaccctttttagcgtcagtgggagcagtgatagatgtcagggaagggaaaataagtctcaaccttggaaagcatatcaagttgcagtttggcatcaacaaaactccacaagggtcaaccgaagatggaagaacctctggaaatgatagagcgatctcaggagaaggatatgagactgaaagagtgaaagaacttagaaagaggtctgataagcaggatgaaactatagagaagctagcccacaccattgaggaacttaggagtaagctgaatcggatgcagaaggaagctcaacctaaaggcgggattaacactatcccgagaaaagaattcacttcaagatggtctcaagatacagattatcctccagaagagaaggaagcctattttgaagaaagggggattgagtattctgctgcagacctctccagggaggacgctgaatatgatgatggtatcagagaggattatgctgaccctctctacagttcattttcttcttgataagtgtgaggagtcaagctagagacttaaaacaagctcacttgggaggaagtcccatgactatccttgtaaataatttttactttcttgttatttttgatttgttttggttatgtttgtggttctcaggaagaaaggagtaacgtgaaggtaaagtaaaaattcaaaacttttactcaactgatggcctagagatcgagtatagtggtcgagtatgagtgatgtttaaaaacctaaaaaattttaatcatcattttactcgaccaacagaagctacaaagtcttccagggagtctttcaagtttacagaggattgcaggatttcctagagtttttctagtgaacagagaatacagagaagagacaagaagacattctgggacccgccgctgacgcccatgtcttccatgcaagagaccaagagacatggaatctcttcactcccactcgatcaccacgcaaccccaccttcactcgatatcacctccatcactcgaccttgttttctcctccataaccaaataaactcgaccccatccttcttaaatcaacgctccctttttcttcttctactcgacttcgacgccatcaccatccccacacctattaaactcgaccccattccccttattcatcacaaccaacaaacccatcctcatcaaagccacgcactcgaccgcttctcactcgcctcttcaccaccgtctcaagatcactcgaccgcggtgctggccgcagcagaaggagagaggtcgagtttcctcagagcggtgctggccgccacagagctgatgaggtcgagtacccacctgctggagctgatacagaacaaggaggttcgtctatggcctgggagcaatcgcaggcagccattgacgagcaactacgttcattcttcgactgaggtaagcgcctcacttcaccattgtattataccgtatgttgtgatttgtttcttcattttttgtttctgtgattggatttgtcctgagtactctcttccaagtttattcacacagtggactgtgtgatttaagtttgggggagggctcaggaagtgtgtgttgcattgtgtataattttgagtctgcattcatctaaggcatagaaaaaaccaaaaaaatttgaaaaatttcagaaaatgatttcataaaaaaaaagagtgttcatgtagttgcatcacatttaggatcgagtctagagtgtttcatttaggattgttgcatatgcataggggatgatgatgagatagccttgtaagcattttgattcaccggataaactcagtgccctcgttgctagttgtctattgcgtagtcaatgattttgaaatgaaactgaaccatgcctaaattgctctactcgaccaaactgtcatgatctgataccatttcctatcaatttgaacctgaatctgatctttaattatcatgtctgcatcaaatttgaactcatggataccctaaaatacttggattttcttattcattttgatcactcttgtcaatccaagtagttgactctccttattagagcagttaacccaaacccaaacctagtgataataggtttttaagtcaattatcctaaaacaccaatcatgtcgttgtagtattttaggtgtcaatccaaatgggtgtgatgcaaacagatgagatgtgatcagaagtcactaagtcaagccaagcaataacagttttactaaaatcactcgaccacaacaggctgatgccagaagtaggatgtggtcgagtgacaggtcgagtaacagacaggatatgaaatagctatactcgactgcacagtctgttgccagacactgggtgtggtcgagtatattggtcgagtgattgcaaaaactaagaaacaggtaatgagaacgattaagcgatacgataaaacatagaaatcagatagacgtgaaattcctaaggatggggtaatcgagtagagtggtatcctagcctatttgaatggttaacaagcgcaatcaagctatccctagacaacaggttcaacaacagatcaattcactcccgtgaaataaatcctcaagcaaagctagcccagactaattcccattaacggaatctaactatgcaggcaataagaacagactgataaagtcaataaacgctctaaacggccaatcccttgggatagagacgcatatctcaggaactagtggatcaagcattccatcgatcaccttctgggtgcgggaatgcttgggatcgaattccagttgatcagaaagaaataagcagtaaacgcaactagtcctaaggggattcaatcaattctaaatcttaaccattctacagactacggattccacaactactctatcccatccctaagaattctacgtcactactcaaacaacatgctcaaggacgtaaacgcagataaatgataatattgcataagtaaagagataaggagtagagaaacaagatgacagatgaaatcaaatgcggaatcggaataacttggaaaaatctcgaattaccggttgcagaagcaaaagcagcgcagtagagtaaaacaaaaaataaaactgaagcaaaaactcaatgtcgactagatgtctcaggacagaaccctaagacatctatttatacaaaacgaaataaaatgatagtagacgggccaataacctaattgccggcccatagagtgataatggcccgagatgggcttcgtgatccgatggaggtccaggccgcttccaaacactttgtcttctcctcttctcttccttgtgctcagcttgtctggttgagtgcggatttgagtagactgtgaagatgtgatcgagtgtccggtcgagtgatggtgatggtggtgagtgatgatactcgaccagggggtcgagtaacatggtagagtaaatggcctagtgtggtcaggtggtgtggcgaagtgatactcgaccagggggtcgagtggcgtcaccgagtggcctgagctgaggatactcgaccagggggtcgagtagatgggaagaatggctccaaagtcacttgacctgggggtcgagtatggtgctggatgcacacgacctggtggtcgagtatgtcttcgggttctggctcgtttcttccaatttgctcgcaaacagctccaaattacctgaaaacaactcagaaatgcaatatgtatgcaaagctatcctaatcatgcaaagtatgcaagaattatgagaaatgatataaaacaatgatgaataatacgaaattggactcaaaacgatgatgaatggacactgaaaacatgcaaattatagacatatcacactcgacccccctggtcggttagaggacatcactacttcaccacatcactcgaccccgatgtcgagtgtcttcatctcatcacctgaccatcactcgatcacatcactcgaccccgaggtcgagtgtcttcaccttcatcgccagaccactacttgatctcgctactctagcttgaagtcaagtatctccatcacaaccactcgactacagactcgatggcaagcttcagagtcttcttcatcccgcactcaaccagacactcgagcacaaggaagaaaagaagactccagctattcactcgacctcccactcgaccacttgggtcgagtacagttattaatccgtcctaatacttcgtcgttttgagtattaggatttcagaatatttggctataagtagcatgtacttcacattttcgcaaacaagtttttatctagttttattccgcagacactgtgttctagaccttttgtaatccggatttctctttatctattcagtattcagtatttagcatttgttcttgattttgtttactgttgttcattctgttatcatcttgctattactctgttgttatcatgtctccattccattcaacgtttatgctttctgctatgatgtctgagtagtgaataggtttctgaggatgggttagagtagtgtagaattctcagtatgctaggtggttgagtttgattgatagatcccttctggattagttgttcttaatgcctattgctttctgatcaactggaatttgagcccaaacatttccgcgcccaaaaggtgttcgatgaaatgtctgaaccactaattccagagattcgtggccctgtaccaaggtattggttgcagggagcgtattggctttaacttgttgattcgtaatgcctgtttggttagctctcgtcaatggtgattgagtttgggactaggttaacttgagggtctctattgcggtgacacttagatttggttaatgaacttgttgtctagggataatttattgagcatgtcaatcacctataaactgaggaaacgaaactactcaatgaccccatcctcgggaattctttatctaattgaattctttgtttactctactgttgtttactgcattttgtcatctgctgcttaatttctgcaattctttcttgttactcgacctcatactcgaccacccagttgtttggcaacaaactgtgcagtcgagtatctgtgttatactttctgtttgttactcgacctgtcactcgacctcagccagtgctctgtaaagagctgtgttggtcgagtgttttattgtttctgcttgaatttctgttttctgcgtgttcatttagaactgctagaacacaccaaaacctgttattgcttggcttgacttagtgacttctgatcacatcttgattgttagcatcacacccatttggattgacaacctaaaatactacaacgacatgataatgctttaggattaattgatcttaaaaacctattatcatcaatagatctttaagtcttgaaaatgatccatttagaccttgtgaggataacgaagattttctgggtcccgaagtagcttatatgaatgctatcggtggacttatgtatcttgcaaattgtactagaccagatattgcttttgctattaatttgcttgcaaggtacaattcatccctaacatgaaggcattggaatgggataaagcacatcttccgttattgatatgagtcaaatttccctaatgactactctctcaaataaagagattgttatagcacttagggatcgaattccacaaagttctcggatcacacaatagattaacagttttgaataaaactaaatagaaaatattataaaagtaaaagacaagaaagcaattaaaattggttgtagattcatatgattaagacgtcgggtttagggaaattctcaggaaatattagaatagttgatctagcagtaaactaggattattaacaaacatttctagaacacaaatcactaatataaagtaaccggtggtgtgccgtgctactcactatgcttaatagtattgatcccaactctcttgtaaatccctagaactaagcaagcattataatcaggtttgataagttcacctaagtaatcaacgctagcacgcatctaaatactaggctcatctaagatagttccagtaatagatacctatggtgtgcatacctattatcctaaaatcaagttctagttagttactctaaaactagcattaagaacaatctaagattaagaattctaaaaaaattatcctaacagggttttcgatctactaattcatccaaatccctaatgagaatccttaaacccaacaagagaactactcaagcatgatcatagaagaacaaaacatgattgaataagaaatcaatgatgaaattaaaaagagaaaagagtttagaagaatcttcactaaagggagtctccatagggttttgccccaaagtacagaatagagaataatagtaaggtctaaacaatgaccataaatatcaatatataagttcctaaaacgtgatgggccttctttagaaataagggaaagttctgtaccgaatttggaaatctgcaaaacatcaataagttgtgcaattcaattaccgtcaggtattggtgtcgctcgacaccaggggttgtgtcgatcgacacctatgttaattttcgtctccggattactacggcagcttaagttgtctgttttgctcaagaatgttccataatcttcaaatgcatcccaacattgtaaagacctaaaaagactagaaaagactctacaaataacaaaagactctaaaaactatacataaatcatagctaaaagtagtgaaaggaaccaatatgaagcttctaggaggaagaacgacgacggaacatagagacggtggaggaatcgccgatggcgacgatttagatacgttagaggaatcaccggcgagaccgcgagagatttaggtcaacggaaagaaaaatagagtttggggtttactctttagcttagcgtttttttcgggttaaggtcgatggaaaggaaaaaaaaacatacatctcttttattaggttttgtgaaagattt

SEQ ID NO: 1002 - DNA, 3542 bp, Arabidopsis thaliana landsberg
aatattatgtaacgcatatttattctttacgaataaaatacctaagaaataatatgttaagcatataaattatttaaaataataacaggtggactagagcctttttatgcaagaattcaggaggcatagctttctatagaattcaataggtatagcttttgtttgattgtataaaaggaggcagagcctaccatatataatgatcaattctgaaaaagcataaccttttatttgatcattaaggaagcatagcttaccatacatataacgatcaattccggaaaagacataggtttttattttatttgatcgtgaaggaggcagaacctaccacttataacgatcaatccggaaaaaggcatagtctcacgaatcacggtgtctaaaatatttatgttttataaatataaacgggttaaataaacagaaagtttacttacctcgtaagcgcttaagcgttaaagacattgtgctgataacgcccttataaaccataactcaaacataaataatattattatattcatatatatatgaatgatgtgtagagtgtaaggaaaggtagagagggagtttgtggctattaaagggttctcattctcttctattattactctgtcaatctcaactttacaacattgaggactaacatatatatagtacgatgacttgttggccaagtcactttcaggccaagtaaattaggataaacattatcttataggatatggataatcacataatatttatctatttataacactcccccttgattatccatcacctttgatgagttacgcactgcctcgttaaaaaccttatcatggaaaaactcagtgggataaaaaccatgataagagaaaaatagtacaataacgtaaactctccctcgaaaagacttcataggtctcggagataatgcatctcgatcattctcttcgctcattttgatcttggcataatatgacaaagattttggaagagagatagacttttactttcatggctatcttttgcgtgttctttgctgcctcgttaaaaaccttgtcatggaaaaacccagtgggataaaaaccatgataagaaaaaaagagtatagtgacgtgaactcctcctcgaaaagacttcacaggtctcgtaaatgacgcccaatacttttaacatggtttctaaatgtgaaggttggaaacgcctttgtaaataaatctgctgcattgtgacttgaacaaatgtaatgaacgtcgacttctttgtttttctcgagttcttgagtgtatgagaagaataatgaagggatatgctttgttatgtcgctcttgatatatccttctttgatttgagcaacacatgcagcattatcttcatatattgttgttggctctcttttgatgattaatctacttgcttcttgaacatggttagtcatggatctaagccaaacacattctctacatgcttaatgaagagcaattatttccacgtagtttgatgaagtggcgactatagtctgctattgagaacgccacgagattgtagttcctccaatggtaaagacatatctggggatgaattgtaccttgcaagcaaattaatagcaaaagcaatatatggtctagtacaatttgcaagatacataagtccaccgatagcactaatataaggtatttcgggacaaagaaattctttgttatcctcacaaagtctaaatggatcattttcaagatttaaagatctattgaccattggagtacttaaaggattcgctttatccatattaaagcgctttaaaatcctttttgtttaattggattgatgcatgataagtaggtttttcaggcctacttatgtgctgaatgtgtgaggttcagttcaattctcctaaaacacaaacatgtcaatgcagctatagggggtgtcaatccagtccactgttattgctagcaatcaagatgtgtacagaagcaactaagtcaaggcagattataatgatggtgggtttctagtagcaatcctaggtcaggattcaaacaagtaaaaatgagagcttaacagccctactcgatcattgggtcgagtagaaccaacatgtgacgaatttaagtaactaaaatgcaatcaacaggggatacaaataacaggtaaataaaagtgcaatcaacaggagatacaaataaatctaatagaagttctaaggatggattcattgataagggcaactctaggattcatcaggtggctaacaggtgaaaggtagatacctttgacgatagattcaaaaaccgggtcaatccactcccgtgacagagacccccataactctaccacttcctaatctcaactctcgttgatgaaacatagcagagcagggtttaagcaacaatctaccaaagccaataaacagactagctaatctcttgatcaagtctacaaatctctggaattcgtaagatcagacatccatttgaacgtcttttagacgctggacgtctatggtcgaatcttcacattagcctgcaaaaaccgcataggggccaacgaatccagaagggatctaacctaatcttaaccacccaactaacctagagattaccctaatctaatccatcctcaagaaacctaatcactactcaagcaacataactaagaacacaaacccagaaattactgaaatcatatcaaaatgtagatctaaacaagctaaacagctttactgaaagaactaaatgcaaaaacgaaatagattaagagtaattaagttttgaagattcaagagcacaaagaaaaactaaaggaaaaaagctagatcctttggacaaatcctaaagtgatttatttatagtaaaatgttgaaaaacctatattcactagaagacaagagacttgaggcggtttgggcgagtgctcgatcttggggatcgagtaaagagggtgctgcaaagtctgcacctttgtgtctatgctccgagtgatcaattggtcgagtagatgcttcttcctctcttatatgtatgctcagatgtctggttgagtggggaatgaggaggatccgaagacgctttgatagatcaacaagtcttgtagatttggtcgcccttggtcgagtaaatgggtcgagtataggatcgagtaggaggggcgagtagatcgatatgttgctgcttctaaggctgccttgatccagtaagttggtcgagtgaattgctgcctcctttgtggctgcctgatcgactgaactggtcgagtagaattctctactgcttccttgttggttggataaagtagagtgtcgagtagaatccttgtaagctccttctacacctgaaaacactaaaacatgcaatatgtatgcaagatgatcctacatgcctaagtgtgtaaaataagctaaatgtgatgcaaaatgatatgaaacaatgagtgatcactaagctaaatgatgataaatacatgcctaaaatgagtaaaatacagtgttatcaactttcccaaacttatctcttgcttgccctcaagcaaacaaaaatcttaagtttaaggtggga

SEQ ID NO: 1003 - DNA, 3191 bp, Arabidopsis thaliana landsberg
ctggaagcttaagaaggaatgaattgaaaagtacaaagcattttttgataggcagctgaaggagatcgaattaagaatgccactaatggatgcatttaagcttattccacactcccacaagtacctaaaagatctgattatggagagaatcaaagaagtacaaggaatggaagttcagagccaagagtgcaatcatattatacacaaggagcgtgtcccagaaaagctagaagagcttgctgttgaagatcaactccaaacttctttaactaagaagtaaaagctaagtatctccctagtgagaccttgatctctgagaagtcattagcctcccacaaggtagtagcatggacaaatgtcattaaaggtgtgattaggtcaaaaacagaggttatggcagcaaaagagtcatgttcaactaaagctcgaccatcaaactcgaccagtaggtcgattttatcctctactcacacaaaatgctcaagctcaacgtctaaactcgacctgcatgttaagcaaaacactctagcatctgataattggttaaagctttagagaagatataaatggtaggagaaagccataagggagctaacacaaaccgtgaaaagaactcaaggatcaaattaaggaccttcgtgggaaatccaaccaagtaccattcagcatcaaagacaaaccccctgatggaaccaccaccctggttagcaaagctgaaactgaactcaaagtgaatgggcagagagtcaatccttgtatggctgagcagatcattcaagagtagtgctcatttcctctcctctcatcatcctttgcctaaaaacagtatgaaagtcaagctaaagactttacactagctcacttgggaggaagtcccatgtctatccatgtatataagtttatattttgcttgttatttttgatgtttttgtttaagtgtttcaggtttgttttaattaccctgaggaagttaacggtcgagtaaattcaaaacaagtcaagaatcatctcaaccgctgatctagtaaaatgaggaggagtgctttaagtcgtgcgattgaatgaccagataagagaagcatcaccaccgcttgatcgagtgacttctttacgtttattctggtccgtttgatcgagtgattaatagcgaagcactccgcaccgtccgatcgagtgaagaaaacaaagagaccaccttgtggactccgacgcctcgtgacccgcctctattgaattccatgatacctccttgtcttcttgtcccctcataataattttggtccccccattgcaattcccgaacactacaaactcatctctccacctccataccaaagcaatctcgaattcttatacctctctctatccctttctcttgcacttcctctttttatcaaaaactcaacataatccatctattttcttcatcactcgatctcctaacctttgagtctctcgttctcaatgacaaacaagcgcacgctcctgtcaaggatccgaaacatagctctctccccatcgaagaggtacccaacacgttcttcacatgcagcagctcgaagactttctgaaccatcacccatagggtcgagcaggagagaacgagcaagtttcgagatcaatcacagcgaatcaagccaagacgaggatgcatgcaagaagaacaaactttcaactcccccgccgaaaacactcgatcccgaaggtcgagtaaggcctcagcaagggagttctcaaggaacaaggaagatatcactcgatgaaagaagcccgtggggagaaggttggaactggtagatgaagattctgaagaagaaatggcttcatcgggggaagctgatcaaatagagaaagaaggtggtgatgatttagaataagagaattgcgcaattcgaaacgagtaatacaggctgctgaagcgcaacgagtgtttaggaactcgatgccctcatcctgagaccatggagagactcgacatctatgatgatgtagactacatgtttaagcaatgcagcctgaatattcacatgtttcgaccaatgtaggggcatgaagaagagaccatccagtttctttcatccgtggaattgttcatatataaagagttagaggacgatggaatcaggctagacggaagtttgggatacttggagttctgtgtttatgacgtagagtatcggcttccaatcgagcatctagagctgatgtatgggtttccaagcggaaaagacacgagtcatcgttttgacaaaagagagcttcagtcattctgggccacgcttgggttttaacaggggttttcgtcctctaggacaaagagcaacgaaataaggagtctggtggttagatactttcataggtctttagctagtacactatttccaagagagagtaatgggacctttgtcaatggagagctagagttgatggagacagcgctgcaggagttgcttgggttagcattggatggtctcgttctagctggagatcagatagacgcttcagtttcattctacctaatcgaacatttgctgaggtacagagatgggctaagggttgtggtaggagaagtgaccccaattttgagagcatgcaatgtacctctgcattcaaagccgattcctccgagatagattgatatgcaacacctcatcaattccaagagcttttggtcgtagcagaagaatagcctatataaatataggtttgatcaccctgaagcaggacaatctattttttccctctcaaatctcgcttccacttcgattagagatggcggcaacatcgagttttgtccactagtagagaacctctatgcttcaggtgatgaagttgtgccgatggaaggagtgaatgatgatgaggctccaattcgacattcagataaggaggcagaatctatggatatgcaacacaacggttttactttaaggagtactacgcgccaaggcagagtaaagacaaagaaaattcacaagcgccttggttttctccaaagctggtgtaacttcaagacatggctttcgcaacactcaacaagaagtttaacgctctccaactcaagttcagctgttcttcttctactacggcgatgcacaggacatgccttttaggagaagcggatcactcgacatgaacctatgcaatatgatccgctgcgccacaagacagacttcatatgagctgagaga

SEQ ID NO: 1004 - DNA, 1273 bp, Arabidopsis thaliana landsberg
ttcaaaagggaatttactggaggttaagggtgaaatatttaatataaaaccaaagtggctttgttttaaaaagtgaaagtttatgtttaccacactggtcaggaatagtattgattatagtaataattggtgagttcatgttctcacagtttgttgttatgactagtttgtctatgaataagtttcttggctgtttgtttctagtttaactgttactcgtaatgcactaaacattttagaacatattgtggggctacttgacaggccagacaactgcccctggaaggacaaatgctggacttggtggtcttggtgggcttggaggccttggtggactcggtttgctgggagcggactcacctcttggtgcgactccagatgcttctcaattgagccaaatactgcaaaaccccgctatggcgcagatgatgcaaagcgtactttccaatccacagtacatgaatcaggtagcgccttcagtaatttgaattttagacattgtagctattgtgaggctgtctttaatattttaatatttccttcatttccagcttatgagtcttaacccacaactccgaagcatgctagatatgaatcctcagttgagggaaatgatgcagaaccctgatttccttcgccagtttagctctcccgagatgatgcaggttagttgggcccatgttgtctctccagataattatttttatatcattcagtagtcaaatgtctcacgacctaatgttttctattgttttttggtctttttagcaaatgatgtctctacaacaatcacttttctctcagaataggaacacggctggccagtaagtttggatacccttttctgttttctttagttggaacattagttgagtaggtaatgtcctttatatatcataataggattttgggttgatctgtgtttagaaaatagtgtcactagctaaccaggtaattctctcggtggtgaactatcttatattaagtaataaatgggttgaatcattagtaatgcagcaactcttgtatgttttactgggctgatcattagtgacctttatcaacggctgtaaagtattttagtccttgaaataaacttgaataggagcataaacattttcgttcttttttggttctttcctttaacatttgatatcagtgatcttgatttccatcaacctctattcatgttcccaatccatcttctttgtagggatcaaacgcaaactggtaatcgacaggtactatattatctgtaattggagtatgcagg

SEQ ID NO: 1005 - DNA, 7060 bp, Arabidopsis thaliana landsberg
  unsure (1)..(7060): unsure at all n locations
caattgctggtggccaaagactgttgttgcactcgcgttaatctttgcaatccagcgatgtgatcctgcaccattctatctttttgatgagattgatgcagcacttgatccacagtaccgaaccgctgtgggaaacttgattcgtcgtcttgctgatgattatggcacgcagttcatcaccacaactttccgtcccgagcttgtgagagtcgcggataagatatatggagtatttcataagaacagagtgagtattgtgaatgttatctcaaaggatcaggcgttggacttcattgagaaagatcagtcccacgatacctgatcagtcaagtggtttgggtaaactcttctcagtactctctttcgagagcttgcttaaaactttttcagggtttgattctaggaatatatattagtctaatgtgcagttcaggttgtataatttatccaagtatactttgaaataacggttttattgtctcaactcagctatattaatctatggtacatttcgagacttttatgcatttatggaaactaattggtttcttactttttataaccaaaatagggaacataaataaacaaaattaatccaagttttcaaacagaaattgattttttttttattgtacttgtaatattgtttttgtaccatacctgtgaagtaaaccttttcaaatcgaagcaagaaactttttggttgtggttctaaatatatatcatcaacaaaaccaaaaagaggagaaacctgaggctttttttatctttcagaagagaaataccatttttactttagcaacaaccaatttgcagtcatcaagcattaaaccaaacacataacgacccaacataaattatgataagagattcgtcttcccatagaaccaaagcttgcgtatcgatgatgtcgtttacatttagtgctcacacttttaatttcatctttgtttgaacctcaaggctaaagcaatgccttgagcagaggagagacaccagcaacagcattatagttgcatgtgttatgaatttatgatgcagcaagttcattagactataaagcagaacataagtcagtttttctttgttttgcttttatgcaatgccacttcccaagtttttatgtaatgatacatttttgttgtttaacagtggaataagtcatatcttcttttctactattctaaaaaaattccatgaaaatttatgatatccagattccagtggtgttaacttttaacttatgatagtaatcctgatattgagttctggttaatggctataacatgtaaataaacaaaacaaaatgatttctatcaggataaggaatcttcctacggtataggtattagtactataactgacagtatctctagtgtcatgtatttggctacgatatattctaaaccttgtgtttctatatgctcctgtttcagaatgattagaccaagacactggtggcattcttacaaccatgcgcaatcaatgcttcaatggttcatgtctttccaattggccagattcttcttgtccagtaagcttcttttagcattttcttgttgttttgatcttgtgcagtttttttcatgtatctatggggtgttgtttttgttctcaggattgccgatatagccaagcagcgggaaatctctgggcggggtttttgcctgctggaggtatggattgcactctcttgtaatcagcatggagacatgtttccgtctcgtctgttaaaggttaaccagttttgctttgtaattatcgtaggtacaaggaaggacgtgccagaaggcattgggaggagaaagggcatcgctatttacttgagcttgaaacaaagcgtgtttgggattatgctggcgacaaatatgttgaccgtagtccgagcaaggatgattgtggaagctgtgaatattctgacagtagaatggctgatgctctcgttaacacaaaattggacacggtagtccttatgtttcagggtagtcccgtgtaatggtttatatagtaaaacacctactaactctgttatttacacactctcagcttggaaaactaatgacccaaggtgagaaagaaatctcggaggtcaaggttggtactgtcttggctacatctaccaatacctcttcctctgggtctgagaatgccacacgtgcaaataaaaagaagagtaacagaagaaagggttagatcaagtttcaaactccattttctagaaccaaatcacatttaggctagtatagactataaagttctagcagacggcagcgagttagatttaactctatagttctaaatggatgcgaagaataaaacctaatcagccgcatttaattttgtaaagatgtttagttgttttctttgcaaagatagagtttagtttgctttgatatttctagcataccaaactgaactgacacaacgataacgtgaggtcatataaagagggtatatattggtgacactctaatcattaacattcaatatttgatttattgatttggttttgaaaccattagttatgcacaaagcaattatttttgctgtatataaaatctgaataactttagtatatgtaacactgtaacttagcagcaacgagagttgcttacttgctttgcctttattgtcctttgatctttccttgtaagtatttctctacactatacaatccgcaaagagacttcaccacaggcatagtcgctggaacaggtaactcaaattccgaatcagacccatcaatgaagttcgatgaaagggaatgtttccgagcttccctaatggctgatcttgttgcacaatgaacagaagctgctaaaagcaatggcggctcacccgacgctgttgatcaaatgaaaaagttgttgagtatgaaagtaacaatgaaaataacactgatacatataagttgttgcaactatctgtctctattatattattcagtccaaaattctaaccaaaaaacctcagagtgtttatgtaagagtctaaaattgtctctattatacaaagtctatgggataaggaaaagcgttgtgtagtacctttggaggagagaacgcggtttttatgatgaccagtgttgacaatctcaacgttgaagtgttttgggattgtgtccacagtcggtattttgtagtcccaagtgccttgttgcaccacaagccccttctcatcagtagtgtactcttccatcatgaaaaacccgatgccttgaacaaatgctccttcggtcttttcaaaaacaaaccatgtttttttgcttagctcaacaaaatgactaaaagaaaacaagaaaaacttgtggagttaactaaatgctagctaacctgtcctaaatcaactgcaggattaagactctttccacagtcataaataatatcggatcttaaaatctcggtttttcctgtcacaaggtccacttccacctgcaagtagaatcacattattgtttgattgattcaaatataaagaaagaagtgtttcccatagtgacttgcctcgctgactccaactccatagttgagatattccatggaagaatactctggcttatacaatgtactcgccgataaattaatatactgaccatacgcctgatcaaagaaaaatgcaaacgttacggttattcatgcagaatctttgttatagaagagtaactatcagaatttactaggctacctacttgttgaatgagtatgttccatgtcacggaacctgacttctccatcatcatctgatccattataggtttcaatctctccaccaagataacacagcaaagcctaacggcttcacaactgctctcggatgtcgtgctaccagcagtgaaacctccttggatcatacctagtgtatcggactgaactacacgtattctatccaagagcttttcgtttccttcgcatttaaccataccgagaccataagcaaccatctgttgtactttagtccacaatccttgccctatctcaattcctccaacctcaactacaacagaaccatcactcagtatgcttactttccccggggtcggtctctgcataacttgatggactataggtactcgagaaatccctctctttcgccatacattacaaagattaaactccttcaccatctcagatctttccttgaactttgaagatatctcaagtttctcccataataaaggcagtgtatattcatcaggatcaccagcaatgtgattgtagaattttctaaggctatcataagtatgaaggtttatttttctcactgcatcaacatccatttgaagagaagaagctacattctcgataatggattccgctatgtaagaaccttgaacttccccgggagctctcatcgctgttctactcagacaattcgtcttacacacttttacatcaaatgacaaagctccccagtcatacttcctcagcggacccattatattccgcggcatgattggacttacgtctggctcaagccctgcatctataagcattgtaagctccagtgctgtgagcttcccatctgatctaaatcccacattgtaatttatcttcatcggatgtcttcctccagccattatcatatccgtcttgcggttcaaaaacatcttaacaggacgttgcaacttgtatgcgcctagtgcgcatgcggttgcaacctgaaacatcaattttaatgagcattcacgatcttgattcgtgcaagaagccagtaaagaaaccaattatggtaaatacttacaggcattgactttacagctttaccaccaaagccaccaccaactcttctagtgatgactctcacgttatgctcttgaatgccaagacatgtagcaataaccgaatgtacgtactcaggtgcttgagatgaactaaataccttgacacaattgtcttcgtctggcaaggcaagtgctgtttgtggctccatatagaagaagtactgtgaccctagcctcaactgaataaataaccaagtttcaaacacacaaaatgagatgtcactacacaactttggcggtgaaaatctggaaacagttttgagatacctcagaggagattatctttcgctcagcttcttccattccttttataacatcacctactggttcggggtaaaacatcggatgaacctcgaaaaagctagatcttttaactgcatcttcgacagttaatatcggttgttctaaattctttgtatcatactcaactactgcaagttttgcagccatgtctgcatgtttctgtgtgtctgcaacctgcaaaagccatatacttctctagatacgcaacgaaatacgagcaagaattaaaaaagaagaggaaactggagttaccacaagagcaattctttgacctgcacatcgagttagttcatctgcaaataaaggtcctggtccaaaaagggtcttggaaccaatgttttgtccttgttgtggaatatccttgaaagtaagaacagcaaaaactccagtaggagttacattctctctgaagcttaagctttttatcttagccaaaggctctgtgctataaatgaatgctccatgaagacagtctggtanagtcggtatatcatcaacaaaaaccgcctcacctgaaaaagaaagctcatgtaaggccctatattgaatctttacccgtggcttgaaccgatatcaagttactaaaaatgatgaaaacagacggcataagaactaaccagaagcttgtaaggcagctccaactttgataactgcttcaccaataggtttaaattcattgctctctaatacttgctgtgaagatgagaggaagggaagagattttacggtatcaacatggctgttgttatgcttattccctgaatcaagactacatattctatggccactctcgatcagtgggtaaaaaaactcaaaaagatatccaacagccaagctttttctatattccgagtgcaaggtgtctttgccagggactatgattcctttaagtaaaccaaaagcttcatatagaacactgtagctaagtaatttacctgtcaagaaagtctccacttctatcgccctgatcgaatgatccccgccataagaaccaaatgccaggaagcatttttctaccgttacaccttttcttgatgcttcttggcgagacactagcgccaagaaagcagcgttcaagtaaggcaatgcatttccaatagaacgaggtgcggctcgatagctttcaaagagaaattcagtgtcatcaccagaaggagcagtccatgatggaatctcaacctttaaaagaacgcgtttggagtctaacaccggagacaattcaagaaactcctgtagcgtaaccttctcggttttcctaccatttaacatatacaccgaggcatctacagcgagcaacaaagtggtaacatcagaaggaaactttctgctctgtgccatcactagattaccaccaatactacccgagtttcggatagaacggttgccaattttctccatatgagtggccattttcttgaaaacataagaagatttgctttccttctccaaagcatcaatagcattcgatatagtaacagctgctcctatttcaattcctttctcatctttcttgatcattgacatctccggaatgttactgatatcaatatatctatcaaaccgttcctcatctttatagtaacctgtacccgtgttgcctacaactaacttcaacgagtctccagagttagctgcttccattatgttatgaagctcagccacactaaaaggagtggtccaacgatacttcaaatgatccgaaccattatcaaccttctctttcttcttcaagaactcagggaatgttacaagatggtctttggggttataaggaggcaaattcttcaacataacctctttgctttctccttttttccaaaaggaatttaaccctaagtcctcaatatcaacatcagaagcaaaactcttacaagcatcgacaatgggacgataaccagtacatcgacaaagattacccgaaacagatttctcagcttcagagaccgtanaatctttagagctgttattctcagcatt

SEQ ID NO: 1006 - DNA, 3314 bp, Arabidopsis thaliana landsberg
  unsure (1)..(3314): unsure at all n locations
cccaccaacaatctccaggttttgtttgtctccacatgattctcgatttgatgatgtttgtgaaaatctcttttaacgttgttttctaatttcgcttctgatttcacatttcgtttagggatacgctccgatctgcttggcgcatgaggatttctacatccgacgattgtatcatcggattcaggtaccttctcaattcggcgtttgttccttttgtgaagtctttgtttcaatgatttggtgtttgattcttaaatttcaatgcgtcaaggactgttttggacgtcccatatcaagtgcacctgatgcttggattgatgtggttgagagagtctctgatgacaacaacaagacgctaaagtgagtccatcttcctctgattttctattgaacagttttggtttctatggtcacattaagagaatatgaaaccaaatgtaaaggttggattcatacggctgagaattggtttatcacttaggatgtcaaagaataaacctttggttgcaactctgtgcaggcgaactacaaagactagcaggtgccttaatttgggttcctacaattatcttggattttgtcctttcgatgaatattgcacgcctcgtgttatcgagtccttaaagaaattttcagcaagtacatgcagctcttccgttgatgcaggtacagtctcttttcttataaggtctcaaacaaactcttcccttttgtttcctgacatatgttgtttctgctatcaggaactacagctgtgcatggagaacttgaggaatgtgttgctaaatttgtgggaaaacctgctgctgttgtttttggcatgggctacttaacaaactcggctatcatttctgtcttgattggcaaggtaatgcatacaccttgtgatatgaacgcttatgttactaccaaaacatatgtttttagtagcttaattacacagccatgtatacagggagggttgataataagtgattctttgaaccatacttcaattatcaatggtgctcgaggttcaggagccactatccgcgttttccaacacaacagtaagcatttctatgcttcactctccatattttcatgacatacatatatatttatgccctcttgttgatggcttcgcaacacctgctcatttggaaaagtattgaaagaacatatcattgagggacaaccaaggacacacagaccgtggaagaaaactatcgttgttgttgaaggtatttatagcatggaaggggaaatctgtgatctaccggagattgtttcagtatgcagtgagtataaggtaaggtaacatggtaaaccatctttcaagatcaacattgatgagtgattaaggtagctctatcaactgaatgatcattttgtttcaggcatatgattatttggacgaagctcatagcattggagcaattggcaaaacaggacgaggtgtttgtgaactcctaggagttgacactactgaagtggacattatgatgggcactttcacgaaatctctcgggtcttgtggtggctacattgccggatccaaggttagcaatcctatacctttgttctcacttgctgatattttgtttgcacatgagtaaagtagaaagatgatgcactaaggcccttctgtatctaataatctacacaacagacacaagattgttgaggcaagttcacttcacctcaaaatcaaccaaatgctttatagcatttttgtgtttcgatctctgtaggaccttgtccaatatttgaagcaacattaccctgctcacctttacgcaacatcaatttcaactcctgctgcacaacaagtcatatcggccataaaagtcatctttggagtggacggttcaaacagaggtatctgctctttcagcatttcataatctcaagttatactctcaaacttttctaaaaaaatgggcaggggaactaaagttagcaagaataagggagaacagcaactttttcagggctgagttgcagaagatggggttcaaggttcttggagtttatgagtccccaatcatgccaataatgctttacaatccagcaaaaatcgcagccttctcaagggaatgtttgcgagaaaacgtaagtctcttatttgttttccaatatctcacttgcttccgcgcaaaagagattcacctctatgttataatgaacattttaaactttgaacagttggcaatcgtggtagtcagcttcccacctatacctctattgctagccagggctcgtatttgcaattccgcatctcacttaagagaagatcttattaaagccctgcaggttgagttcactcgctttctcagcatagtagcaatgatttgaatctactccaaaaggtgcttatagttcatgcacaaatggattcaccgtgttatgacaggttataagcagagcaggtgaccttaccgggatcaaatattttacggcagctccaaagaagcaagaagagaaaaatggcaatacttcaaagttcaaactaagaatatagaattttgtttttctttcaaaaaccaagttagagcacaaattttctatgctccatggttgagtgcaccacttcaaacaaattgacagcattttgttacttatacaaaaaccttacaagtaacacatacgaaactttccctgtttccacatgaaaagtctaatttctttttctcaattgctcttgttactacttattgagatagctgaacacttcacactgtaaataaattgctagactaaacacatacgttttcttcccttggaacttctattgcaaatagctactacacctattcgattgcaaaatccttaacatcatcaagaaaagagagatcaaagagttttaaaaccttcttctttcttcttctactcttcttcatcatcctcttcctttcccacttctacttctactaatactactgttcctaacgcaacattcaaacaacaaacatcaagataagaaacaatagagacgagacgaatgaaagatctatagcgttaaaaaaaaggctttcatggtttcagacattgcaagcttacactctgccatggctttcactatcatcaacaaaaaacaacaataacaaaaacaataaaaaccattttcttttcttcttaaccgatcaaaattctctcacacacgctcatgagaactccctaccaagcttttgaatagcacaaaacatcttcctcctcgatccaacagcattaatcccatatctttaagatcttccaatgtcaacaatggtaaaactcttcatcaactcatgtacncaaacataggccaatatctccctaccctagctcttgta

SEQ ID NO: 1007 - DNA, 2047 bp, Arabidopsis thaliana landsberg
gtttatggtccaagttggacggtccataatggacaatggtccgaaaaatgtccatgaccaataaaaatcatgtccatatgggcaagcccatgtatagcccattttattattaataaattaaaaatcatgattttaaagaattgtgtttttgcattttgcatttttccgacaaaacggtaaaattgtgtttttcttaccaatacaataaaatcacgattttggcggaaaaattatgaaattgttttttcccgccaaaacggtagaatcgtaaaattgttttttcccgccaaaacgaagaattgtgttttctcaccaaaactgtaaaattgtgtttttcgccaatataataaaatcacgattttggcagaaaaattgcgttttcccgccaaaaccgtaaattcggagaattgcgttttctcgtcgaaactgtaaaattgtgttctcgccaatataataaaatcgcgttttagaggaaatttgcggaattacgtttttccgtcaaaattgtaaaatcggagaattatatttttccctcaattcatgcccatgggtagcccattgtccatatggtcaagcccatattatctgcggacaaaactggtcatatgcccaattggactatttgttttatggtccggaatataacccatccatatgcatttggactgggcaagcccatgggcggcctgcccaattgacagctctaactagaacgccgcttgagcaactcagtcctccatccaccacctctacattcacaatcttcccacttcaaacgaaaagaaagtaatgattgtgattacatggtagataaagctgactccaagaccaagtaacacaatgagagatgttttcgcacaaacactatacaggatcaaataagtaaatgataatgctcgggtctgtttacatttcacgtcaccaatcttaatccaatttcaaaataacttatatctagtacaaagcaaatatttcaactccaattttccacaacaatactttaaataaataagtaataagttggattgcagctgccatagcgttagcagctggactcatctttggattgacaattggacacattgtaattacacaaacccctcaatggttcttgaccggacgtagatgatcacgttaagccatttcaaattgtgaggtatttaatcaacaattcttttttggcaagcatagatatgaaaattttgttgcaacttttgtatcttgtaactattttacctttctcttttgattcacagtttgagaaggaacaagagagactatatatgcaattttttttttttttttttttatcaatattgatgcattaatatattttgatcacattttttttatcaatattgatgcattaatatattttgagtttgacatacaaaaatagacaaaaacaaattacagtgtcactaatggagaataattatgcattaacgaatgtgttgttctattaatcgattttttattagacactttagagcatcattattggttgtctcttatattagtttttaggataaaaatatctcattttaattcttatataagagacattttatcattttgtttcttatataaaagttaaaataagatgttcttagtaatcaatgacaaaaaaaaatcataaggattaacctaagaaacaacccctcttagtatatgacaaacgtataagcgaataggaaacgataatataaatctcaaccgggttatggatcgggtcggatcaatgtgtgatacaaaccgggcagagaatatttattgggtttatccattcccgccacggagtaaatctttcgccggcgagcaatgatgaattcgtcgagccttttctcgttcggcggtcgttttccaatcatcaactgccgcgtgtcagctcctgcttcggctcccttcgtcgcttccgttcctctcccgccgtcaacctcctccgactcactagcttgctctctccaatgtcctcatttccaatcgtacgcttctctctctctgtctctctctgtctctctctctgataaatctcaatctcttaagt

SEQ ID NO: 1008 - DNA, 3053 bp, Arabidopsis thaliana landsberg
gcagcgtttaactggaagggttgcagaccttaataggttaatctcccgatccaccgccaagtgcttggctttttacgatgtacttcaaggaaagaaaaagtttgagtggacggctcggtgcgaggaggcttttcaagaacgcaagagatatttggcgagcccaccaatcctcgccaaacccgtgatcggggagccactctacttgtatgtcgctgtattggacattgtggtcaacagatttttagtccgagaggacaaaggtgaacaaaaacccatcttttatgtttcacagacatttaccagcgcagaatctcgctacccgcaaatggagaagctcgccttagaagtcgttatgtcggctcggaaattacgaccatatttatagtctcactccatcgtggtaatgcgatctatgccactccacgccatcccaagtcttagccgattttattgtggaactaccaacaaaggaagctcgggaaaagccgctcgacataaccttgctcttgcatgtcgacggcttgtcatcgaaacaaggtttaggtgtggacatccgtcttgcatcacccacatgcgaggttcttgagcagtctttcaagctaaatttcgaagcaaccaacaacgtagccgaatacaaagcactcgtggccgggctaaaactggctcgcatgctaaaaataggaaacattagagatttttacgactctcagctcgtcgctaatcagtttaacggggagtatacgacgagggatgagagaatggaggcttatctagctcacgtccaagatcaagcaaagtagttcgacgaattggaactaataaggaacaaggattccccgaggagaaaacacattagccgtcgctctagctgtgctggcttcgacttctgatccaaacttaagaagagtcatttcagtcaaattcatcgaaaaattgagcatcgagtttgaaaaggaagaacaggcctttcccgtgcagaatgtcacggatcacgagggcgtgttggaaccaaatgatagcttaggttgcgactttgagtggatagaacccatcaggagttacatatctgaggggaaagtgccctccgacggatgggaagctaggaaattgaaagctcaggttgcacgctttgtcctagtcgaggaaaagttattcaagtggcgtctatccggaccactaatgacttgcgtagaaaaagaagcagctcgcaaaattatggaagaaatccacagaggcttgtgcagaaattactccggaggaagggccttggccatcaaaataaaacgccatagttacttctggcaaaaaatgatcaaggactgcgaaaagttctccaaacgatgcgaaaaatgccaaagacacgcacccacgatccgtcaaccggtcgagctcctttcatcaattgcctcgccatatccattcatgcattggttgatggacatcatcggccctatgcacgcctcaaaaaagaagaagttagtcctcgtcttaaccaattacttctctaaatggatagaggccgaatcatacgccagcatcaaggacgctcaggtcaagaattttgtgagtttctgtgcctctatacacatgggctggatgctctcttctagggcccaatcaaatgtctcgtagttgttacttgtataacaaaagaaacaaaacaagaagagtatacaccacacacttcattgatctaactagtacttatactgaaacagtcacctcaacgtcaaatcttttacaaacagaccacaaagaacatatcggtgtcttaccaaacgagatcacagtgagcactgagcagagaacaaaagaaaaagaaaaaaattacagttggttctctgtatttacatcactcatgacaaagaaaccgatagttttgcctttaggaaagttatatccatgtattggtactccaatgatactgagaaaaccatgaatcaagtgaagggataaaagtttgacaagagcaaagtaccaagaaggatataggctgcacaatatgaacatatcaagtacccccatttactatgttttggagatccaatcaaagacgatgcaaaccagtaaagtggagggcttgctgacaagaaccttgttgcaacctgtaattaccacaacacaaacgtgaggacagtctcactaaaaccttaatctcatctaaaattatgtatattatattctgtttatgccattgaggattgtaacctggacatgcatgatgaagaacgccgtggttaccataaaactcaagtgtacgataaatgggaaaacatcagctgaaaggtatcctgatttttctggagccactttggtcccagtcacatccttcttactgctaggtttccgctgcctaatgtcatggtttcctactcaggaaaacagagagaatcactcaacgtttaattttggaactattatataacaacgatgaaactgataccttcatttgttgaagttttaacacttggttcaactgcatccttcagagaataaagtctggcagcagatctcttttctttctcggtggcttgaaaccccagcgatatgaagagctcaggccgagacttcatgtaactcataatcgaacacacagctaaagagagaattggggatgcgagcagaaagtttgggagctgcttaaactgaaagtatttaaggaaacctactcccctgtcagaaacaagaatctctaaatcaaatataagaaagaaaatttacaagaacaagaaaaggtttgtgttcaaagtattaaccaataatgactttgaatgaagttatacagcaacggaatccttcctttgcaccaaggcctcacttcatcacgcgtatgtccatggcagatgttatagtatccgtatgcttgaaatgcgacaaaaggaagacaaatgcatatgcatctaagaaatccagcaataaaaacctgcatagctaactgggtagcgagaagaatcattaggctaccatacctttaaagagttgacagcaagttaaagagacaggctttaatcattacatgattaaccaagcagatgtgatttgagacatactaa

SEQ ID NO: 1009 - DNA, 8003 bp, Arabidopsis thaliana landsberg
cacagccctcgtgtaataaaaatctgagaaagaattcaaaaccaaaattcaatacacacaaagaaaaataaaaacgcagtggtatgtacaatggttgaggtggtgttatctcagtgatcaggtgaagtatatggagacatagtcatccatactctcttgagtagaggcaggggctgaagttgtggcgggagggttttgctcattctgtccggtcgagcgtgtggaagctcgtatctgccgactccttggctctctcagctcggagatcacttcccgaggctgaaaagatgaagctcggggttaatcgatcctttcagctctccatgcagctgagctcgttgaaccgctccttcttacttagggggtgggagacggttgccttggcttgctctagaagtccttgagttgagcagccatactcttcagcgacttcttcattgttctcatcttcttcttgaaacccttcattgtcttcctgtgaaggttcccaagctcttcaagtacaccgagcttcttgtgaacttcagcaaactcatctcccccttggtcagtaccttctccataatgagcttgctcttgttcgctggtcccgtgctccggctgatgtatatgttgctcaaactcgatttgttcctcataatcaacttgggtaaagtactcatgttgctcatagtcggctggactatattctggttcatcttcccgagctcctccaatgtcgatgttcaaggcaaagggagatggcatgaaattgatgttgcgccttgtcttcaccgaagtccgattctagcatggtaggggtagaagagaaggtccaagctccgagtggttgaacttgaagagatagcgatctgccggagttgttttctcaagaaaatccttccccttgagatagttgaggtcgatgaacttggggaacacgtcaggggttccaaattgtttccttgaagctcctaagattggtgttaagagaccaccaacacaaagacttccgcaaatccccgagagatggatggttgcaacatactctctatagctcaataggtggtccaaaagaacgacagtcaacgaagtgtctactctatcacccgccatcttcctcccatcctcggtctctctcagaatgaagaccaaagcttgagcaatcatgaatagctctccttcataaacgaatctggtagtcttctttgggaaaagggtaatggcgatacattggtggaggtatctaatcacgagacttcgaattgaagaactcttgctcttggcgggcgagtagggctttggaccggcaattgttgtccaaagagattttatctcatcttggtcatagtcttggcggattctttctccacttggaaacccaaaaatggtatcaaggtggctaatatcaagctcgacacccccaaccttgaaatttatgtaaccaagccctcctctttcttctttctccgaatcatcaacacaaaagtgaaccttgagggttgaaaggagttggcagctctcctctttaaatcctccccattggcaggtcatgaacgttgcaagattggccaattccatcaagtattccacatcaccacaaataccaagctcaaactttaactccttcaagtattgatagtactcacttggggttggctctctcttcctccttggtcggtttcttttgccaaccgggcctagtgtatcattcccgatgatctcaacctcttcctcatgaccgcttcttcaaagactgcctcttcacggtgtacttcctcaacctcaacaaccctctttccccgagctacttcttcttttaacatggctgagcggcttgagcttccacctagaatcaagcttgatctttgagcacaacgatcttggcaaatttggcgttcagtcatgccactcatgtcaaacgcctcaacttcttcgttatcaacggaggatcttctaccccgagatgaactctttctccttgaatccatggagattggtggtgagcttcaacagggcaaacaagaacaactctccaaggggtatcaaaatggaatggattcggtttctttggtgatgaaattttgtgcttaaaaccgattaaatgtgtgaggatagacttgggagtgatcgagtaactttggtgaagtattggtgaaggtgagaacgaattcttgaagagtgatagggagagtttggaatgaaacttaattttgaagctttgtgagagatagagaatttgcgaaaatgaaaggatgaaagagagaaggtttcaaaggtggtttggcgatttcaatgggtggaggaggatggtctttggtttcttttggaagggatagaaaagtgagttggaaacaacagtgagggtatgggtaattagtttgtccaccgagtaatgaagtgaagggagacaagtgggccactcgaccttactctttggtcgccgaatcattcacaatcgagtaaaggatcgagcatcccatgaagtgcgtaatactcgatcagatggtggggaatgtttcactctttaaaacgctcgatcaaacggaccagaataaacctcaagaagtcactcgatcaaacggtggggatgatttctctcatttggtcattcaatcgcgcggctcagaacactcctcctcattttactcgatcaacggtggagatcatcttttgacttggtttgagtttactcgaccgttgacttcctcatggtcaatgaaataaacctgaaacacttaaacaaaacatcaaaaataacaaggaaaatagaaagttatatacatggataaacatgtaacttcctccaaagtgagcttgttttaagtcactgaggttgactcttacagagcttagtcagaaaaaaggttgaagagaggaacatagaagtcctcatcttcagtgggtgaatcatactctgcatcctctcttgacatatggtaggatgagtattcatttgatttttcttcaacataaacttctttctgatcagcagagtagtcttcttcttctgaaccaggctactttgaccaatcctcattttcaaaactggggtagcctttaaccatttcttgaagttccagaattgtgctatttaactcttccatcttatgagttaattttccaattgtatcctcctgagctttatatccaactcaaagctctaggagtttttcagcaaaagaatcaggaataaagtgttcttcttcagtagaggggttggtgggctgtttaggcactcctggagaataagttggaatagggatttcctcgtcactcacaaacttgctctataggcttctttcctctaagtgaactcctttctgatcttctggtgcaaaccattctgttgtgaaatcttcgtcctctttgatagctagtgcagtttccatcttctctagatcaatacccattgaaaacttattaactctttttttcaaacatccataattgatctttcagcttcatcacccttgaaaataatccttctatgactctgctttgccatttaaataattttctcatctcataccagtcatcttctgtaggatcttcagtttgagctagcctttctgttgctctcttcttgtggtcaaaagttctcttcagcttgctaagttgagaagtatagttaactcttggtggggttctagcttctgcttcttcatcaacatccatgttctgaatcccaaaattctgaactcctgttgttgatttccctgaagcttctctaatgtcaaacttcatcttgatgcctttttcaaggttcagattaatttttccattccagacatctatgactgctccagttgaagctaagaatggtctgcctaggatcaggggatcctttccttcttcatttacgtccaataccacaaaatctgtaggtatcttaacatttccaatcttgacaggcagattctttattagaccatgtggatgtgcaacagaatcatcaactaagagtaaggctaagttgcagaacttgtattccatgatgctaccaaatcacaaatactcccaaatcaatggtcctagagagcatggaagagtgaatgaactgggatcatcaagcttttcttggatgactttcttcttgtacgtttcttgagtggaggcactgctaatcgtctcttgattctgatccttcttaagtttttcaattatgaacttttttccaggatggtgagtattcagcaaaggtgtgtgctctatagtccagatgaattgttgggtggcaggtgcagcaatttgagttgaatcccccccccttcttgaatcataatgtcctcagtattgggagtctgatgatttggtggagactcatcttctttgtggattgtgatagcatttgtagtagcatagtccttaggattctggactgctttccccggaagttgccgaggatgcttcggagcagaggttgaggcaaattaactcaccacatacttgatttttgaattcagagcttcaaacttgacattcagatcgttgtaagaacaatcgatcttgttgtgtaattcagctatcttcttgtcaaaagccatggctcaagtagcttgtccttggatgatgtgttgaaatgagttgcttaatttcaggatcttgagctgttgaggcttgttgtgtttgttgagtgaaccctggtggtggattctgctgttggtagcctccattaaactgctgctttgggacataaccttggttgtactgaacaaaaggcttggactgattctgttgaggtggatacacttgatcttgggggttagctacattagtgcttctttatgagaggtttgggttgggatcgtagttgttgttccccttgttgaaacctcctttgttctgaatgtagcacaactctacagtttgatcattccccccttcttgcatttggaagtgctcttcattagtgatgtagtgtatctgcttctgctgagccagcaacaacttgtctagcttttcattcagagccttgatatctttgctctggttatcctcaggtcctccagttcctctcactaagcgatcatagtcttcattgtagcacccattagattgtgctagattttcgaccaactccctcacattcttcagtttgatcattatccttagttcctacttacgacaccaaattgataagtaggtttttcaggcctacttatgtgctaaaatgtcgtgtgttcagttcaattccccttaaacactaacatgtcgatgcagctatagaggggtgtcaatccagtccactgttattgctagcaatcaagatgtgtacagaagcacctaagtcaagccagattataatgatggttggtttctagtaacaatcctaggtcaggattcaaacaacaaaaatgagaacttaagagccctactcaatcattgggtcaattagaacaaccagttgaaaaatttaagaactaaaatccaatcaactggtagctcaaataacaggtaaataaaagtgcaatcaagggtaaatacaaataaatctaagaagaatagaatccctaaggatggattcattaataagggcaactctagggttcatcaggtaggccaacaggcgaaatgcggataccctagaagatagattcaaaaccagatcaaatcactatagtgacagagaacctcataactttaccaattcctaatctcaactctcgttgatgaaacatagcaaagcaggctttaagcaacaatatacgaaagtcaataaaaagtctaaacacccaatctcttgggctagagtctacaaatctctggaattcgtagatcagatatccatttgaacgtcttttggacgctggaataccttgggtcgaattccaaacttaactgagctaaatatgcattagggccaacgaatccagaagggatctaacctaatcttaaccaccagactaacctagatattaccctaatctaatccatactcaagaaccctaatcactactcaagcaacataatctagaacacaaacccataaattactctaaacatatcaaaatgtatatctaaacaagataaacaactttaatcaaagaactaaatgcataaacgaaatagattaagagtaattaaggtttcaagattctaaaacacaaagaaaaactacagaataaatgatttgttcctttggaaaaaccccaaagtgacatatttatacaaaaatattgaaaatcctagattcactagaagacaagaaacttgaggcggtttgggctagtgctcgatcttggggatcgagtaaagagggtgctgcaaagtttgcgcctttatgtctatgctccgagtgatcaattggtcgagtagatgcttcttcctctcctatctgtatgctcagatgtctggttgagtggggaatgaggaggatccgaagatcaatttgctgcttccattgaggctgccttgatcgagtaaaggggtcgagtgaattgcagcctcctctgtggctgtctggatcgagtgaactggtcgagtagaatgctctgctgcttccctccgtgtttgatagagtagagggtcgagtagaatccttgtaagctccttctgcacttgaaaacttactaaaacatgcaatatgtatgcaagatgatcctcaatgcatcagtatgcaaaataagctaaatgtgatacaatgagtgatcactaagctaaatgatgataaatacacacctaaaatgagtaaaatatagtgttatcaacttccccaagcttatctcttgcttgccctcaagcaaacaaaaaatcttaagttgaaggagaggtttgaaggtggggattcaaaaaccgaggcatgcaaataaatcgggtaacctcaatatccaggtagctaattatagattgcaagatgatagacccttacttaaaaacgttagccatactcgtcacaatgcaacctaacaactggccttaatctattcaagcattcacattaattaattccctttaacattcattaagcataaacagttgatcaagcaatgcaatggttatgaactcacttggtttcggggttaggctaagagacaaaaatggtccctctaatggtttggtcgagtaacaggggactctcagagaaaagattgagcttcagtagaatgctaaaggtaaaagccaacagacacatacaagaacagactcccatctcccaatgatatagtatgatagctcataagatgatctcattcccatagatgtcttaactctaccctttttctcattctttttctctttttggttcaagttttaaggggttctctttgaaacgatttaagagtctagcaggtttggttctatactttgacaaacttaaggcttttcttctattcttagcacatagggcgttttacccttttctttgaatcacaatgcctaacttctttgaattccaaaccctttactagactaatactttcttttgcatcccccttaagaactctaaactcttactcttttttttcttttcattcccattctcctttcactacaagaaaacacaagatttttgcgagaaaattttgagagggataacgtgcctcgcaaaattgctacggttttgcaagacatgtgcgaggacggacccacaaatcgctaatccgtcgcaaaatttgcgagcaacaaattcctcgcaaatttggtagagataagtgtgcagttttgcgataattacgttttcctcgcaaaacccttgcaatttgcgaggaacttacgagttccttaatcaatcataaatcaaaatcaaatagattatatataaaaaaaaacttcttaaagaagtaactagaaagtttgttcgagttcgcctgatctatcttcttgaaggatcatcagatcaacatgaaagcctaactacattgctagaattcatgttatatattggaaagaggtttacctccttgcttctatggtataatcctctacccgcgggtggaagctacgggttcgaccccgtcagtccctacggattgaatacataactccctgatcgtcatatctctattatgctgaacttatgg

SEQ ID NO: 1010 - DNA, 1053 bp, Arabidopsis thaliana landsberg
caaaaaccttgatacctgccattgatttggttactaagaaactctttttagactgttaaaaaagagagaaaagaggaagaggtgtggggtttgatgttgaaggtgaaggtgatgaaataagacacacgtgatgaaggtatttatacagaagcatttctactttctcattaatgtttaatattatctaacagataataatgcctctacaaggccatcgcaaccaatattgactagtcttcttcttctgggaggatttttcaaagctgaattggactgtttaacgtttaaatatttgtttttacattggttatgtaatggtttttaataaagtattcaatgtatcagagaaaagatcataactagtgcgtagtaataggccaaatgactcaaacttccacctactagcttcatctagtagctttcccccttcttggttatgactggttcggttttgtttcggggattttgtgatgctctatatctgtatgccttctcaagttaaaagggtttctcttaatgtgagattcaatagaacaaaggtttactgatcagatctttttgaattagtttcagataaataaccaaagaagttttggtatggtttcttggttccttttggtgtggtggaattcgatggaaaaatcaaccttgttgatattgatgcatagtaagtataaacaaaatgtataaaggtaaataataaccaaagaagttaagaaagtgaatgatgattattcaaaggattatttggagaaaaaaaagaccctctttgacaaatctgttggaaaatacaaaaaaagagtaaagaatttgtagccagcctatcacagtcccttaagctgttccaaaagacctgtcaaagtagtccatttctcaaatgcaccagctgatgaaacgaaagcgagcttcgatgactctatatcgttcttgttcactgcgaaaaaaggaatcaaaaccacatttcaaagagatcactgcaatgttttaatgacaattttgattcttgtgaatgaaaaagttaagtacaagtacaagtacaatacctgatgtgat

SEQ ID NO: 1011 - DNA, 2768 bp, Arabidopsis thaliana landsberg
tttattatcctaaatttaaaatatgcaattcagattaggtttttcagtaaagttaagaattaattcaaattaaaatctaatttcgtgtacaatctatctcctataaatgttaagcatacattcacattgcctcacaatcaatataaaatatcgattctttaaaacaatagatagagattcaatagtaaattacttcatgttctaataatgtttatctcctaattttactatccagttatgcgtattcttatggttttttgttttagggtcaacactagattataagaaactagccgggttttggtcaatattataccacatataaaatcatgaactgaataatcaaaatataattatacaatcttaaacaataaacaaaacaaatacaacttaatttaaattgtgttctttttaaccttttttatttgtcaaaccgctgaattttatttttaacttatataacacagagatttgataaatttttaattgttgaatactttttttgtgtgctaatttctttaaatgattttggtaaccttaatgacgtcattaaaggattttgtttttgattaaatggattttatttttgattaaatttttctaatggcattgtcatgtaaaatgtacctcccaaataatatagtaggattgaaacatattataatatatttttaaatgtatacatgtttttaattgtataatagaattgaaattcatgatttccttggtaatttctgattttattaagaatttgacgaaacatagtgaaaatgtagagcttgtgaagtattatcatgaattctttgtttagcaagaagatccaccggtttgttgaaatctgtcttcacccattcaaacttaacatcttcaatccgagctttccatagtgttgctttcataacccaatctttttttttccaaccatacattaattaaaaatctactctttgattagtggtccaattaggtgaaagaatgtttacataagaaagttctgatagtaaagttttggagatcttggctaaacaatcggtttggagattacaagaaggagaaatccttaacaacaaaaatataaaaaaataactcgaaacaaacaaaactcatcggctttaagtgtctacttagagacactattgcacactctaaagacattcatataaataacattaatatgccttataaaaaaaatctttagacacccaccaaagattgaccatagagatggtcttatgtctcaaaacctgctctcgttggagtgattcaattactactagaacaaaatggactacaaaacaaatactcctaacaaaataagaatcgataaattttcttttaattggttttcataaactttaataagacggtgtcttatccactaacattcaaatactaaacattttagtgtttgttaactttatattacaaaactgtcattcttctgacatcaatttgggtttcccggaagagtgccgcaccgaaaaccctaccaccttagcccattgtttcagcttctgcttcatcgtcttccgatcatcacctttttaaagttgctcctcaaaaccggagaacattcagacaaagcaaaaaaaacaataaactaattccaaaactagaagccacatatacctttgtcgacgatggtcgtgatgttgttggagttgctgacttcatgatccgacgcgaatgaagacgtccgagacaaatggttgctgtattgtctatgaacgcgcagtacagatcaagagcggggattgtatgggagagccttggattcaaatcaggagattctgtttcaaacccaaaaccaagctcgaaacagcctttaagctcctcgatatcatcattcgtgacactcttgctgcgaggaaggagatccagtgggcgtttctttttcttacgcagccaagcctcttcgcgactcatgtccggtgaccacgagtattgcttcatcagaggtcttggaggctgtggcgcgtggttcgacattagtgactaggtttcttttgattgtgtaagaaccatttctgctatgtaacacgaataataatatctacacaaaagtgttaatgtagtagaaaaaagtgaatgttttcggaatgagaaggctcctaaaattttatattagtttttacttctcttttgggaggtaaagccatatattgatccatattttggggttgttttagtattaataaggattatattggccagcatattccactgtataaactctatctccagttttaattacctttaatggaaaacctctatctccaaaatgtttttttttgggataaaatctctaaaatgttagtatataaggaaaatattaaatttcaatagattttgtttgaataacaggatgacgtgttagcaattatttaaatagaaggatattgtagaaattaacagcttttaaagttaagttataacttataattaactttaggacaaaagtttttttttcagacctttttaggattgtaaaagatgaatgcattcttaataaataagaaaatgttttgttgaccagaaaacaaatctataagaacatatttcaaaaaatttatctatcttaaaataagttatgaatatgatttctattcttttgagaagtgggttatgactaattaatgagagttctaattgttggaaatgaggaaaaattggtcattgcgaccaaaaactcgtaattgtcgggcttgtgctgatttgtctttaaatattggatcttaatctctctgcaaacgacccaactccgtgag

SEQ ID NO: 1012 - DNA, 5132 bp, Arabidopsis thaliana landsberg
  unsure (1)..(5132): unsure at all n locations
aactcgtatatcaacaaggtaacggtatggtgtggatctgtgacaccttgtatgaaataaaattgtaactaggattttcgaagtttaattctctacaagctaacaatctcaaaatgcacaatatcgcgtcttaatggtttgaaaatggacaaatttgggtaatattaaaaagggtaaattgcaggccacacccgttgactatgttttattttcatggattgtcaaagtcaaatgtggttttcaccatttgtcttttcgcctgcaaaatgacgcttctgcccttgcgcttctctcttagcaactgttgaaatgtacggtttagtttagcaggtttagttacgtacactgttccggttcagttgaagattttttgttcacgttgacgcgattcggttccgttacaagtgagattattccgaagtgacatcaacatttaatgccccgaaaaagtttagatgtgactattgttacaattaatgcaaaatcatcattacttgttctaatattagagataataattgttgagataaagatgaacccaaaaacaaacattattttctgaacaaatctgatgttgaagaagttttgaacttgtttatttacaaagtttggagccaagataagcattgatcgtgtaagtaatgaaatttttaagaatttttttgttataacacagttggatattgattgtgttcgaaatcaaaattgttttttttaatagaaaaacccagatttttttttatttccaattttgttggttgaaaatgctaaatttgtaaatatatatgtttataagtgtgtacatcgaaattctttttgttttttgtagatataatcatgttttcagttgcatttaatgggtttctcctgaatttatgatgcagttgggtaatggatattctcgtatttactatggtcggtgagtggagaagcaaagaagaagaatgaaaatttgaaccaaaggaaggcatgtttggtcgctgtgtacgtgttaaggaaaacatgacgtacacagaatttgtacgtacactaagcgaggctttcagtttgaaatccactgagatcaatcccataattagttattggatgccgggaaagatgttagtgatgatagatactaaacgccctcctgtctacattgacagtcaagtggggttggatacgttctttatgattcgtggtaggtatccttctctcaacttgtttgtctctttcattacaatcgtcaagacactcatgaataatgtctttaggactcatggtgacgatgctgaaagtgaccgtgtttcaaatgttgatgaaaataatgaggtcgtagatgagcaagacgacgttgaagacgataaaacagatgaggatgaagaggagggggacaacgaagatggtgatgggtatgatgattatcagggtgacgatggatctatggggggaagtaccctcgatcctactattgatggtagtgaaagtagtggcgaagattatgattacaacaagtgaaacgatgtaattgtagaagaatatggaatagggaatgttgaggagaacgtcattctcacacaactgactgttcaacatctaggggaattcagtcgtctgttggcagagtgtacgtacacaagtcagcgtgtacctggcgaagataacatttcccacttgggtgaccgtacaccagctgtgactccaagaagtatgtgtcaacatggtttgtaccaatgtacgtacactatagattgggaagtgtttttaagaacagaaaagtcatacaacaaacaatgtcttatctcgcaatcaaacaatctttttgctacaagcaacctaggtcatgtcctataagattggagatggtatgcgttgatgatacttgtccatgacatttgactgctcaagtcgtcaagaattcagaatgtttcaaaatcacatcgtataaacgtcttagaatatatctcagccactgccaatattggtttaatattgtatcaataattttttcttaataatttaattcacaaacaaaaatgtacgtatattattacacatgtacatacattaatttaccaacaaaaatgtacgtacattatttcaccatctatttttatttaattattatgtatgtattgagattattgagatataagaatacgtaataaaatagtttgagttattagaaatcgtcacatatacgttccaataaataattttgtgtacgtacactgtaaattgaatatacgtacacagaaaaaattcgatgaagggtataattgtaattttccagtcatcttcaacctgtgtatccttttctgcaaacctaattttgcggccgtctttatcagttttctcaaaatctcattttttttacgttttgattactatttataaataaatcttgtaaacctagagtatttttagtttaaaaagctaaagtgtttgaatctatgagcttttttttttgcattctgttcatctatgaaaacaagaaatttgttcctcaattttggagttcaatggagagatgtcgaaatatgaaggagtggataatgaattttgaacttctttctatttctctctcgaattactccgtctctttctctttttcttcttcttcgtttctttgattcagcttttttttttttttttcaaaactgaaccattaggggtaaaccgaaatcacaaaaccattaagggtaaaccattaagtttcaaaacaaaaccagagaaactaaaccgaaatcaagtgttgtgtggtttggttgctcccattaaaagtattttggtctgaaaacaactgaaaagacaaacggtgaaaaccatatctcactttgacaaaccatgagaacaatttttttttccttttattaaatcatatctcacggtgaaaatttctttttattaaatctataaaatacggaaatcaaatctgcactcgtttttccttttcttaccgatgagcgtgagtggctatccaaaactttacttctacatctataaatatattattttactctccaaacctaatacattagtttcactctctcaattttaagctttgtcgccttcgtgctttctcttaactttgaacgtgaaaaaaacagagagtttgtcttcgaaaccaacaagaagatgactatgcgatcattacctttttcctcttcttcttattcactcgcttccacaagtttgagtaacagacttgagactatattcaagaaagcttcagagctttgcactctctgtgatatcgaagcctgcgtcatctattacggaccagacggagaacttaagacatggcctaaggagaaagagaaagtgagagacattgctcttaggtatagtcaattgaacgaagccttgagaagcaagaaaagcgttaatcttcatgggttcctcaacaagaagaagaacaagaagaagaagaagaagaagggtttgaagaatccgnncnataagagaaagacttaacttaagaagaacgtgaatgttttaaagtatccactcgctgatcattactctcctgaccaaatttcacaactaattcagtccttagaacctcatgtctctaaagtccgagaaaggattcgttttgttgagtcgtataaacagaagcagacaaaaccggatcatcagagtttagcatcaatatcttctctgaatcatcagacccaatctttgaaccctagccagttctcgttgtttatgtacaaccatggagataatacgctctctcaaatcccagtgactgcatcaaatttcaatcaggattttctccgcgttactacaagacgaatctggcttgatgaagcaggagctttgtggttatgattagaacatgtttatgaacaacaacaaatttcaagatccttgcgtctcaaacacacaagatagctattctgctcctaccaaccttcttatcgacgactcatgtttctctataagctcatgtcaagagagtgtgaaactgtttttcatcttcttgtaagaattttaatatgtttgttgttgatgtttattttgctaagtattgcataacgcataatgttttcttgtatcaagctatattactatgtgaacatccaatttatgaagtgaatatatattccactgcataaacatgttaccaattactttgcatgtcgtttcgtgaaaatatcaaatcaaatctcccattttaagaatagcacaaaaggattacggacaatagaagaacagagtcctaacttaaagctttatgaagaagacttaaaaacatatttctcctgattgactatttttcacttggaagcttcagttgactcgtttgtgttgacttgtagagggcactgagatacatatggcttcagctgtaaaatacaaatagatatacatcagcagagcagctaaatcacacaacaaaggttaatgtaattaagtaagcattcccatttcaggtcactaactcaaaaaccttacaacaagaacaaaccaagataatcatcaggatgaacctaaggacattctatcaacaagacttgtaagaagatttctcactaatgtttagttctcaagtttcaattaagatgcaaggtacatactagaagtatcaaagacaaaaggaacataagagtttagagggtgaaatgaaaaaccttaaagccggtgagatcagggactacgtaattcggtaacttatctggctgcacaacatatcctcctgcaaaaacaccatgtcacaaaacttaggtcaagatatcatgaagtctcgaaacaattgcaaaatacatatacaatatgatgatagttcttttgccaaaatgaagtctagaaacaaatgcaaaagcagtatactacacatgtacaattcgagttaagctcccacatttatttgagtggaaagctaacttctttaactcaattttggcaattatgaatgtagtaacaaaaatgcaactgatgatcagttctttgccaaaatggagtaaaagttgttagctttcctcctacataacaatctagtatctaaactttgccttagattccatatatctaatttcaaaaacactcaagtatcaaaaaattctatgatgatcatcaattgagtcaaagtagttagctttgccaccaaaagaatctgatatcgtaaggcatgaaaactaaactga

SEQ ID NO: 1013 - DNA, 1989 bp, Arabidopsis thaliana landsberg
ttccagaaagcatatgtgaaagcattaggaaaaggcttctctggtgcaccttttaataccttcacaatccagtataagggtggaacaaatggaggctacaatctttgcaagtttttttttagactttcatcacactctggaattgaatagggtgcttttatcaaatgcgattagttgttgcattgtacactttgtaaaaatttcctttgcagtgtctttttcatttccttttaagaaaaggtttttgcaagtatagtgtataaatagacagtagcgatataattttgagacgcttgaattgttttctttagacatctgaaatgtctgtcgattcacaggagaagacaaagaaatgcaacggagaatggaagtttgccctattggagttggctgattctcattatgctgcaatctgtattgaagatgatcaagctagtggaggtgcagttacagttgacataggtcctatgagggtaattgttcatttagtggtttcttcatcacaactttgtccttcttgcaggagctcctatgagggtaattgttcggaaaaccatcccgtttgttgaagatgaacttatttctgagaacaaaaatctttagtgcagtgtagcctttaagttcaccatcagatttttgtaagcattttgttttcaatacgtacctctgtagtgcatttcgtgcaagcgtaatatcaaagcttataatctgagtaccaagtttgtgactcttggaaaatcaccagtaatcctttcacgagcagaacccatcataaggttgaatataaacttgtttgtgaactgattgcagtaacgaagatggagagaaaggaaatgtgtaccagtttggagtgatactactacagctcatcacaggcaagtagtggctgcaggctcttcagagatgggaagtttgaagcttcaggtctgttctgttttagtcagaaccttttcatctttgtaaatccgacacggcttaaaagtttggaacctctatgttatttcctgcagctggagaacggtttgagagatataccatcagtattgaacagcttagcagatcctctgtgaaaggatcataagctcagtcattgaggacaacagtggaatttgctatcaactctcttggaatctgcagtatacaattcaagtgcagcaaaagatggaggccaagcagtgggaatcatgaaaatcatctatgaagacattgtgttaaacaaatgatcataatgagagacaacaaaaaatgtagaaacagtgacaagtgttaacaaatgaatatgcagtttcagggagaacttgacatatcttctattagctaaatttgtaaactgttttaccaaatataaagcaaaagaagaagatctgcgactgaaatacatatgataattatgaagatgaatgtggttacgaaaatacaaagaaaaaaaacatgaagagcaacaaatcacagagtttgaaaaacacagaaagacataaaagagagtggtagggagagtaaacttctctcagagatgtgatggtcgaaatcagatacaagagaggaggtttaatgttatttgaagacaaatgctacaatgatataattactagtcggcagtccagctttgttcgacaacctcgcggactcttctgttgtactcgcgcttgctttcactgaacattcgtgcagcttccgaatttgcaggagaattcggattaggatcacatagcaatgactgtgataaaaaaaggacggcgattgtttagccactaatgtaatcagattagatcaaagatccgtgtaaaagatcaggggaggaagcagaataacaacaatcatcaacggttttactgagaagcatttcgatatgacatttcttgtatatatacctgaatggaggttagtatagcagcgacatcgtatattggactccattggttataagagaggaagtccaagcatatactcccatcagcataaactgcacaacattgaccaagtgtagct

SEQ ID NO: 1014 - DNA, 4283 bp, Arabidopsis thaliana landsberg
gtgtacgtacaaattccaagaatgaatagaaagtcaaatatactaaccaactaacactccggtggtaactgtcttctcgatgatgtagtcaaaaggagtaaaatcgtaatacagtattgcagccaatcccgaagtttggtaacaatggtctgatccataaaacagatccggtagtcatgggacgttgtgtgtatcccctcgtcgtggtttcgaaccgagaaagtattgataactatccactcattttctcggatacggtcaaagtaaaatgaagcaatgcgacgattaatggtagcctctatgcgggaacggcaaccctgcaccatatcatgatgattagttacatgtaaggtatgtgaaagtaaaaacgttataaacacatttgcgaaatagtactcgattatcggtcaagatgagacccacgttgaactcatttcttcccacgcatttcttaaacaccgtgaccacaaaagcgcgtatacttcatccggggatcattggacaaagttcggaaatggcatgatatccagcatccatgatgccaaaaaaactcagaataaccaactttctgtattatttgtgtggtgggtttagactttcgtttgaatgagtgaagggtgttattaccaggttcttaaatagattttaaaacgacgcgatgattggtcccaaatcaatgtaacggtttagttaaaaatataattgtcaactcttttataataagatgtacgaagcatacgtacaaatgaaaacatttatcaaagttacgtacagacaacaacgtctacttacaaaaagttgaatgataagtaaaaccgataatacgaggtccacaaacgttcgtacacacagtaacgtacagacaaaataatatttaaaataaaaattagactgataaaaagatttccaaaaaacgtacgtagaaaatcgtccaaaagcacagaaacgtaaactctaaccatcgcgagtaaaaaagtcatcgactaaatagggtttttgcatgtcttcttgttatgaccggttttccaacatcttgtacactgattaggaatgagtcttttctgcctctttttttgaaagttgtaaaatagtaagtcggttaaaacgaagtaaaaattgcatagcagttaggatgggggaaaaacttacccggttttccccagtagatggtatccttttggtgggtggtctactaggtggtcgtctgctgcgtggaggtatgagaatcaggtccgataaatcttgaggaataacaacgtcttttgggtccgctataggtaaaacgggttcttggaaagaattagaaaacacttgaaagctataccacaatccaacctcagccttcgggttgatgccaaaatgtattgcggcagctagagcatgctcgcatggaattcttaacatcgtgtacctaagacaaatacacgtacactcatctagtacaacgtgaaaatgctcaacgctctttgaagtaacttgataactccatggcccagacatcatgactgcgaactttcctaacgtaggcaagtcttggaggaaacgttcatctacctccggggtcaccaaagagttacacttcaacacttttttccgccttgctgcaaaccttcgcatgatgacctctcggatgaactgtagcatatagacaattggataagcttttgccttccttaagacattgttcattgcctcggagttgttgctagtcatgatattgtaccgctcccctttgcaatatgccctagtccaatgctcaaatccaacatcctctaaatactttgcgcatccgggactccgacctcttaactcttcaaagtagttttcaaaatctctaatccgatatgctttagcggcgctaaagaataaaccagacacaccgtaccttgcgtaagacaccgatatgttttgctccaggtgtactatacatgctccatgattggctttcgggtacaccacactaacgcctttatatatggaagaatgcctgtccgagacaatcatcaaatcgtcagtatctggaacaatctctgataatttctcaaagaaccaaatccatgaagcatcggtctcgctgtcaacaaccccaaaagctaatggaaaaatttggaagttcccgtcttgtgcacatgctataaggaggcatcctttgtaacgaacgactagctgcgttccgtctacaacaatgactttcctcatatatttccaaccttttacagacgccgagagagaaacgaatacatatttgaagcgctgacgacctttatcttccggagtggagtggagatgacagattgtaccgggatttgctaaacgtagaagatacagatatataggtaaaaacctgtaactagccatatcatcaccccttacagagttgactacaacctctctagctctccatgctgtagaatatgagatccaaacattaagatcatttaagaccaattgaggtaaatctactgctcttagacccccttgcctagaactatatctattcttcattaccttgcctaaaagtttgtaagtagcatgtttacgataatcctttcgactcccgatcttgcaaacatggatagaatcataacctgtgattttgaaacattttgaattgggtatgacatgtgcagtcaactgccatggacaattacgatctacgcaaaccatctataatcttttagggcatgagcgagtttgtttgtagcggaagcaccttttgattgcaaaaagtcgcatagtctactgtatgacgtgcctgtttttgaaaacacttcccacatacaaaggatgacctgacgtactcaattcaacttctgtctcatcgactcgaacattggctaaatcatcgaatactggagcagcatcagtatcgagtaactcattctcaccattgtgcaatgtagaaaaccctttatacacttcgtaggcttcacctgttgttactagacggtggtcagattcaatatttaacccacttgcagaagccccttttacgcattctataccctcatctccagttatgttctcagctatatcatccacatttgcagccatgtacttaactaattcaccttcgcatcttgtctcctctgcacagactctaatgtacgtacattggtacaaaccatgttgacacgtcggggatggagcagaggttggtgtactgtcaaccaaaacagcagtgggttctacatgatgtacatgtttacctgtcgacgtacacaatgccaatagacgagtgaattcccctggggttccacggtttgttgagtgtcattcacgacgtcctcctcaacatgaccaattccatagtcttccacaatcagatcaccctatttattgtaatcgtaatcttcgccactaccttcactaccgtcgattgtagggtcgagggtacttccatatattcgccaaacatttgatctgcatccacatcctcctcttcattatcctcatcctcatcaccttcatctcttccatcctcatatacatttatatcttcgtcaaacttatgagctgcatcaacatttgcaacctctgtctctgtaaagcttcccttgccgatagagtagaaagacacaaacaagttaatagaaggatcgccattacgaatcaacataaatgtatccaggctgatttgattctcaatatatactggagggcgattacttcctatcatatcagacatatttccaagcatccaataatttattataggcttgcattcactaatcttcatcaccgttaaacaagttggatttgttttttgcccaaattttttatctcaattatgtaaatatcttataatataatctctattataataggtaatcactgaaaaggattcaactttatggataatataagcagaaacaacaagcctgcatgatgattcactaaagggtaatcctaaatgtaactaaaagttcaaattttatcacaaacccagtttttaagaaagaagaaagagtgaacatacgaattctctgacatcctcgccatgcaaaccctaaagaatatcgagaaatcgatccagtaacagagcatcgtactcgataagcttgtcgtctttagaaaccttgccaggagcaagaagcctgagctaagcatcaatagaagccatcttctccaaatttcttgcagccatggtttgggtgatgctttttgctctctctggtgaaaagcttttttggtaagtgagagagattctcaataaatttatagattgataccaatcgaagaaaaatcagggaatattatccgtaaagctgaaataaaaaaat

SEQ ID NO: 1015 - DNA, 2424 bp, Arabidopsis thaliana landsberg
  unsure (1)..(2424): unsure at all n locations
tacagatattagatacttcaaggttttttccaagatttgtatttcaaggaagaattaagagtttttaagcttaaatgagtaaaagtaaatcaaaccccatttcaggacggtttttgtaccatagaattatgtcatccgttcaaggtcttcacctcgatgtggaatcaccacaatccattcagccattcagaagttatgtcgagagggggaagacatgacccaattgttagaagttatatgcacccgttccggagcctctaagtcacactagccaccaagcatgtgcatgggctattcaccactctcaccactagtcgcccaccnnnnnnnnnnnnnnnnnnncttaaccaacacttaacctaatcaacatatattaacgcttaacctataaataccaaacctttagagaaaaaccctacgtatttgatggccttttggagtttcttttaatggcctccttcacagccagctcaaagcatgtagcctccgagctccctatccacctcaaagcttatagaagtcgtcccttgaagatctctctcttgttcttcatcgctttctcttcgcttctcttatactttttcttatactacttttgggtagatgagttatcttctgtgacatcttagagaagtttcctttgaacccccttttgttattgattcgtttatgatcttattctttatgatatatattatttgcatcattagcgaatagttttctttgttgggttttatgggatgattcaaaggggttacatggttcaaaacttattaggttgttagatccgattttcattcatacttagattcttttgggacatcttttactttattgcatttgttttgattaatcaccaaacgctaacccaagagggaaggatctctaaccagataaaccaaacttcagacatcgtattaccaatcattcgtgttgttgcatacgtaagttgaaaaaaggacttagaatacttagcgaacgcgatcctaatgtgttaatctatacgttgttgcatacgtaagttgtgtaacataatatagggcgatttgctaattaagtatatcctagggttagtcgtttattcgtgtttcgtagttgtgaactagagcaaaaatattaaaaacttaagagagactagccctattattcgagaattatgataccttgagaaacccttgaacacccaacaccataaatttatagcttacaactgatatatattttcttgcattaacttattttattgcttagttatgaggaaacccaaatccaaaacccctaagtgtagttttttcttagccatattttatttcataattaaatatttatagatatcactctttatcggatcgatccttaaacacaactaatgattattgtgcccttgtagttaaggtgtggtccctaagataaaaccttgaggtaaatcttataacaatttggataatatatcgtgggatcctactaaaaggaaagaatattggattatcatccaaatgaaagggacaaaatagatgcaagtacttaactagaggtccatgtcaacctatgatcatatttttctttagaaaacaataggaatttcattgatgatatttaattcagcttggtttggtaaatactctagttcgctagagtatagcacattgacaaataaagtatagtacattggcaattgtttttttgattagttgataagagtggagcagttaaagaaaatttggttgagttattcatgtcaaagaaatatcttctttatctctgaactctgcaattgataggctgtttgctaaacatgggttaagtttgacagttgagaggacaaggttatgatagagcaagtaacatgaaaactgagttcaatgggcttagatcattggatgctagggaaaatacttctccatattacctccattgttttgctcatcaacttcagttggtcgtcgtcgttgtagttgcaaaaaagcactttgatgttggtggtttttttgacatgatttctaagctgttggatatggtaggagcttcttgaaagttatcaaaaaggagtagtacaaaattattaatggtgacattagcactggaagcaagagctttctcttcaaaggcctaagtatacccgttggaattctcatcataaaactttattgcgtatggttgatttgttttcttatatcattgaagttatagattttatccaagatgaaggagttgatgactcaaaaatacgtcaagcatttggtcttctcaagtactttcatatctatgattgtgtattctatatacaattaacgttagtcatgttgggtctgacaaagaatttatcgatggctttgcaaaggaaggatcaagatatcttgaatgttatgtggagcccgcatccgggctgcatcacacttgttccactcgtcactaagctacgtc

SEQ ID NO: 1016 - DNA, 2784 bp, Arabidopsis thaliana landsberg
agactatgtacgaaatcctacaaggccagagggctgtattgcggaggttataccttgaagaagagtgtgttcagttctgtggtgatttcttgaagaagacaaccaatgtagaagaaaaagtagataggaatacagagtatgagaacagctctattttagaagggcgtccgatatcagcagggacttcaataactctaagtgaaatggacaagaatatagctcatcttgctgttattcaaaacatggctgcacttgaccaatatgtagagtaagttctctttctttcttaaaacatggctgcacttgatcaatatgattatatatgtaactgaaattcttaaatttctcttttgtaagcatgcatctacaacatctacaagactcaaatccaaggtgtaggcgtgatgcatcacacttatggagtatgcatgccaagaattatgcttcttggttaaaagaacaggtaagtcatctcttttcttggttaagagaacagattgaaaactcatgatggtgattctggttaactctaactgatagtctctttaaccgcttgctagatacctcttggttcgactgaacatgaagatataattaagtggatagcatatggtccacgatgtagtgctaggtcctttactgggtatatagtgaacgggcagcgtttccacacaagctcacttcaaaggcaaaatcaaaatagtgggatttattatgaggcaactgctatgtgtagatctagtgctaaagataactcacaagtggtggatttggtatcctactatggtagagtcatagatatcattttgctggattataatgtgttctatgtgcctatattcccggtgtccaaagggcagttagaggaaacggagttaaggtagaagatgggttcacgcttgttaacttgaatcacagtcaagttagcttcttgaaagatccgtttatactagcctctcaggcaaagcaagtcttttattctagagaagatgatgcatcaagctggtatgtagttatgcaaggtttttcgagaagaaactgtaaagaagatcttcaggagggcaacgcagaatattggtccattgccagcagatattgacatggatgttgacatggaagattctgagattgctagaactgattgtgaaggaatatatgtgcaaaatgtagctttcttttgcattttgatagggtcttgtatatttgcctttgctttttttctgatgtctgcaattcatatgtgtgttaagtgtcttagattattgtcatgttctaactatttctgttctttcttacaggtgaattaagatgggacaaaagaagaagggtgcaaacaaaagaaagaaaactgttgaatcaaaaaagaaagatgttgttgtggagactcagcctgcaactgtggagactcaggctgaaaccgtggagcctcagatagaggctgtggagcctcagacaaaggttgtattttgaaccttaaaacttgctttatattgatgatgtattttgaaccttacttatactgtgactcaaactacaatgccacatgagcctcagactacaatgccacatgagcctcggactgtaactgtggagcttcctgaacctcacgggctgcctgaagatggagctgaggatgttcctgaaggtgaggttgagttatctagtgaagaggagcgtcctacaaagcgtaagaagcatagggggccaacaaagaccgaacagttcgagaaaaagttgattataatatcatgggagatccttatggtccagggtcagttaaattgtcatcatatgttggtgctttggttagggaacacgttccagttcacattgacacctggaagaatgttggacaagatataaaaacagttctatggaaatcagttcaggtaatgagttccttgtgtttttgtctctggaatttagtttagttctctgcaaatcagtttagttctctggaaatcagtatagtaattgaaaatgttactgttatccttttgtgtgcatttctgaattgttttatatgtttcttggtcattgaatacaggcaaggtttgaactcgatgaagagtggcaaagggttgttgtgattaagcagatgggtggattgtggaggtcatacaagtcacgcatagtcagggaaatcaattatgctgccaataaccaacagagaatgaacatgcgaccaatgaatgtcaatccggttgaatggcgtaaatctctaaaatacaaaaccagcacagccttcaaggtattgatcttcagaacttagaaaaatcatttgctttgaatcatagatattattaagaagttcacttgttaggctgtgagtgataaatacaaagaaaacaaatacctcacactgcaagcaggaaaggcatggtcagacttacagaagacatggtaagtcgatttatattgattattctgattagtctacaatctcatatgaatgatgttctggttttgcaaacagaaagttgaaagtggagatccttctgaagtgactaggctgaaggtgtgggtcaagtcacggaccaaaaaggatgggacacctgtgaatacaaatgctgcagagaagattgtatgtgttggacacctgtgaatacaaatgatatggttttccatgattaacaactgtcattgtaattctatatttgtagagaaaagccggtgagctgcttggaagtgatgctccaacaacaacaacaaatccagaagaagatcacctctctcaactgttaggccctgacaatcctggaaggctgcgggcaatgggtagag

SEQ ID NO: 1017 - DNA, 2109 bp, Arabidopsis thaliana landsberg
attaattgctttttcatgtagtaaaaaagatctttttttaagctattaaattcacatcttccattccaggaagacctaaatttccttttttttttgccgttatctgcagagatgcgaagtttctggataattattcagatataggttccaagtttttagctttcatttctaacttctgttttcgtgttttttaatttccataatctggaaactcagatttgagctcatttcggccattgtttatattgcagatctggtgatagtttggttagttgttgtgcatctgagttagaaaaaagtcttttaaggaagtgagagaaaacatgtcttctcttagtagagagctcgttttcttgatcttacagtttctcgatgaagagaagtttaaagagactgttcacaagtatgtctcttttgctctgtagatttccttggatctaatttaccaactgacctgtttagctcttgtgttggttaatgcattattgctttgtcatgttcaggcttgaacaagaatctgggtttttcttcaatatgaagtattttgaggatgaggctcacaatggaaattgggatgaggttgagaagtatctctctggtttcactaaagtagatgataatagatactctatgaagatattcttcgagataagaaagcagaagtatctcgaggctttggataagtaagtcatggctggggatttgtttttttttttttcctttcagtgagatagcaaaagaaaaagagtctgatttgtgattgaccttggtgacttttttgttggtaggcatgatcgtcccaaggctgtggatatactagtgaaggatttgaaagtgttttcaacttttaatgaggagcttttcaaggaaataacacagctcttgacattggagaacttccggtaatgttatattggattaatgtagtgtccaaagcctttgttttcttagccgtagttcaaaagaaagattgatgcagagttttaagtgtttcgagtttgatcaacttttagggagaatgaacagttatccaagtatggggacaccaagtcttgcagagcgatcatgttggtggaactcaaaaagctgattgaggcgaatcctttattccgtgataaattgcagttccctactcttagaaattcaaggctgaggactttgatcaaccagaggtttattgctttgtcccttaatctttttgtcttattcacttcaagttgttgttggcatattaattcattctatcttttgttactgcataactcgcagcttaaattggcaacaccaactttgtaaaaatccaaggccaaatccagatatcaagactctttttgtggatcactcttgtggccctccaaatggcgcacgagctccatctcctgtgaacaatccactgcttggagggataccaaaggctggaggatttcctcctttaggcgcacacggggtaatttagtttctatcatttttatttatgttttcctgaggccaagtgtttgattgtctctatgtttccagccatttcaaccaacggcgtcacctgttccaacacctcttgctggttggatgtctagtccatcctctgtcccacatccagctgtctcagcaggagccattgcacttggtggtccatcaatcccaggtactacttgcttatcaaatgtgtatgtttcttcagacacactttgtgtgatctatgcaatttgcttacaatggaactcctttcctatctttggtatagcggcgttgaagcacccgagaactcctccaactaatgcttctttagactacccgtcagcagattctgaacatgtctcaaaaagaacaagaccaatgggaatctctgacgaggtgaatctaggcgtgaacatgttaccgatgtcattttcagggcaggcccatggtcattctccggctttcaaagcacctgacgacttgcccaagacagttgcgagaactttgagtcagggctcatctcccatgagcatggatttccatccaattaaacagaccctgcttctaggtgtgtttcttgctctctgtatgtgcttctgtgttatcataataataataatcatcagcaatcttctcaatccgtctgaattgctg

SEQ ID NO: 1018 - DNA, 2163 bp, Arabidopsis thaliana landsberg
  unsure (1)..(2163): unsure at all n locations
aataattggtttaaacaaaaaaaatgtctcattttcttttctccgaagtctctattagaaaacgaagataataaatgtataaaatggatggtaaatgtaaatttttcaatgaactgcaggaaatatgcctgaataattaaaaaaaaaactctggacctacttattggccgtattacccgccaatacagttgaatagggtacactattttttcgttttatatagactttacattcttgtagatggttattttcttgtaaaaaaaatatatagcagaaaagaacaaaaacacgtgaactcaacactctgctttggtctctgggtttatcaaatggttcaataatacaataaacatcgactagtcaggtggattttctttggaacatggacacatcgtaacgcgtattaattatgcttttaaaggtccaatataatgtaagcgtcgaactatgaattatagacttttaaggaaataaaataataataatagactttttagtttgtaattttttaataagccattcaaatcgtgcgataaactaataaatacttataagttaatttgttcaaaacattttaaatctatctaactcctaatcaacattggacataaatatcacaaagccttatccttatttgattaacaaaagttcaagttatcataagattctagtacaggaggagcgattcgaacacatgtcgaacaaacaaaaggacccacatgacatccatcagttttaggcttagctttaccaaatccaaacaacgtgaaaatccttacttttgtctgaagctaaacaaagatggaatcaaaacatggtattaataataataatcgacaaatatcccaatctacgcaatgcaatgcatatagaaatttaaaaatcccgtgaccaaaacataagaatctgccacctgaaacataactgcattctaatataaatgtttttatctttcctctttgtgtttgttcattcaattcattctaatggatgatagctatgtgagcaaataaatcccatatctaatctactattcaagtttccaacactatcacaataatttagaaaagtatataggggtatttacgtaattaacaaaataaaaaaaagacagtgcctccagctcacaaaaacacaacttcttctgcttcctttctctgtacacactagggaaaccacagttctcttctatcctctctttctccgcttctgtagcaatgtcaatgtggtaccctctaccttcttcttcttcctccactcactaaccaaatccagaatcaacaataatagaaaaagccctaactttctccgtcgatggctttcttcttctactttttctgcctcttgactctttcttctccttcttcttctgcttcctcttcaaactccttgacttacatcgtccacgtcgaccacgaagctaaaccctcaatcttccccactcattttcattggtacacttcctctcttgcctcactcacctcttctcctccctccattatccacacatnnnnnnnnnnnnnnnnnnnnttctccgctagactcacttcacaagacgctagtcaactcttagaccatcctcatgtcatctctgttatcccggaacaagtccgtcacttgcacaccactcgttcccctgagtttcttggtcttaggtccaccgacaaagcgggtctactcgaagagtctgatttcgggtcggatctagttatcggagttatcgatactggtgtttggcccgaaagacctagctttgatgaccgtggtcttggtcctgttcccattaaatggaaaggccaatgtatcgcttcccaagattttccggagtctgcttgtaaccgtaaactcgtcggagctagattcttctgcggtgggtatgaagcaaccaacgggaaaatgaatgaaacgactgagtttcgctctccgcgtgactccgatggacatgggactcacacagcttcaatctccgccggccgttacgtttttccggcgtcaactctcggctacgctcacggcgtcgctgctgggatggctccaaaagctagactcgccgcttacaaagtctgttggaactccggttgttacgactccgatatcttagccgctttcgacaccgccgttgccgacggtgtcgatgtcatctctctctccgtcggaggcgtc

SEQ ID NO: 1019 - DNA, 1449 bp, Arabidopsis thaliana landsberg
agacgcctatttgcgtcgattaggaatctacccctgaattagtatcgttctgttatagccatttttttacagactttgggaatcgtaatatgatggaagttgtagttatctgaaaggtttaaaataactagagtggagggtaccaacagcgatactgatatccacgtagtctctgtaaatgatatcatctccatcgataactgcatttactacaggtgttctattatactgattgctgttctatatatccacaatattatgtccacaatataatgtccaataaatccaaaaaaaaatgtaaaattgacgagtgttgttgagtgtccacaatttcatacttgtgtactgttgagtgtccaatatgatcaatcaattagttaaccggttatcttgcttaggtttgtagcggtatctaaaaaaaacgtatccactcagtgcataaagagacggttgagattttcacacaaaggaaggagttacttgacgattacagacggttgtaatgcagtcattatttcgatgtccacgaaggtaccatgaaaaaatatccttaaaaatcgtaacacgtttacgatactcaattacgctattaggtaattaacgtgaatgctctgttttgttttggttagggattgatggatgagttttgtatggtaatttgtggagattgggtttattcttcgaatggagagtggaaactggagatttgtaacaaactgttttctagggtttttccaatttcttaaggaatgacattagcagcgttgaaggcagcgatttcggaggagtttggaatgaatgatgtaaatcttttgctgagatacgttttgccggataagtagatgtttacaactaaggaaaagactcctccagttatagttacaagcgaggttggccttctatactatctaagtccacttagagaaaacacgggtctaaatttgtttgtgaagtttgaggaaagggatgaaacatcaaaacttgtggctgcgagtgatgaacatttacagagttttgatgcacgcgaagatagtagcacgaaacgaaagcgtcagtgtagttttgagtcacaaagttttccaaaagtgcgtgtcaaagttggtcgcgatatattgtctgcgggtttagaaacccctaaagttttgttgactcctggtgatgacgaattcattgaggtatttgaacaagcagaaggaaacctaggaagtaaaagtggtgacaaagttgctcgcgatatatcatctcctggttcaaaaaatacaaaagttttgttgactcctgttactacaagaaaacaggtaattagcgagaacacaaaaggtagcttagtagtcgctaaatctaataacacgactatttggcgactaaaacacccacgtccgtaatccatgcgtcgctatattaattagtaaacaaatcgtgcgactgttaggcgacatggttgcccct

SEQ ID NO: 1020 - DNA, 865 bp, Arabidopsis thaliana landsberg
aaaccgctctgttttgagatttccagggatacttattggcttgagtacttctgtaatgtattaaaaattagttcggtaaggcttaatgattactgattctggacattagccattagtgatgtcgagtttattcccgtgattcgtaaacttgttattgctttaggtcttcccattaacgagcatacactagagaccagtttccttaatttctgttgctgatttggttgttgatgtgttgtgtgcattgctgtacaacagtagaagatatgttgctttcttctttagtcgttgccattctttgggaacagtagaagagatggatttatctgagttggcagagtgattttagaattgattctggttagaatgtagattgccttagccatagaacgtaagcgttatattctttctgtttcaggtaggagatagggaatttcgacgcagcacctgattgattctccagagatcaaaactaagtccacactaaggaccatatggtccaatcagttccagatacttggagcattgccttgtgttgtgagcataaaacggcaaaacccatgagcattgccttgtgttgtgagcataaaacggcaaaacccatgaaagaaggttgatagcattagagaaaacagagcattgcagctcacaccgtccacccatgaactgatgatactttcactattttttccggattgattgcatcttagaatcatagtcctgtttccattggccttaattagctgtttaagtactaagaaaagtcttgttaccttgtgatctagttaattagctgtttaagtactaaggaaagttttgtaaaactacttaagaatcataatcctatttccatcggcctgagtga

SEQ ID NO: 1021 - DNA, 4987 bp, Arabidopsis thaliana landsberg
tgaacgcgaagatgccttagagttgaacaacagctcagagtggggttatgattcagaaattatagaacctattagaggctacatatccaatggaaaagtgccctcggatatgtgggaagctcggaagctgaaagctcaggctgcacatttcgttctggtcaaggagaaactcttcaagtggcagttatctggacctttaatgaaaaagaagcaccccgcaaagtcatgaaagaagttcacggaagctcgtctggaaatcattttggaggaagagccctagccatcaagataaaacgtctcggttatttctggccaacgatgatcaaggattactaaaagttctccaaacgatgcgaaaaatgccaaaggcacgcgccaacgatccatcaaccggccgagctcctgtcatcaatcgcgtcaccatatccattcatacgttggtcgatggacataatcggccctatgcacgcctcgaaacagaaaaattagttctcgtcttaactgattacttctctaaatggatagaagctttgtgtggaagcacatcctatgtcgccacgggatcccttacgagatcgttatagacaactgctcgcaattcatattgacccgcttccaaggtttttacgataagtggggaatccgtcttagcaagtcaacaccacgatatccccaagggaacggtcaatccgaggctgcaaataagacgatcctcgacggcttaagaagcggctcgccgctaagaagtgttcgtgggccgacgaactcgaaggtttactatggtcgcatcgaacgatgcctcgtcgagccattggagaaaccccatttgcattagtctacggattggaatgtgtgattccagccatggtacgaatacaaaattaccagaatgaaacggctcggtactacaaccctaacgttcggcagcgaagatttcacgaagagatcgggttctccgcaaagtattttaaaacacagccgagccaaacggtggtaagctcggtgcaaactgggaagggccatacttaatctcgaaagttgtccgacccaacgtctacgaactcgcctatttaagaggcaaagcaattccacgaggtggcttgatccctgaaaagggtacataggcagctcgtcttcggacgagttcagctaccgtccccattaaaaaaggggggagtggatccgtatatcgatacttccacttttatctgtcctgtaagttttaacttcgacataaataaaagtcctttttacactttttctacgatgagcgacagctcggagtatcctttacacctactcggttacagcgcgctatacaagtattcgagataaagtctatcagactatttctgagcagaattctttatcttgagaaaacctggttatgctttaacaccggtaccccagctcgttttttaacattggatagaaagtgaatcggatcgggtcgcaaacaaaaagtttcactcaaaagcccagctctctcacgcttgcccgagtaaccaggacacttcgagtttaatgaataacccaacctctctgaaataagtgggtgctcgtaataggaaatcagaacactaaaaactctgaacggaaacatgtagataaagccgtctaggcataaaggattttacaaaaattggataaggccatccaggcatagagtacgaaaagcaataataacagtcctacaacaaaaatctattcttgctgctcggacggaagatcaccaacagcagacaagtacgacccagactgatgggtgattcccaccacatccgcgagagcctcgaccgacctatgacctccaagacttagaggtgccacttcgggagtcggggccttgagcgtttccttcacttcagagatgagacgagtaaggttcacctatgcgtcggcaaaatcctcgagccactcctagacttgtttcttctcggtcgctaaagatccactttcttcaagcgccttgatcagttatgcattagcccgcacttgggacaaatacataaaccggttgttagcttcctcaaagagcgacatcatttcctcggccaccttaaacctggcaatgaaggcctccaaagtttctcgcctcgttgtctgcgtagcccgagccacctcgctgtctctaagccccctagcctcagcgagcagtcgcctgcaacgaacaacctctgagtccatcttgagattgcgctcagccatcttgatagcattctccttattgatgaaggcttctctctaagcctcttccctcgccattttcgccttagtggcctcggagatcgtcatatctctcagctgctcggcctctttcaccttcgcctcggcttcggccaatatgttaaccgcctccaggttattttgcattgtcgagtcataagactggaccattcgattcatcgaacctacaccctcaaacataaacaggaatccacgttcataatggctcggggaatgcgcttacccgcataaaatgggacgccgtctcggcgtactttctagattaaagcaaggtatctggaggcagaagcaggcgacccgcacactttccaaggagattcgccgaagcgaccttatcttcaaaaataggaggcttgtcctccttttgcgccgacttcttcttcttcttcctcttcttctccttggagtcatcaaatctgaggacgcttgcccgaggccttgtcgccgaccataagtgcaaccactgcctacatagctgcctcaaccggtgtctcagcctcagcaagtcccgatgccgcagccacagcaccctcgggaacaacctcttgaccctcagacgcctcaggattgacacccgacccctcagcagcacgcttctcttccgcgatgcgattctcctcggccgcacgtttctcctcggcggcgagcctcttcttttcataaacctcccggatagtaagtttgctagtctgcatgtcgacgaaaaattgggttcgatggtctgatgattccgagctggaagggcagaaaacgtcgtgaaatagtcgaagtgctcgctcaacccgttctcgggaaaaatgctttgtccaatggcacgtacgagccgataactcttgataacaccaaatgaggtcttcgggacacggctcgaggaatcgaattgggcaatctacgacgaaagaaaacacataagcgaaagtcataataatcatctcgggcacgagtaaaacaaccgtaaatatctaaactacccaaaagtccccattttgtcagaactttcccgacgaggtcgtcaaggacagcatcctccaaagccacgaggaagaagtagtcggtataagcgtcgtctttgcttgggaaatcgtcgataatctttctacccttagcaggagaaatataatatcggtccaccacggacttcgggactcgccagatttctagataattcctcaaatgggaaagcgtaacctcggtttcggtctcataaccgcgcaccagtatcccgatgagatgcctcaaagaccgagccgttatctgagagagagctatgttgtacgaggtcacgtactccaggattagcctcagaacaggcaaccacaaaaagcagagagaaaagaacccctcatataaggtataaaaactctctagaggattgtcggcgcgctcgtccgggctcggaacgcgaagagttaccccaatcgccaaaatcaaaccgagctcttaagttcgatagcgaccgctcggtgcataaagacgagccaggaggatttggcctcaccacctttttacttttcttctttttctttttcttctcggtctcctcgaaggccttccagtcaaacgctcacatgatattttccgtttcatccggaccgaagtagagatgctcctcgaccttaattggggggaagaacggcttgggcacatcttgccaattcgacgctccagcctcgttaacagccggaacgcgagtcatgcggacgagagacggctcagggtcttcaggtaagtctagatcccgagtgatgtcagtagtggcatcctcccgagccaaaaaggggaccgcctcttcggaagcattagaagatgatgctgtgttagtctcggaacccttagaggaagcccagaccatcctttgtttgtaaatcaggggaaggttgtcaagatgattcgagtcggcgagaagatcactagggccgaaagagaggcgttagaatgcgacaaactcatgctcggctcggaactgtctaacgaaataaagatcggaaaacagaaattctctaaccggagaaatcaaaaacaactaaaaagcggtggagatttaccggaaaagaaggaacttacaagaaaatcaagatcagagaagagagagaacaaacctcgaatttttcttcagaaacttcaagtgaacgacttcagaggaatagctcgatatatagaggtataaaggtgcgtcgggtccaaaagagttgaagaacgcgtcgaaggcgcgtgagctcgggaaagtacagcacgtccccatgaatctcgagaacaagcaagacgcttccacttctcaagaaaaaaggcggccacacgcaatggaagtttgactgtccgagaagctggaacgctaagagtcacgggtaagaagacgtacagtcggctcggttaccttatccttaaagctcgtcgtccttcttgtcaaagataacgagctgggggcaaactattggggtcggatttcaccccagtacccgagccaatcggacggataccgtcagcactccgggagctaagatcggcgctactccgattcaggtgttactccaggaaacacagcccaagccgggcgcgatgagacatcgagacccaggggaacacctcggtcaaacgatacttggctcgggtgttattctagaaaacacgcccgtgccgagcttaactatatctcaagaatcacttgggctcgagaataaaaggtgtgacaatcggtcaaagcctaaggtagaatatccacctgaggagaatacagcgcgaa

SEQ ID NO: 1022 - DNA, 2538 bp, Arabidopsis thaliana landsberg
gttgatttaaaattgtaaatttttacatcttctaaatatttaggtgtagaattaatttttggaatatcttatgacaattttctttctaaagaaaaccaatgtaaagagataaataatgacaaagttcctttttaaccttttctctaacacagtaagataattattttcactccatattaagaaaagacaattttgttttgtttatttggggtggaaaataagacatgtgtaaaggaggaaagaccattgtcccacatgcattccccaatctccaagtaattgtaattctagagtttttgtcttcttttttttcttttcttttttggggcaaaccattctagagtttttgtctactaccacatattgtaattaaaattagaatatgaatttgctataagtaaaaacctattaaggcatttagacaggaaatgttagacggctttaaatagtgggctttaagaagtctgttaaaatatattttaaaatcatagtttgggctttaccttagttacacacccgagtgacgaaattgacgatatgtccacataaatagaagacaaacgaagagataataataatacaagtacactactgtaacaggtttataaaccactagataaggcccacctaaataggcgggtctaagatacaaaaataaatatttatcgatagtatttgaattttgtatagataggcgggcataagatacaaaaataaatttttatcgatagtattcgaatttttctatgttatatttatactgatatatagaaaatattaggattttatggatattttagttttttttttgtgtattttgagatatattcaagcaaaactactcgtattgttttgggaatttttgaaaatttcaagtaatttaatagatttacacacaaaatttgatatttcagtatataaataaactcgaacccgaaccgaacccgacctgaaatcttaaaatgttctattttcacttattattacctgagttaaaattgttaaaataaaacataagtatagtaacacatcaaaggatgcatggcactccatcatacgatgagttaaaattcttagaataaaacataagtattcaaaattctattcttataagttcattaatattttgggtttggggattacgaaataaaacattatattacattgacaaatataattttatccaactaaactaatgttaaataaattatattactattttaaacttcaatggtctttttaattagtattattatccatactaaattattataaaaaaaattaatatgtgctacatttaaatgaccaataacacatgtaaaaacaaatttgttaattttccttttgttgaataaaagtaaaatttatatatatagagagagagacatgtaaattagaatatgtaattttgtttactattttagattttttattttttttaagagaacaaaaagttaaattttgaatgacacatgtaaacatctgatcgtttgacttgacacgtgtaacaattatatgagttagcaactttgaaatccatactttatataataagatatagctgtctttttaccaagatgagatttccttttatacctaattaagttttactttgactcatattattcaaaacatataacctatgtaactgagtcaacaaaacaaagaagcttgttagggaaacataatcaataaagtttggtattataaatacaataaagtactaagtggaaagagtccatattcaatatactttcatattgcaaggaaaacaaaaaaacaaaaacaacatgggtgctctagcagaacttgtagctctcattatcgttatgtgtgcaagtgtaacaatgtccctcgctcaaaaccccatggcttcaccaccaagtgttgagaacccaaatacaacagtggtgatacataacgctctttcaggttattggccaatggcataccattgtgcatcaaaagacgttgattttggactccgacgtatgctagctggtggatcgtgatcatttgaatttacacccagtgtttctggagatactaaattcatttgcacttttgcttggagactagtgtttcgttatttccgtatatacatacaagaaagagaccaagaatctgcaatgtttggatgcaaaagatgcgaatggaagatacgtgaagaaggaccttgcaaactgaacaaaaagactggaatgtttgatctttgtcctccttgggattctcaaaatatttgaattttttttaacattactgctctgtgtatctacctaaataaattaataaaataaaataaaacatttgatctttaaaatcgattttttggagccttttattcggtatataccgaagttaatatagaaaaaatcaagttaacacaattgcattttcttgaaacacagagaatttaagcataatgatcataaacatgttaccatttaccaaatgaaaatatcatgcttctttggctacttgagcaagaggatctacaccatttttagagcagaaatacactccaaaaaaagtaactca

SEQ ID NO: 1023 - DNA, 2491 bp, Arabidopsis thaliana landsberg
gcatgcctgaaggtcgactctagaggatcccctgatattgttctgcgtctgttgctgtcgtaagaaaaaaaagaagcatcaaatgccctattatgaaggaaacggctacgccaccggcaaaggtaaatacaaaacccatcaaacctagccgttgcctaacctagtttctactttagaacattttcttgtgcaccaagctaatcaataaactagcattttcttaagaaccttacttctaatcacattccacaatccatttgagatatgattgaaaaaccatgacagtttttgagtttcataatattccaaaatattgttacccaagaaacattatcatgattttctttcattttcttgttatccaagatacaaggtgaaaacaattctctgttttatcttaggtgatcaataccaacagcagcaatacaataaccagagcgatcacgtaatgaatctgtctcagcagtatcctggatccaacgggaataataactggatgaattcaccgcctccaccaccaccaggaagctggcaaccatcgccgcctccaccaccaccgccagtctcaggcggtatgaatggaaacagtagcgactttagctcaaactactcaggacctcatggtccgtcgctaccaccacctcacccttcagtggctctaggtttcaacaagagcacattcacctacgacgagctagccgctgcaactcaaggcttctcccaatcaagattgttaggtcaaggcgggttcggatatgttcacaagggaatacttcccaatgggaaagagattgcggtgaagagtctgaaagcgggaagcgggcaaggagagcgcgagtttcaggctgaggttgacatcattagccgagttcatcatcggtttcttgtgtctcttgttggatattgtattgcaggaggacagaggatgttggtttatgagttcttacctaatgacacacttgagttccatctccatggtaaaagtggcaaggttcttgactggcctacaagactcaagattgctttgggatcagctaaaggacttgcttacttacatgaagactgtgagtcaaaacaaaaatctaaattattaattcaatctttttgagtggtttgattaggttgtgatcaaaatttgttttcttgactttgttgacttaggtcatccgagaatcattcatagagacattaaagcttcaaacattcttcttgatgaatcctttgaggctaaggtacgttcttataatttttaaactcataatgttttcagattcgttggtattattttttctctaactggactggctcaaatctacaggttgcagacttcgggttagcgaagctatctcaagacaatgttacgcatgtctccactcgtatcatgggaactttcgggtactaaagactgcgaaaccagctgatgaaaaatgttcctgcaaatttcattagctcttacttctatatcaaaaacattcttgttttataatctcatccgaaaatctgtttctctaaagaatctcaaattgtgaatcaaacgacaggtacttggctccagagtatgcgtcaagcgggaaactgacagaccgatcagatgttttctcctttggagtgatgcttcttgagctagttaccggacgcagacctgttgatctcactggtgaaatggaagacagtttggtcgattgggtccgtaatcatatggttaaatatattcatcacattaatggttcctctgttagaatcttgtgatctaatgcaaacttggttactttttttacacaggcaagacccatatgcttaaacgcagctcaggatggagattacagtgaactagttgatccacgtctcgaaaaccaatacgagcctcatgagatggcacaaatggttgcttgtgccgctgcagccgtcaggcactcagctagacgcaggcctaagatgagccaggcaagttttacttttgaacatgaccatcttttaaacatatactttacaccaagagaatgatcactatggtccaatgttaaaacagattgttcgggctctggagggagatgcaacgctagacgatctaagcgaaggagggaaagcgggacaaagctcattcctcgggaggggttcaagctcggactatgactcaagcacttacagtgcggatatgaagaagttcaggaaagtggcattggatagtcatgagtacggtgcaagcagcgagtacgggaacacgagcgaatacgggcttgacccgtcttcctcgagcagcgaggagattcgtagaggaggagctaacaacaacaaaaccactcctagccgagaccattgatttagcttgttagtttcaaaacaatcttccttgctgtgtttttgtgttttgtttcccctatgaaatttttttttcaactcttttattctttttgtcaaaattggatttgtgtttgtgtctgtgaaaaaaaaatcaaaacttttgattgtgattaattataatattaatgct

SEQ ID NO: 1024 - DNA, 843 bp, Arabidopsis thaliana landsberg
tgaaccagtttcctcgaacttgatacatctcaagacgatcccaacgatcgatctgggagacggagttttcgaggacgagcttaagcacagaacgcgattgaaaagattaagaagcagcagaaagttggggtttcttccaggtgatcaaccatggagtttcgctcgaacttcttgagaagatgaaagatggagttcgtgggtttcacgagcaatcccctgaagtgaggaaagatttctacagtcgcgatttaactagaaagtttcagtattcaagtaatttcgatctctatagttctccagctgcaaattggagagacacagttgcttgtaccatggatccagatccccctaatccacaagatattccagagatttgtaggtatgagtccattccttatacttgacttgatgtgtaatctctattcatatatggtgaattgtttcagggatgtcaccatagaatattcagagcaagtgatgaatttgggtgaatttctctttacgcttctatcagaagctctagggttgaaccctaatcacctcaatgacatggattgttctaagggtttgatcatgctttgccattactacccaccatgtccagagcctgacctaactttaggcacaagtcagcacgccgacaatacttttcttaccgttcttcttccagatcagatcgaagggcttcaggttcttcgtgaagggtactggttcaacgttcctcatgttccaggagctctaatcatcaacatcggagatcttgtacaggcaagtttgcacaaccaatacatttttttgctctgttttgcagaagtctaaatcttcctcttggtgctaacattt

SEQ ID NO: 1025 - DNA, 3051 bp, Arabidopsis thaliana landsberg
tcctctacttataattcaattttctctcgttaatgtatctgatgcttttgtatacacaagttccattcgataaaatagttttttttccaggtaagtttcatgatgattatgtgttctctcttttatatttcaattgtaggatatatgtaattgttttgtgtcatgggattgatttgtgttaatgcgtttaggaacattcatgggattgatttgtgtcatgtcgagagattgagtttgcctaaattagctcatgattttttgctgcatgtactctttacattacatagttctctaacttctgtctgtgatgaaacgaatgaatcccatcattcttctgtctttagtttaacgaaagagatacaaaatatagtgatgtaaccactatgttagtagctattttgtcttatatttttatctaagctcatgcagcttaatcttatatggtgatgacaaatttaacaattggagacaaagttgtactttatttccagccatgtggataacctcccattgaggatggtctaacatcctcgtgtttcatactaatcttttttttgttatatttagcttatccaattcgcttgttctttatcatccgttcaaccatttataccgtatacgactagtactccaccaatttatttcataattgcaaatgaaaactcgagtcaaacccaagtccaaaagggcaattcgaacttggttattgtatccaaattttgaagtcaaagccatgcatcaacttggttacagactgtatccaaattttgtttgtcacggaacgtatctttcttctttgtcacggtgtatttaggcgtgggttttgcactttttgtggttttctttctttggagaagttcctttaatttgacatatggaatagtggaaaaaaaataaaaggacaaaaacacttaaatttcccgaacaaggacaaaaccttaatagttccaaaattattaaatttcacagaaagttagaaacaaccaaaggtatccgtagaggttaactttaaaggaaaataaagcaagtggtccactcccacgtcgatagtcaacttattgctcttttcgacataatttacctccttattaaatctccttggactagtataactttctaagtatgcttatatctttcatttaaaggggaaaatttgaaatctgttaattaagcagacactagattccagattaattattcggcacaagacaagcaaaatagataggcacatgtgccttggaagataaagatatactgggaacgtgatcatgatgtggtgccacggaaacctatatattttgttgcacgtatccctaaatgattaggtccattcggcatatctggcattgtagattttctgcagtacgctctacttgtagatgaacattatcttatattaggtttttatgaattttacacataaatggaaatcccgggctcatggcaggtttggatactattcacacgtgacgtaatttgtggacaaccaccaaggccaagaagttattagtttggtctcttttttcttctcttctttctctataaaatggcttatttcaaaggcaaaccaaaactcacatttgttcattacaaaaagaggaaactgacaactgatttcgcgcaagagaaagaaaaatgggatctcagatcattcataactcacaaaaaccacatgtagtttgtgttccatatccggctcaaggccacatcaaccctatgatgagagtggctaaactcttccacgccagaggcttctacgtcaccttcgtcaacaccgtctacaaccacaatcgtttccttcgttctcgtgggtccaatgccctagatggacttccttcgttccgatttgagtccattgctgacggtctaccagagacagacatggatgccacgcaggacatcacagctctttgcgagtccaccatgaagaactgtctcgctccattcagagagcttctccagcggatcaacgcaagggatgatgttcctcctgtgagctgtatcgtatccgacggttgtatgagcttcacacttgatgctgcggaggagctcggtgtcccggaggttcttttttggacaactagtgcttgtggcttcttggcttacctttactactatcgcttcatcgagaagggattatcaccaataaaaggtacgtttgtattattaattttggattgatgatttaatccgtgtttttaaactgatttacgtgttataatattaagtttagcgtagaaacaagaaaccatgagataatcaatgcgaatcgtatattttacgtgtatatacacacgaacaagattagtcaaggtgaacaagttgttggcttttatctatataatttcgtaactgggatgctactgtgctagttaaagggttttggacttaccaaaaaaatcccaactagagaccccaactaataaattatacaccaaaaaagaggtccacaatagggacaaataataaatttgtcaaaaaaaaaaaagtatccctaaatttgtattttctcaaaaagaaaaatataatcatttccatacttttgtgattgtccaaacgaaatccgatagtaataaaatcaaccataagacatggtataatcatcatacccactatacttgtcaaacaaattatgttgtaaatatcctcaccacatttaatttaaacacttatagcttcatgaaaataatcaaaaataatcctgagtttcattctattagcataaatccaatatgcgacatattaagtaatatggtggctgtaactagaatagtaggataacttgcaaaataaaataaaatcaaactggataaattaaaataaaatttaaattccaaaagagagcacatacttggaaaagtaaactctatgcaattagccattccatatatcattgtatttagaccactttttgtctgacatctttgacctataataaccttttgctggctctgatcctgtatacagtatcaatgttaatgcatccaaatttgcatctttaattgtagttaagaaatcttgagatgatatcgagttctgatcaataatatg

SEQ ID NO: 1026 - DNA, 1866 bp, Arabidopsis thaliana landsberg
tatgctatttcttaatgtggaaggtaacaagattaaggacgcatttccattttggttggggtctctacaatacttaaagattcttgtgttaagatcaaatgcattctacggtccagtctataactcctctgcctatttagggtttccaagtatgaggatcattgacatttccaataacagctttgttggatcattgccacaagactattttgccaattggtctgaaatgtcaaatgtatggattaaagaagggtacatggagtccgattacatggtcactttctccatgtatgattcgatggatttggtgtataagggagtaaatactgattttgttcggatatttcaagacttcaaagccattgatttttctggaaaccgattctctggagatatccctggatccattggtctattgagcgaactacgacttttgaacttgtcaggcaatgcattcacaggcaatatcccaccatccttggcaaatattacaaagctcgagacattagacctatcacgaaacaacttgtcaggtgaaattcctcaaggtctagggaatctctcatctctgtccaacatcaatttctcgtacaatcatctacaaggattggtgccaaagagcacacagtttggaactcaaagttgttattcattcgtgggtaatcctggactaaatggcctcgaggaaatttgtcgagaaagccatcatgttcccgttcctactacatctcagcaacccaaggaatctttgtccgaaccagaagggccagtgttgaattggatagcagccgcgatagcatttggacctggtgtgttttgtggattggttatcggacatatcttcacttcatacaaacatgagtggttcatagctcgtaaagcccaactccctcgcagtttcgtcaagtttgtctccggtaactagttcgccacgtgtttatccttgtaattttccattttcgtggttgtcttataagcatcatgtcaatgttcaaagctgtaatgttctcaccattttatgtaatgtgatccatgttcgtatggctgtatatgtatctctgttataaatctttaacaaagagtcttgaaaatcatgttttatacaatatcccatagccatcctttttatctttgtgaaagaagataaaccttgacgagtggctttgctctttctcacctcatgatgacctatttagttataaacccaattctcacggcattacaagtttttgtgttattcttatagattgtgacgtgtggattttagctgctttattttcttattctgttttcgtctgttcaattttgtataatcatgaagaaatcatatctcccgcgtcatagtcattttaaaggtttttatatacagagacacagctaaaaatctacaaaaacttttcaacactaaagctcgtcgtcacaatctccaatcccaacgagagatgagagagttgagatccatagctctaatcctcgcttgatctcttttttcctaatttcttcgatcttacgaacagctttctttgacatacccagtttcatcagaatggttccaagtgatttgaacgttgagtcatccggtggaattccagatgaaaccatctctttgaatgtctcaacagcttctttgaatctcccgtctaaagcgaataagccgagaacgctgttgtaactcaacggatcagttagaatcttcatctctctcatctgttttgctatctgagtcgcttcttcaaacctaccattcttcttgtacatacataacatcatcgcaaaggtaaactcgtttgcttctcctctctggttcatgctttcgaatatagcttccgcttttctcaccatcgatctttgctattacaggttgat

SEQ ID NO: 1027 - DNA, 2976 bp, Arabidopsis thaliana landsberg
  unsure (1)..(2976): unsure at all n locations
ctcttcttctggggcagggaatgttatacatgcaaataaaaagaagagtaacagaagaaagggttagatcaagattcaaactctaccaaatctcgcttagactagtcgactaaagttcaagcaatctaactgcttagaatgtctagatctaacaattcattcgtgttataatgtgtgctatgatgagaatctgagagaaacgtttggtagttgttgtatcaacctgatagaactatagccgttaccctcttggtgtatataatacaattggttgatatcaatattaacaatcgtagttacttgacggtaatgccatcactatgcataccgttggaggtttcataagactttaccccatcttatggctttatcttctaatttcctcttttcgtttataatcaaattcaattatttttcatgtcactagaccggttagttatagttttacatttgaagcactaatttcaagagtcaatgatacttatgataaacaaattctatgggtttgaaagttaacccaagttaaatgagtgaaacccatattgtaccaatttggaattagaagtccattatctctttcagatggtgtctactaacacacaagatcacaagaagaaggtgcaagctataaagagagtagacaccatctgaaagaaagacataattggactctcacataaaacacttggcttgaagcgaaaaatgcttttgttttccattcgttgttctatttgtcattggtggtgctatgttatgttcgtgttgatctacgcatccgggggccacatgaccatgggcctcgtttgctaccacgttgcttcattgccacttgtaagtcgtaagtattatcatgcggtacaacccttcaactatgtcttctttttttttttttctttttttctcttctaacaacaacccttcaaatatgtcatgtagaattattgggtatccgtattatgttcatgcaatttttaataatttgtaactacgattaaaaaatatatattttatgattatgcaatcacataattatgcgctatttttttatttaaaaacaaaataaaataaaattatcctatgttacatattttcacgctttgtgttggattactctacgcattaaactcttaaactaattatttgtgcatgaacaaaaaaattgtgttcttaaactaagttaaaggaaacatatatgagagggtccttttgatacatctgtaccacctcccctggaggataaggcttgtaagtggaatgcacttcatcgtcacatagttggggcaaagatatccagggaataaacgcattgagtaagttttggtccatgtctcttcttgtgtatcaatgtccatatggctaatttccaatcagaaagttcagcactgccactaaccatggctagaagatcttcaaggttgactagcggccaggtgtaggtaatgcgcgcgcggtcttgggacacatcatggaactgttcagtgtgaagatccaaagatagaatcttgtaaccattaagtacttcgaaccagtagatggaaccattcacaaagaccgaatgatgtctggcttcgacatagtaaggaggcggactcggcattgtccgccattcaccaatgtttaaatcgagaagttgtgcttgatctcggtttagttggatgagccacgaatgctaggcaatgcgtagggcattgaatatcatttggagtgaaggttttgaatccctcaggcagcttgtgaaagagcttccgtttagcgaagttatataaccaagacattcatgttgcttttcctttatgggctatgtatatcacggtttttccagtttcccggtttttcaaaatcgttatcattgcatctcgacaccgataagattcatagcttaaagttttgtcgatgcactgaagtttgagttgtttttgctttcatgtttactttggacctttaaaactggttttgcaatctgtaaaatctgtaaacctacactgattaatgatatttacattcttagaaaagaaaaatgaatcatcagcccatgtgaacatatcgaacaatgtagcactttctcaaagccaacacaaccgcccgcttagcttacattagatagatcaggcagcctttcatatgtaaagataagtggcggagaaaccagccatcaactattgattagtcaacatcttatcttctatcattagctatttacgatttaatatctacttgacatgtaaaagactaactcttcaccagttcactataaatagaggttgatattgtgcttatatcttcacactacacacaaatacatacaaacatacattaattggaaactgaaagtaatataatcatggctaagtctgctgccatcatcactttcctcttcgctgctcttgttctctttgctgcttttggtgagtaatgatcttataatattatatgcatgaaaaaataaattctgaattttcctctttagatttattggtaattaacaagatatttatatatgaatgcagaagcaccgataatggtggaagcacagaagttgtgcgagaagccaagtggtacttggtcaggagtttgcggaaacagcaatgcgtgcaagaatcagtgcattaaccttgagggggcaaaacatggatcttgcaactatgtcttcccagctcacaagtgtatctgttacttcccatgttaagctaccaatgactaccaattatacttggtgcttcatcgtgtgtattttacataaaataagtctttgtcattctatgagtgactttattatgacatgcatgtttatgttttagtgtttcgtttgctttgttgttgttttctttttttcgttttctttggttttataataaaaataaagaattatgtacgaagttttttcttcttctatcaatatttgncacgttagatcattaggtgaaactaaaccccaatttattggttgatcagactaccaaattcaagcttgacaaa

SEQ ID NO: 1028 - DNA, 1277 bp, Arabidopsis thaliana landsberg
  unsure (1)..(1277): unsure at all n locations
acttcagcttgttcttgttgtttattctcaaattctttctctttcacttgaaccacttcatccaaaggggccagtttattttctggatccacttcatcagcttgttcttgttggttattgtttccatcagaattaatgatttcctaaattgtaggattttcaggttttttcatgtacctaagaagagaattagcctctgatcttaccaactcttctcgtctcttttgcaattttcttttatcacatccatgagnnnnnnnnnnnnnnnnnnnnnnnggcatcgttcaaagtctcaactcaacgctctaacgtacgtcggtcgcttgcttcttcacggagatggaattaatcagatttttaatggaggaaacctagaataagagaattggttgatgggctttagaagtcttgggttgaaaatcagattttttcttctcaactctcttttaattaagcctcattggactttaaaatttttgggccctaagccaccgcttatatcgcttacgtcacgggccggccctgcatgattgtctcaatctatttctcatatggttggttggttggtaatttcaaaatttctgatgataacttgatttgtttgataattgccaggttttagcttgttatcaaaattgtgtctatgaattggctaatctaataaattacttgggttctgtttcttttttgtttacctttttgattattgatgatcatatttggttttgtttttcatcgattttgttttcatcatgtagtcttttcaatttgttccttttttgcagtcgactctgtcagctgtaaccaaaattgaaatcaaaactaaggttcatgatcacttattctttttgatccttttggaattttggttaatatgtggtgagattcatgtaaattagttttttttgttcttgttgttgttgtgtagtgaaagctagtacagatgatgtgttttatgagctttaaaaccctagagagcagatccaagcttatgtgtttaatggtaacttgttgcttctttcttgatatttttgttgttgttgaagaattagctctgtttacgattcttgatttgttcttgtatgttttttttttttaaacatagtggttagagctttggtgccaatgatgacgctagatgctcttttgaacaaaagtgagaagttgctaagtctgttcttgagtaatttgagaaggtaccccccgttgttcattcgaaatctcgttctaatagaaaatcttttgaaagaatcttgatattttatagtgattaaaca

SEQ ID NO: 1029 - DNA, 1551 bp, Arabidopsis thaliana landsberg
  unsure (1)..(1551): unsure at all n locations
aggggtagtcgatcataatttataaggaattttgatattttaatcaaatcattaaaaataaataaatcaaggnnnnnnnnnnnnnnnnnnnnngtttttttattattttgttaattaggcttttataagataattttgtaaaatttttcaaacaatatttttatttttataatactttttacaaaaaatttatgactttattttgttaagaaaaatgtagaaaatcatgaaccaatagcataataatttaattcattataattagagatttttttgttttagttgaataacacaaaacttttactgattttataaaagtatgaatccaataactccagatttataaaagttttagattacttctaacaaatctaaaatgaataacacaaaactttaacacattttataaaatcttgattgaataacaacatattctacataacattttaaatcactaagactcttttgaaatcataaaccaataatggcccctttgagaggagacagagttatatcaatcaatattaatatcctactaaattttatttaactttttttttcactagaaattggatttcatttattaagatttttcattttaatattagtttgtagtattatatttgagttctctaattctaatttaaaatatattttctactatttaaaaattattctgatttaatttaatattagataaatgtttgctctcatttttattttctatcttatattttaattaagtttaaatgaaatttatagtactatttataaaaatttagaattgttgtccataacttttttttaacaattttttgtcaattgcccaaatttaattatgggcccataaaatgtaggcccaattcaattaaacctacctattggttctcctataagttgcttctctcaactttctcgcaaaaccctaaaagctgagccgcgccgagagcattttatatcttcaatcatcttacgcaggctgttgtagcagcagtgtctatcggagacgatgaaggtggctccatctttttcttctcatcaattctgttctcgtttatctctttgttatttcgtttgattcaatcgattttggtttgtgtcgcagttcaacgtcgccaatccgaccaccgggtgtcaaaagaaactcgagatcgatgacgatcaaaaactgtaagatctttgctttaaatcacattttcttcatggatttgtttacatttggcttattgagtgtagagtgtgaacaatctgctatgaagttcgtaaaattctttgaatccaaacctttgaatcgtaggatagttactatttcacactgctaggatctgtttatagctgatgcattactggaatctatgatgtttactgcgttggtctgatatataaccagttctgaatctgaaaatcaacattgtcgattttggtaaagatattgagtttcatttctgttgttttgatgcagccgcgccttttttacaagaggctctctcatgaagttagcggagatgctcttgcgaggtgaaattttttttctggatcagtgttttttct

SEQ ID NO: 1030 - DNA, 697 bp, Arabidopsis thaliana landsberg
agctccgagcagctctctttccgccacgggctttgctgctggctgccttttctgacgcttcttccccactctgctcatcatcactttttccactctcgaagctttcagctttgtatgtcgactcttcctcctcaactgctctcactgaatcttctttgtcccttactgctctcagtttcgccttctttgcatttaaaacagaaaggaactttgcataagttgcattctcaaactctgttttttcatcgcatagtttttcaccttgcgcgagacatctctcagcttcacttttcatcttctcaaacgatctcgtcttgttcacaacttcttcacttacccttatgtcagcctccataagaaaatccaaaatcctaacagcgatcttcttgctatcatctgatggtttacatttccacctccactcaagtttagtcccttccttctcaaacgtccaagagagccgtttagatccctcaatagcatcggagaaaccatagaccgaattaggctgctgaaaccctaagtattgctcggcgagctctaaatactcagatacaggctggtcccattgctgctctctccgctacctcctgctccgtcgcattgcaagtccaagtgaaggagccatcggtgacggagatatcgaaacgagagtgataccatgttcctttgacgaaaattggatcggcgccggaga

SEQ ID NO: 1031 - DNA, 4812 bp, Arabidopsis thaliana landsberg
  unsure (1)..(4812): unsure at all n locations
tgagttcaacaagcaatgcatagtatgataattaaaagtcaaattattgttcaaattactagggaatagcttcagatcacaacaagtttcgactaaggaagatcaagtttatgcattcgaaagatggtgcggttttacttcaagttcactcggttaagcattagacaactaacaacaagggcattgacactatctagtgaacattgcaaatttacaaggctatgatcatcattatcccctatgcaagtgcatgatgcaacaacctatatgataacacactaaaagtagccttaaaatgcaaatgcaaactacatgacactctattttcttagaatcatttttgaaaaaaattcaaatttttatgggttttttatgcctttgatgatgcaaaaatttgaataagaaaacaagaaacaatgttagatacatcctgaactctcccccaaacttaaattacacagtcccttgtgtaataaaaatttgaaagagatttcaagagaaaataaccacacaaagcaaaaataaaagaaaagcaataatataaacaatggaatggagtgataccttgggttttagacaaagagattctggacaaactcgtccagacggtcctgagtgtattcaggttcataggctgaagtggtggtgtggtactcggttgaccggtcgagcatgtagcccgagtatagctcctcgcggtttggctttgcattcagaaccaactggttcacaggaccagctgggagagtgttggctcggcgatctgagaaggttgagctccttccacgctcataagatgagtctcttggcggatcgaaacgtacattcattcgtgccgccacactcatcgagttgcttctcctgaactcagttggaggtggtggagatctctgcctactttggagctcctgaatctaaagagccataacgttcatcgccctcttcatctttctcacatttttacttaacccctcaatgagctttctttggaacttcccaagaccttgaagcattcccaacttcttgtgcacttgccctggatctcgctcttggtcggacgcagcatagtcttcaaagaagtacaactcggcttcagcttcaaacgagtcctcttgctcattaacctgctcagcctggctatactcggcctgctggtatgtactcggccgagtataacccatctactcgaagctggccggatcaatctctgcttcttcctgcgaattattcctcatgcttggctctggttgatgcacttcaggaacatcaactaatatggatcgagggtggttcgaaattgatgttgttccctatgcggactatggtgtggcttgtgcatggcagtgggagcttgcaaggtcccaagtttgggtgcttaaacttaaacatgaaaagatcaattggaactgacctatccaagaactccttccttctaaggtactcaatatcaatgtagttaggagtaacgtcgggaacatcaagcttcactctagctgctactaaaattggtgtaatgactccgccaacgcagagggtacctccaaggccggattgatgaatcctagtagcatactctctatagctcattaggtgatcaatgaaaactacaaagaatgaagtgtctcacctatctcccaccatctcaagtcctgactttgtgtacccaagaatgaagcacatagaaagatcaagcatccctaactcattctcattgatatggctggttgtcttcgtggggaagaatgtgtttgctatgcaaaggtgaaggtaacacagcacatgacttctaattgcgtaactcttcgacctagctgaggtatagggagatggaccagctattgtcaaccacaaatcaaggagttcatccttgttaaaattttggcggattccaagcttggtagggaacttgaatatagcatcaagttgtcttgtggtgagagagtggtggtttcccttcaccatgaaactgatagaccctaaccctccagcttctttctccctctcctcggcatgaaagtgaagcttcaatgtagcaaggaattagcagctttcctttttgtaagcttcaaacttgtaggttaagaaggtctctagcttagccatctccataagataatcaacatctctgcatatccctagtgccttcatggttgacctgtcaggatatcttgtgccctcaaacttgagctccattaggtattggtagtgctcttctatggttggttccctcttccttcatggcaaaccctctagctacagtctcttcttcttgcttctttgcaatccatggtcttatggtgagttactgcagatagtcacccaaaacaacccaaagtaggtcaaagtagaagagaattttgaagttttaaacatatcaaaagctttaagagaggttttaaatggaaagaaagtatgagattatggttcagtttctggaaattctagagagaagtgaaagcaaaaacttgaaatttcttgagagaaatagcaaagttcaaaattaattgagtaaagagagagacagtgtgtgtcttagcttgttgaggtgggtttataggcaaaaagaattgatcctagcccttcaaacactctagatctccacccttcatttggtcaaggagacaagctttcactgtttgcagaataatttttgatggccttttgggagcaggattgatgtgtggggccgagtagattctcattcaaatttaagttttgaattttgttgactttgcacgtgtgatactcggccgacatactcgacatgcgtgtcgagtacaatgttgggcttggtgggcttcatcttactcggcttatggtcaagtggatcatctttttgggctttgaacagtgaggcccatactcgattttgggccgagtggtcttggccgagtatggtctactcctaggctttgatcaattaaagtccacactcggcctgtggccgagtggtttggtcgagcatggcctgaaaatttcccaaaagtctttttttctgaaacacttaaacaaaaacattaaaaataacaagaaagcaatatatacaaggatagacatgggacttcctcccaagtgagcttgtttaaagtcacttagcttgagtctcacaatgtttaggtagagaagagattgaagagaggaactaagaagtcctcatcttcacttgctgaatcctcaaagtctgaatcatactcttcattttctctagatagctggagagtagagtattcattagatcttttctcaaagtaagcctgtttctcatctgtagtctagtctccttctcctgaatcaggttcctcaaagtattcctctacttcgggacttggataccccttaatcatttccttaagctccaagatagtatagtttagttcttccatcttgaggtccaacttgtcaatgatgtcctcttgagcttcatactccttcccaagctccataagctctctagcaatagaatcaatattcaataggtctcccttagtctctacccttgagcttgattctcctttcatcatagaaggctntttgggctgcttaggctctcttaggcagtgaagtggaatggagttntcccacccactcaacaactcagcatctaaatttctttcttcaatgaagaaaagctgcccttctatggtgggcttcttcatcttcttagcaatatcaaagctcatatggagattcttaccaaggttcaagtcgatcttacccatttgcacgtcgataagagcgcccgcagttggtagaaatggtctcccaagaatgagagggtctttcggttcctcatccatctctacaaccacaaagtcggttggaatttcgactgatccaatctttaccggtaagtcttctagcatcccatgaggcactctcactgatctatcagctagaataagatgaatgctgctaggcttgaacttatcaaatcccaatccctttgcaacagacaaaggcatcaaactaaccgaagctcccaaatcacaaagattattgttgaacactaaggatcctagtgaacaaggtagagtgcaggaacctaaatcacctagcttctttgatatcaccttcctttgaatgatagcactgcactcaaaactcaattcaactatttgctgagcttcttggggtctttccatgatcacttccttgggagtatcaaccaagggtatcttctcttctaactctttgatacacttgatgaacatcatcttgtgtttctggaagatcctttcattaacctgtgcaatcctttctggaaagtatggtttaggttcatagcgaggtggaatagggattgggttgctcgggtcatgtgctcgttcgacaagccgagcaaagaagtcgagttcaatctcctgtcttgatcttggtctcaaaaccttcccttcttgaatcccactgtctgcagtggcagaagtactcactgtggtgatagcatgggcatactcctttggattttgaacagattttccaggaagttgtccggggtgcttaggagctgaagtagaagcaatgtgtccctccatggtcttgaccctagtgttaagtgcgtctatctttatatttaggtcgttataagagcaatcaatcctggtggtgagttcagctagcttcttgtccatggtcatggagcatgaggcctgtccttgcaaaagctgacgaagtagagtcttcatctctgagtcttctgctgaagtttgctgtggctgctgggtgaagcctggaggtccaaagttctgcatatggttgtagccttggttataggctataaagggcttagcttgaggcggttggttctaagggggg

SEQ ID NO: 1032 - DNA, 1399 bp, Arabidopsis thaliana landsberg
gctcctttccgcaagcgtttgcggttgcgggcggttaggttaggttagaaaaaaaataattctttttctaattaattaaaataatttattttttaattaattaaaataattttggcttccaccctaatcactattataatatattgtaaccttattctctcaattatgacattcacccaaactgatgaaaatcaaaatcaataatcaaacttaagtatcatctatctttttatccattcattagctagtataattttttaagtatttcattgcatcgttgttttttttattttgtattcttttgagttttttgattgaatgcatgtttcgatttgtatcacactacttgatacaatttttggtgatgtaccaaatacataaaggattaagtttttttcttacaaaatttatttatttttgaatttagagttttatttatggttttaattattaagcatgttcaacttttctaatattatcaatttatcataataatatattgtatttttatttctttttatagtaatatattatatttattttggttatttttatttaattactattgcacctgctggtttaccagtcataaaactctcgcaaacgcacccattatcaaacgctcaaccagtcgttgaaaacgcttgatatcgtttgaaaccgcaaccgtccgtttccgcaaactcccgcaaccgcaaccgcagccgccgcgtttaaaccagtcaggccctatgacattcgtctcaattgagattaatgtactttcaaatgaaacttccaaacaaataattgagatgaacttaacctgagttatttggattggttagaaaattgtttaactgttattacatctaatgttgaactaaagtgatattgataagtctctctatattcaaacttctcattcaaattttcttgtttgacataatcaaacttctatatagtgtctgtgtatatatcagagccggtccaataaattattggaccttgtgctatgctccaaatttctttacctaaaactctaaatatttaaaaactaaaccctattttgcaattatttgaaaatttggaccctaaaatataaagaaaaaactgaataaagaagtgagacccggtgcactagcacactcagcacctcccaagagccgggcctgatatatatctcaaaacttctctatatatatgcctatgtttacacataaagtattataatgaatggggaacattgggggtaggaccctaatatttcacctaaaaaaacaaagctctcacaacagtgacaagaagagaatcaccttttttttttttgtcttattgatttatttcatcatacatatgagaatttatctcctaattacttatattgttattgttgaacttcgacttcaacctagattta

SEQ ID NO: 1033 - DNA, 1793 bp, Arabidopsis thaliana landsberg
taagtttcaaacctttttgtaggttggaaaggctattcaattggtatcaacgtttattggtggatttgtgatagctttcactgaaggatggcttcttacattagtcatggtatcttcaattccacttctagtaatgtctggtgcagctctagctatcgtcatttccaaaatggcttcccgtggacaaacttcttatgcgaaagctgcggttgtagttgagcaaacagttgggtcaataagaacggttgcatcgtttactggagagaaacaagcgataagcaattacaataagcatcttgtctctgcttatagagcaggggtgtttgaaggagcttccacaggacttggacttggtacactcaacatagtcatcttttgcacttatgctttagcggtttggtatggtgggaagatgatattggagaaaggatacactggaggacaagttctcatcatcatcttcgcggttttaaccggttccatgtgagcttccgaatcaactttgttggtccttcaacttcttattttctgtaagctaatttgcttttcatgctaatatcaggtcattaggacaagcatctccttgtttaagcgcgtttgcagctggtcaagctgcggcatacaaaatgtttgaaacaatcaaaagaaagccggagattgatgcttccgatacaactggaaaagttcttgacgatattagaggagacattgagcttaataatgtgaactttagttacccggcaagaccagaagagcagatctttcgcgggttttcactctctatctcgagtggttcaaccgtggctctagttgggcagagcggaagtgggaagtctactgttgtgagtctgatagagaggttttatgatccacaaagcggtgaagtccgaatagatgggattaaccttaaagagtttcagctaaagtggatcagaagcaagataggacttgtgagtcaagaaccggttctgttcacttcaagcataaaggaaaacatcgcctacgggaaagaaaatgcaacagtcgttgagattcgtaaggccacagagctcgcaaacgcgtctaaattcattgacaagcttcctcaggttgagattaaattcacctctcctctgttatttttttgtctctgttttcattttgatgaagcttgtaaatgtaactgaattaactaactgtacattgcagggtttagacacgatggttggagaacacggaactcagctttcaggtgggcaaaaacagaggattgcagtagctagagcgattctgaaagatccaagaatcttgcttttagatgaagcaacaagcgcacttgatgcagagtctgagaggattgttcaagaagctcttgacaggatcatggttaaccgaacaaccgtcgttgtcgctcacagattgagtacggtgagaaatgcagacatgattgctgtgattcatcaaggcaagatcgtagagaaaggtaaaactcaaagtatctaacacatatacatgtatatatatatatatatccaatcctatctgatagtaagtgctgatcataaaatgtatgatcaggttctcactctgagctcctaagagacccggaaggagcgtattctcagctcatacgtctacaagaagatactaaacagacagaagattcaacggatgagcagaaactatcaatggagtccatgaaacggtctagtttaaggaagtcgtcactaagccggtctttaagcaaaagatcttcttctttctctatgtttggttttccacaggaatagacaccacaacgaagctatacagag

SEQ ID NO: 1034 - DNA, 2597 bp, Arabidopsis thaliana landsberg
atcttatgttctctcttttcataagagcacgggactctcacgggcattcaacaccctcatcactaacatacacacacttagcagcaacaaccatagcttcagatttataaagtttaatgtcataccttgtctttagggaagacatcaaaagagcaagcttgaaatcttcaggagagttataagtcttctccaatgctagtaaaatctcaggatcaccaagatcatttcgagctgcctctactctatcatcatcttcatcgtcagaggacaaaggatctggaatcttgtcttcatcccatatatcatctccgctgtcattgtcactagcttcttcttctccattagcctctggaaaatctctttccatgtctaagttaccatcttcttcgacacctaatccagcggggtcatcttcttctctattagtatctactgcatcatcaacctcatcgcagtcttcatctccttggactgcacagtcatcgtcttcatcaagagcaggaacttcagcctctaaatcctcctcttcttcatctctgattctccttcgtttacttcgtctaagtggagcacgaacttcaacgcctgattcaatgtgagcttcctcgtgagcttcctcttctccgccacaagacgtttcacctaaagcttcctcttcctcttgtccaatttcacgacgagttgattcttcaactgcaacatcagcttcctcttccaatctattttgccttcgtttacttcgcctaagtggagaacaaactgcggttgcatttcccacatcaacggactgacctcgagcttcttctccaatttgatttgcttctccttccggcattggttcaactgcatcgtgagcttcttcttccaatctgatttgccttcgtttacttcgcctaagtggagaacgaacttcggccacatctgccacatcaacatttgatactacattcgcttgacctcgagcttcttctccaattcgatctgcttctccttccggcgttgctttagctgcatcttgtgctccgtcttctccgccacaagactcagatactacattcgtttcacccccaacttcttctccaatttcatctctttctcctcgcggtggtgcttcaactccatctcccaccaaattctctgattcgtgaagcattggagatccaatcctcacaacgacaccattctttctaactaatggcatttcataaaacgaattgaagcaattagggtttcgattttgattttgggggcaggattaggtttcgatttgggtttagggtaattgattttgttttgagaatttctattctcgattttgatttctctttagcacgaaaacgacgtcgtaagactatagtaacagatgtttaacggactaaaacgtctgtcaattacgctgttagaaggagttttaacggtggttaattaggccgagtcaacgtaaacttgaatgttaaaacagaaggcaactttttgttgagagttaaaacggccatttcacgagttcacggttaatttggccattttttgtaagttgaggtattaaataacatttttcccataatttaatctctttattcgcattttctaacgaatttcgagtttttgaattttgagatttgactctgagaagaatctcccattgattaccagctcggcgatggtgcgcaactcgtcggacgaagaagaggaccaccgcaatttaatcccacaaaacgacaccagagacaacgatctcaatctacgccctgacgccaggaccgtaaatatggctaacggcggtggcaggagtccgagatcggcgttacagatcgatgaaatcttgtcgcgagctcggaatcgttggaaaatctcagttaacaagcgttacgtcgttgctgccgtctctctaactttattcgtcggacttctgttcttatttactgatactcgtacattcttctcgagctttaagcttgatccaatgtcaagccgtgtcaaggaatctgagctccaagctctgaatcttcttaggcagcaacagctagcgctagtctctctgttgaaccgtacgaatttcaattcttcgaatgcaattagttcttctgtagtaatagacaatgtgaaagctgctctactgaagcagatttcagtgaataaggaaatcgaagaagtgcttctttcaccacacaggactgggaattactctatcactgcttctggttctgatagtttcactggttcttataacgctgatatatgtagaaaggtagatcagaagttgttggaccggaaaacgatcgaatggaagccgagaccagataagttcctatttgctatctgtctctcaggtcaaatgagtaaccacttgatttgtttagagaaacatatgttctttgctgcgctactggatcgagttcttgtgattccaagctctaagtttgattaccagtatgataaagtgattgatatagagcggattaacacgtgcttgggaagaactgttgtcatttcttttgatcagttcaaggagattgataagaagaacaatgctcacattgacagattcatctgttacgtctcgtcgccacagccttgttatgttgatgaggatcata

SEQ ID NO: 1035 - DNA, 1736 bp, Arabidopsis thaliana landsberg
caagccgatcaagtgtgctatattccatatcttagagttaaacttatccatgttccgtggatcacagctacacaaattaatccaagaggaagagtagatggagtgaaggaccacgatccgatgcaacaaaactatgtagactatgttagtgtgggttaacactctcttgaaaacactatattgatggatgttgaaaatctcacaaatcttgatgatgtgagtgtaggtggtgatgacaatgcagaggaatttgaagattctgacagttcaagtcggttaagcgactcatcagattctgatgatcatgagtagaactatgtttttttaatttacttgcgttatttttttgtggtggtcttatgtttggattagctctatgtttctcgtgaacaatgtttttatgcttgtgagttgtttgaagacatagtttttttgtcgttctgagatattagttccatctacgatttgctttcattgttttggttgggtctctatttttttataagcttacttgtcgggttttgcgatgccgcacaacagagccgtcgagattaggtttgaattgaactaagctgtaattgactcaatagccattggttcgttttctgtttccattgtagaagttcttggtggtgatggtgcctcgacatctatttcagggtatgattgtttaaatcgagtacgaaggccttcgtttattaatcagacaccgttaagctttgatttgttaaagtgagtttgggatcttttagctgagctaattgctgatttttactctctactttaagggattgttattgtgactaaagcatgttgtcgggtttggcttagatctgcgatttactggtgtgactttctgatttcggtgggtttttgttgtgttcttaaggtttttgtcaagtatgttctgtttttgcctcttcatcggcgttgaaatcgtgtttcattgttttcaccgttttgccagtttctgacttgaaactgattgcatttcaaattgctggaggaatttagatatatgttgttgatttaacttacacaagtttgaatagcttatagaatggttgaacatagaaaaattaggtcggtgttgaacgtcaagaatttaagtgtagcatagactgatgttcaataatccttattgaatttaaaatttgtttgatttctcaatcagacttgagtttgatctttagattttcctctctaattaggtcactcccttggattatgtagcatagtgctggaataactcccagttttcagtttgatggatggaactgctcgaaggatcttgcattgcatttcaagaaggtttgagtgtcttttttttatgtgcaaaaaagctagttgatcgccaaaaaatatcgaaacatggagcaccaaattctcagtcaaagagacaatgacgatggtgacactttggacactaaccgttgatatgttgtgtttttggtgttttaagtcccttagttttgagtcgtttgtcgtgtcatagtctgtcttttgcgtcttacacaaaatgctgaaacttctattattttttaattatattttgtgtttttttctaataaccaacaaccagtttttatacttttttcttatgtgaattgtaatatgtatttttgaaattccaggaagttcaagtgaataaaggcaagaaattctggctatggttcaattccggtagttgatcctagtaatgatgcatctccaaattaccaagaaatgtatcttag

SEQ ID NO: 1036 - DNA, 879 bp, Arabidopsis thaliana landsberg
tgtctatcttcatagacatgattgaggacatcatggaagttttcatggatgattttcaaggttatggatcatcgtttgaggattgcttagagaatttctacaaagtgttggcaagatgtgaggagaaacatctagttttgaattgggagaaatgtcactttatggtgtaggatgggatagttctcggacacaagatttctgagcatggaatagaagttgatagtgctaagattgaggttatgacaactcttcaagtgcctgataatgttaaggcagtgaggagtttccttggacatgctggtttctacaggagattcttcacagacttcaccaaaatcgcaagaccattgactgctttactttgtaaagaagtcaaattcgagtttacacaagaatgtcatgatgccttttagcagataaaacaagccttgatcagcgcaccaattgtgatgcgagtgattttgcagttggagctgttctaggacagaggaaggataagaaacttcatgccatctactatgcaagtagaactcttgatgatggtcaaaggaattatgcaactacagagaaagagttgttcgctatggtgtttgctttcgagaaattaagatcttatctcggttgatccaaggttattgttcacacagatcatgctaccttgaaatatttgatgcaaaagaaggatgctaagccaagacttttgatacagctggagaagatgactgcaaacgttatgagttgtagaatcgagcttcagtgtcgatcgacaccacttctatgtcgatcgacactcacatttcagagaaagttgatgttcgtagttgcgcgatgaataattggaactgttcgatcgacacccttttgaatcgacaagaaatt

SEQ ID NO: 1037 - DNA, 528 bp, Arabidopsis thaliana landsberg
cacgtggacaggtttcatgattttctgactttgtttctgttttatacaatttttaaacacctggatggcaagtttacggtcctgttgagtgagcatggtgctcgaagtttccggtccgctcctgaaatcggtcgtaacttgtgctaagtagcatggatatcatttttgcatgcacggttttccaagtttcgagtgacatgcagttcaaatctgaattttccgaagaaattcaaataaacaaacttataattgtcccaaaatggtacatgtaggtctacatattgtaggaacataccacaaaaagtttggtgaccaaaataaataaaataaaaatatgctttgccgagtgtctacataggacactcggcaaagactctctttgccgagtgccagatatttgacactcggcaaagactgacagccgtcagatgtagacggccgctaacggctctttgctgagagccatatttgccgagtgcttgacgctcgagaaagccatctttgccgagtgcttggcagtgctgagtg

SEQ ID NO: 1038 - DNA, 2172 bp, Arabidopsis thaliana landsberg
acctaaactattattcattatattgaggaaaaaaatcagaggagattaattataagaatggaaaaagaatcttatagcaaaagttggtgttagttgcacttttgtctgcttcgtagctttcggcttagttgttgttatctttattttggggaaacgttacactatccttatcttcacatttttcgtatttttctgctctaatttatctaaatgccggtgtcgccgagtttatccattcatggtaacagaaaaaactcggtggtaaattcatactattaattatcatatttaaaactagttgtggagttattgtacgtctaattatctcgaataatttatcaacgtgattgagtgtaccgtaactagaaatgtaatactaagaaattgacagaatataagacaagagtccccacggtcacggatataagtattagttatgtttctcttttccttatcacaacgagaaactcgtgaaccgtaattgattgtgatctttgacaactaattcggcttaatcacattgtcgatacattgtctcaatgaaattcatcaaaagttgttgaataataaatttttaatgtttccaacagaatgcggaatacggctggcatcagcgggatatgcagtgtttgggatggactacgaggggcatggtcggtccaagggtgctcgttgctatataaaaaaattcagtaatatagtaaatgactgctttgactattacacatccatctctggtacttatatattcacatgaaaatatctattccttcatcatcttttttcaattcaacaagactaatttcctacttttatgatgttatagcacaagaagaatacaaagagaaaggtagatttttgtatggagaatcaatgggaggtgcagttgctttgttgcttcacaagaaagatccttctttttggaacggggctcttctcgttgctcccatgtgtaaggtcacgtttcttctcatctctatcatcgaaaccctatatttaatcaagttaagacacaaaatctattagttttagacacaacttaattatcaacattttcattagttttgtgtgtgtgggcagatatcagagaaggtgaaaccacacccagtagtcataaatctactaacgagagttgaagatattataccaaaatggaagatagttcctacaaaagatgttatcgatgctgccttcaaggatccggtcaagcgcgaagaggtatattaatcgaatcagtcaacacataactaaaaagtgtactaataaaaaacttggttcctaaaatgtagataaggaacaacaagctgatatatcaagacaagccaagacttaaaaccgcacttgaaatgcttagaacgagcatggaccttgaagacactctccacgagatcacattgcctttctttgtccttcacggtgaagcagacattgtgactgatccagagataagcaaagccttgttcgagaaggcaagcacacgcgacaaaaccattaaactttacccaggaatgtggcatggattaacttctggtgagcctgatgctaacgttgacctcgtttttgctgacattgtcaattggcttgatgctcgtaccggcgactccgcttctctgacagtcactcccgtacatgattttacctccaatgttcaaaaggtcgttgacggtgttagtaacggtcaaggaaaatctaaacgaccacaagctagtctcctttgtggtttaaatggtggtggacgtcgtttggtccatagatcttctatgtaatgataaactaaacagagaagaatctgttttattttgtacttcagattcgttttcctaaatcaaaccaccatcgtgtccaaactaaaatacatagacttcttgtaagttgtaacgaaacacaaaacagctacacgatctttctttacatgtttgaaggaagagaatctctggacttatatatgaatatttaatgggctttagtctcctcaggcccaataaataagtgggcttaaatttacccctcttaaaccgccattgtaccacttgattttctcgagtcccttcttcatcacgaaagcgggatttagcgttagcagggtaaaaccctaatttcttcaagatacatatcttgttgaataagttaggtttctttgtaaaaatcattgactcttgcgtctgtgaattt

SEQ ID NO: 1039 - DNA, 1162 bp, Arabidopsis thaliana landsberg
ctgcaagacggctgattgaatctatggaaccagatgatgacaatactcttttcgtctccatacggcaagaaatgaagacggtaacaagttagggttctcaaactctcagggaccactttttaggaaagaaatgggtaggaacaacatgtttctcttttttttttcaccattcagcagtaatttttttttcaaattgtaacatgtggaccccacagtattcctaatcattccttagtttttgaggaatggtagaagaaaatagaggaacaaacaggaaaacaaattaaatatacgtgacgtgattaaacattttttaattaaaaattaaatttatggaaaattagactaaaaaaaacgtacgtgataacgtttaatatttaatttagaaaataatttatttattttttaatttttgttactatttgttctatgttttggttatcatttacactcattccttttcattcctattttatcatttttattttcctgtttattcatttttaatcatatacctcttcattccttgtattcctttataagtcatcaatcggacccttagtacctaaacaaagattgtaaataccaaattgttattgatttttgtgctaagtttgacatttagtccctatacttttagatggaaaccatgataatgagaaaagtatattataagaatgaatgcaatacttttcaaaaaaaaaaaaaaaattgaatgcaaaatttgaaggatgaatgttatgactgtaaaaaaggaaaggataaatgctatattctcctatatctcatgaaaagaagaaaacaatttcagatattaatcctaacaaccgaaaacgtaagcctattttggttggattaaagaattttgctatacgttaacgaaatttgttttaaatgcttcctttttttttttctttgtttctcggcaacattgttttgttctataattttattttcttattaaaaattgagatatctaactgaaaagtaaacaaaataacgaaaggctctaaagcatccgttgacgaagttgcttcttctctgattcgagtctcataatcatcactgatcaacggccaatgttcttcactgtaatgtaatggctacttcttcctcttcttgcaattgggtttacgacgtcttcccaagctccagtccagaa

SEQ ID NO: 1040 - DNA, 503 bp, Arabidopsis thaliana landsberg
caattatactcaatacacatgactatatgagtttcatatgaaagtaatatgaaaaaaactgagtatataactttttagtctaaattaaaaagttaataattttaattgataatataagaaaaaaaaactaactattgattaaaaatatgtagcaattaaaaaaattaacttcttaaaaaaactaactattaatattaatgaatagttcatatcttaaaaaatgtttattctctgaatttagttttgaaattgaaaaaaactaactatattgtaagaattaatgtattaaatctatatacaaaatatatttatattggatataaaatgtgttttattttcttatacaatatcaaataaaaataatgtttttaatattaaaagttagttttgaatattttgtttgctaacgccggagttagtcgctcagttaacctgagattatatgtttatcaaattgatgacatgacaccatatatttcgtatatgttgtcatgcaatccata

SEQ ID NO: 1041 - DNA, 2461 bp, Arabidopsis thaliana landsberg
aggtcgactctagaggatccccgccgctgtccccagctactctgttttgcgggaccagtttcttgttcttctgccggaattaaaattggtcgtagttcggtttacggactgtggaaggaaccagttcgttcattatctgtggaatcatcctcgtgaacggcctacaagcttccagtatttttaactcgctttctagtgtatgctctccgacgatgcaatcatagcaatcgatgtgcgacctaagcaagttcacgtgaagcgtcacccaatgattacctccggtttggtggatcaaatacaagtgatccacatctattacccacttcatccatgtcaggacttctcctgccgtaccgttaacccataatttatacgctgtgtttttgaaagtaaacctctttgttttgatcttgaactgactgtactcagtcaccaaataagtcatgaaccacgggtatagaatcatgacgcgtttgttgtggtatgggcagggatctcgcttgtacctcatggctaggactttagatacgcagccatttgctgtacaaaaaaagaaaatctactcagacaaaacacaccaatatctcagccataaccaagcacaactcagcctaaacaccagaataaatcagccataatttactttaacttggacagtacaataccgtaactcaacctaaacaccagaataaatcagccataatttactttaacttaaatagtacaataccataactcagcaataactaagtacaactaagcctaaacaccagaataaaccagccataatttgttttatctcaaacagaacaataccaccacacagccataacaacacgataactcagccataaagtagaaaaaaactcaaatagaatataacaataacttatactatcggacaacaagccatattttggctctggctagtcctttctttcggtcatgataactccgtagaaatcaacattgtcttctccactgtccagcgggatactcctaacaaataataaaaagttataatatactcaaatagtgtaagcatgccgtacttaacaacttaataaggtacaaaggaacatacttgttggagcttaacaaataatccttaagtttctgcaattttgccggatcaaccggtgcaacaagatcatagattcctcgtaaaggcacacaacccttcctcatacggctcagtccgttgtctccaataaattgaaaagtctttgtggtcaaattattgactgaaaatcaatgaactcccatttggggccagcttaacagtttatatcctcttagcttttactctcccatgcctcatagtttcctccacatcttcatcagactcatgcagcatgcgattgtcttcagctagtaactggtctttatatcaaatatagaatcatcatcatctaccttctcaccgtcaatcttgttagctttttccttgacttcctcaactctattggggacagaagcagcatcttctatcttcacatcattatcaagtgattttagcattcttagtttcatctttgtagacacctttgtgagtggagcaggaggaagcgccgctgcctttcttcctcttttctttttggcgactggctctttgacggttggctcatttacggttggctcatttacggttttctctttaacgacaactttcttcttttaatctgccttcgctttggaatttctcctcgtcgtcgtcgaagcgcgtaaagtcctggcacctggagacgtctcaatgaacataatttaagcttggcttacatcagtggtctgaacacattcgccatcaagaatcctactaaccccaataataccagcatctttctctacaccaaatctataacttcattcgcttgcataaacgtaaagataattcaggcgtaaaataacgataatgatgtaggtcaaatttccttaagaccactctctcaaataagagatcgatttcagtacgtaagggtcgaattccacaaagctctcggatcacagtatagactatggatatcaaattaagttaaagcaatagattataaaagaagaaacaaagaaaagcaataaatatcaagatgtaaatcagatgggaaaagagtcaagcttagggtattctcataaaatatatgattagtagagctagtgatagctatgttgttatcgaaccattcttaaacacaaactctaattgtggaatgaccggtgacattccgcaaaactccctatgccaagagctaagaataaccagagaagctgagaaatcttatacgtagaactagcattaataacaactaaagatgaagaatcctaatagataacctagcaagggggtaatttactaaatcatctaaaaccctaatgagaaaccctatgcctaacaagaaagctactcaaacatgatcaaaggaacacaaatcatagtctaaataacaaatcaggtaatgataataac

SEQ ID NO: 1042 - DNA, 1034 bp, Arabidopsis thaliana landsberg
  unsure (1)..(1034): unsure at all n locations
cattttcttagaataatagaaaacaaaacagagcaaaacaaattaattattattaaaaatttaaacgaagagtttatagacttgactcagctacctatcgacgagtttgaaaaatgttgttactaacaaggaaagaaagggattttcaaagaataggtctaaaacatgtgaaaattttggaaggtaggaaatctatagcttagacaaaatcataagaagatggaaagacacattgtaggaaagaagtatgtaaaagatttgttcacaagaaggtgaagtgaagagggattaaggtgtatttggtctttaagcgttaaagaaacgtaacaaggacgtggcttgatggtggtgtttttaatcctatctatttgaatcaagttctcgaagatataagttgaggtctttcagtttgggaagcgtgaaggtgtaaaggatctaaactgcatcaaaagagagaagtgatagaagcgaaaactttttcttagaataacagaaaacaaacagagtacatcttaacgagcttgaaaaatgtttatcaacaccataaanacactacaagtctctcttctgctgacacctccgctttttcagttaaccacagcttgacacctcattanaatcaacagccaatcagaatattttgattaatacacctcatttacgttgaccaataaaaacttactatttttccatgtcatcccatcaacttaacaaaattaaaattagacatgggcctagcccaaccaaactattttcaaaattaaaatctatataaaaacatgggcctaaacttcctaatctagaaaacttaggcctcggaaaataaaccgcagcgaatgtaccgaaccaaaactgatgaaaaaaactaaaccgaaccgaacaaaatatttgaaaataactgaatggatattaaattctataactgaaactgaatggatacagaccaaaagattttgcataaccgaacatatccaaaatataattataattttaaaaaaattagttatttctaaacctaataattaaaaatagat

SEQ ID NO: 1043 - DNA, 1795 bp, Arabidopsis thaliana landsberg
ttctcaacttttatgatatgtttgtgtaactgtaacatactggcataatcttagaacatgaattataattaataggctagtcttgttgtaatgcattggcaaaaccacaccttttatatttatattgatcagaatcggagattttaagcatcaatttacattctttggaaggaaagaaactcaagattgcataatgcttcatcaagaccagcctctgctttaatactttaaatcatgaacttcattcggtgtcgccttgacccgctatcgagagaccaacgaattgtgcctccaaacgtctcctatctagctacttagtttggagtgttccaaccttaatgtgttctagttgtattctccttttgttgttgttgttatagttgtccttagacgtcgtcattttcttatttcctttaaattatgatggaagaagattacgacatcaaaagctagagaaaaacattatgagatgatgaagtttgttgcaacggctaaaaacagaacattacaacttaggcctttcataaaacatatgggcttttatggcccattaaaaatcgggcttagtggacttatttcagtctcatatatatattttgagtggcgcatcagtctcatcttcctccatggctctaaacaactttttgactttccaactactccttcttctacttcgtgtttcatcggaatctccatggatcgtcgccggagatgtgtctcgaatcccgatcaatttcctcgaattagcaaagagcccggaggttttcgattcaatggtgagaatcagaaggaaaatccacgagaatcctgagctgggatacgaggaattcgaaactagtaagttcattaggtcggagcttgaccttatcggagttaagtataggtttcccgtagctatcaccggtattatcggatatatcggtaccggagaaccaccattcgtcgctgtaagagcagatatggatgctttgcctattcaggtctagtaccaattcacagaactctcatcgattagttacatttaggtctatggttcagaaatttggattaaggattagaacataatttgatttgataattgaattcaggaagctgttgagtgggagcacaagagcaaaaatcctggaaaaatgcatgcttgtggacatgatggtcatgttgctatgcttcttggtgctgctaagatacttcaacaacatcgccaacatttgcaggtctatgcatatttcccttttatactactttcatcagtaacattggtctaacacatttttttgtttttgtttagggaactgtggtgcttatctttcagccagctgaggaaggtttgagtggagcaaagatgatgagagaagaaggagcgttgaagaacgttgaagctatttttggtatacatctttccccccggactccctttgggaaagctgcttcacttgcaggttcatttatggctggagctggagctttcgaggctgtaatcactgggaaaggaggtcatgctgccatccctcagcatacaatagatcctgttgttgcagcttcaagcattgtcctcagtcttcaacacttggtttcacgtgaaactgacccttcggattcaaaggtttcattttttactctttgatgatttctctcctggtctatgcttaatttgtagtataacttattaaggtttcttctgtaggtggtcacagttactaaggttaatggaggcaacgcgttcaatgtcatccctgattcaatcaccataggaggaactcttcgagcctttaccgggtttactcagcttcagggg

SEQ ID NO: 1044 - DNA, 3777 bp, Arabidopsis thaliana landsberg
acaatctgcatttgataagatcatctggcactccattcattctcgttgtcccacaaatatcttcaaaattatccatgtgatagacaggattctcagaggaatgaccgtaaaactgattctgcttcacaagagccaacaacccagtcttgatctcaaactcattcatgttgatagggacctgttggttcctgtctctaaaaattcaatattgggagcatcatgatctctcagagtttgtcgagcatgcgcaggcctagcattcaacgcggttaaacgagtagcattagcagtagctaaacaggcagcgttggcagcatgtgcatgggcagcgtttccaccatcagcaggaagatttgcttcaggaggtggtggatcctgaaacactccatgatgttcttcttcaaatgggtgtccatcatcattcacaaaatttccagcagcgtcacgggcagccatctcagcttctctcttaaccgctaactgcttctttttcttgttctctctttcaaaccttacgatatcttcgtggtagtgtactagatgtgatgagcctttgctccggatcatacacctgaaaacaccaaagaaaatacggaaatgaatataagtaacagtaaataaaaatgttttagactagaaactaatcttaaatccttaggtaacacaattggtccccggcaacggcgccaacttgattgctggagtaattatccaaaatatctaaccgttaagtagaatattcgaggtcgatccacaaggaccaaagatactctaaggattttcgagactcgttgttagctaaagcggaaagattgttttgtttgagttttcaaattgtaaagtaaaaatgcacataaattaaactatttatctttcaagatttaaagacattaggcattaggatattttagagaacaataaacaatggaaacatgagacagagaattcaacaattacgagccgttcttgaacatgaacacaacttagactaattccctttcaagacattaatcactaaatttgactactcgtttactaaacttttgcatgtaatttcctagtcaaattcgcattatcaaacaagttcttttagttcacaatgcgtcctaacttcagctttggtaggctagaaatacattgctcaattcacattcttccaggcattctatcgaacacttttaatgcatagaaaaaacctcagttctaaaacagggtgatcaatcctattctagcattaagaacatgtaaatcaaagaacccagagaataagaattccaaataccaattattccattaatccattgaatctcctaattagaaccctaacacctaactggtggattactcacacattgcaataaaaatgaaacaaagagatattaaagaaaacatgattgaaattgaataaatgagaatagggtttagaaatcttctccaaattgtcaagaaggaatgaatctctaatcccaaaggtgcttacaaaagggttctcaaaaatgttgcagaaaaagaagcgtcaaagaaaacgtaggtttttcgggtttttatacccaaatacaataaaagaaaagataaacccagttaaggaaaaccgggttggtcatcgaaaaggatggatcgatcgatccccccttgggatcgatcgatcccgagctggcgggtctaaactccaatctttcttgacttggatcgatcgatcccttcctgccgggtctgaacttcatttggctgatgacctggatcgatcggtcccctcctgggatcgatcgatcccatcctggcgggtctgaaccttcatttccattgttgtttttggtccaaatgagcctgacaagtctcgaaagcatccgcatcccacttaaacacctaaaacctgcaaacgactcaagacacaaccgaaaagacgcaaaagacggactatgacacgacaaacgactcaaaactaaaagacctaagacaccaaaagcgcaacatatcatttagtataaccaaggttatgtcccaaaacaacagttcaatggaggataccaacagctgaatccaccagggttcactcaacaaccacaacaagccccaacagctcaagatcctgaaattaagcaactcattcaacaaatcattcaaggacaagctactggagctatggcttttgacaagaagatagctgagttacacaacaagatcgattgttcttaccacgatctaaatgtcaagttcaaagcttagaattccaaaatcaagtatgtggagagtcaatttgcatcaacctctgctttgaagcatcctcagcaacttccaggaaaagcagtccagaatcctaaggactatgttactgtaaattctatcacaatccaccaagaagatgagtctccaccaaatcaccagactcccaatactaaggacagtatgattcaagaagggggggattcaactcaaattgctgcacctgccacccagcaattcatctggactatagagcacacacctttgttgaacactcaccatcctggaaaaaagttcaaaattgaaaaactcaagaaagatcagaatcaagagatgattagcagtgccagcactcaagaaacttacaagaagaaagtcatccaagaaaagcttgatgatctcggttcattcactctaccatgctctctaggaccactgacattcaataggtgcctttgtgatttgggagcatctgttagccttatgcctctctctactggtaaaaggctagggatcatggaatacaagttctgcaacttagctttactcttagctgatggttctgttgcacatcctcatgggttagctcagactgaagaccctacagaagatgactggtatgagatgaggaaaaaatttaaatggcaaagcagagtcatagaaggattctcttcaagggtgatgaagctgaaagatcaagtatggatgtttgaaaaaagagttaataagttttcaactggtattgatccagagaagatggaaactacactacctatcaaagaggacgaagatttcactagagaatggtttgcaccagaagatcagaaaggagttcacttagaggaaagaagcctagagagcgagtcgttgagtgaggaggaaatctctattccgacttattctccaggagagcctaaaccgcccacaaacccctctgctgcagaagaacagttgattcttgattcttttgctgaaaaactcctagagctctggattggatataaagctcaggaggatacaattggaaagtcaacccataaaatggaagagttaaatagcaccattctagaacttcaagaaatggttaaaggttaccacaactttgaaattgaggattggttaaaggagcctggttcagaagaagaagactactctgctaatcaaaaagaggcttattttgaagaaaaatcaaatgagtactcatcataccatatgtcaagagaggatgcagagtatgattcatgcactaaaaattcaaccactgaagatgaggacttctatgttcctctcttcaaccctttttctgactaagctctataaaagtcaatcttagtgacttaaaacaagctcacttgggaggaagtctcatgtctatccatttatataactttccatttttcttgttgtttttgatacttttgtttaagtgtttcaagtttgttttattgaccctaaggaagtcaacggtcgagtaaattcaaaacaagtcaagaatcatctcaacaattgatcgagtaaagtgaggaggagagctttaagccggttatttgaatc

SEQ ID NO: 1045 - DNA, 2424 bp, Arabidopsis thaliana landsberg
tcagggactcccctctgtctttgggctagtgatggtgtgagtttcgtcgttctgtttttttttttctgctcttcgtgaagccacctcctttcttcatccgttttgcttgaagttggagtttgtggtttcttttgatgtggttgttttgtgcttagacaacagtgatgttgtgcgtcatgttggagtggagtctttacggaataatagaggcggcatgttggttttcgaggcatcgcttatctatgagagatggttcctattgttgtgatacgaatggtggccgaaggtggtttctttggttacccgtagatgcttctgtaactgtcgaatttgtgtgttagccctatagttgtttttgcgtttttgcgttagtttgcaaagaagctgtaaacattttatcgagaagttttgaagacgggcttctgcaaaggtttgctcgtagcaaataggatgagactctaactttttggtatcttcgagttgtggaaatcatgcaaatttccaagtttagcttttcggaatcggtgtttcttctcttatttccgcttttggttaacgttttcctccattactatttatttatgtctgtgttttttgtaaatttatttttccgctacttattttcttgtaactcctgtcaaaaaacttagaaaatgatataaatacttgacatttattaatttttgaagcaatcgaattacgtaacacacaatgaaaacaacttactctcgttgtaagttgttatactatattactatcatgtggagtcatttatagtataacgcgcggcacgttgggagcgtttacgaagcctttggccatgacacgctaacattattataataacggaaaaacaaatctcattagtctcttgtttaaactagtctaagcaaatgtttacggatgaaccaagtggtggtagtctaatggtttccacttgaggaagaattgccctgttggtccaggtcagggatcgattcccctcaggcgtgaaattactagttatttctatttggtcaggggctttcacctagtattcccggcccggatcctgaagggattaagggtctcggccccgaacctcctggttataaaaaaaaaaaaaaaatgtttaccgatgcatttactacttaacatgtgagctttaccttcataaaaccactaaattaattatctcaatttttcttatcaaacatgagactaattagtttttgtatcattactatttgtatcaaaacaactcaagcagtacttttgtatcattactaatgtactatttttagaattgcatgccaaatgaataagacaaatttatggaaaccccaacttttatttatccaaaggaaaacaagtgaaggccgttgagccgttaagtagaaccaggcctaaatttgtgtatgggcctcgtgtgttttgtttacatatccaagttttaatattgtcactagacagtagacacaaattttgttattaagcttttgagcaatagtgtcagttttgtctgttgacaatgtaatcagcgagagacaccaaaggagccaccttgtctatatcaaaccctagaagatgttcccgcgcttctatgttcaatctctcagcatattctttcgatttctccactcccatcagtctcggatacgtcagttttccggcgatcaaatctttaccggcggttttcccgagctcttccgacgatttggtcacatcaagcacatcgtccacaacctgaaacattaacccaatacatcttgcgtaactccgaagcctctcaatctcttcatcagacccacctcccattatagctcccataacagctgcggcttcaagcaacgcccgccgtttatgaatatgtataaactcaagatgctctaatccagtgtcactatcaaatctcataccttctccagccaaatccgcctgttgacctgcaacaagcccttccactgctttaaccatctcctgaacggtcttgagaatcctctctgggggacgtccgcaaaggtggatgacgtggtcttttggacagccaaagctatgagcgcttgagaagctaatatggctatactctcgccaaagactatatggttagtgggttttccacgtcggaggctgtcgttgtccatacaagggaggtcgtctaggatgagagacgacgcgtggagcatctcaatcgcacatgcagcggacattgcggttgactcttgtccccccacgagctcgcatgcagctaagcaaagcattggtcttacacgcttcccatcggagagaagcgtgtacctcatggcctcacggatcttgagttctggctcgcggagaggaacagcctcttctagtgctttattgacggacttagccttattgaccatatacgacatgaacttaaaatcatagcttgcggccgaagtcagagggcgggtcaacgca

SEQ ID NO: 1046 - DNA, 638 bp, Arabidopsis thaliana landsberg
gtaaaaggtgaagtatttataccattttcgaagtttcgacagaaattacaaagaatacaagtagcagagaataaccaagatctacagaataaacagacgataacaaatcatcaaaagaggagagcataagtccaaaacaaagacgaaagaagaaacaccgattctgagttgccaaactcagaaatttgcgtgatttccacaacttcaaagagttagagtcccatcaactctattagaagccagtccacaaaacctctagataaaacgcctacaacttctctgcaaactaacgtaaacgcgatgacaacagcagactaaaacacaaacccgacggttacaggagcatctacggacaaccagagaaactacttccaattgccattcctgtacaaacgacaagaaccatctcccacggattagtgatgccacatagaccaaagcgccgcccctattcttctcaagaagacgctactcgcctcaaatttttgtttggtgaagatttgatagattcggttgatatgtccgagcctactttgcatcatctcttctaaatttgttcaccattaccttacctgattctttgcattcctttatcagtctatatcatgacgtgacgtagagttcgggccgagtcactg

SEQ ID NO: 1047 - DNA, 733 bp, Arabidopsis thaliana landsberg
ttcttagattttttgtggacatggatcatgggtctgaccaaacatttgttttttttgtaagttgaatctataatttgatcgacttttgttatatctcatcgagatctctattgttattttcttacgaagttctttttttcgtttttcccaaatatgaacacaacaaacatgcataactttattgctactacgttctctacttaagttggaaatatctccgccacaatggtgatgcacagaggagaagcaagagtaatgacgtttatatcctttggcacttaaaatcgagttacaacaacgccggtgaccatttcctcagtatacatagagctagtgcaaaaatcaaatcaagcaagctttaaaacccttctctaactcctccctgttcaaattcttaccaatgaaaacgatcttattcactctctcctcctctcttccccataacctgtctggtgatccttgaaatatgtcatggactccttgaaacacgaatctctcctccatggtgtggaccgagaggagacctttcattctgtagatgtcttcactgcgttccatcagtaacgtcccgagccacatgtttgcctgatggattgtgacacaatttgaagattaacatacggtttcatcaaacagtcgttttatatgagacttttgtgtgcctctcaagctgcatattatctatattaccttctcaaggtctaagcttccttcgcaaactatactgactgaa

SEQ ID NO: 1048 - DNA, 1361 bp, Arabidopsis thaliana landsberg
tgtaacctttctgggagcatgcttcaatcctaggattaatccatgatattcagctgcattatttgtggcaattcctaaaccttgacgcattttaaaaatctgtttttgagaaaattgatatattaagatacagaaaactgcattctccaattaacaaccatggttcaaaaaggattcataccaagcttccgtcctcagttttcagtacagctgcagcgccagagagaccgggatttccttttgatgcaccgtcaaactcaataatgcaagtttcctaccacaagaggagaagaagaaacagatcaacttaagcaaaacattctgcatccatccaattcactggaactatgaaataaggtatatacaaacatatcacaacactcacatatgaggtatcagcagatggctctagctcagcaagcttttcaactgacatggaagctgaaggaagttgatcctggaaaaaaatgaatacataagcaatgagcttaatcttttttctcataatcattaaacttcatcacaatatcatctcacctggaagagacaaggtgtaagagctccaaacatatcttcttttaagtctaaagctctaaaaacatagagtggtttcttcaacccaacagtagaaagacactcctcggtgtctttgagcaacgagtatcccttataaacgctaactggaggatcataaacctgccattgaaaacttctgttattattatcccatctaagaaaagtatttatattagcaagagattgtgttaaggttaagatgaattcaccgaagatccaacttgagcttgacaatcgatcaaatccttataaattccaacaatgtcaccctgttcgaacaacgaaaaaggcgtctttctctttatccgaatccgaaacagaaacagagctttttgacatctttgatttagcagtctttgatcttgaggaatagcaatgaacactagatacactcacacttgcaggctttaaactagattttaaagatgtatagaagcactgattccatggaatgtgggaagtgacatagctggacatcttaaacagcaccaaggaaatgtatgaacgagcacgagagaagcggttcattataggtagcactgagatttatggaagaaaaaggacacaactttagataactacagagagaggcaagaacaactataggatttacatattgccattgaggaacaaacactaaagctgataataattacaagttcaagagttcgttaaaatggctctattcaaatcacactttggcacaagaccactaataagattaccaagtggaacaatcgaaagagaagaagagacagcataccagagagagttttttttgttta

SEQ ID NO: 1049 - DNA, 1916 bp, Arabidopsis thaliana landsberg
aattactcaagctttaaaatatttttttacttttcagacggctacttaacggctaatgaacagtttattttatctatatatatactcttagacggcccaagaaaaggcaaaatcagtgatcttccttagaagacacctagatgaaagtgtcatatatgactatgcacacatgagaaagcctaaagaattctggaaatctttgaaagatcgtttcgatcactaaagggacatcactctcccacttgcccgagacgaatggcaaagtctaaggttccaagattttgacaaggtaatgaactacaattctgccatgttgggaattgtggccaaactgatatattgtggtgaaactatcaatgaatcctagatgcttgggaaaacgtacaccacgtttcacaaaaaccacattactttgcaacaacgatataggttgcgtggatatattaaattctcagatttgattatggcgctcttaatagctgaaaaaaatagtgagctaataatcaagaatcacatgtcccgacctaccagatcaaaggcatttccattgtggcacgatcgccttggtcacccaggcacaattatgatgcaaagaattatagagggctcacaaggacattcaatgaaatcccaagagatttatcaagagaataaaaggacatgtgttgtgtgttctctaggaaaattgattataaggctatcaccaagcaaaatcgataaaacaattaccaaaattccttaaaagagtccaaggcgacatttgtagacctatacacccaccatgtgaaccattatattatttcatggtaatgcttgtaaatttacgtctcaaacattcaatgattattgtatggtaacaagaataaatgttgaacaccctgtatcccatgtccatacacaaaatggcttggctgaatctttaactaaacgtttgcaattaattgcgagaccattaatcatgagatcaaaacttccaacctcagtccggggacatgctattttgcatgcagaatcacttatacacataagaccaaaggcatatcacaatcattctccattacaattagcattttgtcaagaacctaatatttctcatctaaaaatatttggttgtgcggtatatgtaccattgcccctccacaacatgctaaaatggggtcacatagaaggttagaaatatatgttggttgtgattctccatcaaatatacgatacctagaaccccaaactggtgacgtatttaccgcacgttttgctgattgtcactttgacgaaaaagaattaccggttctagggggagaaaataaaaagatggaaaagaaaattaaaaggtgtgtaccatcacaattacaccttgatcctctcactaaacagtcagaactggaagtttgacgaattatgcatttacaaagtatagcaaaccaactacctgatgcatttgtggataccaaaacggtaactaaatcacatatacccgctgcaaatgctcctgctcggattgaaatcccacaagaacatgggaaagtatatgacacgcgtgagtctagaatacatttgaaacgtggtagaccaattggttctaaggacaaaaatcccagaaagcgaaaagaaacggaaaaacatgatactcttacaataacagaaaatgttatgggagaaacaaatcatgaccctatcggtaatgatgaacctcatgaatcggaagaaaatcatgagatttctatcaattaagtccataatggaaagatatggattgaaataaaatggatgctattttctcgtttctcgtctcaaaggaaataaatgaagaaaacaaacatccagaaccaaagtctttattgaatgtcaaagaggaatgactggataaaatggaagataaacaagttgaattgatcgcttaacaaagaaattatttg

SEQ ID NO: 1050 - DNA, 4298 bp, Arabidopsis thaliana landsberg
aaagcttgggaaaagccagttaagggacgctttcagttcaagattcagcgagagtgtcgatcgacacactcctggtgtcgatcgacacctgtttcggcccagagaagtccattacgctttcaagtttacagaagtggaaatttgccccaggagactttcctatttgcattattagtccttgggtgattattaggtcatttatatagttttagaggtcattatttagacctataaagttcttttcatccctattttcatagagacataagctattcatccctattttcagagatccatccagttttcaatacagttaagagatcatttcatactcttaccttatttgttgtgtttatgctttgttactcaattatgttgcttgtttcaatcattatgtcttagtagtttgcttgttaggtttaggatttctcattaggattcatatggtttagtagatcgccacctgttaggttatctgtagaattcttcatctttaattgttctcaatgctagttctagagtaattaactagaacttgaatccaaacaatagatatacctgccataggtatctgtagttggatctattatttgatgagcctggtttataggtgtgtaataggaatcggcctatctactaaggtgaacaattgaactcgttgagaatgcatgtttaagttatagatctctcgtcttctccggttattcttagctataggcatagggagtttcgcgaaacgccactggttattccataataagattttgagtttaagaatggttcgataacaacctaactatcattagatctactaaccaatagttttcctgagaataccctactcctagctctttattaaatcgtttacaacccaatcaatctgctgttttcttactttcattttcttactatgtcactcataccctgctagcttaatcttgacatttaactcaacgtttgaaagaagaactccgtgaattcgatcctaaaatactgcaattgatctcttatttgagagagtagttctaggtaatttgaaccatatcagcgagtcaccaatatcatggggaaagttaggaagtcctttgttagctttgcttcaaggcttctgagcatgccgcctcctacggctccggtttaaaaagaagttcgtcctctctacgacgttacgaccccaatgcttcctttcgtggtttctggcccttctgatgttgatcaggtctcccatgagatggtcgacctgtagtctcaagacaggatgtgtcttgaaggggccgacatcgtgccagctcaagagatcgccgagtgcgatcaaagtcagtccgttcaggtcgtcgagcctgaagttcaaaatattaccgacgaccgctccgtcgtcgtttatgccgcccctccagcaggcgaagaggtcaacacgggcctaactatccttgatcgagacaaggacgaaaccgttgctgagcccgggatttccaggaggtcccgtgaggagaaagggaaaggagtggctaaccaatccaagaagaggtcggcttctgaagccggtttagatgaggccgttgctccaaagacgtttcgcctgtcgcgaggcgagactcttaattctgaccagtttacgttcaagtattctggtgagaaattcctcgtgagagatcaagaggccgccagccacgtttggcgcaacttgatgctccccgggacgaaggatttccctaatcctgatgatctggttctaaaagagggatatcagaagtttgccagatcatcacttgaggtacgcgctagttacatgtcttcctgttgcctaatatctttgtattttggatttaaccatgattctttttccagaccgctgccctggccaacgatctgattgcgacatatgatcgcaagttgaagctgaagctcgccgacagagtggccttcgataacctgaagaagtgcgctgaccaggccaaagccatctatgccaaagacatgaaggaaatggcagcattgagagatgctgccgagattcataaggcagagctgagctcgttgaacgacgaggtgaagcggctcaacggtcgagaagctgatcttcagaaagagatcagcgatcttcaagtcgcgttggttgccgtgaaagagcatggggagagggagtgcaacaggctgcggaatgaccgagcttctaaagtcgcccgtaccacaaagaaagcccaagctcgtcttgatagagtgaaggcttatctcaaggagcaagaggacctcgtcgggccgaaggtggacgctgagaatcaagctaaaggagctgaggagatagtgggtattctgatgcagagaggcgcgaagattgcggcatccgagctcagcggccttaaggagttaaccagaagggcggccgacgaggtcaatgctttgaacgtcatcgagctcggggatgatgacctgaacatgtccccggatcagctcggtttttcgaggcaaacctctcaagttgctccggtggcggaccagcacggctcaaatgtcgaccttgttagcggaagtgatattcgacgcgtaagcgttgaagaggcgaaccagacgatctgaataggtcgtctttttaatttattttgacatcgatcgtggacccaattttcggggcgatctcaaaactcttatttaaccgtggacccactttcggggcggttttttaattttaacttctattttcgatggttttccatcttgcctgtttcggaggcagaatagtattttttccatgtatgagctttgtcattttttggaaaaggaaattgagggaagtcaacccgtaatcatggaaattcccattttcccagttttggagaaaatgcaaatattagtgtttctcgggaaaggaaaatgagaatttccagatcgcaattgagaaaatttccaattcgattcctgtatttgcctctataaatacttctttgttgatcaacaattgcttcaccggacttttcctcctatttgcaagatggagagtgttggatcgtcttcctttgttggcaaaaatgttccgactttcccgaatgctgaggcgattgaacgtgggatgccgttcttcaataaccttcgagttccctggactctcctattccaggcgagctcgatggaaagacgtgaagccgagggtttcttgtcgtgtgtccagtcaaggcataaggaataccgcgagatcgccttctccaggataatcgcactgtttctgacagggcgatctgatgttctatctggccgatagaagatgatccttggtggcttttggatcgtttttcttttgctttttatttccaaataaacgcccttgtaatggctgccgactttgttcaactctaatttattctggaataaacgtctttgtaatatcccccgatctcgttcggtcgttgattaatacaatgcaattttattaaattggcttatttcctccgcgacctctgaggtcggcttttgagttcttttcgaagtaacgcaattttttctgtctaattggactagatgttaggtgcgagactgagcccggcttttgagaaagaatattcagcgtgtgctggattggagtcgagttgctcatgcgaatgttccatttggcgaggaagtttctagtaatgagcgagacgaactgcttcccattgtctgtaacgatctcataaggaagaccgtgccggcaaataatgttcttccagatgaatgcaaccacatcgcgtgacttgactttgtggtatgcctgtgcctcgacccatttggtgaagtaatcagttaggactaacataaatcttttggatccggaaggaggcattggtcctacgatatccatggcccatcgcatgaatggatacggcgccgtgaccgaacgcagtatctcgggaggaacgttcttcatcgggccgtgtctctgacatggttcgcacttcaccgcgtaggcttcgcagtccgccagcatagttggccagtaatgaccatcttttttgattttaaggcagagagctcgtccgccagaatgattccccccgtctccgtcatgcgtttccttcatgagtgttagaaatggagttttagacctaagataattagaagtttatcatattttggtatgttcgacccattgtataaataggggagggtcaaactccccagagatccatctttaacctaatcaagagactacaattatagagcaaaccctagctttctattcaagcaactctgatcttcccctttgattatttgttagctgagagaggagtgaatttgtctaaatcccttagtacaaattcattgtt

SEQ ID NO: 1051 - DNA, 1209 bp, Arabidopsis thaliana landsberg
acgtaaggtaacgaagacagcagcgaagtagattgcgattactgggatgctaactttggtatgccgaaaaagtccgacgcctcgcgtaagggcgtgtacaaaccagaggaatttacagtcggcgatcttgtctgggccggctgtggtacaagcgcctgatggggtcttgaaacattgcgtccctggcgcaatacgtgtcatgttttttgggtactctaaatggaaaaaaattgtcaattgtcaaaaagtcgtgttaaatatagatgtattgtacagatctttgactttgaagtacttcatttgctgatcacagcctcatctttatctgttttttttacactgtaattatagattggatgccgattggtgcctttgtgcttgattctcgaacttcactcctgactgagagtttgagtggtcgcctgaaagtcccaaaggaaggaaccatagaacggatgttacaaaaatgtcttattcatgatcttcagaaactttgtcaactgcaggaaaaactgtaacatatggcttatctcattttccagatttacagcttgtgcgacctgtttgtgacctcagtacctgtgaggtaaaagacactaatcaactctaatctgttgctgaaacttttgtattgatctctgcaataactaaattgcaactaaaagtgtttctgttttactaatgtaggaacaatgcaaactcttgatgttaggcacattgaactcttccttagtgaaggctacaaagatggaagctgccgatttataatctgattggatctcataagttgcagaaaaacgcaagtgcagcttgtggagccatatttgacctcaaacaccataaagaatcttcatcctcaggtaacttcaaatcttcattactgttatgttcctttacttctcctctttgaatcattctcctttgtctcatacaaatttcacatgaaacctctataataggtattctcaacctcaagtcttggaccggacagccagatatttcccaacctaaagcagttatcgcaccccatgcagttgctgttcacacaagattgcgagaaaacgaaggtatataactttgcatcatcagccatctttatctagaaaacacaattacaaataattctcttgccaaaaggaaaagaatccaaatttgttgtttcagttgcggaaatccaatcagtattgtggcattgcaagagaggagtca

SEQ ID NO: 1052 - DNA, 3373 bp, Arabidopsis thaliana landsberg
agataccatagttcatgatacaaattcaattttaaaattaaaccaatgagaacattttagataaccaaattataaaataaaatatttttatgttattataaaaatatttgtagataaaaaatcgtaggtgtcactcaaagacagaattaaatatatatattttgcaagttattacagtataagagctttgttttgttccagaaacttaaagacaaaactaatattttaatatataaacttatctcagattttttttctttccaaaagttcttaaaaccaaatactaaacaacctaccagttaccactcacatttttgaatagattaaagccaaaccaaaagctaaatatttctgcaaaagcctacaaaaacattcattgccaaaagtttgtttcaagtgataagaagggtacccgacgaagatgttgccttgaggccaaagcttgtgagtcaagtcattaacaacattaggattatctataccataaaagcccatgccctcttgtatagggaccctcggaatcgtcaagtatccttcgtaatgtacgtctgtctttgtactcagtttggtctccaatggcaaatcgaaaacctccttggaggactcgaacaaggccttccgtagctccatggaagctccatcgaataaggcctcaaaacatccgtactcttctaaggcttttcggacttgggatctcaccaagtcccactcgggggtttccggtttgagatctggattggagaagtcgatgatcgggagcgaaagggggacttgggattccgaacttatcgccatatctttagatggcgttgtgtaaagatttgaagattaggaggagaaacctaagaggagaaagaccaagtgttcacatatatagtccaagtgttcaccacgtgttcagatagatttcggcccaaaagaccaaacatgacaaccccagtcaaagatcacatttcaacattgatcatatgattacataccatttaaacatagatcataagattacataccaaatcaactatataaataattagaaaattatgaatagcataaagaaataaattatatttatttttatgaaataagaaaattatattaaaattatataaacagtcaaaactaaaatagaaaagtctcttaataataacaatcctagaaaatgaatcctaaaggaattttagatttttaggtgatttaagtgaatttttagaatatttggtggaattgttataatttttgtttaagaaatagaaaaatagtttgtgatttggcatatatgattaaaaggaaaaactttgaggtgattctcgaatcataacgtaacgaccacgaggggttgtggtcagtggtcactacaggtcttgaccggtctacaatagaatcatacaagaaattagagttgggagaaagtagaaggctaccgggtactaatggtatcatctttcccatttgtttatcagaatatgctagcaaagagaccgtacggtgcataccagaatgtgatcactgtttccatgtcgtggctcaagattcatggttcatgtccggtttgtcggaacttacgctcgtaaaggaagttgttgttgtcaatacatatcaattaacattgtaatgaatgtcactaattattctgtttgttgataataagacgtgtttatatgatctgaagatgtatacaaaatatcatgagatgtgttaactttaataatagtatacaaatcaattttaacgagaataaacataattgaaaaaagttgctatacaaaaaaaaaagccttgctatacagagcttaagcaataaaagctacaaccacaagcaatttggtctgtcacatttctgaaaattattataattcttttgttagtacccaagaaaataagacgcggcacaaaagcaatactcacataaacccttcaggttcttgaaacaaacaaaaacacttgcttcacaagcctaaacataaaaagtaaaaaaacatgtatctacactatcatatttcatatttcttaaaattaattaaagaaatagtatccataaaagaagaagacggcgcagcacaaaacccacagtaacataaaaccctaggttgttcatgtatccttccagcttgagagcatgatgagaattcttctacaacacgcaacgcgttaccgggttcgctcctttggaaccctatcatccccatgtggcagagagccaaacactgcagcatcgtatcacagatgctctccatcgaaatgcacaaatcattccggtgctagaacagtggcggcaacaggggaatcaagtgaacccttcgcacgtgagagtcatcatcaaaaagcttcgtgattccgaccaatctctccaagcccttcaggtttccatattttccctttccccaatttggtgttctctatctcttataagtgttggaattgatgtcttgcggtgatgttataattaggtatcagagtggatgagtaaagaaaaaatctgcaatctaatcccagaagattttgcagctcggcttcatctgatagagaatgttgtagggttagaagaagcagagaagttctttgaaagtattccaaagaacgcaagaggcgattctgtttacacctctctcttaaactcgtacgcaagatcagacaaaactctgtgtaaagccgaagccacgttccagaaaatgagggacttaggtcttctcttaagacctgttccttacaacgcaatgatgtctctctacagtgcactaaaaaatcgtgaaaaagtcgaggagcttttgcttgagatgaaagataacgacgtggaggcggataatgtcacagtgaacaacgtgttgaagctatactcggctgtgtgtgacgtgaccgagatggagaagtttttgaataagtgggaagggattcatgggatcaaacttgcgtggcatacgactcttgacatggcaaaggcttacctgcgagcccgttcaagtggaaaggcaatgaaaatgctgcgtttaacagagcaattggtggatcagaagtcgttaaaatcagcttacgaccatcttatgaagctgtatggtgaagctggaaacagagaagaggttttacgtctatggaaactttacaagagtaagataggagaacgtgataacaatggttaccgaacagtgattcattcgcttttgaaagtagatgatatcgttggagcagaagagatctacaaagtgtgggaatctttgccacttgagtttgatcatcgaatcccgacaatgttggcctctggttatcgagacagaggaatgacagagaaggctgagaaactcatgaacagtaaaaccattaaggacagaagaatgaataaacccgtcactccgcttctggagcaatggggagatcaaat

SEQ ID NO: 1053 - DNA, 899 bp, Arabidopsis thaliana landsberg
tttttttacagcaaattaaaaccaaaaattaataattacttatgagagattttaagaatttttaaaaggtctccgtaaatccaatggcattgagtcgtaaataagttccaagtccaggatttatttgttaaaattgctgcaaaaatgtatatctagattgatgcaaataaattaaaagaacagtacatcactatatccttgcaaatcatccgccaaatttgctttattttatatccaagtaggttcaaaatcatatctttgacaaaaaaaaggttccaaatcatataaaccaaaacaaaatcattgttttcaagtaaaatttacgttacaaaaaaaaggaaacaaaaatttatacatgatttttcttaaagtaattacacccataagtttcaatgtatcctcaatatatgatcttaaatcacttccatcgataaagcttcttctcaggcttgtaaaaaccccatctttccgaaccgagtaaccacaaacgtagctagggtaacactgagcagatgtgtcgggatgaacgctaaccgggaagttgacaaacccgaaattagaacggagatggcaatgcgtgaacgtgtgcctcatcttaccatcatacttaaactcgaccacgacataacggtctcctggtttgctcctcttccataccttattaccaccttttgcgcatacaaaacccgcgtttccattctttacaccaaatagatcgttggtgatgaccattcgtacaaccgtatttggccgtaccttaaattctgatctatagtctttcttgtggtacgcacttaacgaatttacctctaatgataagtttgagatttgtacaaggagaaggatgacaaaatttataactagggttttaggattcatcctcgttatacttgagggat

SEQ ID NO: 1054 - DNA, 1143 bp, Arabidopsis thaliana landsberg
ccaatattggtatggagagtaatatttacatgagaaatcgagatgattttaataaaatgcatggtagcttgctacttgctagtattgttttgaaatctgattggctctttagtttaacaaaatgcatcttatgattgccgatggggattattttaacaaaataaacttatacttgtagcctttggcaacgtttatcaagtggttctgttaagatttgatacaatgtgatgaacaaaagtttaaacattaaaagtaattcattcttttctgtagtacaataaatattactattgaaatatgaacatctcttactactattagacaaagtgaaagaggatgcaagcaagaaggatggtgcaaatggttgtctcaaaataacaagttgactgcgttgaaaaattattaatctcattttttaccatttgagatgaataagttagaaaagtcatttaacccattcaaccaaaaaagttagaaaataaactaattacaaagaaaatttgttcaacttatttatctactattttgtagagaaatgagctgaataatgtacaattcttttgttcagttcaaaattttccagtcattcatctacatgcaacatttgcagccaaagatttcatgttttgtgaaaaactcacaacaccagtttgcttggcatgatcggtgagcttttcttaagcagttttgttgtattattccatgattgtagcaatcagtatccaatcatagtacttcttttcaattgttcgaaatctttgagcatggtttagagaggtcggtcacggatgagttatgtgttcggccatccaattacatctgttttggctgagctattggatccaagaacatcgaggtgtgacgttgataactttggctgcatctaatgataccaccgatttgataaatcatttggatgaaaatgcttcgagagaatttgttctccatgaaaaaatatgtgactgaaagaggaaaataacctgaatctatttcattacttagatcgatctattgacttttttttttattttttttaacacagatcgatctattgataaagcaatcaattagtttgatacatagaagttaatacatgctcagttatgaagaatgtgatcgcatgcaaaacggcctgtataggat

SEQ ID NO: 1055 - DNA, 562 bp, Arabidopsis thaliana landsberg
  unsure (1)..(562): unsure at all n locations
taacacaaactaatcttcatctcctacatcactatgatgacttgcattggatccttgcggagttgcccaaatattaagagacctcctggtctaggtgtttgtcgcatttgtccagtttcaaaataatttgtgaaaccgagaccagatgatgatgtttgttgaattattggtggagtttcagttgttgcaccatctacttgacctccaactgaaaatccatattgaacatttgttgaagtcgttccgcttgaaccaccttgttgaaaattttctgtttcccgccattgtggagcatttggtgatattcccattgtggaacatttggtggcgtgcctcactgtgcatttggtggtgttcccactgtggagcatttggtggtgtcctcactgtgcaacgtttggtggtgtccnnnnnnnnnnnnnnnnngaccccaaaaaccgggtgaattttgccacccaaattattaccaacggaggatggacttctagatgatatactcctaaatgtggaccccaaatgaatggtctgaaccaactgttttacacatcttggtagtgcgtga

SEQ ID NO: 1056 - DNA, 599 bp, Arabidopsis thaliana landsberg
atataaccacaatgtcttaagatccatgcaccattttcaaattctagacttgttaatatccacatttaacagagaaaactaatattttaatatatatcatgatttaatttcaagtgacgtacatacaaatattatcgttatcattattaaggatataatcatattcatgattgattcgattacagtatccatgattgctaacactgcaggtttaattatgtacaattgtatattctcatgaactactcttgtatataccctagctctcttcctctgtataagaaactatcacttgaatacacatctttatggtatcaagagcaaacgattcctataaacacacagttaaaaataatcatggaatgtacccattcacgtaaaaataaacacaattaaagataaaattcaaaattcagtagctcttttgaaatgagctaattaaattattgattcccattttttccaatatttaacattcagttaacatgcatgtacaactattatcagcataatttgttcttacatataaacatttcaagaaagagtgccctagagtagatagtttatggaagaggagacaatatatgaggttgatgatc

SEQ ID NO: 1057 - DNA, 459 bp, Arabidopsis thaliana landsberg
tttgtatggttttggctctaataccacttgtaacgccccaaccgcccctaccaatgggccccacatcttctatcgggcccatgggcacaatcaattcttttaaacctatccgcatgtaccatcatattcctgaaaccggggtgttagattcttgatagttattctttaattcctgaaaaattattttgttgaaaatttctaatgttatggtaatcatatgaaatattgaaatgatacattgtaggaaaagtaattaaatacaaaaagggtattgaaaaaatgttaagagatttttttagtataaaagtataactagattgagtgaatatgaaaatagttttttttaatttgagaggaatgacacatgttgaatgaataaagcagcacttgtcagtttttttgagcataagtttcaggtaaccttacattattatataccgtaatcgatgatatggttca

SEQ ID NO: 1058 - DNA, 1368 bp, Arabidopsis thaliana landsberg
tgagtcgagtgggtctatgcttgggatttttcagttttcgataaccattttgacgaagttatcaatgctaacaggtgtacaagcgcagttatgacgtgtgcatgcaactatatgaaaaagagctttggactagggattcatatcttcacgtttatgggtatgttgcttattgtccccctcatgaatcaaaatctacgctttagttttaattgttgcctggtgtacctgttctttggctatcctgtcaatcgtttttgtgcttttatatggaagagcaatacccgattaggtttaaaatcttatgcatggcttattaacttaaaataatctctagtatgtgtttccattttggcattttgttagggttcagacaggtaatctcaatgcggttcaactttccattgttgcggtatgctctcaatttgcgtaatgatacaaggcacccttcatctacctttctttttaccatatgaagcttacataatagttgctgagctgcaggggctttgtgaatggcgggatcggattgcacgcgcagatgatgagagcaccggttatgtattgccaaataaaactctttttgacataggtagataatttaccatttcatctccaggttcttggatatttgtcggtggttcctaatttggtctaactcgttttattaaataacagccaaggagatgccaattgttgttgcccagttgcgccgtttgttgaagtcaaagcttccttacctcgagcgtaattttgacgcagtgatcagtgtcatcagacgatcaatgcaaaatgcagcggcattcgagccagttgttcaatctttgaaagataggcgtcctgaaacagtaagatatctattatgttatgaattaatagtataactccttttggtttctttctgtttatataaggagtacgaaaaaaatgtgcttgccttctaattctggagtggttttggcaatgattgctgttatcgagtagatatgttttgaaaaatatgtattcttaaaccgtaagttttagttgtggtgtagcagtgatcatatatatatgatgcttgcttgattgaaacaaggtgcattaggaactaaatcgtgcacccttcaatagcatgtgaacttgcaaagaaattataactagaggagagttatttgcaagtgctgattgctagatgtttcttaatagccatgagtcgtgaaagctttattattgcatgcacttggtaattatttatagtaaaaaatttctctttgctctgtcttttcttgatttaagtggttgaaatgaatatagaacctaagattgagaaaacagacacaggagcttcagcgtcttctctgagtctggagaaagtttgtgtggatgatt

SEQ ID NO: 1059 - DNA, 1552 bp, Arabidopsis thaliana landsberg
tcttccgatggcttctttattgtgaagaatatcccctatcggaaatccagtgactactatgactttgtggtcgtcgaagtagcgacggagcttgcatgcagttagaagtactgcttcgtacagtaccagccctttgacatcaccttgatccttgctgatagaacttcaaggagacctttcagcattctagagaacgtcccaataatgatagatggagttgagatacctacagattttgtcgtgcttgaaatggatgaagagggaaaggatcccctgatcctaggtaggccattcttagcttcagcttgagcagtcatagatgttaagcaaggaaaatttattcttaatatgggggaggatttcaaaatgaactatgaaatcagggacactataaagaagccaacaatagaagggcaaacccttcttagttgaagaaatgggtcagctagctaatgaactgctagaggagcttactaacaaagatcaccttcaaactcctgtgatcaaaagtagtgaagctggatttctctccagtgagaccttgagctatgagatgtcattagactcacacaacaaagtaccaggatcagagatctttaaaggtgtcattgcgttagaaagagaggatgttgcattgaacgaggaaggctcaattgatattcgactagagtgctcaaccaaacagctaaagtcaagcatgagggcatcaaatgattggctagaactcaaggagaggtctaaatggcacgacagagctataagagagctaacacacactgtgaaagagctgaaggatcaagtcaaggagctccatgggaaagccaaccaagcaccactcgacatcaaggaagtcccaaatgatgaagttattcctatggttagaaaagaaggatgtgaattcacattagaacggtctagaaaagacgactatccagatgatgaaaaaggagagtaaaagctcgagagtgcgatctagtggttttgggacaacatctttctcaacgacaatgtcataccactcgatcgcaacattgcaatggtgtgatcaagtggtcttctagtggaattgcccaaaccactaaatcgcaaggagaagtaaaaacgcccgacatgacttcaatgacaacccgcctgaagacatgtcatccagccaccatgacattgctccgtcaaggcaattcacctataaacatagggaccacaccgttccgcaagttccccgtctcatgagccaatggaaaacaagaggaggaagagtgctagaactgtacattcatcaaccaaaggccggataatgtcgggctggagaacacatgagtgtcatgctccacaacatgttggggttgcgatcgagcttaatgacgaggagatggcgaggccacatcaagaaccggtcatgcctgctgagtacactcaagcatatatggatgactacatctccaggacattctactgaggtaacacattaaaaccctttgtaaataccgcttttgtttttgtttttgtgtttatcttgaattctttcacaaattttgattacacaagggactgt

SEQ ID NO: 1060 - DNA, 577 bp, Arabidopsis thaliana landsberg
ctccaagaagaaagtagaatcttggttagcgtttcagagtgaaatatgactagatgtcatgtgtatgattgaatataaaactagaacttaacgagatactgaaaagtaaagtagtgcttccttgttataagaacttcggctttaccatcaaagctttgagaatcaagaagaagcttggtttgtgtttttgtagtcaaatatgtcttgatgcattgtttatcattcagtataagaactagaaacacaaaaagaacctggaagttaaagtaggatttcgggtttaaggtttaaggttaaggtttagcgtttagtgtttaagttttaaggtattggattcagacttacggtgtaaggcttaacgtgagggcgtagggtttaagggttagggacgacggctatgattctatggattaggagcaccagctatcaagtctagaatattgttagaaaggttacctaccgacacatctacattctgattagaaccgtcttgataatagttctcatgaaactccacgtcataacgaaatgcatgggtcgtcatatccacatatggaacttatacaacatgacgcac

SEQ ID NO: 1061 - DNA, 392 bp, Arabidopsis thaliana landsberg
atacgatttattttttaaagtaagaaaggaaattatacctgaaggttgtgtaaccctaataactggcgattccttgatctccaccgctggattcgttctctgttttgctctgattcgcgattccttggtctccaccggtggatgcgtgctctgaatacctctgattcgcgtcctcctccttagtcgaagctttcttttccaaagtaatcgcgcaagcgaatctcatacctccaatccaagccgatatgcaacatgaggcttcaagagatggcttgctgagaacgcctcgtaagacgtaatcgtacggatcgtagagaacaaacgtggttcagtctgtgtgaaccaacggcttggcttcaccgtctcaccgaatacaagtgagatcacttctt

SEQ ID NO: 1062 - DNA, 1791 bp, Arabidopsis thaliana landsberg
caaaatattaaaaatttatatataagaatatgttatttaggtaaataggaaagagaaataaaatttaaaccaaaatatccctttctgtttagattaattccaaaaataccatcgattcaaaataattttaatatttaaaaataaatatataactatttgtttagcaagctaacatatataataacgtgttaaatttacatattatatgttaaataaatgtttatcgattttaaattatgaatcaatatttttatttatatatatcaacacaataaaatatatcatgttacataattaacatgataaagattataacaatattttatatagaataataacatgctaacatactaaatatcgaaataatagttctctcaatacggtaaaataatcgatatatgaaaataacatggtaacatactaaatatcgaaatagtatttgtcttaacacgataagataatcggtatatggataatatttatttgaacgtactaatgttttatccagccttttattttcaatttaaataatttaaagatataattgtcataaaattaaaacagtaaaaaacaacaatattttcttttttttatcagttaattatcagttcttccgtatagatagttatattacccgtttattacatttacatgtttttttttctgaagaatgcaaattagttcattactctaaataaatatgtggtctacccactacaaaaaagcggcacatgacgtcggttattttgaccatgacgtcgatactaaaccgacttaaacaaaatagcatcagtttgaaaaaccatcgtaataacttgtgacgttaagtattttgacaccactataacattcgttgtttatttctgtgtctaatatttgaatcggtttaagtaagtttagcgactgtttttatgtgccacaaaatcaaaaactcatttcttgctttgaaagtttcttaagtcgttttagattatgacgttattaaccgacatatgcatatatacgtatgtgcttcgatataaaacaaaatagataagtggctgcacactagtaccatcaagtcaccacgccaactaactaaaagactcacctaaaaaccttctttatctttaatgtattctctttgttcatttggttttacaaccaaaaaaaaaaaaaaaatacaacacttcatgcgtaagacataagcaaaatggccggtggaggattggctcttgatgtctccagcgccggaaacattgatgccaagatcacagccgcagttgtcatgagttgcattgtggctgcctcatgtggtctcatttttggctatgacatcggaatctcaggttacaaattcaagaacataaaagggtcattttattaaacaagtatattagaaaacaagtatattagttaatttatctttgattataatttaacaaagggggtgtgacgactatgaagccgtttcttgagaaattctttccatcggttcttaaaaaagcttcggaagctaagacgaatgtgtactgcgtctacgacagccaacttcttacggccttcacatctagcctttatgttgccggcttagtagctttcttagtggctagccgtctaacagcggcttatggtcgccgaaccaccatgatccttggcggtttcactttcctctctggtgctctgatcaatggcttagctgctaacatcgccatgctcatctgcggtcggattttgctaggatttggtgtcggattcaccagccaggtagctatatatagttccaatttcactagagcccatagcatattt

SEQ ID NO: 1063 - DNA, 530 bp, Arabidopsis thaliana landsberg
cgttgatccatcatcgaccaacaacaatacttcaaaagctaacttattatttattataaaaaattacagtgttatttagatagttgtacaaatacaaacaaaatatatttatatccaatataaatatattttgtatatatatataatgcattaattcatataatatttactttattttttcaatttcaaaactaaactaagagaataaatatttttttaagatatgaactattcataataataataataatagttagtttcttaagaagttaaatttttaattgctaaatatttttaatcaatagttagttttttcttatattattcgtaaaaaacatttactttgaatttaaaaattaccgagcaaaatttacactaaaaagttatatactcaattgtttttcatattactttcttatgaaacttatatactcatgtgcatataggactgtaatgattcattctctaatgaatcaagacggttatatattttacttgataatacacatgaaagattctctcactcatat

SEQ ID NO: 1064 - DNA, 1217 bp, Arabidopsis thaliana landsberg
accctaaacattagatactaaactctaaacattaaactaattcttaaatttaaaccctaaacccttaactttaacacatagacactaaacccttaaccatatacatataccctacaccatataccataaaccctaaaccccaagccctatacgttaaaccttcttattgttgcccataaatgttaaccctaaacccctaaaccctaaaccctaaaccctaaacccctaaaccctaaaccctaaaccttaaattttaacccatagacattaaccttaaaccatatacataaaccctaaaccctaaaccctaaatcctaaaccctaaactttaacccatagacactaagcctttaaccatatacatataccctatatcatataccataaaccctaaactccaaacccttgactttaaaccttcttattgttgcccataaatattgagcataaatcccctaaacaaacataagccaattgagaaaatagaaaattcatatgattcattaattcatatggtcaacaatgaaatataaaatctttttcaagaagcatgtgatcataaacccaaaaataattgtagatgaccatggtccatttaccctaaaccctaaactttaatccatagacactaagcctttaaccatatacatataccctataccatataccataaaccctaaatctcaagccctaaactataccatatacactaagccttccttaagactaaatcctaaaccctaaacactaaatactaaattaaatcaacatcttttacataacataacgcttgttttatgaataatattattaaaacgcaatcattttaaattatcgaccgtccacacacatccactaaactctaaccatgtggtcattttaatcattttgaattatcgaccatccatgtacatccaccaaactctgaccacatagtttgcataatagtaatttgcatacaaatgagaaggacaaaatagtaatttgcatacaaatcatcctcttcgtgaaaacctagccgcctatcactctgtatttttttggatatgatttttttatatttttccattttttaatcatttgctcattgttttaagagatgaaaactgcacaaaaccacacacatccaccaaactctgaccatgtggtcatttcaatcatttcgaaatatcgaccatgcatcgttgtatcttgggtagcttagtatagtccttttt

SEQ ID NO: 1065 - DNA, 2392 bp, Arabidopsis thaliana landsberg
  unsure (1)..(2392): unsure at all n locations
aactatctcaaagaagaacgtcgattctgtcggatatcctctgtcgttgtcatctgaaatcgtttcttnnnnnnnnnnnnnnnnnnnncttccttgtcttccctcttctctccggatcaaaatccacattcttctaattctctttgaaatccattccaaatcgacgttcatctctttgtaaggtatagattctctattctcagtcatttgtttgtttgattcatatatgcaatggattgtgttcggttttgtgttgtgaaacggatggattgtgttcggttttgtgttgtgaaacggatggattgtgttcggttttgtgttgtgaaatggatggattcggttttggatttgttgtactttttggttatgaatttcaatctggaatgtgtctttattttatggtgtgtctttgatatttggatttctttctttagaaagatgtaagacttgattcatcggatttgaaatgcgtggaattaaaggatgtgtgtttatttcttacaattatgtagatagataataacaagatcatgtgagtttgtatttgggtgtgagtggattgtgagtttgtattcggatgtgtctttatctgaattatgtctttgataatttgagattttttataaatgtttgatattgaatatgtaatttttgttgtaggtacttattaaatggctattaccagaggaggaggatctaattctagaagtgaaagggctgccaaaacacaaaattagtctgatccaaaccatttagtgattgcagttggagtggatagtgacaagaacatgaaggggactcatcggcgaatgatcctttgtgacataatgaggtaagtaatagacatatggatgtttgatttttttagtacaatagagtaccaatatgtacaactatgttgtgggactaaatttttgtgtgttaatattgcaggaaatagagattctgatgaggatttcatgcctcttcagcctgagagtttcttctttactcctgatgagtatagaaagactctgaagatttatacaaggtgtaccattgctaacacgctgcttgtcataggggcgaagctcaacaacagagaaaagagatggtttatagagaaccaacaattcaagcatacatggtgttggggtcggatttcacccagagaccgagccaaacagataagggtcataaacgcctcgagaacaaagcttgttatcgttcccgagcccaaaagattattcatggaaagttatccgctgaatcgcctcggataaccctcactcggcacgggtgtagtccaagaaacacattctgagccggcaataataacatttataagattagaagaaatgcctcgggtaaccctcacatggctcgggtgttattctaggaaacacatccgagccaagtttgagcacgccttggggataactcagatcacctcggaagatgttcgaccacgcgttccgagccaaagtgtcctcgcgccttccaagttcttacgatatcctcagagctcccgaatgataaggaaagtatctttaaaacaaagatcctctataggcgacttaaggataaatggaaatcttcctagactatcactagaagcggtttatgagtcctatataaagcgcctcaaggtcttcgcaaagggggacacaagaaaacgctctcaacttcatactatcaaaaaggctctgactttgaaggcttaaaccctttttcattacttttctaaacacttgtacgaccaaatcatcaccttttactaataatatcaagaacatcatccatggttattcatcgattctgatgttctttgagattctcgcgatgatctgttctttgaaaaaaccgtaagtacaatttcgattgtgtgagttttgactctcacatatggcacatggttaggtcggataaaaataagctgcaaggtatgttgatgctccttatgcggactgctttgacagagaagaagagagtctgctggtttgtggttaatggcgnnnnnnnnnnnnnnnnnnnnnnnnnncatgctctaataactggtttcgattgtcatcactatttatttagattataaagcaaggagctttggtatttatgactttgtggagagggtgtttggaacaaaggttgttaacatgaaggatgtggaagacatgtttgattcaattgaagatgagtgtggtggagatcggttgcaggtggcagtctagctctttttatgcaagataggaagaggaaggagaatgtttaatagcatccattcatccattcactacttttgaagacactatggacgagatccgtcacttgatgaagaagcggttagagggcacaatggaagtggactatttatttccaggcttcattgtttttcttgaggtacggttctatatat

SEQ ID NO: 1066 - DNA, 558 bp, Arabidopsis thaliana landsberg
catcatcgtttttctgaacttgtagtggatagtatagaagacctaattaagctggggaattagttttgaggttaatctttgtcttccattagcgacgacagttacgtttacttgtaacccaagattcgaaggtcaattttatatgatgatatatagttgtaacagagtagacacacatatctgtttaaaagaaaaaaagccgaagcatatactgtttgtaacaaacattttacccaatctgactcgaatgagacctattaaacaaacaaaactgagtaatgaaactgtaaacacttcattagcaggtatttgtaagcgtaagaaaaatccctgattcggaacattcaacgtcaatatatgtaagacgtgagcaaagatcagccatgtcaactcccctaggcatttattacaaccttgtacatacacattataaagactcaagaaattattggattgcgcaacagagaacttgtgtacagctcataagtttaagatgagaaattacaaattgaaccaaacctgaatcataaccaattcttatggttaaaaattctaatc

SEQ ID NO: 1067 - DNA, 1314 bp, Arabidopsis thaliana landsberg
gaacaaattggggcaatatataaaagggcacaaccggttctacatcaaccacaccaggttacatcccagggaaaccaatacataattcaaaggagtatgcccacgcaatcactctaagaagcggacgagagttaccaccaagaggagagccaaacccctacactgaggaaagtgtggttccagagggggaggattttgtatcaagatgatgttttggctgacaaaacaatcgaaaagcccactcaaccataagttccaccagctactccctctgttgaaaaactagtagccgcaaaaaccaaagacggaatcttcctaccaccgccctacaaaccaccgcttccattccctggtcgtttcgaaaaagttctgattgcgaaatatcgtgctcttttggaaaaacagataaaggatcttgatgtcactatgcccttggtagattatttcgcgctgatacctgactctcacaagtacgtgaaagacctgatcacataaaggatccaagaagtccaaggaatggtgatattaagtcatgagtccagtgcaattatccaatagaaggtcatacctaggaaattgggagatccaggctcattcactctaccatgctcactaggccctctaacattcacaagattcttatgcgatctaggtgctttggtcagtctgatgcctttctcagtagccaagaaacttggttttgataaatataaaacttgcaacatttcgctaattctggcggacagatccatcaggatacctcatggcctgttggaagatttacctgtcaagataggttctatagaagtacctaccgactttgtggtgctggatatggaagaagagccgaaagacccattgattttgggaagaccatttttagctacagcaccaacctcgggaaagatcttcggatgactttcgacatcaccaacatgatgaaaagcccataatagagggtaaagttttctagatagaagagacggaattgctagctgacgagcttttagaagaactagcataggaggaccacttacagagcgccctgaccagagacagtagagaaaaagacttacatgtggaaactttgggataccagaagctgatggatatgagcagggaagtcgatgactcagaagactttgaggagttgagaccactcgatcgcaccaacgacccactcgatcacgtcactcgatcgcaaggcgagctacatcactggatcgcttgactcgatcacgattccatctccgacgctgaatcaccacctgacgattggtccgagctcaaggcacccaaggatgacctaaaacc

SEQ ID NO: 1068 - DNA, 534 bp, Arabidopsis thaliana landsberg
gagcttgtttgtttagctcgcgagtcagagcagaaaaaatgtatataatcaaattctagttaacttcaaactaatttaacaacagaaaataataattatactcatagtttcacataccacatcaatgtaacaccagattaacataactcatcaattaacaattcacacacatattcatcaatttaaccccaattattttcgcaaagaacaatttaagacatagacacaatttattaattattagtttaactcttagaccatagacaccacacatacatataacatgttcatcatttgttatttaaatgatatacatatagcttcgttttgctgaaatgtgatatctcgtttagtttgcgagctggctcgttaatgattaatgaaccaagctaggatgtcaactcatctcgttaaaaaaattcaaaggagtcaatccgagtcgagcggagttgaactgaccacgaaccgagcgagtcgacaagatacaatcatttcgtccagcactaagattgactctaggcaccataggtacat

SEQ ID NO: 1069 - DNA, 2355 bp, Arabidopsis thaliana landsberg
caaaaatttgtgatattattaaaataaattaataatgtttttttgtaaacaaaatttaataatgtagtgggttaggtttttatatatttctcaatttcttcttcacacttattatcaaatgcatgttatttttgtcaaagaaaaaaatacttcttgtaatttggtattacacacacgtgtgttttaattttatttttctaaaaaattgaaggaaacaaaagcgaaaacccccaaaaaaaaaactaaagggataaggattgatccagccatggaagaatcagagtccgaaaatgaacaatgaattttgtttgtgagatttaatgtgcgtttgggatttgattttgttgtttcttcatgcttcagtcgcatcgaagatcaaattagagtgattcgactctgcatgttacaacatctttaggctatgtctgtgtgttgttggtttcagagcggccaaaagctttcttcttgccgctttttctctcacagatttcttcagttttggtcagaatctccattggttaaggtacagtgagaatgtgagatgcttcactcttctttcacaggtttgaaatatagactcagctagagtgatcttagagcaactcttgttggatatgaaatgatattagggataattttcatcacaaaaagcttacaaatgtcacatctttatgcagaaaagaagagttcattgttttgagcagaagaaagtaagttgaaagaaatacaaaagcagaatgaatttagataccgggaaatgttgttcttgttcactcacttgcctattatgagtttggctctggcatctccggtgttgatctggaacttatttgttagtccaaagtgagccattagaagccacacaaagtttatgagctcacagcctctactgaattgctctacgtgagccgtagcgtcgcaatgcaaagctgcaaaacagagaaattccacccacactttactcaatatctcccatttgtttattttgtgcgtcttctccatatccataaggtctttggcgagcctgctcgcgtcaaacaacacagacttgcttcgagatcccttcactcccattatttcaatttcactgttgacgtccagaatattttcggtggctatcttcacgcttctcttgttcccaatatgcctcctctggaaaaacttgtcagcttcagccaatgtgtctctgaatctgatcttcccaagtccagcaacctcggacatcagactgggttgcaagattaggagatacatcatatagtctgagatgatcttactgtactcgcggtaactgtaatgatctttttcatcataaccctctggggcatattcttcttgttggtaacagagctcggttgcgatgtgccacatcaaaagactttgatcataatcgaccattgtgacataacgcaccagtttttcgcggtctgctttaactggcaggttgtcccgcaaactccattgcccccgagccaaagatatacttttggcattttcaggactgtctccaaactttgatttgtatttcagctcattaaacatgaactcccacaattgttttgtcatcggctctccgtgtacaaacaaagtcttgtggactgtatcaagcgtatccgagatgtcgaaaaactcactgaggacatcccacacatatttgatgaaatgagggatgcgggataggaactcaaaatagagagggtaaatggtacgacgagccaaaggataaattcttgataacccatcgactttgtggctgatccacctgtgcacacaattgatcaacttgacaatatatccaaatactctctggacgatgaagataagtttttcgaatgggaaagatatgatcttccatgagtaccggcggacactacctcttgcgtcgtgaatcctctttacatctgcttttgtggcgtaagctaaaaagttgaatacgttgatgcttccgcaccacctccggaggaaaacccgtgtcgtgagcacgtcatgcttctgtactattgaacatttatcagcaccttcaggacacttatgccaacctttattgtggcattcttgtgttttccaacgcagctgcctgaaactaagtaacgaatcgaaaaatctctctttcaatgatagacgctcatccggatcatcattcaagctagtaagtacagcacacgtccagtcggagaacagaaacaagagtatggatatgaaatccaaagctataccaactgcaaacagcgtgtaggtatcaacaacatcagctccatgaaatagtttgtcttttttaggtgtcttaccaaagaccatgaatccaaccacaagggtaccaaaagaaaagatgcgtgagatagttccagtagtgga

SEQ ID NO: 1070 - DNA, 566 bp, Arabidopsis thaliana landsberg
gtttctgttatatgagggaatcacgggtttttgttgcccatgtaaatcctgactctggtttaaacgttttcttggaggctaaatctcttggaatgatggcaagtggttatgtttggttcgcaacagactggcttcctacagctatggattccatggagcacgtggattcagacacgatggatctcttgcaaggagtggttgcttttcgccactacacaatcgagagtagtgtcaaaagacagtttatggcgagatggaagaatcttagaccaaatgatggcttcaactcttatgcgatgtacgcttacgattctgtttggttagttgctcgtgccctcgatgttttcttcagagaaaaacaataacattactttctccaacgatccaaatctgcacaaaacaaatggtagcactattcagctatcagctctaagtgttttcaatgaaggagagaaatttatgaagatcattcttgggatgaatcaaactggtgtgacgggcccaatccagtttgattcagatagaaaccgggttaatccggcttataagttctaactaggaggtca

SEQ ID NO: 1071 - DNA, 832 bp, Arabidopsis thaliana landsberg
taggtttttaagtcaattatcctaaaacaccaatcatgtcattgtagtattttatgttgtcaatccaaatgggtgtgatgctaacaatcaagatgtgatcagaagtcactaagtcaagccaagcaataacaggttttggtgtgttctatcagtcctaagtgaacatgcaaaaaacagaaaatcaaacagaaacagtaaaacactcgaacaacacaactctttgcagagcactaggtgaggtcgagtgacaagtcgagtaacagacagaaaataaaatacagatactcgactgcacagtctgttgccagacaactgtgtggtcgagtaacaagaaaaaattacagaaattaagcgacagataacaagatgcagtaaacaacagtagagtaaacaaaggattcaatcagaatactgaatactgaatagatatcaagaacaaaagatgaatactgaatactgaatagatatagagaaatccggattacaaaaggtctagaatacaaggtctgcggaatagaactagataaaaacttgtctacaaaaatgtgaagtacatgctacttattgccaaatattctgaaccctaatacttaaaacgacgaagtattgggacggattaagaactgtattcgcccatgtggtcgagtgaatagctggagtcttcttttcttccttgtgctcgagtgtctagttgagtgcggaatgaagaaggctctgaagcttgtcatcgagtatgcagtcgagtggtggtgatggtgatactcgacttccaggtagagtgatgaggtcgagtagaggtctggcaatggatgaaagtaactcgacctgggtc

SEQ ID NO: 1072 - DNA, 1253 bp, Arabidopsis thaliana landsberg
ctcctagcgtcgatacacgcctaacggccaattctgatctgcaaaccatcacatgttttgcgtaactttcggattcttctttattcttcactgacttcacacgtgccaactcccacgtgcgggttctgcatcacaaattcttgggaaaaggtgtttatggttctgttgatctcatcagatacactaaaaccgatggttcctcgttacaagccgccgtaaaaacatcttacgctgaagatctcgaagaatacgacgcgctcaaaagagagatacagattctgtctgaactcaagggatatcccaacatcgttatttgctatggagacgatttggaagaagatttcaacgaacacggacacaaagtttacaaattgcttcttgaatacgcaaacgaagggagtttaagttcattcatggagaattatcccgacagaaagttaccagatccgatgatcagagacttcacgcggatgattctcgaaggattggtctcaatgcatagtcacggttatgttcattgcgatctcaaatccgataaccttcttatcttctctcggaaagattctgcttcgtgcgagttaaagatttttgattttggaaactgtagacaagtcggagaagttccggatcactggaaaagtgattacccgtatgtgggaacgcctgagtctttcttcgacggtgttgccaagaaaaccctagatttgtggtcgttagggtgcttagtgttgaagatttatacaggtgagcagccatgggaaagagttactagtgtcgatttcgtgaattttcttagtgatggtgaagctccaaatattcctgaatatgtgccttgtgatgcaagagagtttattgaaacgtgtttcgcaagggaacatgagaagagaggtaccgcgtctgagttgttattgcatccgtttttgtgtcagaagcaacccttgctggtgaagttgaaattgagaatcaaacaagcttcgaagataacaatgggtattagagagaagcccctgacattgaagatgtttctatctaagcctccacaacttaaaaaacttttgagtaaacttttgaggttgaagaagatgattcatccgaaaccattggaattggattctagtttccgttcttacagtagtgatctctgtttattataagtgtatagatcacaattatgcaaattacttattcctattaatctgtaatttacgagattagtactgtggagtttagttttgctttgaaggttttttttg

SEQ ID NO: 1073 - DNA, 7001 bp, Arabidopsis thaliana landsberg
gtgtagactttgtcaaatcttatagaaagttacatatttttccatttatttattttctggggtgtgtgaaggtaatggccggtggagaatctccggtggcggttaaggccggtttctgagactggaccatttggattaacttttccagctaggtttggcttttcttttccctctctttttttatttatggtcgaaagtttttattttagttttgttaaagtaatctttaaatattcaaacctgcatcattatctgtctaatttcttgatccaagaacatcatgattacatgtgcaaccctgtgttttagcctttttccttaaatgaaataaaaatatatcattgtatcactaagggagatattaactcatctatccaaaaaacactgatatcatgtagtactattatttgataacaaggaaaacagcatgtaattggattttataatccctttataacagactaaacaagaaaaccaaccaaaattgactaatttcatttgcaaaagagaatacaaagacagctaaattactagtacttttctatttgacatcaaacataaaaaaaaaactataattagcaatgacaaagaagaagattagagaaaaaaaaaaaaggaaaaacagattgtgtagctctcacctattaatgctttaaaacaaaacagatgatgaaacacaaagattttgtgaaagggaaaaggccaaaaccttgggttttttttgagagaatcccgtttaaatctattaaggaaaatccccccaataaatggccgatcccgcagctgaatctattgatgcaagttcgtcgcggtttgggagagtcgtatgttataaccaaacggcaatgcatggaagcaacaccatttcagccgcagctcctttctttatgacgcaactgtctgtcgctaatcttacctaccgcatactctactattttcttaagcctctatgtcttcctcctttcgtcgctcaaatacttgtgagtagtcaatcttgaaaacatatttaactaaccattatcaatctttaaactgttttttttcattacttattacccacaactattgcaaacctatgtttccttttttttctttgttagctatgtcctaaagagtcttcatcttcaaattcttgattaaatttttgctaacaattaacttcattgttctaacgaaagtttagctttttgcttcttttttttttcgaaaacggtgattttaagataaaaccaaaatgataaaaaatttaagatttgtccacttgcaacatacgatttatattattggatctttttcaaattaatctcgtacataatttataatatgatcctataataattgtaatgattattttgtttacagtgcggattactgttcagcccgactgtgctcggcaataacgaagtggtccttaaacttatattcccttataaatatacaatgcttcttgagacattcgcaaacttagctctcgtttacaacgttttcctcctcggtctcggcttggacttgaggatgataaagatcaaagacatcaaaccagtgatcatagccattgttggcctccttgcggctttacttgccggtgctggcttatactaccttcccagtaacggagaggccgacaaaatcctagcaggttgtatctactggtcgatcgcatttggctgtacaaatttccctgatcttgctaggattcttgcggatctcaagctcttgcgtacggatatgggacataccgcaatgtgtgcagccgttgttactgatttgtgcacttggattctcttcatttttggaatggcgattttttccaaatctggtaactaaatatggttgttcccttgtgttatttttcctcacacacgcatagttactgaattatagtactaacgaaaaccatatttaatttgttaggtgtacgcaacgaaatgttgccatactcattagcatcaaccatagcttttgtccttctctgctactttgtgatccaacctggagtggcttggatcttcaacaacaccgtcgaaggaggtcaagtgggagacactcacgtatggtacactctcgctggagtcattatttgcagcttaatcaccgaagtatgtggggttcactcaattaccggagcattcttgttcggtctatcgatccctcatgaccacatcattcgaaaaatgatcgaagagaagctccacgatttcctctcgggaatgctaatgcctcttttctacatcatctgcggtttaagagctgatattggttacatgaacaggaccgtgagcgttggaatgatggcggttgtgacttctgcgtcggttatggtgaagattttgtcaacgatgttttgctccattttcttgcgtatacctttgcgtgatggtttagccattggtgcacttatgaataccaagggaacaatggcactagtcattctcaatgctggacgagacaccaaggcattggacgttattatgtacactcatctgacgttggcgtttctagtgatgtcaatggtggtgcagccactattagccattgcttacaaaccaaagaagaagttgattttctataaaaaccgaaccattcaaaaacacaaaggagagtcagagctttgtgtattgacatgcgtccatgtcctccctaacgtctctggcataaccaatctattacaactctctaacccgaccaagaaatctcctcttaacgtttttgctatccacctagtcgagctaacgggtcgcaccacggcttcgttgctcattatgaacgatgaggccaaaccgaaagctaactttgctgaccgagttagagcggaatctgaccagatcgctgagatgttcacagctctcgaagtgaacaacgacggggtaatggttcagaccattaccgcggtttcaccttacgcaacgatggacgaagatatttgtttgttggccgaggataaacaagcctgcttcattttattgccttaccacaagaatatgacgtcagacggtcggttaaatgaaggtaacgcagtgcacgctgaaatcaaccaaaacgttatgagccacgcgccttgttcggttgggattttggttgaccgtggcatgacgactgtccggtttgaatcttttatgttccaaggcgaaaccacaaagaaagaaatcgccatgctattcctaggaggtcgagacgacagagaggctttggcttacgcttggaggatggtgggacaagaaatggttcaactcacggtcgttagattcgtcccaagccaggaagctttagtctcagccggggaagccgcggacgagtacgagaaagataaacatgtcgatgaagagtccatctacgagtttaacttcaagactatgaatgatccatcagtgacttatgtagagaaagtggttaagaatggccaagaaacgatcacagcgattttagaactggaagataacaattcttacgatctttacattgtgggaagaggatatcaagtagaaacacctgtgacctcagggttgacagattggaatagtactccggatttagggattataggcgatacattaatttcatcaaacttcacaatgcaagcttcggttcttgtggtccaacaatactcttctgctaacagacaaaccgcagaaaacaacaatcaagaacctgtccaaggtaaagccaagaccgatcatgaggctacgccttttatggaagacgaggatgatgaagtagaacatcagtacagtatgcgcagatgattgttttttcttaacccatattgtatacattctttagatggaatttataatctttcttttcatattgtaagtatccccaatgacagattcaatatgctcaagtagaaaccgttgcagcttctttcttaaatcttcgactttctcgttcgtttctgttctgtttaagttcagatcatcgagccaatggtttaaagctttaaggtggacgagaagagactcttttccatttgtttcttccgtcttcaccaagaaagaccctttgttcaatgaattctccaaatatttcaagaaccattggctggaaacttggactagctcatccgctagactcgttgaatccttcagactgcttttaccttctaagctacttcggtctgaaacagaacaatgtttcgttgcaggcggtttcgcgcctttgtaggatggggttcttgaacttgttgtctccttggggttcagtttctcggatgagttctgcataacaatgtagtgatgatcagcagcatcacctttctttccaggctctttaaataagttgaagtgagaaaaaccagtcactaccgcagcttgaacccaagatgttgcatttttatttactactaatctacacgagccgttgtttcgattttgagtaagcaaccgatggaccgctttgcatgtattctgtgtattgtggtagatgtccaagaaccgggccactacttgtccagtagataacttcttagtagaatcacacagctcggcaaaggccctgaaggaacaaattcatatgtatgctattattaaggactcgcaaactcgtgtaatgaaactggttagggatgaaatagagaagacatactgcaaactaaatagaacagactccatggcagatgcttcctccagtgcacttactgctgccgaaactgctacttgcctatgtgatgaaacttcctgaaaggaggggttgaaagacatgactacgaattcttagagtcggtagattgatccaaataccgtacctttccgagcaattgaatggtttttgggagtccactccatgacattctttgatcagaccaagtcatgtgacttgaaggcaccttaaaaagcgcaaccggaggagtcactgcctttgacaaggacttgataccatctttaggagacctagtcacggatataggtgatgcaggcttgaccacatatctgcttcttaaagcaggggtttcgcagttaaggtgctttgatataggtgacttgataccatctttcggagaactagccatggatataggtgatccaggcttaaccacattcttgttccttaaggcaggagaggttccacagttaaagtactttgatggggactcaatctttagcagactcttatcattcaagacctgcaaaaacatcacaaatctgtgaaagccaaggacttcaagtgtatgaactgtgaaaccaatatcaaattgctgtactatctataagaaacaacttttaaggtcttcctgaaacaaactattttagcaacttaaagaacaagaaaccctacaccactcaaaacaacagcttccacaatccaaccaaatgcaacaaaaagaatcaaacagagtgactcacagagcaacattcaaggtctacgaagactagtctagtagtattgttggtttctcacatgtcacatatatcaatctcataccattgtaggcaacttaaaggacaagaatccctacaaaccactaaaacagagcgattcacagaagaaaaaaaaaaaaaaaaaaaaaaagatgaaaggtgtaccaatttagatttaagacgtggtgaagaaagaagcaatgcagcgtcacgacgacgagtcaccggaggagtttgatcccaacaactccttctcgcggaatccaaactcaatctccttgtttcaacaagattctttttcttcgtcgtcgtcggagaaacagagacctgagtaaaaggaagcagcaaatcgctagaataaagatcgctagggtttccaacacacatcctccgcttagggactggtttcaaaccacggattacaggaacaggacatcctttctcgacgtgtaaaccaccgcatatgtaaatgaattgtcctagctgaatttcatcggaacgtatcagatcagcgtcatcaccggtggaaacggcgacgtaagctgcgtggagagagtcagagactttgacgaagaatgcttcgctacgccattggtcgtcagagagacaaggaacgatttctatgacttggaggagtggtgaacgatgagaagacaacaatggcggcgaagaaggtgagtttccggcggcgatattgagaaggttggagagaactccaggagtgagggaagccatggtgggaaaagaagctgaagcatcttttgggagaaggaagaagaagaagagtgggaaggaatctcaaagagagagagagagagaggtgtctcggggaatgtggagagttcgtcgtttactgtgtcgggaaaagtaaacagttttgtctctctgtcttcgagatttggtaagggctgcaagtaaaaagcttttgttggttgcaggtgtaaagcacgagcctttttgtctcttttgtaatatccgattgtgatttgcaagtgagactttttagcaatatttgatgtacactacctacaacatactatgcatgcgattaggatgaagatttcttttgtcatcataaacctatctaatcctaacatcataaagccttttacacacatttaagcgtgtattgtgatgggccaagtccaactaaaattactctatagagaaaaaataattgtaagaatattttcatgcaaggcctgtttgatgattaataccttgtcaaatttatgggggagatgcttggaatagaaaacttaagtgaagtgtccaatcatttacttacctgtgtttgtgttgagtgttgacactccaactcgcccatcaggtcgcactccaaccaaccttccaaattttgtgaacttgctttgtttgtacctttgttatccggtatctctttttccacttttttttattacaagaaaagtacatgataagaagtttcggatcttaacatttccctagcttggcgactgagatgggtttgtatcaatcttaggatcctatttcttttctgctcgagctacaaaagttacagacacaatctaagtgaatgagctatattgaattttcgacaggagctagattaatccacactattctcacaatttcggttttaaacgtatggattatcaacccaag

SEQ ID NO: 1074 - DNA, 1054 bp, Arabidopsis thaliana landsberg
  unsure (1)..(1054): unsure at all n locations
gtttggccaacgacgccacctccagccgcatgctcctgtcgcagttctagccgcagctcctgtcgcagttccagccgcagctcctgtcgcagttccatccgcagctcctgtagcagctcccgccgcaactcctgtcgcagctcctgccgaactcggagagacaactccacgaagaaccaatcttgacgaagtcatccgatttttcctcgaccgactcgacttacaggacacaagaactgccaaacgcatcaacgcgattgtcgatgcccagaatgcatcgcagaatcaaatcgagcaactcaagtcctccgtagctcgcgccggtcgacagctcagcgatgacgaaacaatcccgcccaagcaactcctttcatggaaagaccggtgaaccgacgcaataggccggcttctatcgtcgttgggtccatcgacgagcacacccgtgaaaatgcgctgaaacgtgacaaccagccgtacatcgacactcgaacatgccgaatagaagacgactatatcggtgttagcgaccgtgttctctaaaaattacaaaggactatgaaggatataactctgctcagcaccaaagttagacctttcttcaattgaatcaaccaacatgatgcaaagacggccgagcacctcaacataaccgttgaaagagtagggaatcaagcatacccctcaagccgacccggttactcactgcacctgctatcttccttcaaaggctgccaagactgactattccaatctcaataaaactgcaaccaagaggacttaacttgacaaactcgtcttaaccgacctcgactcgatagccaccatcnnnnnnnnnnnnnnnnnnncctagccgccagtttgtcgcatggcagcaagctcgtcgcctagcggtcaactcaacgcctagaagctagctcgtcgcctagtagccagcttgttgtccaactgatagctagtctcctagcagccagctcgtcacttaccaactagctcgtcgcctaactgatagctcgtcgcctagctgcctagttcgcctaaccgccagctcatctca

SEQ ID NO: 1075 - DNA, 2650 bp, Arabidopsis thaliana landsberg
gacactgttgagcgtacatctattgaggctcttgtgacaattcaaggtcagtccaactcacggattaaagaaagaagaaatggaaaaataatagatgaaatgctggatatgggtgtttcctacatcataggaggtcccaagtcttgtaaagaaaacgaaaggtagaatactaattggactttattgttcttgaacttctcttagtagctttcatatattcaaacacaatgtagattgatgtaggaacttaaagatgttgtattgcttttcagaccatttggtgtgtcgacagggacttctatcaacttacctggctgcagcttgactttgagcctatcgttgaatgtgactggttcgatgccaatcgaagctgattgatgaagtcgtcactagacaactactgtctcacttcaaaagacaaaacagagtatggtctttactctctgtttctccctttactgtacacacttgtatgctcaatttctagatttttgtcgaacaactggtccaaaaggctccattgtttcataaagtgtttctcaaataatgctctggaaattgaagggaaacatgaagaagttgccggagagatcccatttcttgggtgataaggagacatataggcttagatatatgtcttagatttgctgttccataatggatgaaaaaattgtgcattacgttgtatagatgatattatttgggtaaaagtttttggtttgaagcaaaaggaccaacgatgagcagaagttttgttcttagctatatattttttgggtaaaaaaattgtgcattacgtgctttctccgcgagacaacgttctttattaggttgattcgatccaaactcatggacgagaatttccgaacaaaacactttaacctctaataggctctaaatttattgtttgatttataattttattctaaagatagaaattttctccgtcaagagattaatctgaagatcaagttaaagggtccttgattatcattttatttcaattctttgcctacaggcttaagacctttgggtttagaaaagttgctgagtctgaacaagaatgcgaatatgcaaacgatgattttgtgagaggtaaacctgagcttacgttggatattgaaatcacgggattgaaaagttttgtcacaggacaacccccggagactatgatagcttattttatggctattaaggagaaatacaaagctttatttagcaaaggatctataaaaactcactttatgaattattgctctttttatcttttatctttggactaatgatttattttcttgttgttgttctgttcctcgactaatttatcccttcgtggctttgtgagattatgagattttggacttttttttacgtgttagtttgataatcttaaagaacgaagcattgttgtgttactatgtctattactaaaatttcatctttgttttggtttgttagacgaaaactccccatctatctttgatcagttttgtgaacgcaagttccaatgaaaaagcttctaaaatccaaacatggatgattgaagaaaatgataatctgaagatcaagttaaaggctccttaaaccttcataaataatgattcagttatatgataggtgtttgatatttatctagtctaatccaatttacagaacaagataatagcttaatcaaaatcgcgatttcacaaaattgtatattattggcaaataacatgtgcaatcgtccatcattctacaaaatttcaaaatcataacattaaacgacacttttagtgaaatattcttgataaggtgagattgtcggatatagacgttgacaaggaaaaatgaatgattgcaaattaaactttaatgatacaaactgaagtaaccatcaaaatgtaaatcaaaccacatgcagcacaacaaaagacaagaaaagaacgacaatgtccgtttgtaataattcattactcgcacatggaattaacagaatgattagacagcatacgccgtaggagggtaaggttgagctccagcattgtaaccttgattggcttgtggcgcagtcgggtaagcggttggcattgttggggcaccgccagctttagctatcccttgattttgacccaagtagaagcatcctatacaaccaccaatggctatgaacaccaagaaaatgaacaatggtagcgagaaatacacaatgagcatagcttaatatcttggagatttactagacagatgttaaaccgataaaaacaggtaagcaagggagaagaagatatgtagagggaatgaagaaaccaagaagagagtttcatggatttataagggaatgttgttgttgtcgttgctacaaggcatcgacttctaagaaaatgcaaagaaaataaaatagtaatgatgggcaagtactctataatactatgcaagtaccgagtaaaggaatttgtgtatcaaaagtcagatgatcacatgaaaatttaaacagaatcaatgatctattattttgaatcaatttgttctataaataccaaaaaatgatctcgctttcaaaccattatttgagggatttatgtattatttataaatttttaaaatgtgctctccaaaatgttaaaaacaatcaattgtctcatatactactaacaagtcaagtcaagct

SEQ ID NO: 1076 - DNA, 573 bp, Arabidopsis thaliana landsberg
agaggatcccgtgttgctatgtctattactaaaatttcatctttgttttggtttgttagacgaaaactcctcatctatctttgatcagttttgtggacgcaagttccaatgaaaaggctttaggggcttcattgacacatgttttccgaaatccaaacatggatgattgaagataatgataatctgaagatcaagttaaagggtccttgaaccttcatgattcaatcatccatcattctacgaaatgtcaaaatcataacattaaacgatatttagcattatattcttgaaaaggttgagattgtcggatatatacgtacgttgacaaagaaataataatgattgtaaattaaactttaatgatacgaactatagtaagcatcaatatgtaaaccacatgcagcacaacataagacaagtaaagaacgacaatgtccgtttgtaataattaatgaatcgcacatggaattaacagaatgattagacagcatacgccgtaggagggtaatgttgacgccagcattgtaccttgattggcttgtggtgcaccgggtaacggttgcattgtcggca

SEQ ID NO: 1077 - DNA, 941 bp, Arabidopsis thaliana landsberg
cctaactcacattttatcttaaacatattatttattttctcataaaaacaacttttgctcacaatattcttaatcgaaatggctaataaatatttataaattttcttcgacataaaatttattgaaaggttttcaaagtttctctaggctaatatgaagttcacaagagcaaatcaataatttttgaatatcaagtatagttttattataagatttatgttaaagatacaactattataactagaccaaatttaaaagcatatcatttaaaattgcacaagagctaaaactcctagttaataaataaccaaaattggtgaaaatcaatcttttcataacaagtgagtcataacatatatcgaaaagtacatgataatttaagagtggcattggattgatatgttaaaaatatataccaataagtagaatcaaagcaaaatattttaaaattttacattaacaaaagattcaagttaaatggtaaagacacctatatcgatatctaaatactttatcactaatcattagatctaatttaacactaattaagatatgtatgaactaacagatctattagaaaataaatacttttcctaagaaaatttataaaaataaaggatttagtagatatcgtattcaaatttttctcacccttcaagtttttgttttcgcattgaaattaaaaattaaacatttgtacttgaaaacagtttggttatttatgtgaggtactgatttaacgtcattgaaagatagaataaagataaagaatgtatactaattttcctgaattatacagattaagttctataaattctttgaaaatattatgtcaacttttttgaattacgaaaaacatattactctaattagaaataaaatacaaaaattaaagtttactaaacaatattagttagagctcctttaatagttaaattttg

SEQ ID NO: 1078 - DNA, 3141 bp, Arabidopsis thaliana landsberg
  unsure (1)..(3141): unsure at all n locations
ttcctgaagctcctctcctaagctgctgctgctactgttgagtaggactggtttgaaggttgatggactggtaggaggcgtaaacgaggtgttaaagtttccactccatgaagctgttcttctggaagtaggaggctgatgattatccccattgacgcttatccccaatccatttctttggatgttatccatacttggatatctctgcatcatcattggtggtggagcccctgaagaggctactacttcatctgctgaaatctcctcctgtctggtttcagcagcagccggttccattgcctggtcgtttgaaaacgatgcaggtgctgcgggaacaaagaactttgcttttgcggggattggtggttttgcagtttgtacggaaggtgacggaatcatggtctgagagtttccacggcctggaggattataggtgtcaacgtatctgcccaaaaggagagtaaagtgattagctctaaacatgcaaattatcttcagtaaaacactaacaagactgcaaacatgttcacttgaaaatttacaactcacagctggaaacagcaactacaatcatgcctatttcatattgaatgtttcatcttttatatctttcctggtagtaaaccaagtgtggctaatattccctcctccatgcaattctaatgtgacggtacaattgcgctcatgatttataatccaggatagtctccacagattataattctaaaatgccttaagctatttgtttaccttgccctcacacccgtacgcccacgagctgagaattgattcgaaccgtgtgagattggtgggattcctgaagaattctctgacggagttgggccaccagaactccagttcccattagatggaatcatatcagatttgttttcataacccaatgagttgttttggaatgcgcctattgttggaggaggaggcagtgcagcttcctcagctgggggttccacacctctttccacccatctctttagtttgtcgtcatagtagaannnnnnnnnnnnnnnnnnnnnnnccttgacccaaagcatgaaccgaaaaaattagaataagttcaagagatatcatcacgaccaaagcatttagcagtgtacctctttggatgaccgagctaagacccttcctacagtgtccttaaaaatgccaaaaccaaagcgactaaaccgcgaacctgccactgacccagatgatttcaactttgtcaccccatcaactgccttttctttcgaggagtcagccatttcctaaaaaaagggaaaccttttataaattccattttcaaatattcttagcggtgattatggttttctggtatagacctgtatcggcgtcctaccgaaatctggctctgatacacttatagtatgtactgccattctcctaccactcccaccctactcatgagtgggttccactgaagcaggcggcatcaatgatgacattggattaaccgattgactatatgctaacttagaagcttcctgctgcatgatggtaatactcatttccctgtcagagtgctttggttgaatgtggtgcaggtggtggcatgcccccaacaggacgatgtgtcttactaccaaaaaagtttagcagtactccaacaagtttttctgggtgtaaattcgctgtatacccgccctgaaatggttaagttgcatcattagagaaaagaacaagctttagattattcccactttttttcttcacactttaaattaatgggaaggaaaactcacagatgtaaatcttattttacatttccatttgaaggaatagacatctaacagatgtaaaccaaatggaaaaatctattggtagatacggattggaaccagaagttgtacctgttggtggatacggattctctcttcaagagatgaaacaaactgtttccacatttccacttctggtgatcggcctgtcttgaggcattttaatactgcttgacagtacctgaatcagccatagcacaaacgacatcaggaagccattatacagtctaacaaaggagtagatgaaggaaagtgaatcatcttacttttgtgcagtcgaaagtttaccaacttcagccagcatatgggcatacatgactttatatggttgaaacgttaacagggtatactgagagtttcccagcgtcttagagtattcatataactctgttctctgtccatgcaaagatcaatcgacaagtcaaaaaataatcagacgattaactaaaagaatggtgttatccaagaatttcgttggagtatctatgcaatacgtatttgaggaacatggagggtatctatgatatgctcaaaacagaatcgtccggctagtatgatgataaccaaaaaccagaatgataaaaaaaaaatcacctgtatagcctctggacttgcatatgttcgaggatatttccagtgatccgctccaacaaggcacagtctggcagtatctgagtatggatcaaagttcttatccgcaattaaatagcaaatatgggccgcaataatctgattcataacaatagttcaaatgtcatgataaagtttcataaagtaaaacaacacaacaagggagagaaccacctcgcccctttctttccacatgcaatctccaagatgagtaatcacaagctcatcatctgtggttctgttcgcagtaattatacccaaattctcttcccaactgtcaagcatgctactacatccaaactgcaattcagggaaacattaagacattattaacaagctcccatgacagagctgcataagaaaatatgccctttgaaatggagtgatctagttccctatggtagataaaatattttttgtcttgcagtatggttgaatcggactcttcgaaggaacaaaagagtttacctatttagtatttaatactatgtagagttttcttattctacatcttttgtcaacacgtttctaaaattgtcttactaagacgcaatagatggtttatgcattacctgaggttgctgtggaggtaaatttacggaaccaggaaaagagatatcgcttgtccttccagtggagaacactaaagctggttgccctgcaaccagcaggcacagtgttcgtaaaggtgagccgggtaccagctggcgaaggg

SEQ ID NO: 1079 - DNA, 3742 bp, Arabidopsis thaliana landsberg
tcacctaacctctgcatcacttgttatgttatttgtacctaaccagaattgtttgaccaaaaccgttttggtttcggtattggtttgctgaacaatcatctgtactggatgactcacaatctcattttttataaatttaaaatcagttttgattaacatcgttgacttgcatctttgcattacattagatgtttttagatttaaaaatacatagacccgtttcccgccatgcctccactttgttacttgtccatgatgcgaaaaactgtaaacgacccacttctttttcaacttcccttcgcttcttccatatatctacgatcgtaacatatcagagctgccttctttcattatttttctgtagcagaaccgttttgttctgttttattttgtttgacaatgtcgtttgttctattatcgaagatggcgaagttgaagtttaaccatatacgacacacaatcattagcacgcaaaaaagcacaaccattatgccggggataagtcagctcttgaacaataggtctcttatcatctcatctattcacaatgttgttgcatttttatcctctgttttttttcttactattattggtccttcaggctttaaattaatggtcataatggatcaccagattgatcggaaaggaattcagttccgccgtccccactatgttcaagagagaagactacaagctgactatacacgacatcgcattctccaaatggcggaatcttataagacacaatgattggaaagatttcaataatagaaaagaaagggtccgtagatacagacatgaggacttaccccctcaacgttgtacgggtctgtatgagctcggtgtaggcgtcatcggtcaagaccaaggccaaaactttgatcctgataataatgttcttggtgtatatgtcggacaatgtgtagacgtaaaatcaagactccaggattatggaagacgcggtggtcatttgccctcgggtttatatgaggacatattctcggaaggatactcagttttttatagatgggcaccagtaaatacatgtcttcttatcttctctagttggtctgctacgtatacaccattgatcctaactcatgtgattgtttctctgctttaccgtgatttatcagatgggatctaattaagtaggaagctgctgccacacatgggatgcttttgagcacttttgattatgcatggaacacatgcagtaatggggaacgacgccatcttgagttacagaagctcggtgaccccgagtttatgagcaagagaaagtcacaagtgctagttccttctattcgagaccaagttgttaccatcaaagtagagaagagtaattatactttcctcacttcaacactcaaagtgatgagaccatttggttaaccggagtaaacctacatcgactaggtcaaagatatggcttttgtttctcctaaattaattggattgtaacccacttattcacgtttcaaatttgtagtgttagtagttaatttgtatagtttctttttttttttgatcaaaaatttgtatagtctcaaattgttcaacgaaatacaaaccagtttggttcgatattggtttgccgaagcaatcttctgtatcggtttattaatttactaatttaaaaccggtgacgtgttctcttcaaacacagtgaaaaagtttggtaagaatgtcggcagaatcaccaccgtcgattaacggaaagataaatctaatctaacggttattgataaagcataaaactgacggctccgattttattttctaaaaatcacgttaatcacgcaccaggtggactatcattgtctttaatctatggatttaaaaatttccgcacgattaaagagcgtctcgaaaattaacttttataggtaggaggagatagaaatcgaatcttatcgccgcgttaatatgccaccggccggagaactccgacatcaatctccatcaaaggagaaactatcttccgttacccaatccgatgaagcagaagcagcggcagcagcgatatctgcggcagctgcagatgcggaagctgccggattatggacacagatcaaggcggaagctcgccgtgatgctgaggcggagccagctttagctagctatctatattcgacgattctttctcattcgtctcttgaacgatctatctcgtttcatctaggaaacaagctttgttcctcaacgcttttatccacacttttatacgatctgttcttaaacactttttcctccgatccttctcttcgtaacgccaccgtcgcagatctacgcgctgctcgtgttcgtgatcctgcttgtatctcgttctctcattgtctcctcaattacaaaggcttcttagctattcaggtgaaatcttcatcatttgatctgatgaatccacaatttctatatcttgcgatttgatttatgaatattgttttaggttaggttaggttgattcttcagttatgcgaatttcggatcatgatttggttttgttgaatttgaattaggcgcatcgtgtatcacacaagctatggacacaatcacggaagccattagcattagctctacactcaagaatctccgatgtattcgctgttgatatccatccagcagcgaagatcggaaaagggatacttctagaccacgcaaccggagttgtagtcggagaaacagcggtgattgggaacaatgtttcaatccttcaccatgtgacactaggtggaacaggtaaagcttgtggagatagacatccgaagatcggtgacggttgtttgattggagctggagcgactattcttggaaatgtgaagattggtgcaggtgctaaagtaggagctggttctgttgtactgattgacgtgccttgtcgaggtactgcggttgggaatccggcgagacttgtcggagggaaagagaagccaacgattcatgatgaggaatgtcctggagaatcgatggatcatacttcattcatctcggaatggtcagattacatcatataaagttgttgttataattgtttctgtggttttgaaagtgaaaaactttctgaccattcgcttatagagaggtgctgaggtaagtgagctttgttgtatttgtaatttacaaaacatcttacgatgttcaatacaagaaatggccttaatttgatgttattattcaatcattagttatccaagagtttatacacttcttctactttgtattcgggtttggctcggatttacacttgtctgcatccattttacgggcttgacaaacatcgaggagcattgaacttgttcagactaagtgaagcattcttcgcctttaccccggttcatgagggactatgttttcgtcaaccgcaactaatccttatgcgtatcttatatcagtatataacttacggcttctgcaaagaaggattggtctccatttccatttacaattcaattcagactaaaaagtttcaatctgatgatccaaatagttcaggatcaagactgttaaaccattaaatatcaatattaagcaaaaaccagattctaacttggtgaaatcaatgtgcttgtaaggccaattagagaaccaaaaacaaaatgcaaaatgaattttattacttgcttctgcagagttcgtcacaaaacaattgttacaatgtcacaagaacagaacattttacatatgtataaaaaaatgaaataataaacaacattttgggcatcttaacaagaaaactttcgtg

SEQ ID NO: 1080 - DNA, 1942 bp, Arabidopsis thaliana landsberg
tgaaatcataacaggaacttgctcgtctccaatcatctctagtgcttctcacttacactctcggtacgaagacacgtgtcttctcaaaccaagaaagaagctatgttcaagccctttggtttcgcaggtaaagttgttactctttcactcgaaaaaatgatattttttttcgttttacctgattgtgtttgctttgatatgagcagcagaaactggttctcgtctcctgacgacgcaatggttgcaactaggaaactcactttgcttgaaggaacgtataagcatcgctatgcaagtgactttcctcgctttctttcttattcatttggcacttaaatggtttggtgtagtaagaaacagaggatctaatgatgtagaagaagacttgaagaagcagagcataactgtgaagcagagcttctcttacaacatatctcttctctgctctgtttctatcttagggactcattgctttatcttgcttttgctgtttcgagacagcgtggtctcacggtgtgattcctctgtttctgtcttctccgctgaggtttcgcagtctttctcgtggttgtttgtttctgttgttgtggtgaagatcagagaaaggaggcttgtcaagtttccttggatgttaaggtcatggtggctctgtagtttcatcttatccttttcctttgatgctcatttcattaccgcgaaacacgagcctctcgggtttcaagattatgccgacttgactggtcttcttgcatccttgttcctgttggctgtttcaatcagaggcaaaaccggttttcatcttcttgaatccagcggtaacacagagccattactacttggtgaccaaacagagcagaacaagaaagattcttattcttcttcttccccatatggaaacgctactctcttccaacgcatcactttctcatggatcaaccctttgttctcccttggatacaagagacctctagaaaaagatgatgtaccagatatcgatgtgaaagactccgctcgattttgctctcatgcctttgaccagaaactgaaaaccaccaaagaaaaagaaggacctggaaatgctttcttctataactcggttcttcgctatgtgtggaggaaagccgcaatcaacgcggtattcgcagttgtaaacgcgagcacagcttacatcggaccatatctcatcaatgactttgtagagtttctaagtgagaaacaatcccagagcttaaaccatggttaccttcttgcactcgggtttctaactgcgaaaatcgtcgagacagttactcaaagacaatggatctttggagctcgtcagctaggactacgtcttcgagcagctttgatatcacatatctaccagaaaggtttagttttatcaagtcaatctcggcaaagccacacgagcggagagatcatcaactacatgagtgtagatgttcagagaatcactgacttcatttggtatgtaaacaacatatggatgttaccaatacagattttctcggcgatttatatcttgcaaaaacatctgggacttggagctttagctgcattggtcacaactttaatggtgatggcttgcaactaccccctgacaaggcttcagagaaactaccaatcagatatcatgaatgccaaagatgatagaatgaaagcaacttcagagattcttaaaaacatgaagattctgaagcttcaagcatgggataaccagtttctcaacaaggttaaaacattaagaaagaaagagtatgattgtttatggaagtctttgaggttacaagctttcacaacttttatcctttggggagctccttcattgatctctgtggtgacttttgttacttgtatgttaatgggagtgaagctaacagctggagcagtcttatctgctcttgcaacgtttcaaatgttacaaagtccgattttcgtttac

SEQ ID NO: 1081 - DNA, 556 bp, Arabidopsis thaliana landsberg
tggaagtaaaccaagatgacagtggcatttttctttcacaagaaaaatatgcaaacaaacttattgataagtttggaatgaaagagagcaagagtgtaagcaccccacttacaccacaagggaaaagaaaaggagtagaaggtgacgacaaagaatttgcagatctaacaaagtaccggagcattgtcggaggattgttctatctatgtgcatcaagacctgatgtgatgtacgcaagttcttacctatcaaggtacatgtcatcaccaagcattcaacactatcaagaagccaaacgagtgttgagatacgtcaagggaacgtcaaactttggagtactctttacaagcaaagagacaccaagattagttggctactcggacagcgattggggtggttctcggaagacaagaaaagcagcaaatagtggctcaatcaacggcgaaagatgagtacatagcagtgtgtgctgcgacaaaccaagccatatggttgcaaagactctttgaagacttcggcttaaagttcaaagaaggtattcccatcttatgtgaca

SEQ ID NO: 1082 - DNA, 1114 bp, Arabidopsis thaliana landsberg
tttaacttgttgatttgtaatgctcgttaggttagctctcgtcaatggtgattgagtctgggactagtttaatttgagggtctctgttgcggtggcacttacatttggttatcgaacttgttgcctagggatagtttattgagcatgtcagtcacttgtagattgaggaaactaactactcgattatcccatcctcgggaatttctcatccaattgatttctttatttacattgctatcgtttactgtttcttgttacctattgcttaattttaacatttcttgcatgttatcactcagatactcaaccaccctgttgtctggtgacagactgtgcagtctagtattcttgttaaattttatgtctgttactcaacttgtcactcgaccacaccgagtgcttggcaacaagttgtgttggtcgagtgttttaactatgtctgcttgaatttctgtttcctccatattcactaaggactcctagaaactcaaaacctgtaattgcttggcttgactctttgaactctgattgcatcttgattgctagcatcacacccatttggattaacaacctataatactacaacgacaggatagtgttttaggtgtaattgatcttaaaatcctattatcatcgagtattcgtgaggcggcgctggccgcagcagaaaaagagaggtcgagtattcaggaggcggtgcttgccgcaatagaggagatgaggttgagtacgcacatggcggagctgagacacaacatggagatttttcaatggcctagcagcaatcgcagacagccatcgacgatcaactgcgttccttcttcaactgaggtaagcacctcacttaaccattgtataataacatctcttgtttttgtttctgtgatgtgttttgtctggagtactctcttccaaatttggtcacacagaggactgtgtgatttaatattgggagagggctcacgaagtgtgtgttgtgttgtatatattcttgagtctgcattcatataaggcataaaaaaaatgaaacaaaattttaaaatttgttgaaaatgatttcacaaaaagagattgttcatgtagatgcatcacatctacggatgagtctaggatg

SEQ ID NO: 1083 - DNA, 2399 bp, Arabidopsis thaliana landsberg
gttctctacgtgctggttgcactcagtcgataaagtggatgatgttttcgcttaatataattggtggaggaatgaatttatccttatcatttagtagagcttcgtcttattttgtttaatctgtccgtcagtgtaaattggatatagtacctatgtgaccgtggtaagtatataacaaattttagcatttcatgtttttattgatgatatctgttgataaaaaatcagtaataaataaattggagatgggtggataatgttgttacatgcgtaacaatacaaagtgtgttgtaaaacttgtaacgaatccattaagaaatagtggagaaaatttcaaagcttttgaaatatatttgtctgaggtgctactttgtttcgcattttgcacttctttttcttcgaattcttcattttcacctaatggaattttaatgtttggaaacttgtattaggtttaatgttagataaattgtggtgaaaaaaacatattgttgacttgagtaagaaatgtttgggttatttacttgcataagtgtctgcttctaattcaggtttccaaaatatctggctttttgtggtgttcaccattctgttgacctacataagagtatgtaaatagttgtcagtttctatctttgaagacaataagcagttttaactaattcctgctcatatatggacggtcattgttaggattttttacctgtaattgctggtagaccattaaaaacttctctgtagactatgttagtaacatacttgccttctttttttttggatgtgtctagaactgttagtccttttggggatgtgacgcgtgacaaagcaacgtatagttggccgtggctgaagactggttttggtagatacaatgccactctattcaaggtttgtccttggcttttatttatcgtcatagcgtagcacatacgtactggaaactgacgccttcttagagtgaatggatgcttggaatcttgtggtgatagtataatccttgggattaacacttttttcctttcttttgttgtatctgaaagaatctcagctttaagtactttgtctcccaaatgagttacaataagccttgttccattgcataacccttctttttggttaagatttctaagtagcataattggtactccaacctttaagcatagtctatgcgctggtaatcctggaaactctaatgaatttagatattccatggggtatgacatctcaaatccttcttctgttagtgcttcatcctgatcgatactgtcagcgctgaaatattcctttgctaaaccaggcactttagagagcaaataatcgttgatttcatcaacggtttcatttcgtggagttaaaacagctgtacctttaaggttctccaagtcttaaaatgtgttggtaaaatccggaaaaactgattggcataacacctctagtgggttttctgtctctggtagaagaagatttttgtcaattatgatgttatcttcttcttgatcatcatctataccatgggtttttctgggtgcttctccatcccctatttgcaaaatccattcagcaaattttatttcctcaggttgcactctcatattttgtgaaaggaagtatttatgacacgactcccataaatatgaccgatttattgctgcgctaacagtttcttgtctggttctctgtggtatcactggtaagatttgtctaaaatcaccacctaaaagaactgttttcccaccaaaagttttggttagtgccttttcgtcacccactgacagaatatctctcaatgttcgatctactgcttcgaaggtatggcggtgtgccattggtgcctcatccgaataataagatccactttactaagtacattggctagcattgaacctattttaatatcacaaatggaatcctcatgcacattgattggtatcttaaaccttgaatgtgcagttctgccatagccgatgatgcgacaggcatgacattttttccatttgatctcagagcagagataatagtcttgtacaaaaatgttttgcctgtgcctccatctccatatagaaagaataacttgccttctttctttgtcactgatttgagaacatcatcgtaaattatccgttgctgctcgttcagcttgctgaataaatttgcatgtgtttctctttccttgtcaatgttgatctgaaactcttgccgaagtaaggagttgtttacttcttccaatattgacttttctggctgaggcatttctggataatctgacaatgacttttcatgctggcgtaagagtgtttcaatctcgatcaatgtggattactctagttcttttgctttcagttctaggtgagggaaattaagaactttttgctgcttacggaggacattatctgccatgc

SEQ ID NO: 1084 - DNA, 929 bp, Arabidopsis thaliana landsberg
gttgaatccaccaaacatttattcttagtttatttattttttcaaaaatactaataaattcagcaaaaacttgaattttctttcttatcttacatcatcatctccattatttgcatgacataagataggagactaaatttgaccaaaaaaataaaataaaatataagataaaaataaaaataatagactatattgcgaaattacattaatattattggttattggtcaacattgcgatattatattcctaagaccatccccattggtcataaaaataaaagaatttaaagaatcgatatgagatatgtgtcttcctagagacatttaagaccttgtaacgtttgtttaaagactcttttctccgtatgtcttctttttaatggttagtttgtttttgatattaaaatatttaatattttggttttgaaacattcaaaaaaatagttcagcaatgaggatgctctaagaaaaatattgttaacactatttcatccggcaaattttgtgtatctttccttgacataggtttcctccagcagaatatgccattgcaagacagatcaagacaaatagacaatagaggaacgtcttaaaatctgaatacaaaacaaaaactgatgttgtatgacttgatgaagatagggtagaacaaatgatccttccaagaatcaactaaaatgcaactccatggaaactctcttatcttatcttgcgaaaatggtggcttctgctgactgcagaatctccctctctgccccgtgctgcgtggctccacgggacttgattaggcacatatagctgctagctaggagtccatattcttagttacgttcattcctgtttgtatgggatttgattttggggcttataaaaggatttttcgtatttactcaatcacaattagtaagaggaaactttaagaaaggcga

SEQ ID NO: 1085 - DNA, 1629 bp, Arabidopsis thaliana landsberg
tgattatatattggattttatcatatccacgaaaattttaaattatttaggagtttctttcttttttgggcaacttatatgagatgagaagcgatgatacacatttggccactttttcgtctagatacattcttcgtgaagaagtccaagtgcacacattcattagtgttggacggacccattttattttggatttttttgtataattctttgggttttttttgttaataattcacttctgtctataatatgattatgattgttcatcatattttagctgtaactagatcataacccgtgctgtatagcacgggcattaatattttgtataaattaaattgtatactttgtttgaattatataagaaatagtatagtataacagtgatgccataatatttttcaatgtttttactatttgcatataatgcttcattgaattgactttttttaaaaatgttatttttatgataaatacaacatatgtagttttaagtaaatgtgtaaaatttatatacaagttgttttggtaagaaacatgtttcttttgtattagaggatctaatttttggcctaacttaaaattagtctttgtatagtattttggttatactatttgtggacctaattggggcatatattagattatctttgatagggctgacgaaaaaacccccccgatacccaacccaataattgaaccaaaaaaaagggttaggacgggttaaaattttaggaaatttccttattgggtagagttttagtaaacccgtgtatatccgattggtccggaaattactcgttatccaaaaagaatattcaaaaacccaaacattaatttaatatccaaaatattaattatatttaatcgtaatattatctaattatctaagattataattataaatctaaatatgtcaattaattttggacctaaatatccaaaacaactaaactattcaaaaattatttgttatgtttgtcaaaatttagtaaaatatattcaaatataattaaatttattaaaacttaacaaatgtaaaagttttttttgtttgaagacccgctatctaaatacaaatttcctgtttctatttttttgggcctgaaactttttatccaaactgacccaaacccaactagacccgacccttaccataaccgaatatttagaattattgtattgggtagtaaatcatataccattaatcctaaacccgaacgggttctacccaaactcgaatgggttactcatatgtccaaccctattctctaatttaattatctaaaaactcccaaaaaaaatatatgttttgctgactactttttattcgaaaatttttacatccttttctaccaaaatcatttcataagacatcgcaaaacccttggaataatgatttcatgaatgaagaatcctaatttgaatatatcaagaaattttgaaaggttttaagtttttgataggtgtgtatgtgagaaggtatatgatattattttatttgattttaaatgtatgatattattttatttgattttaaatgtatagtcaactgcgatttgtatatgttttgtggatattatttatgttgtttagggtgtaaaattatacacttgtattttgattgtt

SEQ ID NO: 1086 - DNA, 1650 bp, Arabidopsis thaliana landsberg
  unsure (1)..(1650): unsure at all n locations
tcaaaatgtgactgtcggatacttttgcatgtaaataaatttcaccttcttatagaaaatatacaaaacgttcatcaaaaaactgttgcaactaatgtcatgactcgtcactcatgaacaaacgatgttgaaaacaatatgagatatctcattatgcgtaaaccaccaaaagaatacaaagtttaagggaaactctctccatacttgatacttcaaacgctggaagatgaatgagcagccgagcaggaccgttataaacccaagaaacagaaacggttgcaattaggcttataaagcaaaatctttcggatgaaagtaattatattctacttttcagttttttttggatgaaagtagttatattctaatttatattaaaaagtatttatattatactatgataagagagtgttgacctgaaatttacagtttatcagcaacaatattcggtttattagtttccaagaaagacaaatttcccttataacaattcaaaagtatgtgataatgtggcagtaagttataaaagatgccataatcttacttaaagttagtcaaagagtatctataatttgactaggaaagtcttatgaaaagattataaaaatcggatctaccttttttaataatgtaatgaaaagattgtcatgtggaaacacatcaatacgatgctgttttaacatcttaggtggttccctagttaattaaatggtccgtcacttgccccaaaaccaactagtctaaccttctgtctttgaaagagagttctgatctacgacccatctccttcgtacccgagcctgaaatttatcttccggacccgagcctcggatttgctcctgcgtccgccgttgaaaattttcgtactcccttcgatcacttatctctctttctctcttctcctggtttcgttaattatcggattcgaaaaccctaacttattcttagaaattgaggtcggagaagaaagcttgtcaggctttccaattgttgtcgacgcgacagaacaagtgtaagtctgcatacatctctcttactcttagtagaaaccctagttttgtgtaatgtcccaataggaaaatgatgtgtgaattcccaattctttggagcgtgttggtaaaattgaagtaagataggttctcgtttgaggttgaattctaggttatggtaatgttcgtgttagccagagcttcgattttgggtgaaattgtgttgcggcaattttgatctcagagtaggttcacgagatttccgataaagtctagaaattggtcgaaattagcttatttttcagctgccatagagtgtttatagctgtgaaatgcgagagttccactgtttattttttgtataaggatcttgatgatatttactgcaaatgaatactcgagattactggattaggtgcatttgagtttgttatagtttcagaagttgagttggagtttaggctttggcttagtggaccttggatgtcaatgtacggttttcatttaaggaaacaatgctgattcagctttccttatcacctggtcggcgttgtctcgcttcgttggtctgagggttttcctgcgtgaagatttaaactttcttgtcttaaactgaatcanggttgaggatcttgtccgatgattttcatttgactcactt

SEQ ID NO: 1087 - DNA, 4477 bp, Arabidopsis thaliana landsberg
atattatcggttaactgatcggttcaattggaggcgtagttttaataacaaatccgaaaatacatgtagttttattgagattaaagtttttttgatgattttttagagacaaaaagtttagaggtgaaatgttgagattgcaacgattatagggctgaaaattcagccaacgcttaaataaatgtaaaataaaattaaaaacataaggtggcataaactattactttttggtgtcagaaaaagtagcataagtgataaaaattctggcaagagccataaataataaagcatctcatgcttaagcttcttcttcttatgttaaccatttaagaaaataaaaaagaaagacaaaagaaatattattgatattttataaaagagataaaagggagacatttttagtgttggtttttaaataacccaaatttatgtagtgatggaatcaatgtagagtaaaacttttgatagacaaatatgggatggaggatttacgatagtcttttcttcttttattttataaacgaagtttaaattcttatatactcaaaatcacttaagaacatgggagggaggatttacaataatatttttttggtacgagaatccaagggttgaacttgctgcgagtgtggttgtattggcggaatgtgtccacacataaaggttttgttgatatcaaaagaggggtttcgagtcaaagttagaagaatatactgcaaatgtgtactacaagaaaacaatcattttccgactgcaagtttagtcgtaatataatcgttaaaagtctagttacgcataaaaaatatagtcgtaaatcgagagtcgctaaatttaatagtcgtaaaattagtcgctatttaacgaatacgctatgactattaggcgtagtcgtaaccgtagtcgtaacgtagtcgttaaattattgggggagatcagtggcgacatgctctatggcagttgaagttgaatgactctcgatgaagtctttggtacttctccaccaagggatggatcagtttgcctttggtacttcaccaaggacaagtgctccatcatgtctacttgctcgagaaccgctttggaaagctcagcgtaacgagcatcacggtgttcattatatgcagcatgctcttcgattttatgatgagcttccttcagctgctcttacattgccatagaggaaaaagaatctctcaattgcttgtgttttccattgagaaaaatccccttcatgttcccaactccataaagagttcctcttgaatccttcttagtggactgtgacacgtcagaaaagaaatcaataagtttagagcatttcttgaagtcagaaaacaatctaagatcctataactacagatgatagctacttggacgtgtacctgaagaaagatggttgtacattcatcaactgtgagctctaaaggttgtgaagtaccgtctgaaacagcagaagtctccgcctcagggtatgtaacttttcttgcactttcttttgataggtctgagcaatcttttctacctttcgatcgacatacgtaccattttggttttgtatgagtcttactgaagacctcaccaacactcactggtcttcccaattcctcctcctacaatgttataaaatatacaatgattatcacagagtttcaaattgcaagagagagagagagagctgtaagttaattaccaattcatcttagatttgttgatatgacttcgggcctgataagtggatgtgaggaccgatgtgtgggtagactacaaaacaaagaaaacatggctagagttagtgacacaacacaagtactatagatgtgaaacaacacaagtgatataagatagaaaactataccgcaacctccaggaaatattccttctgctctaccatgaggcactcatgtccaactatagtagggaccatcgaatttgtttgtaagaagttttgtaatcttccttaccagtcttgatctatagtcgcgagtaaatttgaaatatttgtaaacaagtggagagtgaatccaaatcaaacaagtcaagaagttataaaaacaaatgtctacaacacttgaatgattaaaaatgcaaataagaagaacccttaatttaaccactagaacctaagcaacctaataataaactgactctggctaactctcaatgctaatcaactatatctcatatatgataacatctcagacatgtgctcatattaaaaatcaagtaaatgaacctaagacatcaaactcatagtacaaacaggacttcttaaaacattgataaggaaacataattagatggaatatgtcataccaagttttctttggtaacagtgtagagagagaaaggtggtatacatatgtcggtctggcaccataagctgagcattcagagcctcaaccgtatcctcctcgagatccgacgacatcatgttctggaagttgttaccttgagaggaacatccaagcccgtgactttgagcatcagagttatgatgtggagaaggaggatgatcctgctgtggaggttgttgctgtgttggcgtttgttgtggaggttgttgcggtggagtcgtttgctctagagtcagatgtcgactattgtggacttcctctgacgaatgacgttgtgatgattgactctaaaagtctaagttctagaaaagatgttatgggggtcgatagtggcgaaaaatgcactacacctattgtaggttcaagaataacgcggcgtggaacttgggtgtccagagaaacttctaccgctgctggtatgaaggtgtatttagaagattgatttgccggtcttatgtttgcaacggtggaaccaacgcctctctgagacgctttaggaacatttcttctctttcgcttaccagtcattgtgttcttcaggggagaattgtcagaagaaagagagagatacgacgaagggaagagatctgggaagagatttgatcgagaaatggaagagtaagagattagtgttcgattaagtgagaagattcaaagagattagtgagttatgatagattgaagagaaggtttggagaagaattggggaagaataatgagattagggttagatcgagaggatttggggaagagattagggttagatagagagaaaagaggaagagagaaatggaagagggatcatatgtgattttgggggttttcttcttagggtttctcgaattgggggaaattattgggccaaaactatttgggcttgattttgcggattaaattagactaattattttggtgatagtcgctacatagtagctataaacacttattcttttacacatcggtcgaactatcaggtatgaacaaagagtcaagtttcatgaacactaaccgttttgatgaagtaaaaggaagagtagtgagattagctccagccttaatggattgtgttggaaacaaggatatcctcaagtttgttggcttgccatctggatttttcaatagtcggattgagtttaacctgcagcattagtcaaccaggcaataatctcaagaatagagattataattccaaacaaaattttgactccataaagcaactcaaaaagaaaaataagagtaaaaataagattcaaaaagaaaaacatagttagtaagcgcctcccccagacttaaacgacactgtccctattgacattcaaagccaaaataagcaaaaaagaaaataaaagaaaaacggaaataaaagaaaaaataaaaagaaaattcataccagtgggttgcctcccactaagcgcttgtttatagtcaatagcttgactttgatggagtttgggaatcaggtggatcagatggtggcagtaaataccgcggagtaaaacctctcatcatccatggtggcgtataggcagttggcatgtgaggtctaccaaggaagtcctgaacatcagcagggcatgacataggtatgggtgatctactccgttttcctgcacaatcatcaaaagaagaaacaagcgctcgttgagaaactcgtggctttcttaaccgtaaaactgttttttgaaattttaaactcttattgatgaaatcacgaggtttaggaggatgatatgagtacctttgtcgtttaggagatggatggagtatgagaggtgcaatgggtgacgtgactgtagttcctggacttatagcagtgattccaagcttgaaaagtagctatcgtagatgattctgcttcaaccagtgattggtgtcgatcgacattagtgggggtgtcgatcgacactcgtgctacaactcgtcttcccttagcctgtcaacaattcagctctgaaacctgttccgagacaataattgtcttccttttgtctccctgattctgtggagctttgtagctctcctcctgaatctcttgcatatactgttgaggcatgaaacaagaaatttaggcgtgtagacttgttcagcaacatgtggaaatcaaggttgattggtgcagtatg

SEQ ID NO: 1088 - DNA, 3243 bp, Arabidopsis thaliana landsberg
tgttcctcttatgttatccttccaaaggttcagaatccacctcttgatgagtgttacttaccggtgaaatatgacctgaatcttttagtgtaaaaaaccataacatgttttgtagctttaatttggtttcagatgtatgagtaagtcctcctcctcagccattccttgtggcttttcttttacgaattcttgattcactgtcttcatttattcggaagagcctcttgactttagtgccgactgcttcttctagctccaactgagtgtactcatccataagtttttctggtgttagattcagacaatgaccaacactcgcacaaccgactttagttatctccattctttcttctgcactgttgttctaagtgttgtgttcaaaaaagtttccatgtaaagttgctgcttgtacttccttctctaaggaacctttcacatcatcatctttgtttgagtgaatctccttccaacattcaactgagttttccaagattgctgtgattaaaatcagaaagaaacacggattagaacaaaattagtttagccataaaactgaaaaagtaactcaaatcaaatgaatacaagtatataccttctatagagctacactctcagatctaggaatgcaaataagagtttctctcttagttttggtagttttctcagcaatagatattgaaacgatattcttaacaaggtaacggccagtagacacgactagctcagcttcagtgctgctcactggtacttgcactgaagcaggtgataagcgcttgacaaaaagtacagagtgtgatgatacttcctctttgtcctccttaactgcagatattaaaactgtgtctcgctcaattttctcttcacgttgtccttccataagttcagaattcaactctttagtgcttattatttgagaaactatcaactgatttttccagtgtagaatccagaacattctcataatcataacagatcctgcacctttggtttctgaggaaataaggtgaatcatcaatcattccttatggcttatccttaatgcactcttgattcattttcttcaactactattggagcctcaaatgaattatgtctcgaagagttccttgtcaatctaacatttagcttcttgaatcttgacattttcaacagaggctccatttcgttcacagtcaatactggaacaacttttctgtgaattactcattgcttccagtattcaaaatgtatagctcagagaaggacaaatcacgtcgcaacgtaataattttttgcaaataatctaaattaatctaagagtcatttttgaggataaaatcgagttactgacatcttgtgtgtctgtccttcataccaaattatccggtcaaaaagccaccacaccggaaaatattattttcttatcatcgccatgttttgatttttccacgtttacaccttttaatctaaaaatcaatatttctggaagaaaaaaaaaaacaaattaaaattgtcacacaaatcacaaactgaaatctcaaaatcgaaactaaaagcttctcagatctctaactatagctcaaggcggaggagactgagatcgatcatctgaatcgccgaaacatgtcgagcgatagcaatgatcttgacgaagatgagcttcttcaaatggcgttgaaagagcaggctaagagagatctcacctatcagaaacctccttcatcttctgctcgtaagcctgttgccaatttagtgcagcagcctcgacagcagaagcctgtggctgcggctgccgctccgccgaagaagtctgctgcggcggttaggaagccttccatggatgaggatgaggagtcggaggtggaattgcttagcatttcgagcggggatgatgatttggagagggaaagggaaataggtggttctagtggtggtgcggggagaggaagaggtagcgatgtacgagagaagggaagagcgaggaaggaagatgatggtgcttgggatggaggagagcctgattgttggaaacgggttaatgaagctgaggtatgtatttgtggcgagattcatcagtgaatgcttatggctttgcttgttcgatcaagttcaagagtttgaattcgatatattgatctatttgttgaattgtacgacactgaacaataccattcgtgggatacggtgaatgctatccatagtttctggtgttgagttgatatagagagcttgataattagcatgccattagtgattttagaaccatagcatcatatggatgtataagtggaaagatgaccattttcactgaaattccggtggcattttggcagcttgctcgtagggttcgtgatatgagggaatcgagaacagcacccgtggttcagaaagtagaaggtaaagcacctgcacctgggaagaaagtggctctgactagtttgcagtcacttcctcgtggaatggaatgtattgatccactaaaattagggtaattgctctcgtttcgttttgcttaccaaggaagccagtcagatgctttgtactctgtctttgatatggtagaacatatctaaacctgaatttgtctacttcataggatcatagacaataagacattgagattaatcactgagtcgtcaggcagcccatcaaaagctgagaaagtggataatactcttcgcggtatgtctttctttaccatatctacaactcgagtgaacagtagcacttacaattttttggagggctaattcgatgtacaatttccagttgtctaattgttatgtatctttttctgagtatttgcagaaaaattggtttacttctctgatcatttcgatccgaagctgtttctttcccgtattcaccaagacacgactgcagcagatttggaggctggtgcccttggcttgaaaagtgacttaaagggtcggaatctgcaaaggaaacaattggtgaaggacaattttgactgtttcgtctcatgtaaaacaacaattgatggtatgtattattacttccaactgaataatttatgtttttttcttctttcattttcatgttgaccactgattttcttaatagatattgagtcaaaactgaagcggattgaagaagaccccgaaggttcaggaactactcatttgtttaattgtatgaaaagtgtgacatcgagggccaatcttgcatttgagccactttttgagagacaggttggtgtgattctgatttacttcttttgcttgtcactctctttcattttgc

SEQ ID NO: 1089 - DNA, 1965 bp, Arabidopsis thaliana landsberg
tgctcgatccatgtgacctaaagatcagctgcccagattcctctgcgccttaatccgaccaggactatggacctgcttctagatttcaggcacgttttcttgacagttgacacatattccttttcgtttttttttttggttagatgttcaagtttgctcttctaattggtttgggaagacaaaaagtaaataaattgacagttctataagcatcctgtataattcataatcagttctgtaagcatcctgtagcatctacgtctggtgatatactttctgttctaagtcatgaaggcatttatacatactacataggcgtggacgtacagtttgtatctgactcttttacagttattgggaatacacaccctaaacgatttgcttatttaattactgtgtagggttcatgtcatgaggacataaggacatgcgacgcttgtggctcaggttgtgtgatgtcaacaggttagataatgagggaaaaggaacctggtgatggaaagggttatccatttgtaacattcagatgtaaggacttagctgctgaagcaattgataatctaaataacactgtattcagagtaagttctttgacctgattcttaatagttacctagaattttgatggattggtgtttccgaatatttctggctcttatttgtttgtttacttattgttattcaatagggtaaaaggataaaatgttcgactacctaagcaaagcatcgtctctttcttggtaatgtccctagaaattggatggagtcagacattaagaaagcagcaaatagaattggtccagtcgttcaaattgtcgaactcctaaaggtttgtctcctgcaacttggataagtttcagcctatagtgtatatctagttagttctgtaactttcatctcaacttcacgtataattgtaaatgtagaaattaatacatttcttgatcagtttttctatttggttttgttaaaatcacaggaaccacaaaatatgggccggaatcgtggatttactttcatcgagtattacaaccatgtatgtgctgaatactcaaaacaaaaatgtcaaatccgagtttcaagcttgatgataatgccccaactgtaagctgggctgaatcaaggagtggaggagaaggagactcttctgcctctcaggtttacttctttagaatctatcttacaaataaattatagtagcagcaacagtaaccttaccaacaaaatgtcactaccaagaaattattatcatagagacgtgttctgcaaatattcttctttctaaacaatgaaaagctgtgtggaatgattgcaggtcaaggcattgtacatcaagaatttacctagagatataacacaagaacgtctaaaggcattatttgaacatcacgggaaaatactgaaagtggtgatcccaccagcaaaaccaggaaaggaagacagtagatacgaatttgtgcactacgcagagaggacaagcgtaatgcgagctttgaaaaacactgaaagatatgagattgatggtatgttccattccgaaatcacaattgcaaccaaactatcctcctcttcttagttatggcatggctcttagtcccttggtgctcttggtggatttggagcttctgcctattcacaagtgagatttctactacttatcaatcaaatcattatctcttgagaaaaacgttaaaaaaaattgagtataattttgtgggaattatgtagccattaatgcatgcgggaggtcacgcagctggtggaatgtcgatgatgccaatcatgttacctgatggaaggatccgatacgtcttgtaagttcttatctatactccatatactgatctcatgtgtttgctataagacacgtttactgatctgatgtgttgaaatgtaataggtaacagcctggactagcagcgatgccacaaccaccaccgaggccttttccaccgtataggggag

SEQ ID NO: 1090 - DNA, 1072 bp, Arabidopsis thaliana landsberg
tttcgtcatttctcgagaagctgttgaagcttaacgatctctctgatcttgtttgacttcttggtttccatggtggagatagaagacaaaagacaagaagtttggtactatgttttgtctagcgtctgtctctttctatgtgtgtagtgattaggacgtggtgaatattgagaatcggggatatatagaggtggtgaccacggaattctgatttaattagttttgtttctgcttaaaatattgtgctaatcatatgctttggttttttttaatgatttaaaccaacttgaatttgttgacaagcaaaattaagcagcttgaacttagaaaatgatatttaacataacctcaaattttgtcaccaaaatcagacaggcaaagctggctcaagcatcgcttaaatccctgtaaaacgcaactatgtaattaatattgagatatacttgttgctttctgactctgatttcattcactcggcagaattctcgtgctctcggctgctgttgccaaatcttatggtatctttctcaaaaagctcatagtaccgttgtgtctcaatcagactttcattgatgtaagtcttataggtactactaagatccataatatgtaaggcctcacttgcttctttcccatcatatcatatggctgtttctctttttccacctcccggtactgaataacagcatgttgcttgctacaaaatgtgtgattagtaggaatgtcggatctttctctcacgtccaaagaggtagcaaatttggtaatgaatgcaaagtgtctctttcagtggttcaccatccttaaaatgataaagtctccatctttctttgggttttctattatctacgggattattgaagaggagtgtgatacctttgtatatgttggtttcttcagcaagtttcctcgatagctcaaaacatcgcacaccatgtttttcaatcatcaaacatgaatgaagtagcagctatcgagactctctctctcgtccggtacttagccaacacccttcctccgaacctaaaaatgtcagattgatgtctcctggcacttggaggataatctagca

SEQ ID NO: 1091 - DNA, 1317 bp, Arabidopsis thaliana landsberg
aacttgatgatgtctgattaacccaaattcgagtggaccaagtaaatgaaatcctgattatgctgctttatccatgtatttcacctgtgatgtttcaagtgaagcaaatatgagtgttgagcaatattctgtggggacaaataaaactgctaagatatataaaaaaaaaaggaatttccaacattagtaaaaaaacaaaatattaaatattgaaagatatagaagaatattctaaaataaatgaacgatcgcgttgatctcgttgacttagctccacctttctctcttctttttctttttttatatataatttaatggaaaattactattcttaccgtgtgttgtgtatatttttactacgaatgttataagttttgacgagtttaagacagagtagacaatctcaaacagcctttgaatgatgaaatctgctattttactgatggtttcttgtgttttcatgtttcttgtcgtgagctatattcaaggtaataacatattagttttgattcatcacttgaatagatatagaattatatatcaaattaacttcaattcggttgcattatcaattagtttatttaaattgtcgttgttaactacaaaataaaaaaatatgtttgtcgtctggttttttctagcaactcataccctcttttagaattccccgtagcgggcttgcgtctggcatctccggctctttcagcggcgttggctagcttgcgtctggcatctccggctccttcagcggcgttggctagcttggtctccggcgtgttcgttagtttcttcgacggactcggctggctctgcttgaacggttatatgttgccgttttcttttttgtttgaataaaagctgtgatttaaactcatcggatctatatgttagtagtggtgtttgtggcgattctccactcaaaagagtcttctccggtctatcctttgggttttcagttttcggaaaacaattaaaccatttgcggttacagttgaagattcaaagctcttccctcagtttcttactattgcctttagctgtttctttgtgtttaagctttgattgggttaattaacagaggtgaattaatcatggatcttaatttcctttttggtttggttcgaatctaaacttttattcgaacaagcaattgaaattattggatctgtgttagtttgcatctctgttttgcagatgttggagttttcagagtaatctccggcggaatcgttagcttcgacggcgaaggttgatgacgggaaactttttgtttcctcatgtttacatgagtccatgttgttgacacgtgtagtgaga

SEQ ID NO: 1092 - DNA, 556 bp, Arabidopsis thaliana landsberg
gtaatatgcatatatactacaaaaaaatgaatatccttacgaaaaaattgcgaccatttttcgtcagaaaattgtgaccatatacatacaaaactgtgacatatttatttggtcataaaaacgttgctatttcgttatagtgttataaaaacgctcctttctcaaagttaaagatgttttggtaattatatattttctttcgtgttaatttctcgtaaaaaattttctgctatttcacttttgtttattgtttcttttataggaagcaaacaatgaagacttctcttttattggtgtgatgaagaaaacacatcagaagcttgatggctcgtatgttgatcaacgagcacggttggttgcagacacttatgaaaagcatatacaagaacgcttgggtcaacttgaatcttctggggaagagaatctgacagctgaaactcttgacgaacactcaaggtaataattctaaacattaggctggttttacattcactttaagcttgttagtctctggttttacatttatttgttcatgtgatgtgtgtagtctaaacta

SEQ ID NO: 1093 - DNA, 687 bp, Arabidopsis thaliana landsberg
gacgaaacataacacgggtgattaaattaaagcatgttacatatatttacaacatgcgatatatcaataaatcgtgctgggaacaacataatgtagactaattttaataaatctctaacactacccttaacgtaatacattattacggtatcccataaaacaactagattaaaacccaactccagaccaaacataccacggttgattaaattaaaacatattacatatatttaaaacatgtgatctatcaataaatcatactagacacttaaaaatcaagttatggagaattacagtaactacagttttgtatagcatgatataaaagtaagatactatgtattttataaaagcacgaaatgcactgattacctgggactgcctatcgactttccagacaatatccaacttcaagctccatagacgctcaatttccttctgcgtttcctccatctctgagtcatcatcttcgtcaacctcagggaattgcaattccctaattcgaggcacactttcaaggaacaatagttggattgcgtgtgggaatccctgaaccgttacagatttccgcataagcttattagcaccccttgctgtaacactcttcaacgtcaataaaaaagatgtagttccccacggatgattaaaaaacttatccagattttcgtccatgtccgcatgtaccgg

SEQ ID NO: 1094 - DNA, 2743 bp, Arabidopsis thaliana landsberg
  unsure (1)..(2743): unsure at all n locations
aagaaaaattagttactgacttacacaaggtaggtttttttgagcttcaataatgtgagcaataatgcatgaccttatagaaagagttattaatgtagcacgatgaaaatggatatggtataattactctatcatagttttgattctttaattctttatcgtttcccaacaaccctttggataatgttgagtaatggttgatgatgataacgtgttgattagtctttgtttctaatggttgtttgtctttgtttcaggcagaggttttgctactggaaggataagtcttggagaaatccaagtggtgaaagtcaccgagttcgatagagtttggaaatgtggcacctcgcgtggtaaattaagatgcgcatctttttacaaacctgtggggataccagaaggtttccattgccttggtcattactgccagccaaacaatcagccattgagaggctttgttcttgcagctcgggctaacaagcccggtcatctagcggatgatcatcgccctcctttgaaaaagcctttgaattattctttagtttggagttcagattcagattgctacttctggttacctaatcctcctgttggttatagagccgtgggagttattgtcactgatggatcagaggagcctgaagttgatgaagtgagatgtgtacgagaggatcttacagagagctgtgaaaccggtgagaaggttcttggtgtaggatcttttaatgtttggagcactaaaccttgcgagagaggtatttggtctcgtggagtggaggttgggtcattcgtttgctctactaatgatctgtcttctgataataaagccgccatgaacattggcgtgtttgaaaaatctcgacccgagcctacaaggtatgccaaatcttgatcaggtccatgcacttattcaccattatggaccgatggtctacttccatcccgaagagacttacatgccttcgtctgtgccatggttctttaaaaacggagctttgttgcaccggtttgggaaatctcaaggcgaaccgattaactcagctggctcgaacttgcctgcgggtggagaaaacgatgggagcttctggattgatctccctgaagatgaagaagttagaagtaatctaaagaagggaaatatagaaagctcagagctttacgtccacgtgaaacccgcgcttggcgggattttcacggacgttgtaatgtggatattctgtccatttaatggtccagccactctcaaaatcgggcttctcacggtaccaatgaaccgccttggagagcatgttggtgattgggaacatttcacattccggataagcaacttcaacggcgatcttacacagatgttcttctcacagcatagtggtggaggatgggttgatgtatcggatcttgagtttgtcaaaggaagcaataaaccggttgtgtactcatccaaacacggtcacgctagtttcccacacccgggaatgtatcttcaaggcccgtcgaagctcgggattggagtaagaaacgatgttgcgaaaagcaagtatatggtggattctagtcaaaggtacagaatcgtnnnnnnnnnnnnnnnnnnnnaaggagcggtttcagaaccgtactggctgcagtttatgagagaatggggaccaactatagtatatgattcagcagctgagatcaataagatcattgatctacttccactgattctgaggtattcttttgagagtctgtttcctattgagctttacggtgaggaaggtcctacaggaccaaaggagaaggataattgggaaggagatgaaatttgttgaaaacagagctcctctgtttcagtgaagctttttgctaagtgtatgtgtaaataagtgtgtatatatatatatatggaaattgtatacaaattttggattcaatattaatcatttcgatcttacaagcctgttattaactctatatatatattcaaattgcccttaaatccatgtgaggtacagatagatagattcctaagtgatcaaagttggattagtgaacatgtgcctttttacttatcgaaacgaggaaacgacgtagtttaataattaacataaggatctagaatatgttgtggtagacttcgtcgtaggttataaaaactttctcggtttctaaaacgacggcggtgacaaggaacaaaggtgaggtttcagacacagacagaacaaacaacgaagaaaattcaaaatcttatttcaattcaacgtatactttccttaaattaggaatttggttttcgagaaaattgagatccgaataactatggtgagactcaagacgagtctctgggttcttctccttgccctcgtttcaattcagttaaatggttcgtttggatctgaatcaagtaaagtagcttatgtcacacttttgtatggagatgagttcttattaggagttagggtattgggtaaatcgattcgtgacactggatccactaaggatatggtcgctttggtttctgatggtgtctcagactactctaagaagttactcaaggtttggtttttattgtctagttatagtagtttaaagatctaaagagttctcctttcgattgagtttgagcttaaatttgatcacatactgctttgtttaaagttgtttgcttttgattctataggctgatggatggaaagtagagaagattagtttactggcaaatccaaatcaagttcatccgactaggttctggggtgtttataca

SEQ ID NO: 1095 - DNA, 739 bp, Arabidopsis thaliana landsberg
aaacaatgatcaacaaggctaatgctcttgggaaaccagtggtcacagccacacagatgcttgaatccatgacagtctctcctcgcccgactagagctgaagctaccgacgtagcaaacgcggttcttgacgggacagattgcgttatgcttagcggagaaactgctgctggagctcaccctgagactgccgtgttaacaatgtcaaggatctgcaaagaagcagaggatttcatagattacgacattctccacaagaaaaccctaggaatggtttcgttaccgttatctccgatcgagagcttagctgcttcagctgtttcgactgcgcggagtgttttcgcgtcggcgatcgttgttctcactagaggcggttacacggcggagcttgtggctaaatacaggccaaacgtttcgattttgtcggtgattatgccagagattgctgaatgctcggactcggtagctcatgtggcgagacgtggtttgatttaccgtgggattattccggtggtgggatgttcagctagagattcagtggaggagatgattagattagctataggatttgccaagacgaagggaatttgttatactggagattccattgtggctttgcacaagattgatggttcatctattgtcaagatagtgagcgtcgagtaatccaattctaaactttttttgtttaaccattgtttttggtcacatgataataaagttttaacatatttcagttc

SEQ ID NO: 1096 - DNA, 1199 bp, Arabidopsis thaliana landsberg
ctgaggatgagaccattgagcgtgagactgagtcagaagagggagtattctacatcgatggtcagggctataggaaagagagaaaaagagttcctccaactacactcaaaagcctgctttccagaagacctttcctcagagcaacttccagaagacatatggtaattcagcttaccaagccctccctccccccccccctctccaccctcatcaaagagaagaatggaatctatgcttgagcagattctagagagccaaacaaagctcgttgtggagtttaatggcaagtttgatgctgtctacacagatcttaatgggaagatcgacaatctgagctctcacttgaagaagctggatgtataggtagctcaaactgcacaatccatcaagagacaagagggttttcttcctggtaatcctgatgctaacccaaggaagagctgtaatgccatcttgatcagagaaggagatgatgtttgggaagaattggacactgaagacaagttggagctcgctgctgcagagttggtttcgaccgacaccaaccagtgtcgatcgacaccgtatcgaacattattttcagaaacacttcctcactagggtgtcgatcgatacacctctagtgtcgatcaacactgggtccggactgcaccatatgaggcgcgaatctcgatgaagcccgagtcttcttgcactcctcttgtcccttatccgaggacacgtcgttttaaggaggagattcatgctgctaagtgcacaactgactagaatcactctcctcttcgcggatcgttccaaacgaatccctgaaggaattcttgaggatgttcatgttaaggttggtaactccctaatccctgctaattttgtggtcctggactataagaaggaacccaaggatcctcttattcttggaagagcattcatagctacagctggtggtaggattgatgtgaagggaggtaggatctctcttaaagtttgtgatttggagacagagtttggcatggatggttcagagtttacttagactattagtagtattgcctctagcatagacacacctcctcagaccccttagaatccccagacagagccacacataacgctcccaccagctcagctcgccaatgagagttgcagagcaacgatgtcgatccataccatccctcatgtcgatcgacaccctcgggattcac

SEQ ID NO: 1097 - DNA, 617 bp, Arabidopsis thaliana landsberg
  unsure (1)..(617): unsure at all n locations
tacaagaactcagattaaaaattcatatatctttagataggttaaagcccatgtttcttgggctttaagttagcaccaaaccttgaacttgacgaagatttttccgcgtataaattcaagagtctctgccattgtgatttatctccgtccgataaatatatacaagaacaatgaacagaggagcaaactctgcttccatccctaatgatctcattcttgaaatactctcgagattgcctgcaaagtcaaccgggaggtttcgctgcgtgtcgaagctgtgggggtccatgctttgccattcatatttcacggagttgttcttaacgaggtcctcggctcgtccacgtctcttaattgggatccaccaagacggtgaccggtttttcttctcgtgtcctcagcctcaaagcccatatgataactcttctattgttttagcagcagattttcatatgaagttcggtagagttgaggatgaatgggtttatcatattctgacattaggaactgaaaatgtgaggtggagggagattatatgtcccttttcatatgatctcctcgggaanagccgatatgcatcnatggggttttgtattcataagtgtcggtagttatta

SEQ ID NO: 1098 - DNA, 606 bp, Arabidopsis thaliana landsberg
  unsure (1)..(606): unsure at all n locations
aatacgtcttctcccatttcttgcgagagttgaatgaccatatctcttgtttcatgtccttcccctctgatatacacaaacggtccttcatgttgcttatagtaactcgaccatcagtggtaaatggtattttcatactcgcttcaaaagatccactggaaagatcaaaacacactatatgccatttccattgcatgttgtgtttctattcttatgtggtactctctggagggcacccacctccaaagaaattgaatttatcttctctcttttgatgactctggcgagttggacttctggagtaactttatactatttacgaattgatatacttgttttgtttgtgacctgttctttccactgtcatagtcttaactcttaagttttgtttttcttacttgtgttatatgctattattgtccttactattacgcaaatcagagatgctcaatgtaaggcagtaatttacgttgnnnnnnnnnnnnnnnnnnatgcttagggtggatacaaaatgctgatttggttggaaaatgttccaatctgtggatccaacatttcaaatagaacaactccataataatctttttcaaagtaaaaggtgaactc

SEQ ID NO: 1099 - DNA, 669 bp, Arabidopsis thaliana landsberg
aagatgcaaacaaccataaatcatcaaaataagaacctcagtgagaagttcagttttaagataacataaatccaagagacatataccgggtagtgactacctccagggagttaaacgtgctaaaatttgacaaatttttatctttatacaccttgatcatagaaggtcgaacctggacggtctgtggaggaagctgccaaattgggagcaattttaggattagctcaaaaatctggttctgtgacatgaaagagagtctacttacgttcttgtttaataggaaaattcccttaacagcagagccatcattaaacatccgaatttggatcagcagaggctgttggaataaaaaaaaaagtgtcactacttgtggtaagtgataatcaaatacagaatcgagcttaaacttgaactgtaaactacataccggctcttggacacaggttccctgtgattcaaaacaaacataataaggaaacaagagtgaactaagcaaccattaaattgtcatggaagtacaagaaagacctgaatattgtacttctcatagatttccctttaaaaatatttaatggacacattcgagcaaggtcctcaaagatgtatccagttccatctgagtgtatacgaggtttcccattcttatcaagaacatcattattactttga

SEQ ID NO: 1100 - DNA, 4085 bp, Arabidopsis thaliana landsberg
ctgattttccatagtcggattgactcgaacctgcagcactcatcaatcaggcaataaacaagagaaatatatatcatgattcctaactaaactaaagaaaacattttttttttttcttttttttggaatgaaaagaaataaccaaatgaactacaaaataagaaacaacaataaaagcatcattagtaagagcctcccccagacttaaacgacattgtccccagtgacactcaggtgtgtgttgatcgacactcttctcgtcacctgtaagaacaacaggagagacaagctttcgaggaactctaggcttgttatcttgtgaagcagtcttcgaataatccaaagaattaatcaaagataaaacaggagaagagagagaagagatcttatcacataggtcctcaagtggtgtgggctgaagagaatgtgcagaatcatctgtctgtgaaacccgtggctgtcgatcaacagaggtagtagtgtcgatcgacactgttgccctaccactctcatttgcgagctgagcggatgggagcgttgtgtgtggctctgtggtgggattctgatcagtttgaggaggtgtgttttggctggaagcaatgcaactgataggcttagtaaactctgaaccatccatgccaaactccatctccaaatcacaaaccttgagagtagattctccctctcttcacatcaaacctaccaccagctgtagctaggaatgctctcccaaggataagaggatccttgggttccttctcataatccaggtccacaaaatcagcagggttaacagagttaccaaccttaacaggaacatcttcaaggattctttcagggattcgcttggaacgatccgcgaagagaaaagtgatgtgagtcggcctgtaatgagtcatgcctagtctctcagtaacagacttaggcatgaggttgatgctttatcctagatcacacaaagagcggctgaatctgcttgtaaagatagagcaatcaagaacaaagctacctggatctggaatcttcccagtagtctgaccaggagtaatggtgcggaagtactcagctatgtctactttgtgcgcctacacttacttggcctcaggcagcatgattgcactgatgtccctggtaagcagcttagcttcatctgagctaattccattatcaacaagtcgcttgacatacctgttgagtgaagcacaagatgtcctagaagcatccttaggaagagtatggaggatcttctccattatggctgtccacttagaatcatgaatctcctgcttagaatgacgcttcctcggataagggactggagggctggaccttgaaatcgagtagcatagaacaagtcaggcctgttgaaatccccaagagtacgacgtggctccgtagctggaggaatagctgcaggaatctggtgttggtgtcgatcgacacctatgttgtgtcgctcaacaccaatcgcgtttgcattctgctcctgaaggtgttgatcgacaccaattgggtgtcactcgacactgagccctgctgcgtctctagcagctaattgcgcattgaggcgcgcctgatcctcattggcgtcctcaggtaggatgagtccatgatcatccaatctctgaccagcctcattgtaggcttgcccatcctcatctcttaaatctccttctacatcagctctgaagactctgtcagccattaataatctctgagtttttcggttggtgcgttcaagttttccccaagtccagaaagacaagttgatcagctcattctgttgtgtgctccttgtttgcctaggcatacacctgaaacacaaaaaagaagaaagcaagaaacgcgtaagtaacaaaataaaattaaaaactagacgaaatctctaaactaaactcaatggtgattcccaagaactttggcaacagcgccaaatttgataaggttcaaattacgctaagaacttcgctctcaaataagagatcaattgcagtacttaaggatcgatttatacaaagatctttttcacacaatgaattaaatgttgagattaagctagaagagattatgagaaaataaaagtaaacatagtaagtaaacagcaggttgattggttgtgaaacgattaaataaagaggtaggaacatggtattctcaggaaactattggttagtagatctaatgtaagctaagttattatcgaaccattattaaactaaaactctaattatgaaataaccatggtgttccgcaaaactccctatgcctatagctaagaataaccggagaaactgagtgatctttaacctaaacatgcattctaaacgatattgattgttcaccttagtagataggctgattcatattacacacctataaaccagcattatcaaataatagatccaactacagatacctatggtgggcatatctattgtttggattcaagatctagttaataactctagatatagcattaagtgtaatcaaagatgaagaattcttcagataacttagcaggggggcgatctactaaaccataagaattcctaatgagaaaccctatccctaacaagaagactactcagacatattgaatgaaacaagcaacataattgagtaaaaaagcataaacacagcaaataaaataagagtaagaagggatctcttcactgtattgagaactgaatgaatctttgaaaataatggatgaatagcttatgtttttgaaaatagggatgaaaagcttgataagaaatttataggtctaaacaattacctgtaaaactatatataaaccctataaaacgtccagggactagtaatgcaaatagaaaagtcttctaggcaaatttacacttctgtaaacctgaaagggttatggaatttgctaggccgaatctggtgtcgatcgacacctctgaatttggaatccgaaatcatctttagcttcctttcctctagctcttgctccaaaatgtctccttatcatccgttcttgtctcactgcatagaatacctgaaaagacactaaaaagactcaagaaataacataaagactcaaaatcatatacctaaaacatagataaattcagtaaaaatagagatatatcaaaatcctacactcctggtgtcgatcgacacttccctctgaacccggaatcctaaatcgtccttagcttccttttccttagtttttgctccaaaatgtctcctaatctccattgttgtctcaatgaataaaatacctgaaaagacactaaaaagactcgagaaataacataaagactcaaaatcttatacctaaaacatagataaaatcagtaaaaatagggatatatcaaaggtgaagagaatctaaacttcaacatcaaatgagagaagtgatagagttaaaaaccaatttagaagttaaaaccttttattacagcaaatatttttagtcgtagaaaaatttattaaaaaaaatctaaaaatagacccacgaatagcgagagtttatttttatcgatttttttaataaatatttttggtttacaaattatttaagtaatgcaaaagtactttaatattttatttttgattctttttcacatagatattatttcatttatatttttagtatcatttctgttatttctaattttgttatcaatatcatatgtcattttcccttacttgttctatattattaaagatttttctattagtcaagaaattataaatattttaaaaagtattagaacttaaaactaccaaaatatgtacatatgtgggaatacatgtgtttctcttagttagtaaactgtttactatcaattaagcaattataaagtaatatatgtttgactgaaaagccaggttgacattttcccattttaacaaccgcaagagttgatttgatttttgtgataatcgacagattatttgggtttggaaaaactggaatgtcctaaaagacgctttatcattctctcatgttttaaatggcttttgtacataaaacagctactttcgaatttagaaactattatatttgttcccctttgttttaactgaatgtttatttgcccatcactaactta

SEQ ID NO: 1101 - DNA, 1378 bp, Arabidopsis thaliana landsberg
atatttaaattatatgaaaagattgacaaaattttaataaatatgattaaaaactttaaatttgcaaattaaaagtctagtcagcattaatcggtcaaatcggcgggtttagtatatgtatttttttaatataaatatgacattgttttgaataagtgaaaaaaataagtaaaaacaaaataaaaagtatttgattactaacttgtaaattatgaattaactattctcaaattttcagttattgagattgacttaaattagttttcatataaattaagtgtgaatatatatatatatatatatatatatattataaattcaaatatgtaacgttttaacatttcatctattttaactaatattgtgttataaaattatgaaaatatttaataaattagtaaataatgtgctaacgcctagattccgcctagcccccccgattaatcgatctaggcgctaggcccctatcgaacgcctagctaccgcctagcaattttttgaacattgcttttatgtcttaaactttttttttataatcaatatctttatagagccaattaataacaaccaaaaaataaatattataactagaaaataacacaaaaagggtaaaagcccaaatgttacatcgatcctcgtgcttctttctttgttgaaggcggttcttagatctactatttccgcctctatttgagctttgtcgaaggtttgtatcttcttgtttgtgatctaggagggaggatttctcaatcaatgtagtcgaagttttggtttgacggaagaggagaattgaagttgtggttcactgtcaaggatgtcatggaatgcttcaaagatcctcaaggctcatcagttcttcttgtttgcactaactatggcagaagtctgtggaaaaaaggtgggttttcacttgtttgatgtggtggttaacgacaattctttgagatctgcttggctgacacaaagctcgtcttcaaagctgattagtgagccaccaccctctggatccttcgcgtttggtatccaccggtccggttgaagtgtccatgcttggtcaaatcaaagatatctggaaaggtgaggaaagggatatacatgagtgtgtcgggttgctaggtcgggccgtcccagtagatcgactatcgaggtgattaactttccagaagataaccggtagatcaagtacgtcagaggaaagcgatcagtgtcggaaacctactcttccgcccgatctaaggctcatgccaccttgccatcgaccatcaatagaattcgatcaatttttccgattttggaagtttctacaattgggctttttgtaactggatcactatttgtaacgctaaatcgagcccatttttgagaaaaaatttaagaa

SEQ ID NO: 1102 - DNA, 539 bp, Arabidopsis thaliana landsberg
  unsure (1)..(539): unsure at all n locations
aaagtgattctgacgtagtgcagaaatgcttgactagcaacaaactaatttctgcttcaaacagaagccgaatcttgcaaatcacatgatcttgcttccagttcaagttattggtaagcctatactttatgcaaaacttgagaatcttcttgaaccctagaatcttcccagtctcctccgactttatcagtttatcacgacccatggtcctccagcaaccagattcacatccatcggtcttaccacaagcctctgttcgtggtttaacgataacaaatctaggtctctcagaattgaacacctcatctgnnnnnnnnnnnnnnnnnnnnnnnnnnnnnnnnnnnnnntctggccaagaatctccgttaacgaccataggcttcagataacgtgagattattacttcgtcttctaagtttaacagttcggatttgacttgatcataagctgcgtcgttatcttccatgatgaaaaaaaatcgatcaagaaaaagatctatagagagagaaagatcaaacgcaagatcgagatgttttgtt

SEQ ID NO: 1103 - DNA, 2230 bp, Arabidopsis thaliana landsberg
gtcaaaatatagataacaagttaaccattttttaaaaggatttcatcagaggcaaccgtgacataatgttcaattgaatattttcaggaagtgtttcgaaacattaattttttgaaaattatatatctccattttctttcttctctaatggtattattatgtgtctgagacaaaaacatagatgtgatatatattgtgtggaaagcagagttgttaccaacgttgtgacttgtgactttagtttaactttttgagttgtaaaacgtatacatttttagtttacttgaatttagtttcatgcttacatctaaaagcaaaaataaaaattttgacaaccacaaatatgttaaaaacttactaaaattgttggccaattagcatagagattattggataccaagtatgacattgacagattttgacagattttctattatcatacacgttttagtaaacaaaattgtaaaaatggctcccactttacttatgtgtaattgcatgaacaaattttttttgtcaaacgtcaaactctctgatatttatgacagcaaagaaatttggtgccaaaagtgactttcatagtatacttctagtcctcaatccacaagattagtttaactatagaaacactttttcatctttttaaaggtttgaacataattttgttgacctaaaaaatgtaatgttattgtattattattaaatatactgttaaagtacttcacagctcgagttacaaagtttagccaaactataaagaacaataaacaaaagaagaagaaaaagattgatcacagcaaaaaagcaacgttagcaattgtaaatccgaagcttaatttagccgcactctgttttctgttaccgaaaatttttaggatctccaaaaccatgtttagaagaaactcttatgaccgcatggtttgttacaaaatcaattcaaatatagagaatatcatacacatctagtagtcaatcgacaacgttaacccacaaaatcaattcaaatatacagacacgttttaactttttaaaaggttttcacttttcagttttcacttaagtaatttgtacacaattacagggaggtttaacgtatacgcattaaacttatttgtcgattctttttaaacctctatttttcatcttgtttatcgttgaggaatgtttggtttatgtcggtatgtaaatttgaaataaaatgaatgtaatgttattatcaagaagtatactaatcagagtggtacaattagtttacgtacttgcaaagttacaaaagttcagcctaacagtaacagaacaatgaataaaagcagaggaagatgaccaatcgcaacagaaagcgatacagccaaccacaaaattcaaacagccacctatccatttagttgccgctctttcgagaaccagtcctctgttttattacaaccaccataagactactcatttgcaaacctttagccgcacttagtattctatttatacaccattacctttaccattttagcttcttcaaaaccgtgtttataagaaactcttgtgacctcccggtttgtaattgaggctgaggtcacgggtagtaatcttgatagtgctactttagatgtctcggtatgaaaagatttagagaaatcaagtttagagtattataagttgatggctaatactttgttgggtgtttagaagatataattatagtacacttttgacaaattgggaaaccattagattgttggagttcgagtctcggtctttttgttcgatgtttgaggttaagcctcaacggttttctgtggtcttaattgcttttgatatcacagaaccaatatgtaagtaaagagaaagataaacagagttccatcatttttgtttggaaagaaatatatagtacctattggcagctacattgatatgctttacgttttccagagacttgtatccagatgcagaggaggagggtgtttccgaagcatgagatggctatgagtagaccaagaagcacattaggtttagaatgtgacacacacaatgcaacaatcaacaaattcaaggaccttcttccttgcggaatcaagatccagagcccgatcacaagcgtctatcgtctttagcagaacatcctctggcagttggttcccttttgtggttaaagcagtaactaaaagaaccatatacatagcagatggaagaaggccttcaagatcaacaagttttaatccatctcattccaatt

SEQ ID NO: 1104 - DNA, 460 bp, Arabidopsis thaliana landsberg
  unsure (1)..(460): unsure at all n locations
aaaatcgcctgatgtggttttcggctactcgctgcctctcctagagattcagataatactgatattcttctgcattgtcatgtctcatatgttcctcagatgcatcggcatttcccaaatcgcttcatatatgattgtaagcaagttttccatatctaacttggcaagcacacaagatatttccaattattagaactacaaaagtagatgtaacttgacaagcacgtaaattgtttaagggacaaagaagatcatgcatgcgtgctattgaagatatttttcagaaactgaaattatatatataaatttatgtgcaggctggaatagttctagggcctcagctttttgatgtactagagaaatcttcagggaaactatccgtggatcctgcgtnggatggaatcgcagcgttaagatgcatctcggtgtttggaacactaatgtttacgtttctaatgac

SEQ ID NO: 1105 - DNA, 6002 bp, Arabidopsis thaliana landsberg
tgccgccagatggggcagttccggcgagggtgtggcacagtcaggcggactcagccaaattttggtgcacattggctggctccggccaaggtttggcatggctgggcggactatggccaaaggtcggtgcacatcggcgggcttcgaccgagatttggtacggccaggccgacttctccaggcagcgtcggttactcaatgagtagctgggccggttatcacggcgcctagtgatgggtccaggtgactgtaacacccctatccagtcctaggcccatgacggatcaggagcgtcacatggacgcccgtagtcagccaacctaggctcgcggaacgaatcagtttgcccaggttgtccgaccgcgagtgcctttcctcacaaacgcggcctaaagctttgcaacccgtacaacgatacgtgagttgtgatagtccggacaagactaattataccatgagagacatggggctttataaaatcagagctttattacttatcgataaatcgagtcttacataacatatatcaaaactatagtctctacaaaggcaaggaaacctacaccggttggcctaacgtcctttgtacccttaaggtctccctactaatggttgcctgcaaaagagagtaagggatgagcgctaatcgctcactgaatttgggttcccctaaacatgcaataattccccgcccaaactcaaaataccaagtaaccgagcaatgcaacaatcaaattgtatatacttcacagagtatacacaacaatgcgcaacgaaaataaatatgcatgcaactaactactcaaccactaaacctagggccccgcgtattgatcttcccttcccttagtcatgaacacctatacacgtagccacaaaggctaaacgagtatagaacatgactaagttctgagtaccatattgtggtggaaactcaggctacatcgtcatgcagcactcgaccataagttgcgagcccgtcatctccgagtcttcgtaccattcgtgtgtagggaactagccactatgcacacactactaggatacagccttagggaaccatgacacacgcaaactatactaatatgcatgaaactaactcatgcaacaaacaatcatgcacaagcaaatatgaaccatggggacttaacctcgcatggtttatcaacaatcaaccacacaaaatcaagcaatcatacaagcaagatttaatcacaacgataacccaattatacgacttaacgtataaccgaggatccaagcaatcaatgcataattaacacctaatccattctagttctcatcaaacaattaaacaaacaagttggtttacatgcgttcatcgaacaacatgcaaccacatgcaacacgcataacctgaactcaccttggcactacaagaaatacttacattgatagcaccgaaagatagctcattttccacgactgctattaaagatgagtttaaattttggttattatatgatagcatttgataaacgttaagataaaagttctataagcgggattctaaaatttcttacgccgctcaaaaaattaaaacgaaaatctaaaattttagttgtgaccgcaaatattacacctttaacatcccacacttaaaaaaaaaaaaaaaactcacttgtgacctaaattttctcttcatgcctacccaaaaacgagaaacccagattcgaatgggtgaagatgagatacaatttccttttcactttatcagtgaattaataacggcgaagaagtcaaagtttcagagattgtaaaagaggtgggcttttttgtgatttttttttgtcttcctcttgaacgaatctggtttggtaagaggagttttgattttgatcagaatcgatggagttgcgacgtagatctccgtgaagaagaacggagataaaccttaaccctcattccagtgttaactttcttcttcttctcgattcagatatcatctgatttgtcttgtttgagctacaggaacactctcaactgaaggactagctcttggcatagctagactctctgtctcagctgggaattcgaagaactcattatcattaacaccctaattttgtcaagcccacatagattcaaagagaaaatggcgaacgcttctcgtttcctttccaaatcaggtgatatttgcttgtccttcgttttgattctcttttctttgaggctgaaccatggcgattaagccatcaaaccaggaatgaataagacctacaatttgctttatcaaatgtttatgtggttttctttatactgacgaatgttttgaattattgtttctgtcgatcatgagtttttggattatactaaccaatcttttataatgtatttaatttgattttttcattgacttctgcagaggtaacttcaaaaacacaatgaggtagagctttctgcatttaaaacgggtatagaccgtatagtctcttaaacttgttctatgatgtgtttggattaatttctcgtcttataaacttgttgttgtattccgtcttaatgttttgattttgaagggtcaaacttgttgttgaaactgatgaactgttattttcttctcttgttgctgaaacttaataatgcagttggggcaaatgggtctgggaaaagcaatgtcttatatggtgagattgagcctcttgaattcttggtttcgaatgcagtaattctttttatattctggataaatcaacatagatgattgaattctcttggtagcaaatttgattcagatttccagtataattagctatgttactttcatctttatacatgagtattttgtcactatgtgcatgtttcctttggtcgtttattcatatgtgtgttttggccacagttttgtctatttgtttgcgtgttttagttggtctaggttcttcaatatccagaagccaaaagagaagagcttcggtttagagcaagaacttcctatatctaatattcatctctttgtcttttaattccttattgtaatttgtgttttcaggtttctcataatctatgtggatttggttgttgttgttgttcaaaagctcaaggtttggagacacagcctgaggctaaggagaaacctaaagagaagtaaaactcggtttgccttacctctgacttaatgtattgtttctatatgtgatattgtttgcatttttcaggaagacgtgacttctgtttgtgtcttctctcttctcctatgcatcttctgtaagtaattttgtttgtgtcttctctcttctctgattggatttttagtcaagcttttgtctgctgctgcatcttctgtctcttaacatcagattcttgggtttcgtagtcctcgcagcttctgtcttcttctcattgagtttcattttccttatttgcttcagcttctgtcttcttctcattagattctttgcattttttccccttagttgcttcaacatctacataaggttaggctcacatggactcgcattcttttctctgtttgcttatgttgtcacatttcccttgttattagtcttttcctctgcatgcttcttctctccatcactcttaacaacaacttcatgtggctcttttatttcagtgtcccttgatgccttcaactttgggagatttttcaacttcttcgacactctcagtcttcttctccaactccttcaatactgcaaaagatatggagaaggcagtgaagtctgaacatcaacctgagaaggcagtgaagtgtggatatcaacctaagttcttggagggagataagcaaaccaatgtagttcttcatttagtccaaatgaattgcagtacttatgatgttgaatgctaaactatgtatcttttgatgatccatggaaagagcatgcttttaataaatttgttttgtagcatataattaattggattttaaatctatagatttcaattattacagcataaaagggtaatatataaaaaaaatgaaagcattttaatgaagctatggtagaaaacacctataatagcacaaaaaacaactcattacataattaaaaaaaaaaattaaagttgctatatcaaagcgtttagctattgctatagtagagaaccctatgataacatacagataaaacgctatcgtatgtaggtggtctaccataacaggggcataacatagcttttatgaaaacgctattaatgacatattataccgcttttcactggctaataatgttgatatttgttgtagtgaacctagctattattagatctactaaccaatagtttcctgagaataccctaagcctgacgtttttactttcttggtttacaacctcacaatctactattgcttccttttgtttctatttatgttcattactatcttacttagcttaattcaaaactttggtctattgtgtgatccgagagctttgtgaaatttgacattaaagtactacaatcaatctgttatttgagagagtggtctgaaggcaatttgacctatatcaaatttggtgtcgttgccgaagttctctacgattcaccattagattaggattagaattttgtctaagcttttatttttctttttgtttttatttacttagtctttctcttttctttttcttgtgtgttttgggtgtttgtctaatcacagaacaaggacaaaacgagaaacatgaaggagagtaagattgttgggatcaaggctaagcttaacgcggtccacaatcaacttgtggagaatgtcgattatgttagtagcagaggttttccgaatcagagatttgatctccaacaaggcaacagaggtttctctgggaatggtccaactagctacactcagaattctcagttctagcaaccgctttagaatagcaatagtttagcttcacaaggatctatgatcttactacttaccaagcctccccctccacccgcaccaagaagcaagatagaatcaatgctggaacagattctggaaggtcaacagaggatcttagagagacctatccctagatggcatgagagcagcctcactacttcttggcattctgcttcaatggaaagtgagtatgagttagtgaagattgaggagagtgacgattttgacgttacagaggcagtgttgaacgacactaacccttggtgtcgatcgacaccatcacatatatacgagacatcaggctgtgacgaagcaaaatcgaccaggttcgacattgatctccagaatcgctcgacacacattgatagtatcgaccgacaccacctgggtgtcgatcgacaccagtaccaacctgaggaagtgtcgacgtttgacagtgcaatatcgatcgagattgagagagtagcatcgataccagatagtagtgtccactaacacttaccgagtgtcgatcgacactgaaagtagactgcaccaatcagccttgactttccacctgttgctgaacaagtctacacgcataaaattccttgtccaatgcctcaatagtatatgcaccagatttaggaggagcactgcaaggctccacaaaatcagggagacataaggaagactgttattgtctaggaacagatttcagactgctagtggtggtgtcgatcgacacacactagtgtagattgacccccatcacttgttgaagcagaattatctacaatagctacgtttcaagctggaatcactgccactatctaatccacttgacatctgcacttcgacaaagtcaagctattgactataaagaagcgcttagtgggagacaacccactagtatgagttttgttttcttttctttctatttacatttttcttatattttccttgcttacttcaaatttgaatgcactggggacaatgtcgtttaagtttgggggaggccttactaactacgtttagagcacagacacacctcctctgactgctcaaaatcccaaaacagagccacacataacactcccatcagctcagctcgccaatgagagttgcagagcatcagtgtcgatcgacacca

SEQ ID NO: 1106 - DNA, 872 bp, Arabidopsis thaliana landsberg
caggtagaatggcttgttagactagattataaatctaaacttgctttgaaaaagaaacgttttggggattatctgggtgcctgcatggacacatgaaaaccaataaacactgcccaaaatacagaagaaatacagaatcccagccggaaagtatggatatgaagaagtctactggaaaaccgagttcttcagatctatcaggcgaggtctggctgacacctatcgacaacaagaagcctgcgccaaaaagtgcaacaaaaatttctgtaaatgaagctacgaaagtaggtgattcaacttccaaaactccaggaagttctgacgtagcagctgtttctgaaatagactctgggactaagttgacatctaggaaactcaaaatttcaagtaaggcaaaacctaaagcatcgaaggttgaatctgacagtcctttccattcattgatgcctgcatatagtagagagagaggggagagcgagcttcacaatccttctgtttctggacaactcttaccaagtacagagacagatcaggctgcctcaagtaggtacactacttcagttccgcagccatctttaagcatagataaagatcaagctgaatcttgtaggcctcatcgcgttatatggccgccaacaggaaaagaacattcgcagaagaaacttgttattaaacgtttaaaagagataactgatcatgacagcggtagtcttgaagagactccacaatttgagtccaggaaaacaaaaagaatggcagaactggcagattttcagaggcagcagagactcagattgtcagaaaactttctagactggggaccaaaagatgatagaaaatggcggaaagaacaagatataagtacggaactg

SEQ ID NO: 1107 - DNA, 972 bp, Arabidopsis thaliana landsberg
cataattgccaaggacgtgaccagtttcctaatttacctttgtgactcttttgactccataaaacattcgaaaaatcatcccacgtccatgagagcaacatgaaccatgctctgataccaccttgtaacactcctaccccgtcctaggaccaggagggaataggagcgtcatgtggacgcccgtagtcagccaacccaggttcccggaatgaatccattcacccaagccgtccgaccgcgagtgtcgttcctcacaaacacggcctaaggctttgtaacccgtaccgcggacggcagttgtgatagactaaatatatcattggggttttaataaaatcagatctttataaaaatatcgagtcttacatactatacgcaaaactatatcttacaaaggcaaaacaaatctacactggttggcctaacgtcctttgccccttaaggtcttcctactaaaggttgccttttaaaaaaagtagcatttgagtaatctagtattactcagtaagtgcgggatctataaaaataaaacccaacccaacccccaaacaacaagcaaagaggcaatcaaatgcaatgcaataagcaactatatgtagcgaaactactatgcctaaacatgctcctaactacttaagtaaggccttctatgaacacatgataccccgaggcaatggcctgcacactcctagacacaaagtgtaaagaagattaacattttcttatattacatcgtcatgtagtgcctgtcggtagcgaaacagcccgagcctttgtatgccataacacaacggagttacatgcgacacacaacatacggatggaatcctcatgatttggctaatcctagttatctaacaatcaaagtacaacagtcgggcagcatgacgtcaataccaacatcttccggcataaaagttatacgaccacgactttatactatcaagcaacaatcattgataagtgatcata

SEQ ID NO: 1108 - DNA, 493 bp, Arabidopsis thaliana landsberg
gctacgtacctggtgttgtgtgtggactcaccattggtcacattcttttttcgtataaacgtgactggttcatgaaaagcatgacctcttaggaggatgatgcccccttgttataatgcgtgtactctaatgttttgagttgtataatgagtgtgtgttttttttaacgagggaacaaaagtttaattgattgattcagttggcgtttgataataattgttaatccaaatgttgaggacaactaatatcattcctttagctgtatttgtttttatttcttcgtgaattagaagaaataagacagaagctttgtttaatttcagagaataaaacagaggaggtcatgcataggaaaagtcttaacgaaaacttggaagtgaagaaatattaaagacagagatttggagaccaaggaaatatactattgatattagttgattgattaagaaaatttaaagatataacggaagaaataaaaaattgatttcgcaaa

SEQ ID NO: 1109 - DNA, 4993 bp, Arabidopsis thaliana landsberg
ctgctgagtccgcctcacttattttttatacagagcccagaactccctctttaaattatacataggcctactgggcataagccgagagacgtctcgcgcccagtacacgccgaatacttttatttacgaagccgagctcagtctcgcacttaacatctaacccgaaagacagaaaaaatcggctgtgacgtcaggtgaaaaccagtccgcccgaaagccgagctcaaagcttgcagatgacttataatttagtcgatctaaaacctaatttcaagattgggaatccgatatggttaatacgtaatcaactgacggaggttcacaaaaaataaaaataaaaaatgaacttgttcttaaggaaaaaacatttattcaaatataaaagtctgaaagataagtggtcgacataagtcaaccgacctaaagccttcctagctcccagttcgtctagctatcagctcgtctttacttcgcctagctaacagctcgtctgccgcctttctagctcccagttcgtctgtaactttcctagctcgcagttcgtctagctagcagcttgtctgcatttcgcctagctaacagctcgtctgcagcctttctagctcccagttcgtctgtagctttcttagctagcagctcgtctgcacttcgcctagctagcagctcgtctgcagctttcctagctccctgtcgtctgtcgctttcctagctcgaagttcgtctagctagcacctcgtctgcatccttcctagctcccagttcgtctgtagctttcctagcccgcagttcgtctagctagcaactcgtctgcacttcgcctagctaacagctcgtctgcagcctttctagctcccagttcgtctgtagctttcctagctagcagctcgtctgcacttcgcctagctaatagctcgtctgcagctttcctagctccctgttcgtctgtagctttcctagctcgcagttcgtctagctagcacctagtctgtacttttcctagctcacagttggtctgcagtttctctggctcgtagttcgcctagctaacagctcgccggcagccttcctagcttgctattgcccgcctaacagctcgtcaacagcttggagttcaacaagtcgactagcagctttcctagctcaacttgtcaacagctaacattttgagctttttctacaagacaagtcaacaatgtggagagctccaaagaagtttacaaagactccaaaattccagatctcaacttgagcagcatcgcatgtctccctccgttaaaagttctgaagcagcacaaagtaacctttgctttcgtcgtcatgaattctgatcgccaatggagcaacaaaacaactcggaaaattacgatattttctggaataatcagcaacagtcacacgaagccacagaaaaaagcggatcacgatttgaggttatggtttgagagttatgatttttttccaagacaattcagattgacaccacttgaaaacgaccaacttcgtgagcaattcaacataatttacatggcgatcagcatatcagtttaaagccccgaggcctatctttctagaaagaccaacctacaccttaatgtctaactcatcaaagagttatcacaggaactctgagtccgctgcaaagtaatcactagtcgataggaacgacccttcatagacgaacaatgcaatactaccatcggaacaccaactctgagctcagcctctcaccatctctactcccatcaggataagtattcatgctttacactttatcatttcatcttcacatttgttgattgttgaagtcaaactctaaattgagtccagattcaaaaagcctagtttacctagcatcgagctacattcaaaagatgagaataattctcgcagttaagccgagctcaacgctcgcaattacacctataaattgagccgagttcaacgcttgctattatgtgaataaatgtttcgtaaaaactgagacctcgtcttgcattaaatctttaaaacaggataagcttcttgcattaaatctttaaaacaggataagccgagagctcctcgcaccttaaagtaagctgaaaagctcacatatcttactaaaccaaatgatattggcatgtttgcagctcatcgcaacttatgttttggagcttatctgcccggctatctcgcagaccgctagacagatctcatgtggcagatcagatagcagctcgccagccagatcatccagacgctcatttggcagttcatcttgcaacttgccagacagatcatctcgcaattgcagccagatcatccagccgctcatctggcagttcatcttccaactctccagaaagatcatctagccgctcatctggcagattatctcgcagcgcgcctgccggatcttcaagccgctcatctggcagtccatcttgcaactcaccagacagatcatccagctgctcatatggtagttcatcttccaactctccagaaagatcatctagccgctcatctggcagattatctcgtagcgcgcctaccagatcttccagccgctcatctggcagttcatcttgcaactcgccagaccatcttgcagatcatcttgcagctcgtcagtcaaatcatctagcagctcatcgtagttcttaagcccatgctcttcagttcatccttcacagctcaacataattcatgccttgcagctcatgtctgaaagctctgcaactcatggctcgtagcacattcatcgcaggtcaacaactcatgctcgttaggctcatcagactacctaactcacgaatttagccttgttttatattttcgacgcatgccaagctagattgacgtatcttggaggttcaacggttcaaattttaattcgcatcttcataaagtataagccgaatattcacaacttttaattcggaaaattcgtattaaacattcgaaattcccgaactagggggagggggcttattgtttatgcaggaattagcacctccgacaataccgacttaaaccagaagaattacaaattaaactgagatttcagtcaaaccggggatattccggtttagcctgttaatgggtgaaaataaggagatcgcctgacgaccttaacccaaagtgtagggagatcgcccagccgacttcctactttgaagaaaaagagttttcctctttggaaatagcaagtcttcagagataaaagaaattagaagattcaagtctcgaagaagtggaagtttagcatatctttaaaccgtcttaatagtgtataaatagaggggtttgtcctatattataggaatcatacgaaaatccctaattttctaacttgttctagagcaaagaccctaactttgtctctaagcagttttattcatcttttcattgcgtctttgattacaaaatagcaagagagttaagtgaatttgtttcaccctctttaaacaaattcattcattgtgtgattttcggaatcaacaaagagattaaataaaagaaacagaaatgggaaggggaatacttcacctaaaattgacttggcaatagaatcacaaagttcttcttaccaataaagaaaaatattaatcatgaattttttttttttctttctttggtctatttttgtgttgcgtttgagagtattttgagtttctttgcatgtatgtgattttttttgtatcgtgtttgaattcaattgtctttgggtgtgttttgagtttgggtgaattgtcttcgtgtgtctgtgttcgtgaagttatgtgttgaattttattttttgtgttggtgttttgagtatatttgcatgtgatatgatttctatcttgtatcgtgtttgagttttgtgtgtttatgtttgaattttgttttctatgggtgtgttttgagtttgggttgattgtgtttcagtgtctttgtgttcgtgagataatttagtaacccgaacaagccaagccacatgggcttgtcaaatgcaaataacctgtacagaagaatgcatgagatgagggaaagatttactttacctgacctctatatgctcttggctactgaatcgcctccggaaattaggttatgtacagctcaaagatacatgacctctcatttgatcttggctactgaatcactttcttgaacttttgttctttgtagatccactctctagtatccaaaacattttgttagcaattattatgggcacagactagtataacaagaaaataaaactacaaaattatcgccaaaggaaaagaacaaaacatggtaagaatcttacagagactgactggttgttaattttctgttatttaatcttgacaggttatgctgtgtaatgaagaacccgactgaaaaacagaaatcatcaagttaggaaaacaatctcactcaatatgagtatataaactgcgaaacgttttgagacggcattaagataacccaaatcatgtatgcagcaaatttgattcaaacattgtttcaacactcacatttgctcctgacacggaattgagatatgagttgtcacctgattgctgtatcatttaccaatcagattgattatgttagagctcggaaatggagacaagaaacatataaagatataaagatagatagcgaaataaacaaagtggtataactatagattcttcttgcatgactttcttcttcacagatacaacgaaagtgacaccatagtcattagtccaaaccccatttatccggatcatgtaattatgatggtttccttcaagtccaagccacaaccaaaatgatgcaatggataagaaaaaaaaaacagacatacaaataaagttaggaaagaaagccacatgtaatttctggaaaaatcattctacaaccaaaattagtggtgtaagagaagatgaaaatcattagtcaccttagtattggtcaggaaacatttggctgccttatgtgtaaaggactctccacaactgaaatccaaccatgacatcatagtatttacctg

SEQ ID NO: 1110 - DNA, 2624 bp, Arabidopsis thaliana landsberg
gtatcggactggcggagttctagtacggtcagggggcgttacagacgtggttaggagacaaggcgaagttgaaaaaaaacaagtcaagaatgttgaaaatcaatcacacatccgagcatggcttaggagggtaaccatggacccttcaaggaaatacgtggaattacttgataggattcttgatttggataagagggttgaggactcatcaacacgcactggagggaatgaacttatggagaggaaagaagaagactctagccctcatgtgctttgtgacgcggtcacaacctaccatgaacctcacgaccttgaagaaggagaaatcgacaaaagggatgaggaacctccggggagaacaagcgtttacaaccggctcacccttctagaggaccggtggcatccacgtatgataagcttgagaagacttggagattttaaccgagtcgttgctaagctactaccatgtacacccgtttttatagcttgttcggcttttcatattgaccgtttctttcttgagagttgtgaaacaagaagagaaatgaaggaattatatgaggaagccctacaccacttgaaaccgttcaacactctttgaaagataaagagttcgggaagatttcttgtgacttgttctatacgaggtgttgaattcatagatgccctatgcgattccggatcattgatgcgtgttttatttcacctcaggcttttacctgaaagaccacacgactactacaagtgcacaatatatcggagtagtattttaggatcgaatccacaaggagagaagtagttcagagaaatccttaagaagagagtgaagctcggaccaaaataaaagagaggggttattgtatgcaataagtaaccaaaataaaagacaagtaactaaactaaacagtaagcaataagagagaagcgttaggtcatcggggggttctccagatgtcatggttcaataataaggtatagatctcaatctaggtcataacatggctaggcttgtttactttcaaattcccagacatacgaaactctatcaagactagctaaccctaacggctagtaggtgaaagccgactattatcactaatatcttgcatactcagtttccctatcggctagtaggtgctaatatggtttcaaaatacaagatcaaagcattaagttcaaatttgattatagtccataagtccctatcactcgagggggggggcgtgtaacagttatagttctttattcagttgagttaggtcaagcattcaaacgagattttgccaaagaatgaaatacctaaggtcaagtactaggtggcgttccagacatacaagcactaagattaaactcaactagaaggaatagtgtaaacgatcaatcaaagtcatagaaaccgccaacctagattttcgatctattggtccccatgaattcccctttgaaatctactcgctcatggcaaaggagctaatcaaaagttgggttaagtaaaccataactaaagatgaataaaactttaatagggtttagagattacttctttgaatatagaatacaagaggcaaagctccaccttaaagagtcttacacgaaaacgagaaagagaaagagagagatggtgttcttcaagcttcaagaggtgaggcggcgaataagtaagtgatcgggccgagtagtgggcttcgggacaggagcctaatgacggcagtgcaaagagggacagacttgggcgtgacctaatggtcggtggtgagctactcggagctgcccgggttcaagtctcatcagccggatgtgttttggacattatttccaaacagccaattcttgacatgtcttcactcttcgggtcatatcttccaaacgacttcataaattgctttgatttgacttcaacgtgaatcttgactcttctagctttcgaatgccaccgagataccctcatgccggttttggcaagacctcgaccgcaggctaaacttccgaagaactagaatgatcgccttttgatacttttagcttcaaaattctcaaaaccttcttggcacctaaaatacgtgtttctcctcttattggctctggaatggcactaaatgctctctgaaacataagaaaacaatagctaaaacaggcaaaaaagtcgtgttatcaactcgcccagacttagactttgcttgtcctcaagcaaacaaaagaacaaatctggtggagaggtttgaaaatcgcaggaactctcctattatcagtgattgtgacttgaatctatcctacagaccacattaaacaaaagtcaccttagaatgacaactcagtagtcctatacctttctcgtccttgtccatcctctttgatcctacagaactctgaattcacgtcagtcaactcattacatccttcaaatgttttggcgtggactttctcattagaaggtgtcattcggggtagacggcgcttggtatgaaaggggattttggtgtttaaatggtggagttaaagtgtttagggtaaccgtatggtctcgaatgcaggatatgtcgcaaaaccgcatgagagaacaggtcggctgaggttcatagtttccaaccatgtcttctttttaaacacctccttctccgttactt

SEQ ID NO: 1111 - DNA, 2379 bp, Arabidopsis thaliana landsberg
  unsure (1)..(2379): unsure at all n locations
ctataaaatcaagtatctacaagtgtgatgataataaaagtgtaattgtatgaatctccgtgaatggagagttatgtattgaacatatatatagggttacatgagataagcataaatctgttcctaagatattagatatatacaaatataagattctcatatatataatctaacagaaagacagagatcataagaagaagaaaaaagaatgattcagtttgatatttttatatatttcatattttagagaagaaaaaaaatgtgttttaaactagataatgttttcaactttcaatgtaaatttttttaattgttttcacgatttaagttctgtaggttgttttattatttgttgaatcgtatttaggtacataataaatgatttttagtttaaaaaataaataaaaataaatgattaattaatttgtgtgcaaaacatttaaacatctagtatcaaagacggaagaagtatttaagttggagttgataaaccttatagacttccaaataccactacaagaaaacaagcgatttgcgaggacaatttgcgatggaaacaatccctcgcaaattgctacagatttgcgagacatttgcgagggagagaagacacgtcgcttttccgtcgcaaattttgcgagggataattccctcgcaatattgcgtgaaatttgcgaggaacttgcgaggacgaaaaaattcctcgcaaagtcattgcaaattgcgagggacttgcaagtacaaatattgttctgtgggaatttttgcgacgaaacttacannnnnnnnnnnnnnnnnnnnnggttaaaattatatgtaagtaatatttggaaattttgatatcttaatgacttatgttgaaatgataaacttaattaaaatctactttatgtaggttactaacggatgtgaaaatgaacttttactactttggttgtatgagatcgttcaagaaccaagatctaagatcacaaccgcaaaatcattcgtggtcgatgtcaatgcaaacaagacttatgcaaagttcaaaccatttatcctagcatcacaagctttctatcttacccgcgtgtgaggtcacggcgtgaagtgtggttatcggttattaaagttaactccaggggccgtatagtcggcctagttgatgatgttgtgatgcaacaagaaagcattagagaactttccattccagacataacaacagaagatgttatccacattgacctacaaaacagagagttagaagacatcatcacagacggttccgaagaagaaaaacaagaagacgaattcggcgaatctgatgaaaacgttgagtcagaaaatgattataatgattcagaaaatgaatcagaataaatattggattttatatgggctactttcattattttaaccaagtataataaataaattcagaatatttttctaataatattgaaagttataattatataattttaaagtttattattataattttgcattgtgttgttcttataattgtaaagttgcttataattttataagttatttttttttacactgtccctcgcaaacccctagcaatttgcgaaggatttacgacgaatacacgcaacttcctcgcaagtgtgtaaccctacagctttgcgtgggaattactacgccccacgcaagtccctcgcaatttgcgggggatttacgagggacctcgcaacctcctcgcaatcttatctgaaaaccctaatcgaatctctgtgtaaccctaaaactttgcgagggatttactacggaaactcgcaagtccctcgcaaaattgaagcgatttaattggttatttagtcggttcctcgcaaagccctagcaactttgcgagggatttgtgaggcgctttatgtttatatatacaacgcgagcgagtttgagcttcgctcaaacccaaccgtctctcatccaaaccctaaatttctttcctcgcctattctctctcgatccgacgactatcgaagctgctcgccgccggctcgaacttcttcagccgtcgtttctacatcttcgccgccgtctggagcttctcatccacgcctgttcttcgtcgccgccgtctggaatagatttcatcgacgagtgttcatcctctctaccgtgtatacctgttcgtcgccgccgtttggaacccaaaggtaatgtttccatgcaacgatttttgagttgatctttcaaaccctagagttgaatcggtttaatctgtatgaatcgagtttctatttgtagatctaattagggtttcttgattccggttgattttcattgtagatctaattagggtttgcttgtattcgaatattntcgttgtatttgtagatctaattagggtttctatttgtagatctaatt

SEQ ID NO: 1112 - DNA, 1842 bp, Arabidopsis thaliana landsberg
taaggaagcaagaggtatatgcagtttttagctggagatcttgttcggtatccgaaatggttggaagctgatcttttctttaacgctccttatattgagcggtattgtttcaaggcctatggtgatgattgatccaactttgacttttgagtttttagtagagccaagaaactttacacttgttgtgtgttgttgtagcctgatggatctttttgtgataatataagaaaacaagttctctctcctttgttctgcattttcaatgctaatcataagtaaacataggcagcatcagagagagataaaaaaaaatcaaacataaagaaagaaactcaaatcaaaacatcatatcatgggtctcacaatttggacaaaaccccactatttcatcaactgaacaaaaaaaagaaagaaaaccaagccagatttgcctgaaaactaaatccgttttacttgtggcttaagcaataagcagagttatgattaggaagaactagagctgctctctcctgaacagccttggccagagtggctagaatctattgccgaaggaatgggtaacggtacctgaccagattcacctcaagtagaagcaccatcgccgccactgccagattctcctgaagtagagccgttgctggaatttttggggtgagagcaaaacagagtttgcctgttccagatcggaaagaccagagaggaaagacgtctttttccttaaacgaattcgacttgttagcatcaagcacatcgttccaacctttaacaaagacataattccagtttcccttcatcttccacttcctcaactcaagcgaggatccaccaaattcacaggcacaccatcgtcacgaatcttcatggcattttcatgtatgattcttgtctcgtcctctgtcaaaaagtccggagttttcacttggttagaagggacttggagacgtgctttacctttatcgagatcagacttaaacaattccctcgttgagatcagcttcggattgtagccattctcgttcctcataacgttcaaaagccaatcgggtggagtcgtttgaattggttgcacctctaaaggactaacgactttgcatttcttgggacgtctctcttccaccttaacagaacaacgttttttcttggactgactgacacaagatgacatagacgactctgaatccggattagggttttctagtacggaagtaattgatctacgttctaagaggctgtcaagcggcaactctgcgacaacttcgtacatcaactcctgcatattaacccgccctgagttaaccctaggttccttctttttcgatttgtctttcttagtctcgtactctaacgacatgacgggcggatacaactgtttaaagcttttgtcttcattagtaccgtactctttgtgcacatcccactgacgtctcgaaatttgttccacctcaaagcgaccaaaggtttggggtttctgaagaatttcacgtaatctcgtcaaacatctctgcttggaaaaactacgatcatcagatttcatcatcttgatcaagtctcttgaagatacagaaccggaaattataaaacctagaaggaaactcgagttctagcgaaagagaaaaaggttagctttgtagtcaaggaacgaaggtattcaggttttccttttcttcatagggaaattgattttattttgtgattaaattaatgagagtcggtgagattacaatttttacactcctgggctctaaattaagccgcctaataatttgttatccttaaaggacgaactacccttacccaacaaatgtaacatatgttttcgtttactcaaaaaatttcacatgt

SEQ ID NO: 1113 - DNA, 1684 bp, Arabidopsis thaliana landsberg
tctggcaaggctgttaggagagagcagctctagttcttcctaatcataactctgcttattgcttaagccacaagtaaaagggatttgggtttcaggcaattctggcttggttttgtccaaattgtgagacccatgatattatgttttgatttgagtttgtttaaagcttaactttctagttgaataattctatataaatgaaagttttttagttatcctttgagagttttatgtttgattttttcttatctctgagtctctgatgctgcctatgtttacttatgattagcattgaaaatgcagaacaaaagagagagaacttgttttcttatattatcacaaaaagatccatcaggctacaacaacacacaacaagtgtaaagtttcttggctctactaaaaactcaaaagtcaaagttggatcaatcatcaccataggccttgaaacaataccgctcaatataaggagcgttaaagaaaagatcagcttccaaccatttcggataccgaacaagatctccagctaaaaactgcatatacctcttgcttccttcgggaacaactcgaacctctccttgttcaatgtaaaccaactgatccacctgccaatcccatggcaatttgcatttccctgtcttccaaactgaccatctcgaaaccccaagttcctccaaccgtttctgtgaaactttccgttccactttaacattgtatagctcctctaatggtttctctgtctgcatacaagtcaccttaaaggctctctgaacagacaggttatttgtcttcttacatgtagtgacagaacctgagaatggtgtagtcattatcagacttgccatggctgcttttatccaatcttgtcaaacctgagatccacaatgaactttaaataacacatatcgaaaacattgtgatgtgttaaagtcttgtaactcttgaaacagagaaagaaggtgaatttctaaactctagtgagtaaaagtgaattatattgtaaagctgaaggctttatcatttaccctctttgcaatagcttatatgaatcaatgacacagcgtaacacaaaaactcacaattcaggaaattagctaatgcccatttgctatttcgattggaaaagtgaaaactcatcgcaaaattgaagatatacgaatttaacccaacaagtccgcaaaaaaaggttgtcgatttcaaaaccaaaaaaaaaagcggaagacagattatacgcatcgaaatcgaatttcttaccagcggaagtgtgagcgagagtaacccttaaaccctgaagcagtcaggcttatccgatccccgatataataaatgttacagaaacgaccctaatatttatatttgttttaactttagactagaagtttgttttgagttaatgtgacccaaatattttttgtatagacgtaacgttttcagatttgacgtaatccattggtcaaacttttgcattgagaatgttgacgtagatgcttaaagataatcttttgcatagcgcgttatatcttctttttttctttttctagatgtggttatacgtgacgaaaataaattacgtttggtaaatggagaactacattggtcggttaaccaaacaaccaaacttctctaacgttgatattttatattattaggtatacacgaattaaatcacaacttgcgttccccttct

SEQ ID NO: 1114 - DNA, 585 bp, Arabidopsis thaliana landsberg
gagtacatttgttggagcaaatattgtcaagcctcttcgaggcattgtaagagtaagtaagggatttgttcttcaattttggaatgatttttcacttttccaattgaaatagcaaatgagcattagctaatttcgttaattgtgagtgtatgtaactatgtgtccttgattcatgtaagctgttgcaagaggttagaatgataaagccttatgctttacaagaattcacttttacactagactttagaaaattcactttctttctctgtttcaggggttaagaggacttttaacatcacaatgtttcgatatgtgttttcaaaagttcatagtggatctcaggtttcacaggattagatagaagcagccatgacaagtcacaagtctgataatgaccacatcattcccaggttctgtcactacatgtaagaaaacaaataaccagtctgttcagagagcctttagggtgacttgtatgaggagctatacaatgttaaagtggaaaggaaagttttagaaaaacggttggaagcggatctttttttaacgctccttatattgtttcaagcctattgtgatgattga

SEQ ID NO: 1115 - DNA, 4061 bp, Arabidopsis thaliana landsberg
  unsure (1)..(4061): unsure at all n locations
acatgtattttttttatttttttatttttatttgttttagaggattacgatacattaaagagcatgataattcttagtggagaaagtttcatttggtctcaaacatgaagatgatcaaacatcgtcgaaaccaccgttgtcttgggaagctcctctatcaccagcttgtgtgtatggctccccggcccgcttcagcaagagaagtcatcggaaaagaatatgctcctaaagcataaagaaaaaattccgaagatgctccatggaacccaacaagagcacaacctttgctctcgagcaagaatgttttattagatgcctttcccagtattggagaggttctattatttgatgttttgaaagtcaacgacgttataagagtgccgccagggttgtctctataagtcccctccacagaagtgagaaactcatttggatagtccactgtaaactgcgacaaaatgagattttacatataagcagtgttcaagaacacacacacgcatatatatagataaaaacatatgtcttcgaccaatattcagagttgtaggaattataacctcttcttttgtaaaatcacccgttcccctcttccccccctgcacacgggtttcgattttgccgtccttaacgtaatcgaactcgatacaccttactataccatcattatgataaaaggacaccttttttacaccttcgaaagtaccatcatcccaaatgtcacttccttcacctatgtattctaatttagttagagtaagggttgtgatataagctccaagagcgtttaagttatcctgagcagatccatgaaacccaatgatctcatggccgttgcatccaagtgtgaacttagtacccttttcatcgtctcccattacttctgaagtctttatgttggttttgagttgcagtgattgaattacaccagaatcttcgtcgtagcaaccgtcaatagatagcagatattccttgtcgctatggttaatctcaaactacaaaaataaacattgcatattgcggtagtagaaaaccaagaggcttgtcatcaaatttaaatttaatttatgcggtcatacataccggttctagcgtgtatcctctacccgtctctgagccatggagttgctccttctccggatctccatccttgtcgacataattgaatttgatatattgtatgccttccttattaatacgtacttgaatctttgttacactatcatggtcacctccatcatcccactttgttcctccatttcccccttgcgcttccattcttgtaggagtgatgggagtgaaatatgcatcaagatctttaaggcgatactcagcagatccctgaaacccaatgattttatttccatgttttgccagtttaaatttttttaaaccccaatatgaatatcctatgatttcggaaaccctcaagttggttttgaattgaattgctccaatgaactcgcaacttctgttgttgtagtaatactcaacggattcaagatattcgtttttgagattgtcaatctcaaactgtgtaaaagttggtgaaaacaaaagtcaatattaattatcctcattaacataaaataataaagggatatgtcataccatctnnnnnnnnnnnnnnnnnnnnnnnnnnnnnnnnnnnnnnnnnttcggttttccagacttgacatagtcaatcttgatgaaatctatgccggttttaccacctaccaaatatatctttgtcacatcatcatggtcaaatccatcgtcccacttaggcccttcgttttgtatcatctctaacgcattcgaatcttgagacatggtgttgtattgctttgcttatagctaataatttgcatcaatacccaattgtgattcattaggtagaaaaatcaaaatggggggaaaacatttcggacaaggaacagacaggctaatatattgaaggaaggagaccatttgcaaaaatacagagaaggaagatcaagcttattgggtgaaaaggggcaaattccatatattaccttataagtaaaaacaggagatagccatgctctagattgtaattacgtttacaaaagaaaaatctaggaatacaaggcttaaacattaactaaataaaagcaaatatgcataaggagagggagagagagctgacctctaatggtgaagtggaagttgaagaatagatagtactgtggtggtctttaaccctatggatggaggctatttatatacaagttttgggtcttttataaatagagaatattgggtctttttatttatttttattaatttggtctttgataaatatgtaaaatacaactaggtattttattagagaaaattgttaaatgagaagtcattctccattggtgaaagttcgaaactctaatttggactatgtcaatcatgactttttaagagatatattggtgataacttgttagtaagagaaattcccacatcagaagttggagaaattatttagtgatatataaatgtttacggccactcaatttattgtcaattggttttgagttaaatgtccatgttaaaatcacatttttcatggtattaaagtcactcaatcgttagaccatcatgtggatgttattcccacatatgtctactgaaagtcccatatcgagccatctcgtgaatgttgttcccatatatgtccacgcttcaaagccaataatgcttcgaagtaagaaaaattaaatagtaatatataaaaggtttagactactccactcatttctaattgattttgaattgaagctcatgttaaagtccaaatctgtcatagcttcaaaacaaaaaaatttagaattgatcaaaatggtttagctcccatccaatgccgttttttaaaaacctttttagacaatttcagccactatatgttttctactgctcgtttttttttgtttcattttatgtactttaaattgtttgatagttgttcagcttgattggtcagaatatgtgaatgttattattgcatacccttcttttttgtattggaaacccccaatcttgagttttattttaattaactgtatgattgccaaccaaaaaaacaagaataaaaaggtggaccaaaatattttttattttaatataaaattattggatttttttccggtataattttaatgaggtccaaatctaataattactataaaactcttgcttctatagtcgttaatatagtatatatatatagccaacttaaaacattgagtttgttttaaaatgtttaaaatgtttaaatcattgagtcgttaatatactatgtataaagccaacttacaacattaataattaatctaaaacccatgcaatttggcgtgaaaggaacggaaggaaacatggagagaaaccaccctcagcagctcttttaaccaaatggatagacaagcaaatccggaatcaactatcttcgatcagagcaagtggggataagagatatgaccagggcttgcaagtctggtttgcgatgagacaaggagccacaaattcttgattttgttctagtttgtttcaaaatttttcaaaaaacgttgcactcgatgtaaaaacgctattttcttttgaatctaatttaacattactttcaaaaaaaaaaaatctaaaacccatgcagtgtatatgagaaagacatcttttccatattacgttttggacatattcacaccatgtccttgtggcttgtgtatatgagagaaacatcttcccatttatggtatccaatcagatttatccattgcatttaatttgaaaaatataaagagagaaaatgagggatgaagtcatgaaggtgtctatacaattttaaatggtattacttagaatagagtctatacaattttaaatatgaaatcatattctaaacgactatatgaagtcgtccaacgctatctaaaaagaaaaaaaattataaaattgtcatttagacaaataggcgtgcatcatgcatgtaatggaaccgacgtccattgcatttcattaaagaaaaaaaaaatagagattcgttgttttgaattcgcgatatttatccg

SEQ ID NO: 1116 - DNA, 5779 bp, Arabidopsis thaliana landsberg
  unsure (1)..(5779): unsure at all n locations
gtctaagtcttcagtcgaacatcagagaaggctgaatgcgaatctgaaagaagtggttaagaaagagattatgaaactgttggaagcagggattatctatccaatctcagatagcagttgggttagtccagttcatgtggttcctaagaaaggaggtgtcacagtagtcaaaaatgagaaagacgagctgattcctactcggacaatcacaggacatcggatgtgcatcgattacagaaagatgaatgctgctacccgaaaagaccatttccccttaccatttatcgatcagatgttggagaggttaacaaatcataagtactattgcttccttgatggatactcatgattctttcagatcccgattcatccagatgaccgggagaaaatgactttcacctgcccctgtggtacatttgatatcggagaatgcccttcggtctctgtaatgctcctacgacattttagagaggtatgatgtctatcttcacagacatgattgaggatatcatggaggttttcatggatgatttttcagtttgtggatcatcgtttgaggattgtagagaatctctgcaaagtgttagcgagatgtgaggagaaacatctagttttggattgggagaaatgtcactttatggttcaggatagaatagttctcggacacaggatttctgagcatggtatagaagttgatagagctaagattgagatatgaaaagtcttcaagcgcttgataatgttaaagcagtgaggagtttccgtggacatgctggtttctataggagattcatcaaagactttagcaaaatcgcaagaccactgactgctttactctgtaaagaagtcaaattcgagtttacacaagagtgtcatgatgcctttcagcagataaaacaagccttgatcagcgcactaattgttcagccaccagattgggatttaccttttgaggtaatgtgccatccccgtgattttgcagttggagcggttcttggtcaaagaaaggataataagtttcatgtcatctactatgcaagtaggactctttctgatgcacaagttaagtatgccacccaccgaaaaagagctccttgctatagtgtttgcatttgagaagtttagatcatacttggttggttctaaggtgnnnnnnnnnnnnnnnnnnnnnnnnnnnnnnnntctattggcaaagaacgatgcaaaaccaaggcttttgagatggattttgtttctacaagaatttaacttggaaattaaagacaaaaaaaggattgagaatggtgttatggatcatttctcagttgaggattgacaatgatataccaatcgatgactctcttcccgaggagcaactattggcaattcggcttttggatgcaagtcatgagacctatatgaaacttgaggaagtcaagagattgaaagacaattgtccatggtatgcggattatgttaactatttggcatgtgggaaagaacctccaaatttgagtagctatgaaaagaagaagttcttgaaagatataaaccacttctattgggatgaaccatttctttatactctatgtaaagataagatctatagaagatgtgtctcgaaagaagaagtagaaggaattttgctccattgcaacggttcaagctatggaggtcactttgcgactttcaagacggtcaccaaggttctacaagcgggtttatggtggccaacgatgtttaaagacgcacaagagttcatttcgaagtgcgattcatgtcaaagaaaaggaaacattagtatgcgaaatgagatgccccaaaatccaattttagaggttaagatctttgatgtatggggaatagatttcatgggaccatttccttcttcatatggaaatagctacatacttgtggcggttgattatgtgtcaaaatgggttgaggcgatagctagtccaactaacgatgcaaaaattgtattgaagctattcaagactataatatttccaagatttggtgttcctagagtggtaataagtgatggagggaagcatttcatcaacaaggtctttgagagtttactcaagaagcacggagtgaagcacaaggtcgccacgccttatcaaccgcaaacaagtggtccagttgagatttctaaccaggaaatcaaagctattctagagaaaacggttgggactacaagtaaagattggtcggtaaaacttgatgatgcattgtaggcatatagaaccgctctttaagactccgataggtactactccgttcaatcttctctatggaaaatcatgccatttgctggttaagctcgaatataaggctttgtgggcagtaaagcttttgaattttgatatcaaaaccgccgaggagaagcggttgattcaattgaatgaccttgatgaaatccgccttgaagcttatgagaacgccaaaatttacaaagagaggactaaggcatttcacgacaagaagatcgttccaagagactttaaagtaggtgatcaagtgttgttgttcaattctcgtttgagattatttccgggaaagctcaaatctcgttggtcggaatccattcaagatcaaagaagtgagaccctattgagccttggtattgtggaacaaagcgggaggagaatttgttgtgaatggtcaacgcttgaagccttacttcgcgactcaacacattggggagggaaccaaagtttctctcttggagcctcaatccgcctaatttgtgtggaaacgtcaagcttagtgactttaaacaagcgcacttgggaggcaatcccatggtatccttgtacatattttgattctatttatgtgcttttggtttgattaagtttcagggaagtatttggaaaatttcatatcaagacgggcaagcaaaaccatttctgggcaagcgaatcgaccgcatggtcgattggacggtcgactcatccatgtccgcaaatccgtcagatttctaatcgagcactcaatagagcagtcaatagacgagttggtcgattggacggtctactgattcatgttcgcaaatccgtaaattttcgaatcgaccaatcaattgatcgattggttttcaaagcccaggtaagtcatctcttgacttcgtcggttcactagaaattttccggtttagtcccttaaccaaccaaaaccgaaaaaaaaaataaaaaataaataaataataataattccttctttttccttctctcacgacctcttcctctcacttttctctcttttttcaaactcactctctcttttgttttcaaacacacttgcttgtttttagtgattcaaagctcttgttcacttgtttttctccatagaacccgaatttagcatctccactctcagattgacaaggcacaatggtagaaggcacaaagagaacaaaccccaaacgttctaagacaatgacctccactgaaccgcaaagtgaacccgttgctcattggactaagaaagataagaaagctctcaaagtcatctctccacttccttcatttccaacgcgttttgcaaatcgcgagatcctagagaagatgggtttgctcgagactattgacgagttcttcacaaagatgggacttggcgccttcacctccatggatcaccctacattcagtgagcctacagttgatttctttagcaccatggagtacacatttaagaacccaaagataccactagctaaaaaaggaatcatcaacttcaaggtcaaaacaaaggctttctccatatcaattcccgacctttgtgaagcctatggatttgagaacaaaagcgagatgagcttcccgaagtataatggaatccacttcctttggggcgagatagcaggcgggaaattcagttgtaacgcaagtatcaagagcgtccgccattcggtaattcgttacgccttgaagcttctcgcgcatgctctttttaggagaggtgaaacgagttctactacggtttccgagatgtgctttctttttcaagaagtcaaagaattgttggtagaagacgcggatgagaatggcgatggaaggttggtacatgatgatcttggaaatgatgtgaactatgggtgcatctttgcttttttatctagaggattataagaaccggctaatcaagggcaagacgaaatccatctacattggtggtactctcacaccactttttgttaaagcgggagtagatctttctccattcaatgccctcccaaagcgtgaatacattgactatgagaacttggtgcgttctcgctctttaaaacgtagcgatgatgctttcatttacttgtacacggatcgagaggataacaagttggaatgcatactaccctcaaaggagatcacaaatgtagagagtcatgaagacattatgtttttgccaagtaaggaatatcaagtaccaaatttggagcaatttatggagattaaagaagaagacttgccaccatctccacgagatgacccttacaacctcaacaattatgatcttcccaaattcacatttgtgccaaagaccaagatggagacgtttcttcaatccgtcatcaagtctcaaagggagataaacaagtggcaatcttatgcgatagggaagctacttaagaaggtgaagatgctccaaccaccggattatgtctcttccgaggatgagcttgttgttccttcaaatgaagaggaagatagagacaatattttggagagtgatgagaataatgaaacgcccgccacttcatcacactcgtctaggaggaagaacgcctcgagagaccactccaccatgccttagccactccacggtatcacttgtatatacgactttatttcttttagttctatttctttattttcgttagtcttttcctcatatttttctctcacatcgagaaggtgaaataagtttgggggagagactaaccatctaacgttatgttttgttttgattttatttctttgagtcttgcattttcaatatctatgttttgagaaaaataaaaaaaaatctgaaaattttgaaaaatccaaaaaaaatcatgtaggtttgcatattaattttctcttttaggattgagtctagtagcagcatctagtttacatttgcatatgcataggagataatgatttaattaccttgtagaaattcaagattaggattgaacttaaagcccttgatcacagttaatcgttgcttgatcatcatataccatccttcgtataaatggaaaaaatggaaaacccatgattagacttttgcgtttctcgaaagcaatttctacttgtgtgaaacttacatgacttttgaaatatctatatgaatttggacttaatttgatattgatttctcgcttatggatcttaaatgcattctcatggtagtctaaaagactcattcaggttattttattctttttgccaatcttttgttaacccgaatggccattctcacctttagaatggttttccctacccttaaccttgaaaccttttctttcaagcctatgaattatttgtgagtgaggcctctagtatgaaaatgctatagattttgaaatcttgaaagtattgagaacgacaaggttttagctcttgtttttagcttgctttttgaacatctttggactagctattaggttgggaatgaaagatttaagtggttagattgaatatttggaattgggtttgagaaaaaaaagaaaaaataaatgaatagaaaggtgtgatcaatggttttataggagtctctatggaataagtcataaataaagaaa

SEQ ID NO: 1117 - DNA, 752 bp, Arabidopsis thaliana landsberg
gccccgagccgcatacaccaaaaatcggttatactcccaaaccgaccgctcaccctatgccagctcaagtaaaacgcgcctccatacggtcgagcgccttctgcggaaagtacttggcattaaactcagccccgaaatctgtacaagacatatccgcctgcctcctctttgcagtcacacccgatactccaccgggcatcagctcgtaccaaagttccgctcaacccgcgacctccaattgtcggcctcctcaggactagtaccaccataaaaatacccggtgccaattctctgcaactgctccatcatcctcaaataagatggaacctcctcagcaaccgcagccctctgctgcacctccgccactcgtggcgcaactggagcctgcactggtaccatacctggtaaccgctccaacaactgcctcagcaggcccgccaaaccactggaacttgggtttttccggctgcggcacccatcactcctgggtccttagcaccaacggcatggacacaggcaccaacaccagctccaccagcccccactctggctgcaccagctatatcggcaccaagacttttcctcgccccgggctccacaaactcaggctgcgaacccacagtctgctcaactgtgggactatggccatcactctcgccataacaattggctaaacactccataatcaatcctcaatatgctaacatcctatctcattccacatcaatcattaggaaaataatttatcaatt

SEQ ID NO: 1118 - DNA, 1016 bp, Arabidopsis thaliana landsberg
gatctcggcaggtataattccatatccctatggctcaatgaagatggaaggtgatatatctctactgatagtttggtactcaacacgcacgtcctttacgagcacatctattattttaaactagactgtgatttcatttcagatatatacactacaatactgagaacttggtaaaggacaagcaaaagataatcagtggataaagctataatagatttcttcttcctactctaataagtaataatagcaacactagtcaacaaaaacatattctgataatcattggataaagctataatggatctacgctcattagaaccgccaatctactcggcatttttataacctaaacaagctataaaaatgcaatgtgaattttcttccttatgattctgtcaactttggttcaattataagtaatctaaaacagaacattggttctgtaatatgagtatgagaagatgactgaagaacctgtctgcttatctccatattgatagaatcataatacagtgataactttatagttatgaatttacataaccacaaaagatttatatgatttatacctatcagctacgaatggtaaaaggtaacaacttaatgggttctgcaattagttcaagttctagcaaagcttttagagcatctccaaccggactgcaaaacaccaaatatagtgttaataatgctctaaccgaacggtataaccaacaccaaatttatttttttagtgttttgtgaacagtattacaccaacaaaacactttaaaaaattagtatattatttatgtttttgatttagtattatatttaaattgttgtttattcactaaaagaaaaatacactattattatttttgggtgattttatttttattaatatgaactttgatttataactagtatgatatgaaaaagtaattcagacaaaaacatttaattaaaaacttgattaagacaaaaaaaaatacaaacaaaaactagattgattaagataaaaagaaatacatatt

SEQ ID NO: 1119 - DNA, 3256 bp, Arabidopsis thaliana landsberg
  unsure (1)..(3256): unsure at all n locations
tgtatataagctaacgaatttaatctcttgtgttgaccaaacaaaaaaatctcttgtgcctgaaaaatttgactgatttgtttttagtttatacttaacatttctactggttgtattgcgccagtttcatgtcttctttgtgattggtattttaggtggatgtgagtaaggttgcattgattccaaggacatggcgatggggaagtattcccgtgtagacgggaagaaatcatcgagctatggtttaaccattaccattgttctgttactttccctctgtttagttgggacatggatgttcatgtcttcttggtcagcccctgctgattctgctggctactcctcaactgatactgctaaagatgtttctaagaatgacttgagaaaagaagaaggcgatcgagatccgaagaacttttctgatgaaaagaatgaagaaaatgaggctgcgactgagaacaaccaagtgaagactgattctgagaactctgctgagggaaaccaggtcaatgagagctctggcgagaaaactgaagcaggcgaggaaagaaaagagtctgatgacaacaatggtgatggagatggggagaaagagaagaatgtgaaagaagtaggatccgaaagtgatgaaacaacgcagaaagagaaaacgcaactggaagagagcacagaagaaaataagtccgaggatggtaatggcaacgaagagaaggctgaagagaatgctagtgaaactgaagaaagcacggagaagagtagcaaggaagtctttccagctggtgaccaggctgaaattacaaaagagtcgagcactggagatggagcttggtcaacccaattggttgagtcgcagaacgagaagaaagcacaacagtcctcgatatctaaggaccaaagtagctatggatggaaaacgtgcaatgtgactgctggtccagactacatcccttgccttgacaattggcaggctatcaaaaagcttcatactacaatgcactatgaacatcgcgagcgccattgtcctgaggaatctcctcattgtcttgtgtctctgcctgatggttataagcggtccatcaagtggccaaagagcagggaaaaggtaaactctttctttaaaactggttgcaaataaaatagtcctgcgccagaattaacatgaacattttatcagattttggagtaaactgcttgcactcttttgtattatgtgtcatgacatatattcttctgttatgtgatcacagatctggtacaacaatgttccccacaccaagcttgcagagatcaaggggcatcaaaattgggtgaagatgagtggtgaacatctgacgttccctggtggtggtactcagtttaagaatggtgctcttcattacattgatttcatccaacaggtaaaattttatactggccacataattttttcattactaggaatgataagtactgaattaattatattgttgcagtcacatcctgctattgcatggggaaatagaacccgtgttatattggatgtcggatgtggagttgctagctttggtggttaccttttcgaaagagatgtgcttgctttgtcatttgctcccaaagatgagcatgaggcgcaagtgcaattcgcgctggaacgtggtattcctgcaatgtttaacgttatgggaaccaaaagattaccgtttcccggttctgtttttgaccttatccattgtgctcgttgtagagtcccttggcatattgaaggtaaaaagtgtaccccattgtattcttctgccttactcctactctatagaatgaccttctaatctttgttgttgtttaatatgaaggtggtaaacttcttttggaattgaaccgtgctttgaggccgggtggtttctttgtctggtcagcgactccagtctatagaaagaacgaggaagattctggtatatggaaaggttagaaattttatattttcttctttgtttgctctttacctcaagataggcttttgaaaattgatttgtaactttggagaggccttcgttgtgttgtagcaatgtcggaactcacaaaggcaatgtgctggaagctggtgacaattaagaaagacaaactgaatgaggttggtgctgccatataccaaaagccaacttcaaataaatgttacaacaaaagacctcaaaatgagccacctctctgcaaggattccgannnnnnnnnnnnnnnnnnnnnnnnnnnnnnaaaccctgcgtcagtttactagttaaccaatgcaatctgatgcttatatgttgaatttgcggtttaggaatgttccacttgaggcatgtatgcataaagtgacagaagattcatcaaagcgaggagcagtgtggccaaacatgtggccagagagggttgaaactgcgcctgagtggttggattcgcaggaaggtgtttatggaaaacctgcaccagaagatttcacagcagaccaagagaagtggaaaactattgtctcaaaggcataccttaatgacatgggaatcgattggtctaatgtgagaaacgtgatggacatgagagcagtctatggaggatttgctgctgcgttgaaggatttgaagttatgggtgatgaacgtggttcctgtggatgcgccagatacacttcccatcatatatgaacgtggtttatttggaatctatcatgactggtgtgaatcattcaacacttatcccagaacttacgaccttctccatgccgatcatcttttctctaccctgaggaagaggtataaaacaatcactggttctccttgttttcaaatgcagagcttgatgatctgatctgagttaatgaatcaaaccatttttcatattttccattacaggtgcaatttggtgtcggtaatggctgagattgatcggattcttaggccacaaggaactttcatcataagggatgacatggaaacattaggagaagttgagaaaatggtgaaatctatgaaatggaaggttaaaatgacgcagtccaaagacaatgaaggcttgctttcaattgaaaagtcatggtggcgtcctgaagaaactgagacaatcaaatcggcaatcgcttaaacaagtcagaaaagaaaagaaaagcatcacttgaatatagttcagtaaaaaagttggttctttcacgcctttaaggcttgcttatcaaattcaattgacaatgtttcttagtagtatttgtatcttttggctttgagaaaagttgtatacataaattctggaatcatacc

SEQ ID NO: 1120 - DNA, 830 bp, Arabidopsis thaliana landsberg
cacgtctataaaaggatgatgtctttgtttgtaacacatatttttattttctaataaacaaagttgtgtgtgtcgggaataagagaatcgtgtatatcctctgttcttcctctttgctcttagtctcttgttctctgtttgggatttaataatataatatgcagtagctgttattagaagatgatcatgtttaagattgatgcttctttttctccacaaaaccaaaacacataaaccaaacacacacaaaccatcaaagttaggttccctatagtgcagaagatatgtttgttgaaaccagtcatgataacaaactcaactctgttgaaaggacataccaatcgtaaccaaagattctcttactaataatatagacgatttgggttctaccatgacaatgtgtcttgcttgccatgttatactttcatacaccatgttgctatatataacacaaaaccaacttcaagttcctcaaaacatacgatcaccaaaactcacaattgtcctcttcttgtatgtgaaacaatcaatcaccaaaaaacacaacacaatccaaataattagtcttgttattctttttctacaatcattttttttttttttcctaataacctcacttgagagatactaccatcggactatgatttttttttcttcaaaaacataagctctcttcttataaattgctataatttatactaaacaatgtgagagagcccatggaaagactatcaccattgtggatgttcttaaacgtacattagcccatagctttttattgtagaatattctattattattatactgttgggccttaaacgaacaatttg

SEQ ID NO: 1121 - DNA, 834 bp, Arabidopsis thaliana landsberg
attaaacctctctctgcagttctaaaagtaataatcaatatacattccacattgacggtttttgtaagactgtaaagaagccttttttaaaaatcttgactccattcagttttcaatgtttgttcagttccatctcttggagttcttgctagcctttgacttctgtttagcttgttgaaatgcttgcatcttatgcttcttcctcgcttctttctctgcttttgacatctttgactttgccttcacttttggtgctttctcttcaagctctgcttctctctctagctcctttgttctagcatccagattcttctccaagtaatactgagacattcacacattccaaaagttaatacagagatcatattatactggaaaaaatgtagagagagtgcaatccgaagtgtacattgtagtcgcctgcataatcttctaaacaaccatcttctacttctatcactctgttgacgatttgtttgatgaagtatcgatcgtgggataccgcaatgactgtaccttggtactcgtttatcgcttcctgattcaattgaaaaagagaattagcctatctccaggtccaggaacagagttattatcattgtatccaaagattctcaacaaattagagatgcctactactaacctcgagcatttcttttgaaggaatgtctaagtgatttgttggttcgtccaaaacgagtaaagtagatggcgtcaccatgaatttgcagaaagcaagacgcgctttctccccaccacttaaaagagagacctttcgatcaagcatgtctgctttgaagttgcagcgtccaagaagaccttttatatcatcac

SEQ ID NO: 1122 - DNA, 1269 bp, Arabidopsis thaliana landsberg
tcgttctctcagtcttctattaataccttctctaaaccacccacattggctttcttttttcatattccaagatttggattcgagtttctctttttggaaattcctcttaaatcgaatatataataatgtcacaaaattaggactagatacaaaaaaaaaatcattgtgaaaactaaaaaagcaaagcatatcaaatatatctcttgaagctagttggcataatattctctgagttatcgaatattctatatatgtaaatggccagtttgacaattacctaaaatcatatgatagacataaataattctacaaatttttaaaataaatttaaactaaaagacaataaaattaccattatgttcacatttagtaaatatttcatggacgaatttctccacgtcgattttcgaaatctcataattttccggcgccggaatatacggtggtcgtgataccttaagcaccaaatcccaatccaaccctttaaagaaatcatgtcccttgattccttcaacattaatcctacggctaggatctttctccaacagttttcttaccaagtctcttaacgatgtcgtttctccgaccaaactcggcggttcagttaatatctttaaaaaagtctctttacggttggaccccctaaacggcgtcgctccgtacaacatctcatacaaaaccactcccaacgaccaccaatccacggcgaagtcatggccacttccggtgattacctccggcgcaacatattcctctgttccaacaaacgagttcgacttctctcctgaaaactccgactcggaggatctcgaaaccgagtcgtccggggagattccggagttacataaaccggaaaatgcgaagatagacctttctttcttcgtcgccgtcgaaagtctcggtgacgacgaaaaagaagattgtggagttctaggaggtagattcgtcgaaagatcaaaatcaacaagcatcagatgaccattctcttgaatcatcacattatcaggcttcaaatctctgtacacaattccttgattatgcaaatactcaagtgcaatcacaagctccgccgcgtaaaatctaatgatctcatcggaaaacatttcttccgactgttttttccttaaagagttgagatctcttccaggacagtaatcaatcgcgtaaccgataactttatcggtggatataacaccatgaagacgtggaaacagaggatggtcgaatcgagacaacactccttgttcgaaacttatgcgtttgtactca

SEQ ID NO: 1123 - DNA, 817 bp, Arabidopsis thaliana landsberg
  unsure (1)..(817): unsure at all n locations
acccacaacatcaaccaatgctgtaaaaaaaaaaaaaagttagatctaattatagtggaagaatttattacatatagttattttcggttttgaaattttgtttttgatttcaggggatgacaacagcaggaggatgcagatacggacaatccattccaaaaggtcgtatacaaaagattgactccaattatggatttcgtaaacattttcttcctcaggtatcttattttcaactattatcaagaggaatttatcacacacaaaaataaatgaaatttttatcaaaatcaattaagtctagaggtctcttttatttagtttctttaaaaattgtttagttaggccacacattggtggagacaaaacaagtattgatcttcagacatatttctatgtcaaagatgtttgttagtccagtggtttatcctatgttttgccattttcatcaaaaaaatgatcaataagtagaatatgatatgtcaacaaataaatttacgtaagcaaaatttgtagataaaaacatcaaaaaaaatgtttttctgatttgttctcttttggtgggaaaacaggggaaccgaagatacactcctctcgagcaaccaacggcacaaaaagtaatcgtcgacaaagtttctgaaggtccaatcagcatcttcgtgatcggttctcacaccaatctagctctcttcatgatgtcaaatcctcacctcaaacataacatccaacacatttacgttatgggtggtagtgtacgctgtcaaaaccctaacggattctgcggaacttgntcacagattatacaagtaatccttacgct

SEQ ID NO: 1124 - DNA, 658 bp, Arabidopsis thaliana landsberg
gtatcaagatcacatcatatacttcctaaacgcttctccgaatctaagaggaggaaggcgtggaatagttgctactccttcggttccatcggatgccaactttgtaaccagaaagaacaactaaagctgattagcatttcagttacttctgatgataaacatataaaaaataatctactgaactcaaatggttacatacagaagatgagcaggcgttcaaggcatggcttatactagaagaacatggatttgaagaacggaacttctcagcacgagatccctcaagatcaacttgacctgtatatgtagctaagacttcatcagatgaagcataacagacacatcattaaagatattagatcacacatgcttgctaaagatcgtacattcttgtgctctagaagaatgtccagctgaaatggatgattgtccccgggatcttacatcggcgtacggttgctcttctctcacagtaaaagaggaggttgaattttgattaaggtgttctctttgcttgctgtgcaggatccacttcatcatcagataagatgtcaactgaattagataatccagatcgcacgatacagtcatctgctacattccgaccttcaactgtcagcatgtacctaaggaaaagaaaaaaatcttatcacatgtc

SEQ ID NO: 1125 - DNA, 1431 bp, Arabidopsis thaliana landsberg
cagagaaagtttagggcttaagagaagctacacagagaaagtttagggcttacaaagtgagagaatgtgagaacgactcgtctttgagaggcgacgacggatttaagctgcgctcgccggaatgaatgaacgaagcgaagaaaacccaatgtgtttacaacctgggccggaccggccggtcggaccggtctaatctcgaaccgctgacaatacggtccgttggttgaaccggcgacttactttctaaactttgattcattctccctaaacaatcgttgtggtagattaatttttctttaagctgtattagactggtttgggtccccttcaagaatgtataccaacttcttgattcccaatctctatttaaaattacaaatcaagaagacaatgaaaaacaaccgtcagtgaaagataaagcaagctggaaaacttaggagttgagagtacacacacacctgaagtctaagtttttggttcttgtagcgattatccataattgccgagcgcatatcatcaacgttctttctgtctacaataaagtctagaacatattcatcttggcggtacttatgtcgagcattccatattcaatcaccgacacgtaatcttctaacctaccgattcaacacactttctccagttaattattttttgtaagtaggaatctgttgacattctatccaagaaagcaaatgcaaacctcaatcttgatctatgaatacagaacatatgttatcaactatggatcgtgatctgtgaataaggagctatgtgttagtactaagaacactcaaatcgaagaaaaagagagtagtgttccacaaaccccttagtagcaacctgttctcgaacatccagtatcaagattacatcatataattcctgaaaggcttctccaaatgtaagaggaggaaggcgtggaatagttgctactccttcggttccatcagatgccaactttgtaaccataaagaacaactaaagctgattagcaatctagttgcttgtgattataaacatatagataacaatctactgaactcaaatggttacatacaaagatgagcaggctttcaaggcatggctcatactggaagaacatggatttaaggtggatccaacattgcaagaacgaaacttcttagcacgagatccctcaagatcaacttgacctgtatgtgtagctaaaacttcataagatgaagcatacaacatttaacagacacatcactaaagatattagaagatcacatgcttgctaaagatcatgcatgcttgtgctctagaagaaggttcttctctcatggtaaaagaggaggttgaattttgattacgtggtttctttgcttgctgtgcaggatccatttcatcgtcagataagatgttaactggattaagtaatccagatcgcacgatacattcatatgc

SEQ ID NO: 1126 - DNA, 864 bp, Arabidopsis thaliana landsberg
  unsure (1)..(864): unsure at all n locations
aaagcattgtcgaccatagatgctaactgttggcctcatatgttcccgcttaacccgttctttccacctctgcttaaggacaactgtgcgcacatcgtccccaattctccctcaaagtgaaagcgggaatcaagtgacttgatgctttataatatagtcgagttagtttagtaatctaaagaaattctcctatatatgttccaagtgccttatatatgaataaaggaaattctcctatatatgttccaagtgccttatatatcctttaatttactctattctgtctttgtttacaaatatatatggaaataaaagatataataacttagttagcaacattcaagagagcatacagtaaattagctgaagtatgtagattagttggtggaaatggtgaaataaatgaagatcttttgaaggtctctgtcatacacaatcaagacgatgttttatgatcgcagttgattggaaaaggacttgtaacaaccaaacctatatgtatatccctggacatttcatttgtacacttaccaaaacttgaccaacccactacttgaatccgaatatatccagttggtaaaccgagtccgataaccggaccagaatcaaaaaccaaaatcttaaaccgaatatatcaaattttaaaaaaacaaaattattttcaaagtgaaacaacgactttaatattagacttgaaggcacgacattaactcgaggttgattttaagaaattaattcgaaaaatattttcttcaaattggaatgcttatttgactntgcattttccctttaagacaaaccaacaaagaaataacgtttccttcaaacaatntataaaaacattagaccgttcaatcgaacatt

SEQ ID NO: 1127 - DNA, 2893 bp, Arabidopsis thaliana landsberg
  unsure (1)..(2893): unsure at all n locations
tcttccggaagacaagcagcctcagggacgacagcaggaagacgtcctcgaggcgtccgccagcgggcacgaagaagaaggccaagaagaagtcgcaagtgaagtgcgacgccgccgacgcagatcttgtcgctgctgccgagcacaggaaccctcagaagcctctcggagggnnnnnnnnnnnnnnnnnnnnnnnnnnnnnnnngtgcccctatcaccagggtcccgtcaagcacacccttgaggaatgcgtcatgcttcggcgctacttccataaggccggacccccggcggaagatggcaaaggccaagacaacaacaagaaagagggcgacaaggaagaggagttcccgaggtccacggctgcttcatgatctacgatgggcaagtggcgaatacctcagctcggcaccgcaagcaggagcgtcgggaggtctgctcgatgaaggtggcggcgccagtctacctagactggtccgacaagcccatcaccttcgaccaagccgaccaccctgaccacgtgccgagcccggggaaatacccgctcgtcgtcgaccccgtcatcggcgacgtcaggctcaccaaggtccttatggacggaggcagcaacctcaacatcatctacgccaagaccctcagactcctgcgtgttgatctgtcctccgtccgagtaggcgtgcgcccttccatgggatcattcccgggaagcgcgtccagcccctcggacaactcgaccttcccgtctgcttcagaacaccctccaacttccgaagggagactctgacgttcgaggtggtcgggttccgaggaacctaccacgcggtactagggaggccatgctacgcgaagttcatggccgtccccaactacacctacctgaagctcaagatgtcgggccccaacggggtcatcaccgtcggccccacgtacaaacacgcgttcgaatgcgacgtggagtgcgtggagtacgccgaggccctcgccgagtccgaggccctcatcgccgacctggagaacctctccaaagaggtgccagacgtgaagcgtcatgccggcaacttcgagccagcggagacggttaaggccgtccccctcgaccccagcggcgacaactccaagcagatccggatcggttccgagctcgaccccaaataggaagcagtgctcgtcgactttctccgcgcaaacgccgacgtctttgcgtggagtcccttggacattcccggcataccgagggatgtcgccgagcactcgctggatattcgggccggagcccgacccgtcaggcagcctctgcgcctcagtcgtctaggaagggtcgcctcgcctcgcagagcccgaccctccctcgggggctaaaagggggggaaccccctctgcgtcgagattttcctcaaaaaaagatctcttctgccagaatatctttcgtgctttctgactacttcgaaaagtggatcctgaaaacgacggagtacacgtaagcagccaaggctgaccgagccgagggactcctacgcctccgggatacggatacctcactcatcaccttctgcgataagtaactcgcgttctgataaagcgattccgcggaccgaacaagtcttcacgttcggaagctcttctgccgaagcgatccttcgagccttctcgactgagtcgatgacagggcctcatggacgggtgaaagtgcacgtaagcggcaaggccgatcgagccgagggactcccacgcctccgggatacggatacctcactcatcaccttccgcgagaagcaactctcgctcgcacaaacatccctgttaccgacaaaaaagtccagatactcgaaacaaggcgaaaagaaacacagctttacaacacgacgacgatatgtttggcctcggcggccgcaaaaaacatacgcacactacagataaactgttcctgcaggatcagacatcagtggggannnnnnnnnnnnnnnnnnncgactnccacttctggcggaatccgacacggcctcggacgacgacacggtcgaagatctccacctcgaaggaacctgtcgcaccacacctgggccatcgccgctagggtctcctccggaacccggcccaagcagacggctcgatcggctgcttcgtagcctcagccagctgtcccccgaggacatcagaccggctcatggcctcggcaacccaactccggcgtcggtcctgctagtggatggcccggccaggctccgactgacgaagttttcttttcgagccaactctgcctctgtccatgctgacaccgctgcctccggctccggctcatcgcagagcggccaagggttttctttaactaagcaagagaagcctcgggcgcaaggccgaccgagccgagggactcctacgcctccgggatacggatacctcactcatcaccttctgcgataagtaactcacgctcggataggtgattccgcggaccgaacaagtcttcacgctcgaaaactcttctactgaaatgatttttcgggccttctcgactatatcgatggcagaaccctacggacgagcaagagtacacgtaagcggcaaggccgaccgagccgagggactcctacgcctccgagatacggatacctcactcattaccttccgtgaaaagtaactctcgctcggacaaacaattctgttgccgacaaataagtccagatactcgaaacaagaggaaaagaaacacagctttactacatgacgacggtgtgtttgggcctcggcgtccgcagaaaacatacacacactacaagataaaccgatcatgcaggctcggaccttgatagtcgaagggagcagcagcacctcggcgtcaactacaccttcggcgaagtcgacccagcctcggacggcgacgcggtcggaggac

SEQ ID NO: 1128 - DNA, 931 bp, Arabidopsis thaliana landsberg
gaatttagatgtgctttgtcgcggtaatggtaatgtgtatacctgtctaaatccctttgagctctttctatttgcctcactttttcatctttgtaccgaccacaactatgaccggcaatactagtataagtatgatctcttccagtagcttgaccacacagccagcaaaaatgctgcccacacttacaagtcatgagattgcaaccgtctctcttttgaataggtttgctacatttgggacacagctttgtgttaacggttatccaattaaccgtctcagactcgtcttcacacttctttttccatagcttccacatcaaacaagagcaaggagagtgagactcactcaaacaactgaaacagaactgaagtccacatgaacatccaacctcaacgacgtcatgaccatcttcgattttccgtatcgcactcccgcaatgcggtttacttggacaccacttcaccatattgttatcttccacataagattcaataaggaaacgatcatacctgtcagctaattcaggactaactagcttcctaacaacatcttcatcgcaaatcgctttgcattcatgagccatacatagaatcctcttgctttcaccttcattaatcttcacagtaaaatgccctatccaacaatcattgcaaaacctatgaccacattccattctcgtcatcacattacttggtaaatcatcttccatgcagacatcacatttcatagtcttcttcgaagtaactaaagaaggaacaaaaacagtaagaccagcacaagaaaacatacgatctttgccttgatcagcaaacacagagaacaacttctcaacgttccattggtaataaataagaagagtcctagcttggttctccttaaccgataacaattccataaccctaaccagaatttcttttgtgctgctactag

SEQ ID NO: 1129 - DNA, 4312 bp, Arabidopsis thaliana landsberg
  unsure (1)..(4312): unsure at all n locations
gatttaaaatattgcgcaaaaaaaaaatgtgagaagaaatctgtgtaccattttatgattatcatgtctaaccacactagatcattttaccaatatcaaaattgaatttactaagagaaaagcaaaaagagaaaagagagagaatcatattttgcgaaattacaaaatatatttctcatgatgttatgtgacaatttgatcattgattcgcatgtaaaacattttctgaaaaagaggaagaatcatattttaggcgaaattataaaacatactttcatgatattttgtgacgatttgatcattgattcgcatgtaaaacattttctgaaaaagagggagaatcatattttaggcgaaattgagtattttcggagatttgacaataataataataataatgatgtatatataatttagcaaaaagttttggtgattgatagtttaattttactagactatttataatttatgttacaataaatttaaaatatggaaatgaaaattaatttataaaggagaaaaatgaatatataaacaactttttctaaaacaaaaatataatttatccaccaaatagtttctacttacaacaaaattttaattataatatatatatatatatatatatatatattactattttaaagtgtaaaagtgtttgatcgcagcctcaaaagaagaagaagatgttgaagattttatttgcttgatcgaataagtaatttgaaatatgcataccttgatataaacttgacgattgtaacaattgacgatcaaacacggagcagaaaacaacatatataacgatcaccaacgcagcagctgccaccgaataaaccttcgacgacggtttcctaaccatggctttgacgattcttcaatggaagagaaaaataaagaacatgttgttgcacgtcaaattactaggtgaagaacagaagacgatagaatgcaatcaaaattagtgtgtcagtacatatatcttatatcaagaagacgtttctcttacaaagtagtattttggttgtctacacgactttttgctattaaaaaacacattcattattgtataaagaatcttgaagtaagaaacgcttatgcatggaatactactacgaataaaacatttaataacatcctaacaataaacatttaatagctgtaaacaaacactccaattgagatatattattgttaatttaatgttcaatcatttttgggtcaacatccattgattaatcaaatgagagattggtgaaatattgtttacatacataatattgtcggttcgttctatgagagcttataagaggttcataaaatcgtattctagtgatgcgggtggagttcttggtcgtgttcttcgccgttaacggctcaatgtttttggtttatcggtgaaagacttttatctcactggtaagccaataacattgagccgtttgacagaattatcttgtttaattaattctatacataattaattctataaaaaactataaaaaaactatatcctcacttgaattttcattgtttcgactttcgatattttgccgtttgacagaattatctttctcttctaggtgtcttatatgcaatcaaaattattgtaccttcattgattttaaaacctaactgttttttttttttatgtagatggaccaaataatatttaactttcatgtttttattcttttttaccatgggaccaaactataaattttatattcttgtaactcttaactttttcattttctaatcaaatattaacatttttagcaaaaaaaagagaccattttcacagtactatgtaaaaaatgatacgtcgtcttactatcgacgcttatcatgtaagaaatgtaacttcttaattctatgttctatctaattacaaatataacagttaattaataattgatttcaattgacaattggagttatttactctttttttttgttgttttgacatattataatttatctaatattaaatagtgaaagagacaaaaccagaaaaacaaacaaaagatatagttttttatagaattgatttttgttatgccatgatttttttctccagctcaacatgattaaactataaaatcttgattacgatttacgatatttttggagatcaaatttgtgatttttttgttataattatgaacacattaacgggctttagatctttataagcccatttaaggcccatgaatatttttcgttacaaaacgctgagaccaataatcgggcgggaaagccacgccgccggtaagttgtgaacggcgaagaagatcaatgctacgctcaatcactctttctccgactagaagattcgggtttccgcagagatgcgtctcgtttacgacaatcaaagaattgattttaactgaagagaatgatgggtcttctctgcattacgccgcttcgagcccgtgctttctccttctaagtaagtgcacgaacattgattctctaaggcaatctcacggagttttaacgggaaatggactcatgggtgatatctcaattgccaccaagctcgttagtctatatggttcctttgggtatactaaagatgcacgtttggtgttcgatcaaattcctgaaccagatttttatttatggaaagtcatgctcagatgttattgcttgaataaagagagtgtagaagtcataaagttttatgatttattgatgaagcatggattcagatatgatgatattgttttctcgaaagctttgaaagcgtgtactgagcttcaggatttagacaatgggaagaagatacattgccagctcgttaaggtgccgagtttcgataatgttgtgttgacaggtcttctagatatgtatgctaaatgtggagaaatcaagagtgctcataaggtgtttaacgatattactttgaggaatgtggtttgttggacttcgatgattgctgggtatgttaaaaacgacttgtgcgaagaagggttggttctgtttaatcggatgagggaagacaatgttttgggtaatgaatatacttacggtactctaataatggcttgtacaaagcttagtgctttacatcaaggaaagtggtttcatggttgtttggttaagatcggtatagagctcagctcatgtttggtgacatctcttctcgatatgtatgttaagtgtggtgacataagcaatgcacgtcgggtgtttaatgagcattctcatgtggatcttgtcatgtggacagctatgattgtggggtatacccatcacggaagtgtgaatgaggcgctgagcttgtttcagaaaatgaagggggttgaaatcaagcctaattgtgttaccattgcaagtgtcttatcgggttgtggtctgattgaggatcttgaactgggaagatcagttcatggcctctccatcaaagttggtatttgggatacaaatgttgcaaatgctctggttcacatgtacgccaagtgttaccagaatagagatgctaaatatgtgtttgaaatggagtcagagaaagatatagttgcttggaattctataatttccgggttttcacaaaacggctctatccatgaagctttgtttcttttccatcgcatgaattcagaatctgtgacgcctaatggtgtaacagttgcgagtcttttttcagcctgtgcttcccttgggactctagctgtaggttcatcacttcatgcttattccgtgaaattgggtttcctggcatcatccagtgttcatgttggtactgcacttctggacttctatgccaaatgtggggatgcccaatctgcccgtctcatcttcgatactatagaggagaaaaacacaatcacatggagtgctatgatcggaggctatggaaagcaaggggatacaatagggtcccttgagctatttgaggagatgctgaaaaagcaacaaaaacccaacgaatcaaccttcacatctattttatcagcttgtggccacacagggatggttaatgaagggaagaagtacttcagctcaatgtacaaagattataacttcacgccttcaacaaaacactacacatgtatggttgatatgttagctcgagcaggtgagcttgagcaagccttagatatcatcgaaaagatgccaatccaaccagacgtgagatgtttcggggcatttctacacggatgtggaatgcattcaagatttgatcttgnggagattgtgattaagaagatgcttgatttacatcctgatgatgcctcttattatgttctcggctctaatttgatgcatccgatggacggtggaatcaggctaaagaagtgagaaa

SEQ ID NO: 1130 - DNA, 654 bp, Arabidopsis thaliana landsberg
  unsure (1)..(654): unsure at all n locations
gggtgtgttccctctttcaaataaagtcgccctaactaatgttcttcatgtgcccaagttgatgtgtactatgatctccgtctcaaaaattgtgaaacaaaaaactgtattgccacttttaccaatacaatgtgcgttttgcaggaccattttcgacgactttgattgtaagcggtgaagagcgnnnnnnnnnnnnnnnnnnnnnnnnnntcgctaccgcaaagattcatacaacgaacgtctcttctgatcaagctctatggcatcagtttaggaaatcctagtttttcggtgctttcttctttactggtgttttctagttcttctagttagacgtgtgttttagagctaaacaaacaagagaatttttcctcttagtatcaataaatcgatccagtgtttctctttgattcattgtgatgtttcgcgtatatatcgcatcccgtcatcttgtggtgcagtttatttcgtattgtacttactaatttcttggcatatacagaaaaacaatttgggaagtctctcaaagtggttcttagtgacaataggacatagtttatgcttatatcttactttagggaacatgggattattcaccaaactttgtgtgtcgtgactccacaacagaatagtggtgtaaaacgtaaataccga

SEQ ID NO: 1131 - DNA, 1212 bp, Arabidopsis thaliana landsberg
cggggtgtttctaatgtctccttgcctttattttgtactctcttttactttctcagtctcatatcctttttctgggatcactccatcatctccagaggttttttcatcttcttttgactcttgtggagttttgttgatgtcgaactgcaacttgatgtgctttccaaggttgagacttattttctcttccctgacatctatcactgctcggaagggtcttcccaagattaggggatccttatgctctacttctatatccagcaccacgaagtctgtaggcacttccactccattaatcatgactggtagatctttcatcatgccgaagggttttcttgaaatctatccgcaaggatcaaagtcaggtcacaaggtctgtactgaataaattccaaccttcttgccacagagagtggcattaagctgacagaggctccgagatcgcacaagcaatcgctgaaagctaattcctcaatggaacatggcattaacttttcttgaacaatcctcttatcagcagctcgagatggagtagcatcacattcatcatctgaatcgtgatacatcttgatcctttccagtattaggaattatgttgagaacttccattagtggcatcactgcttcaatctcgtcaagctgtttctctgcaacagatttgtatctctccatctaggctttcctgaatttccatggaagagcacgtgagggtaatggagtaggtttgatacgttttaccattctctcaattatggctgcattctcatcggaggtggattgaatgagatggcgagaaccagcagaatggttgaattcaacaaaagagacctcaatctgagtaaaaggctccccctcctgaacatcactgtccctagtgattaagacaggaacatgtcgagttggcagctctcaatcatggcagatagtgatggcgtgagcagttgcatactcctttggattctgtattgacttcccaggaagtcctgtaactttaggtgcagaggtagatgctgactgtcctttcaagtatctgactttggtattcaatgcttccactttggcattcaggtcactgtagctgcagtccagcttatggtgcaattgagataacttcttagcaatttccatggagctagatgcttgtccctgtagcagttgatgtaccatctgtttcatttcagcatcaggagtaacaggaccttggttttgctg

SEQ ID NO: 1132 - DNA, 5979 bp, Arabidopsis thaliana landsberg
aacagcagcaatagtactatccttgaccacataccaagattcccaaaagaattccgcagtgaagctgtcaggacccggagccttgttgcgaggcattgcaaagaccgcagcagttatctcctcatcagacgggagagcagagagacgagacgccagtgtatcattacagcgaaaaggatggatatctttgattctctgaaccgaatcgggagtgagaatgtcgctgtcaaagcccaaaaggtgggtataataggctacaatcatttctttgacctgagtaacattctccacttttacatcatcatccatgcgaagaaacttgatcagatttttagcctgatttgcaagaatgactttatggaagaaccgtgtattagcgtcgccatcttgcaaccatttaattcttgatttctgtctgtaaaaagactctagagcagcagcaaagaagttccactttttcctggcaacatgctcaactctaaaaagagaatcagaagggttggttaatagctgagactgaatcgattccaaagaatccagagcctctttggttttatgctggatattgccaaacccttgcctgttcaaaagcttacaacacttcttggcagcttttaaatgttcccctaaagaaaacatgtgagaaccaacaggaatctgctcctcccaagcaacagtaagggacaccaaaaaggtaggatgagttgaaaggaaggagaaatatctgaaacatttcttagatctctttgggaggtttttcaggataataatacaaggagagtgatctgaaacccctgacagctcaaagacagcaatcgcactaggaaaagaagagaaccaatctccattggcaatagccctatccaacttccttatgatcggattatcatcttgatgatttgaccaagtgtaatggaccccacgactaggaatatccaccaaatcactatctcttaaacagttctgaaactcctctaaacctctcatggggattgaagtttgaaggacagaatagtgatcagaagtagcagctatctggttaaagtccccaaccaggatctaaggagtgaagcaaagaggagaggacggtgataaagtagagatgtcttcctaaagggttcgtctctaaatctcagtgtttctaccataaacaaacgctaccgcaaaagatgtagcaagacccggcagcttaacactacaaaccatcaattgatccatcttcttaaagaccaaaaccgaaaccgaagggtcccacacgatccaaatccgacccaactcggaacaacaataattggtatctaatctccaactcgtaagggttgaatccaaaatagcaggggcattactctcagctacatgcgtttccaaaaaacttccaaccaacaaattatttttattaacctactgtctaacagcgcgttgacgggaatggctattcaagcctcttacattccagcaaaaaaccttcattattaacacaaaaggggaaggggaaagctaagctttcaagcacaggacgatccacccgagaccaaagctcgtggggaccctgagaccttagaaatatggtcagcagcgctgcttctgctgatattccacttatgacgccatctcttcctggattttgaagacatagcaccccaacccggtggataaggaaaggaatcctccaacgggatagctgacaccaaaactgattcaggaagatgggactcaggtggcttgacaggacttctagcaacacctgtagtcgacttcttgacccaagcagagcccttggcataggactgtcctgcctcaaccaaaacagtagaaggaacaatctcaatattcttccctttcacgcaattctgagaggtgataagccttggaggggtactactggagcgcttcttagagcgtgaacgaactcttcccttccaaccaaagatgttgtatccactaatattttatcgaagcgaaggcgttatctctggaagcaagtgccaaagcttgagtatcttgatacatctcttgacactgagcattggagagcttcacgttttgttgacaggtttttgcaactacacgaagctcctgtcttggaaacaaaactcaattcgacggtcaaattcaatcttttcaacgtgacaatggctgagaatacaataacaaccaattccatgaattttttgataaaactggaatcaaggttcgtttctcaagcccacatacctcccaaccaaatgggaaattctgaaaggatgattagaactaataacaatgttattcgagctctcctatttcaagctcgtctatctccttgttattgggttgaggcactaaatgttgttgttcatatcctaaaaatccttccctccacagctatccaaaatcaaattcctcatagcctcttctttcataaaaatccaacctgtgatcaccttcgagtttttgggtgcttatgttttccaagcttgaatcattcaaatctgtcaaaactatcaccgaggacaacgccttgtctgttcctttggtatccatctcaacaaaaagtgtatcgatgccttgatttaaaaacaaacaaaattattatttctcggtatgtttactttgatgaggatacgtttcccgcaactaatcaaaatttatctcaagtttcatcgtacacattcctaaacgcagttgatgatccttctcctttgttcaaggaaattctccaatcaccactacctcaaaaccaaccaccaccacctcaaactctctctgtgccaatgaacacaagatcaaaatccggcatcactaaaccaaaaaaggttttatcacttgtcaccacagccaaagcgcctcttcctaaaagtcataatcaagctttattggaccctaattggaatccggcaatgactgatgagtatgatgctatgactaaaactaagattaaaatttggtgccacgacctcctaaggtcaatattgttagatcgatgtggcttttcaggcacaaatatgatgcagatggagtgctttcttgacataaagcaaggttggtagcaaactgtaaatcaaaggaacacggtgttgattttacagagactttcagtccggtagtgaaaccagaacaatacgggttgttcttgactttggagtagcgttaaactggcccatacaacaactggatgtcaagaatgctttactacaaggtgatctccatgaaacagtttatatgcatcagcctccagagttcgtcaacaaggaatttcccaaccaccaaccatgtctgcaaactagaaaaagccatttatggactcaagcaggccccacgggcatggaattcatggttcaccaaatttttaatgtagcttggtttcatcatgagcaaggcagacaactctctgttcatcttcaaacagggcattcaaatggcatatgttttgttatacgttgacgatataatgttgaaagcctcctcaccaagtctcattcagaaaatcattacacaactcaaaggcgagttcccaatgacagacatgggctggctgcatcacttccttgacatcaaggcaaattttaacaagcaacgtatgttcttaaatcaacatgtttatgctcaagatataataaactgagcaagaatgtccgaatgtaagccatgtgcaacaccagttgatctaaaatcaaagctctcgaccggtgaaggcaacccaatacctgacccgacatcttacagaagtgtcgatggtgctctacagtattaaacattcacgcgaccggatatagcatacacagtccatcagatttgcctatacatgcatgaatgcgctagaaaggataatctgttacttgcaaggcactaagtcttatggccttcacttggttaaagataacatttcaacccttacgacttattctggtgcagactgggatggctgcccggatacacagcgatcaacttcagggtattgtgtcttccttggtccaaacttggtgccatggtctgcaaaacgacagcccactgtatcacgatcaagctaagaggcagaatataaaggggtcgcaaatgctgtagcagaacttacatggctaaggaacctaatgctggaacttcatctccccatcaccaaagcttctctactgtgacaatatcagttcagtatacttggccacaaatctggtgcaacatcaaagaacaaaacatattgaacttcacatacactttgtccaagaaaagtagctattggtgaagtaaaaggtcatccatgtcccatcctcactccaatatgcagacatcttcacaaagggtcttccgacatttctcttcaacaagtttcgaaccagcttaaccatccgggaaaaaaatgcttcaagaaagaaagtgtgatagaatataagaatattcagttacaatcaagtagatagactcgtatatattgattcttatatcccagtaaatcaatgaatctttcgaggaaattattcttctaacattgagagggtaagatttgtgttttagatcactattgatgtgccatatctagcaaacaatcgctctctttggtgtgtaatatccaaaagataactcggtatatcagaagtctttttgcagcttctatgcgatctctcagtccacctcccttataatcagagcttcatggtctcgttgcagctaggccttttcttttctaacctttagagtactgattcttgggaaatcatattaaactaaaacgagttttattatgaaattcatttagatataattattaatatatacttttcttactcagatggtgtatatacttgcttatgtaataatttgctttccgagaagtatgtaaagtttgtaatctcaatttgatatcaatgaaatcgttttcctcacaaaaaataaatgaatcccaagttatgttttaacaccaatcaatcattattcaatactctcaaaatcatttcttaaaatgtattatttttaactatgaaactcatctaaagttgtgttaaatacttaccacaaaaaataatctaaagttgtgttaactaatcgtatagtttcttaaagtatcttatcaattattcgtttaaaaaaaaatttggaatgtcttatttttcatcgaccctttgttttgtacatttagtttggtggtgtcttttcataactttcttctgttctgtaacagtgtagtgtaactttctgtttatggtcacattttttaatcatattttaactggttgttgaagaattaaaccccgtaaatggaaacattggttggttaatgggccgaacatgaaagcccaaattagttcataaccctaaaccgaagcaaaacattagctgatagtgatactcttcgtcttcttcttcctccgtcccacctttggaaaagttctcgtgagtcttctctaatgtctgtacatgtcaaggtacataatatattacttattcagggctgctttaaatcttggtttaaaactgatattttccatttcaggaacctgtttgtgaaacttgtggcgacataggttttgaagaagcacttgtcttttgtgactcttgtaagattgagtctatacaccggtgagttcaattctcgatttctcctatggtttgattgaattgtgttgtttataacctatttcacttgttctttagctattgcataggcataacaccgactccttttacggaatacataacttggatctgtgaggattgtgatgagagtgacagtgattctgattgtaaagaactggatcagactgctaagcttacacatatcttgaagaagagtgacaaaaagaagaagaagaggaagaagaagaagaagaagagtaaatatcttgataaatatattttaaaattacgtctgtttattgtaactcttcgtagaagtattactaactaataaatgtgtttctatagtctcttgtttaattatcattttaattattcggttttaacaaaaaaaattatgatcttttcaatttagaagttctccaatttttt

SEQ ID NO: 1133 - DNA, 662 bp, Arabidopsis thaliana landsberg
atcattttctgcacacctcatgtcctttggagggacaagaaagattaagaaaaatcttaaaatgttcactcacagaagagtctcttaaagactggttattttaccacaggcacaggagggtagagcctcaaggtctcagacaaggctgcatggaggtagtgcatctcatcaagagcctcttcgttaatactttcaacgaaaccatttacatcggtcgttttctcgtgactagatgtcacatctctgatttcttgtacgattttctcctgaacaagtgggtttttgcagagcatgtacaagaaccaagagagtagtgcagcggttgtgtccttaccagcaatcatgaagttcagaattatatccctcaggtacttatcattcatgttctccggatctttctcactctccactaggaatctcgatagtatgtcctctctaacaacctaaacatttttcaaaaggtttaaccaacagtaaatgcaatctttaacaagataaagcttaatagaactactcacagtgttctgttccttagcaagctctttccttttagtggtaatgagactatagacaaatttatctatagtagcaatgctcttcttgagcttagattgtgatccattgttgagaaaccatttcagcttccaaagagatcgatgaat

SEQ ID NO: 1134 - DNA, 1742 bp, Arabidopsis thaliana landsberg
attacaaaccaatccattgaatcaaaatcaaaactatcacaaaaacagagaacacaaaaactaaaaaagaaaactgattcactttaacaaatttgaagactttctgcaaagcaacacaaataaggatagatttatgaatcaatgagaagacaagctccatgaatacttatagattcaacggaagaaaaaaacccaccaagttgagagtagctacacaaactaagagaacacaaacaaaaatttccaaaatattcaatagctgtgaataacgaaattaccttgcttttctacctggattgggtgattctccttctttaccttcttcttctacgagtcctcccccaaatctatgtaactatgaacaactacaacacaactacgtttggttaatcataatggaaatcaactaaaaccacatcattagacacacgttgctttgaagctcttcaaggtcacaaaaaataaagagtagagagaaggcaaacatgataggaataagtgggatcgaagataaagattcaagaagaacaagtggggtcgaagataacgatttaagcagcgaacttcaagcagagaacttcaaaagctcttcgaggtcaagaagagaacttcagaaacaaaacccactacttcgagatcgacgagcttactttgaaatcgcgagcagatccaaatcgtgtaaaagagaacaagagatttcagatcgtgtaaaagagaagaagagaaaaattttagatcgcggcgtaatcgtgttggctttagggtttgatttgttttttgtgtgatttcttaaagatattaagcgtgtttaggtcatttgttacattaatcgcagctttttaatcgttgccgctgaattaaatcagcgttcaaaattattcgctgcagcattttgacgtaagtacgtgcagcaacaaaatgtacaacgtaatctgcgtttgccgcaaccgtaactacccgcgacgacgaaacgaacaacataattctaatttcggtataatggaatgattttagaaaggaaaaaaaaatatcatttcaaatacatcatccaaatcattcgtttatataatttatttggattcaaatgaagaaaatgggcttttattttcagtaccacttgaattactaactagtaactacgtatactactaaaaaaaccaagtgatttacaaaaaccgattattttttttatttcaactggcccaataatattttactaagccgacacatacatatgggctcttaatgggccatatgttaactatatcaacggttagggtttacatgaagcaattagggttttaagttatgccgcctcataaccatctatataaatacagattctcttcggtctctcatatcatcagccacttttctagcttattcgacctaatggtttacacagatacatttagtatttcgattctctattatcgtgtttgattgtttttggttattcgttattatgtctcttcccgatgaagaagcaatcccatagataggaagtgccgtatgacactttacacaacaacggactgaacgacgatgcatccggtgaaatctcccaatccccgatcagtcaaacacgaactcgtatccggatccaaacccccggatccgtttacggtcgggtactgactcctcggccgggtcttcaccgtacttcccaccgttctgtgtccgtagtgtggttgatttgacaagggttcgctgagggtttttaatttttggtttaagaacaa

SEQ ID NO: 1135 - DNA, 3028 bp, Arabidopsis thaliana landsberg
ataagaaacgagagattgtctcagcagtttggttacttcaagaaaatgcgttccagatttaacaaacttggcaagttcttcagcacgctccacttcctggacaaattctttctgaatctgaggcaataacttctctgatcctccgtggctgatatttcttcctactctgttaatgtcttggagcaggcttccttctatacccgagactgcctgagtatgacagatgtgtagtgcttgattccaaattgcaagaatcaccagttggatcgagaaagcttctaaatgcttaccattttcaccctatgaaaaaagaaacgtgaaaagaaaacgctcagaaactcaagttagtaaggttttgtgcagaactttactatattcgaagttgctaaccctttcatgaaccaattctgctattgcagctgcacacttttgcaaagaccggattcttgtcaagctgttagttgatggctgttcaaaagcatctacaagatccagagacccatgggaagtacccgggatacaattctgactctccaagcttccaaatcgactaaggttgttgccagtagcactagctattggcataggagccgttaaattagttacatttctcttgatgaactctacaggaggagaatgtgatttgaatgggtaattgaaaggcttcggagaaccagatgaagatgatggtatatcaaccggtggtccagatatcagaacataatcttgatccattgagtctggagaatcccctacttccggaaccaacatatattagaaactgcgcgaggcatcttttccaaagacaattttagttttatgggctaagcaaattatagaaatttgattacctcttccttgggtactaaatgatctggaatcaggtaagcttgacggtttgaattggcttctatctgataatctatggccctcaaacttgaaattattggtttctgctctatttctgactctactatatctggaagaaagatccatgtttttcaaaggacttaatgctgcctcccttctttcaacactaaatccgtaagatgacttcatcggggaagtatgtttaaaagatgaagggctttcctcaggtccactagaatcatcatctaaaaagaacggctacccgtcttcttgagaaatttcttctatatttcttgagggactgcttcctgatgaatgaaaatcgttcatagttcgtgaatctaatctactcctgcaacgtaaatcatcatcaataaaacagtttataccacaaatgataaagaaactactttagcaccatatctaccttgtgaaatcatatgattgtttgtctgaaaggaaaggatgatgaaaaaactcttcaaacgtcaaacgttccactgtcggacagaagatccccaaaaataaaatgttaaacactaacaaataaggaccatgaaaggagcttaatggtaaacgtccatttgaaatcaatacccagagtgtttaagacacccaaatggacaatttcaaatttttagccgtaatttttcacaaaacaaaaactgtgaccatgacaaaaatgaaaatagtctgacttgcgcattctcttgtaacttcttcaaaattagataaacccacatatgctaacagaatctggaaatatatttacaaagatgcttacctggattacgacgcagtagcttctggcatagatctttacagtcggactcaaatctctacagtctgctggaaaatgtaattcagttgatcttatattgttctggagcaactgtggacataagatggagagcatgttagccgtgctgcattcaccaaaacacaaacatttacatttctagatattttcgaaacttgatatacaaaacctgaatttggctgtttcctgtaaaaggggttctgcctgtcacaagttgaaataatatagcaccaacactccagagatctgcctgtgtagcaatgaagattttaagcaggatatggtataagaatggcctatgtggtatatagaaacaaaaagtcgcacctttgcatcatatttttgaagctgcataatctctggggccatatacagtggtgaaccacataaagtttctgccaaacccctaggctgcaacgatctgagctaagaaagtgtgatgtttaagtgctaattacaaactcaaagggtgctaccacaggctagatagtgtgatgtttaagtgctagatagatagatacaagaaaagcagaaaccatataagaccaactctgattatcacattacactcattgtttctgtaacaaaggggctgactaaaataccttgcaaatccaaaatcggcaatcttcagagctgcatcattatcatctgtggatagaagaagattctgtttcaagaacgaaagaaccttagcaatcgaatttcaattttagacaaaatctttatctcagctagtgaaagaatttctcggaaataaaccatatcctgtgagaaacctaacagaatacccttctacggcgtcctttcaactcttcgagagattaatctttaagaatgagctctcacgtattgtcatggtctaactgacataaaaagatcaaatctgggtttgagttatcagacatacctgaggctttaaatcgcggtgaatgatattattgtcacgaagaacttgtaagccagccgctattacaccgaaaatttatacaaagaatgagaatgtgattctactgatccaaacaaaacagtaaatgatgaagaatctttttcaaacttgtacctaactgcagcataaaatgcttagcagtagcttcaggaacacttccatgtttgtgaatatacatagacagatcaccacctttacagtactccaacaccaaatttatcttcccgggagcctaaaccaagtttcataaagtttaaacatttaccatttccaatacaactaataatcagcctacataagggtccagctaaaacatatgacctagtctaaacctaattgtaatattcaacaaagctgacacatttttagaatcccaccaacaatgtcag

SEQ ID NO: 1136 - DNA, 1705 bp, Arabidopsis thaliana landsberg
aatttattagaggctaggtctcgaccgaaagggcctttgcctgggaactcgaagtttgcccgactggtagccagttcccacctttccgtccacactggttctcacacttgttctcatccacctgtggaagtccgatctactattgggaatccctcttcgattgctatttttgattctcttccggttgaaacgctgggaacctcttcccctattcctagaattgttaaatttctctttagtgacgaatctttaaagactcctttacttgccgttatccccttcgacgacaagctctcttcgataaaacattatgtttctggcgaaagctcctccgatttggcaacaatgtctgagaactccttcactatcgtcaaagagtctgatttggtccctaatcctcgtttggtcgaggcaaagggctattccaccctatcacctaacgtgggggcgtcaatgcctatcgatacctctggcctgagccacgctgtaccttcgtccataccctctgagcctaccacaatatctaagaattcctctgctgcggtggatacaactctcctgaaaaatcctgctaacactggatcaagctttcccactaattttggtgccactgccactcctcttccggttaacaatcctcctcacacttctgctacccttccatgggcgaagaaatttaaggactcgttgctaaaaccttaagcaaatgtccagcccaacctttctcgatgatggtacccctgttgttgttgcgccaccctctgtattactgaagacagcagagatgtggaaaggccatcttatagcccaatttcagggcctttgtccaccggcttcaaatatcttcaatgatcttaatcttatacgaggaatttatggtgccatcatggttcgtattatctcggaaacagcttctttgatctacatcccgtctttggcaacccgagaatgggtagtggatgtggggtccttgtacagtgtacccttggtatctagaaggccctctagaactcaaagaattacaaacggctcctacttggacaattctcaagaacgaccttccgtagttgtgtttacttgatggaataattgttatagcaactggaattggcgagtccctgcatagagagcctttcttcacatttactcgacctcgtggtcgagtacctcagtctaggccactcgatgacaccactcgaccacgaggtcgagtaacaccttgccataccactcgatcatcacacgaactgtcactcgatcataacactcgatcacaacactcgaccccgatcgattagattcctggcctatcccttatcggtttactttgttttgtataaataagtcttcaaggattttgtcccaaaacatttaggttttgcttcacttttgatttctattttacctagtttattttatcattgcgctgtttgctccacaaactcgtaattcgagattttccatgttattcggattccgcatttgattttgtttagcacctagtttctctactctttatctctttatatatgcagtctacttgtttattggcaattatgtttttgagcatgtaatctgaatagtgacttagaattttgaaggataggatagaatggttggttgatctgtagtctataggatggttaagttttagaattgattgaatcccttctggattagttgtgtttaaggcttatttctctct

SEQ ID NO: 1137 - DNA, 7808 bp, Arabidopsis thaliana landsberg
  unsure (1)..(7808): unsure at all n locations
ggaacgcctgcttgggatgttcccgcaaccataccggaatactccttatttaggtttatgcactgtagcacatccgaagggggacactgagggacaagatcacatgttcctgtgaatcaacccactgcacataaaaatctgttgttgccaagagaagttaatgaaggaaatggggaaggtcgtaatgttcaaagtgnnnnnnnnnnnnnnnnnnnnnnnnnnnnnnnnnnnnnnnnnnnnnnnnnnnnnattcaacaatagcattactaacaacagatgcagaaaagcgagcgtgccgaatctccttcggcaaagttcttaaagctggttatggatgatgaaggaattaagtgttcggaagtttaaaggagagcagaatactgttttagcggataagtggttgaggaacctggaaatgaattttgaaacgtcaaggtgcccgaaagactttaagggccacatagcggtatacttttaagatgaggatggtcgagcttggtgggatagtgttgtttcacgataccgcgaccagcctaacacatgggaaatgtttaagaaggagtttgagtctaagtattttccaccggaggcacgtgattgtctggagctgcagtttatgagtttggagcaagggcaaaagagtgtcttggcatacgagcaaatttttacaagacttgggagatatttgtacaacggaaaggatgctgaagctatgatggtaaggttcctaagaggtttaaggcctaaactttggggacgccttcaggctgttacttataccaatgtgagtgaattgacggaaatggccgtgaatgttgaagaagggattgagttagaaaagggagagaagttacgggagaacgaaaagtccgaaggcaagaaggaaaataatcgagaatttcagcctggtgttttgaggattaatccgccgggaggacgaaaccagaataatgaccctgtaaagcctaagttggtaaccaaggaggacgtgtaatgaccacttacgatccaagagcctgctatatgtgcggaaagccgggacattttgcacgagattgctcaacggtcgtacagacgaaagtgccaaatatggcatttgttacttgttacatttgtggggagtcagaacatgtgtcaaatgcatgctcgaataagcaagcgggactacagggtaaccgagtgggagcttgtttcatttgtagagacctagggcattatgctaacgcatgcccgaacaggcaaataaagcagtataaccaaatggttaaccacccaccgccagttcagaaagctaagggaccaccggtaaagaagcaagccactctagcaaatgtttatgccttagatgtagaacctaccaaaccttcatgacccgcaaaaggtcccgtaacaggttagtatgggttcttacttttcttatttatgcgtgtttgagtgattgatcgttgtgtgcgtagtttactagattaaatattgcatacatcattttcatttgcattagggacattaattatcggtgttaaccccacgcatgtattgttcgattcgggagcgacaaatagttttgttagttcggacgtggccgataagtttgatcacgagtatgagaaaagaaaactgaatgttttggtacatactgcgggaaaccaaccacccttgtagacccgaattatgttagtaggaattcaagtagttatccaggatacaattctaccggcaaaccttttggtaatgccgatggaaatgttcaaagttatccttgggatagattggttgtcaggatatcatgcccatttagattgcgggcgtagcagagtagtgttcaaactaaggaatcgacaacaactcacttattgtagaatcaatctaagtaaaattgcttcgttcatgtcagcattgaaggttgacagtttactaagggaaggagaagtctaccttgtcactttaaccgccattggtggagaagttgaaattgactcaaggaatgaagagatcccggtggtgaacgaatttgaagatgtgttcaagcccttagaaggattacctccgccgaggaatcatccgtttaccattaatcttgaacctggggcgactccaattgcaagggcaccatataggatggcgccagccgagcttgcagaacttaagaaacaattggaggatctacttgaaaagggatttattcgtccaaattcatcgccatggcgagctctgatattgtttgttaataagaaagagggaagtatgcggttatatattgactaccgaggtcttaacaacatgacaattaaggataagtacccattgccaagagttgatgagctgttggatcagttgaggggagcaacgtggttctcaaaattgttctggcctctcggtatcatcaaatttcaatctcggagccaaatggtaatggggactgcctttcatacgaggtatgggcaatatgaatttgtagtcatgccatttggacttacaaatgtgcctgcggccttcatgagacttatgatcgaggtattccatgattatttagatagcttcgttatcatatttatcgattatatcttggtatattcacggagtgcggaagagcatcgtgaacatctatggaaggtgttggatagacttagggaacaacggttgttcgctaagtttagcaagtgtaagttctggcaacgagaaattggatttcttggccaccgaatttcaggacaaggagttacggcagatcctgaaaagattgccgtaatacagcaatggtcgcaacctacatccattacaggagtacgaagcttcttaggattggcaggctattaccgtaagttcgtcaagggattttcatcaattactaagcctttgacccgacttactggtaaaggtgtacctttcatatggaataaggatgttgaggaagcctttgttaagttgaagaacgcattaacaaccgttccaattctagctttgccggagccaaataaaccatatgatatctacacggatgccttgagagttagcttgggatgtgtccttatgcaagaaggaaaggtgatggccgttgtaatattcgcattgaaggcatggagatcatacttgtacggggagacggtacgagtatttacggatcaccaaagttttaaatacttatttacgcagccagatctgaatctacgacaacgaagatggatggagttaatcgccgactatgatttgaagattcaatattacccgggaacagctaatgtggtggcagacgccttaagtcgccggaaaatggaagtggatgttggaaaggatctagagtcgttaactgataagttaaagaaagtgactttgttagctctagagggtgaatctagtgagcccttgggtttacaaactgtgactcaaacaaacctacttaactgaatccaagaagaaccggcacaagatgaaaagttgtagaatatcgtggaggaattaaaaacattagatggaccaaatgctagtggctaccatctggctgatgatggcaccttattacttaatgggagaattactgtgcctgaccgtaaggattacgacaagaaattttgaaagtggcacatacttctttgttgagcattcatccgggaagtacaaaaatgtacaaggatataaggaagtattaccattggcctaggatgaagagatcagtggcaaaattggtaagccaatgtgattcatgccaaagagttaaggtggaacatcaagtgccggcggggttactacggagtctaccaattcctacatggaaatgggagtcaatcctgacggatttcatcaccggattaccaacaagaccaggacgtagcaatgatgctatatgggtagtaggagatcgctagaccaagatggctatttggtatcaatgaaaagcacaaataagtcacctatcctggcagagaagtatatcgatgaaatcttaagactccatggggtacctgctaatatagtatccgatcgagatcctaagttctcatccatattttggcaagacctccaacgtgctttaggaacaaatgttcacatgagcacaacatttcatccggaaactgacgggcaaacttaaaggaccatccaaaccatagaagatatgattcgactagtgcactagagtgggctggtgattgggaagactacatgcctttggttgagttttcttataataacagctatcactcaagcatcggtatgtcgccatttgaagcaatgtatgggaggtcatgtcgaactcctctttgttggacggaaatgagggaggacgagttttagtagtcgattgatcgatgagactgaaaaagtacgctgaccgaaagaggcgtgaagtggaattccaagaaggcgacatggtttatcttaaagtaatcgcgttaaaatggaaagatcgctttggaaaagttgaaaagctcgaggtaagatttattggtccatacaaaattgagaagagaatcggggaagtagcataccgtttatatatgccggaagaaatgcaattacataaagttttccatgtgtcgcaattaaggaagcatgttccggatcctattgttatcatacccgagccgatacaagagtaaagaacgaatctcacctatcccgaagtccctcttggcattggtgaaagacgaatgcgggagctaaagaatagaaggattccgcaaattcaagtgttctgggaaggcaaaatcgtaaagttactacctggaaagatgaggaaaagttccgaacaaaatatccacagtttttcgaaccaggaaattacagaggatgaagccggaccatctaatccttaggaggagaatgtagtgacccgcttaaggacatcggccacgggcaagagtccgaattttcgaaagttgcctaaatgcatggccaattgaccttaggagcccaaaacaacatagaataccaaagggcaagtttaggcaagaatgggcacaaatgggcaagtttgggcaagattgggcaagaacgggcgtgccacgggcgaaagtttgccccgccttgcgttgaccgaccgttgaccgcgccaaggacgcgtgactcggctaacttgggcccaagcaaagttgcttggagccgaattttagttgcttggagccaaagtttgggtggccacgtgtcacttatccgcttgagtagcgagagtgtcattgcgggtagatgacacgtggattggtgactctcccatacccatgacacgtggacatgctgactcgccattcccttgcctataaaaacccaactcgaccccaattgatttgtgaagagaaattgagcggaagtgagaggctgccgagtttaaaccgtccgtttgattcaagttaaggtcccgtagccgaaaactcagcccgaatcgttggaagctttccgttggttactgagtgagttctggataatggtttaagtttcataatcatattctcatgtattcttgattgattttgtgagttatatggatcgtggaaatggttatattggaatgcatatgtgatctttagattcttatgctattatttatggttgggaggttgtgttgggatattgatgattctatgtgtttgatttaaccatatgtttcataatatcttaaactttggggtcttggtacgtggtgcttgtggtaggaggcaaagaccataagcgtgccaagatcgtgatatgtctgaccttcatagtgattcgtactatcgtggggtcttgtaacattgttacttgatcgccatgtagtgcaaagaactaggagagacggggttagctaccctggccgagtgtctacacgacggtgtagcgtttggtagtgatgctttggttgcatacctttgtcgttgtaatgcgggagatcacgggagtgtgtgtgtttggtgttaggttagaaggcagcatatcggcccctttaaaacttaataaaaattggagccttaatgcatgtgcatatttttttgtagttgcttcaacaagctaccttacattgccactctctattgcgtgtttcatgttggatatttgggttggggtaaattaatatctgttgaagggaatcccaagctcactgagtaatcttagattactcatgattctacttgttttccaggaaacccgtagtgggaaatatagggtgtggtggacaatagaaaacccgaagtagttttgtgccttttgtaaaacaagtatgtttttattatgtacgatgcttttagcactaggccctggccataaaacttagaaatgtttggtaacatgatgtgtaatatttatacttatgaaataaatcgggtttcttgtacaaacttatgagtaatgactgataatgacttagtctgagtcggcacaacacttaatatcgaaagggttggcaagcctaaacaatattttaaatgggagagtggtcgtcaatacaacggccaagggttgggatattggttcccgaacctcggttggatgttaatgatcaatctcaatgtggcgttttcagggcgcccgagacttgtctggtcatagagcgtctcgggggcgttacaatttgttgtataagagcatggttaatgatgctacaagactcgtatttttcaaaatgttttatcgagtaaatgagtcgcaaaaggcatttaggataatctggtctgttcaccattattaggtagatgggttaagtttaccttggttgaatggatgcagatgtctggtcaaagaacggagaggagtgtgtcgataaatttctcaccagtttatgaaaactagagtcagcatttcggtccggaagactgggtaccgtatgttggaggagaaggagatgagggatactattatcccaatatgtatggagcgcctgattaggatgttcccggaaccacaccggaatactccttaccaaggtctatgcactatagtacatccgaagggtcacactcggggacgagaccacatgttcctgtgaatcaacataccgtacacccaaatccgtcgcagccaagagaagttaatgaaggaaatggggaaggctgtaatgttcaaaatgtgccggagactcaagagaagttggggatgattcagaccttgttgactcacatgattcaacaacagcaacaccaacaagagatgcaggaaagccagcgtgcagaatctcctgaagaaggtcttaaaactggttatgatgatgaaggatcttggtgttcggaagttgaaaggagagcataatactgttttagcggataagtgtttgaggaacctggaaatgaattttgaaacttgaaggtgcccggaggactttaagggccaaatagcggtaaactttttagatgcggatgttcgagcatggtgggatagtgttgtttcatgatactgcgaccagcctatcacatgggaaatgtttaagaaggagtttgagtctaagtattttccacctgaggcacgtgatcgtctggagctacagtttatgagtttggaacaagggcaaaagagtgtcagggcatacgagcaatttttttcaagacttcgaagatatttgtacaatggaagggttgatgaagctatgatggtacgaagttttttaagaggactaaggcctgaaattaggggacgtcttcaggctgtgacttataccaacgtgagtgaattgactgatagggccgtgaatgttgaagaagggattgagttaggaaagggaaagaagtttcaggagactgaaaagtctgaagccaccaaggggaataatgtagaatttcagcaacgatgttttgaggactaattagtcgggaggacgaaacccgactaatggtcgtgggcagcca

SEQ ID NO: 1138 - DNA, 2587 bp, Arabidopsis thaliana landsberg
tattcctactcgcaccttctctggcggcagtcttggaaaacgaaataactccacctttagccgttgctttgtttgcttgaccaatattaccaatgagaccaacaactgacgagatatcgatgattcttccctgcaatcaagtataccatgaattatgcttgacataatatcacttcttaatcgtatagaagagctcaaaaaaaaaaaacgctgatgcctttatatatatcatttctccctatgcttcagggaaggagtaacatgtcaaaaccaatgacaaacgtgtgaggatatagacggtgacacggcatatgacaagtaaaaagtgttaccctttttttcttcatcatgatctttactgctgcctaaagagagtaaacgagtatcagtccctgaaaatccgagtatcaaaattttagcagtattgcaggaatacaaacctgagtacagagaaatacaccagtgagattcaaagcaatcacttcgtcccattgtgattgcttcattcgtattaacaaggtatcccgagtaattcctgaaaatatgtagccacgtcagtaaggtactaagtaaaacttaatgggaaccaaggttttcatttacctgcattgttaaccacaacatcaatggttccccatttgtcaagagcctgcagaaaaataacaaaaggaaaatgaaaagatgtataaggattagggaatataagatggtgtacagttgatcactcacggttttcatcatcgcatccacatcagtcgctttcgagacatcacccccaaaagtgatagcctggccaccatattcttcaatctacagttgcacagagaagaaatgtcagagattacatgaaataagttgacattgtaaacgaaaacactattaactgcagatgacatttgttagccaaaagataatatttcatttggcagtgtggatcaagagcaaaatcacaaaacgcatttgagaagcatagggcaataagaaacatttttcaggtccagaaaattcatttgtctacatttcttgtcccagaaaccaaaactgtttaaatgtattatcaacgttaaactcgaaaggtaccacatttattttcgtaccaacaacaacatccttccataccaaacacctatgcattatttggtctaaaccgatatcccgaagcagaaaaagaaggaaagagctgaaaaccattctagatacttggtgcatgaatcatgtaaattgcagtctaatccacggcaatgaatcacctgtttagcaacttcttcagcctcctttgctgacctagcataattcaacaagacctgcaacagaaacacaatgtttgcttccatcagtatcagacaagacctctattggtcttccttctgtagaactaaaacactataacccagaggaaaccaaactagacagagaaccaagcctattgggtaccaacaactgagaaaatttgttaatgccaagagatcctgacctaaaatcttcgtaactcagaaacttgaagaacagtgttgtgcaaattgaatccttcaagagtacatatacagataaaatctaacagcaatgactaaaaacaagtcccccaaaattccgatatgcagatagacagtgttattcaccttacagcgagctttacccaaggctagagcaattgctttaccaatccctctagaggcaccagtgacaacgaccacaggagattccacgttttgaacaacttcacctggtaattgctccgtagctgtggcttgagttagaccagtgggaaacgcaaacagacatcctgaaacacaaattccaatagtcaatatactaacaaacccgcaacctaatttctcacaacaatatccaggaaatgaatttctagagaagcatcaaacaaatatcacctttgtcagtgatgtcttgcttgtaaagtcgttgatcctttggctcttctccttggagcaccgacattcctcttcgaggtccatggtcccgatgagattctttatcatcttcaaccatttctgcatcctcttcgaccatttcttcatcctcttctacatattcttcaaattccattcctgcaatctaaattatatacatacaaaaaagagcattagtgtagcaagtaacattgaacttaaaatatgatcaatcaacaaaccttaaacttgagatttttctttgctcgatttggcttctctttaaattttagacccagaggacctgttttcatgcctatagagtagaatccgtaaaggagatattgcggttttttaggccaagtaccttccttgtcagatttttctccaagtactatccacatcacttctgcagaaacgtaaatgtatcccttaaacccagtatctgtactgctgctacttttgcatctgaccaccatttgcccttcaatcagtgtacaatcaagcattagtgcattgtgaagacctgtgtatacattagcccctgccttattgggtccctcgtagatgatgtcaggtttatcccaaccctgcgataagagcaatgttgcgccaacaggatgacttttaagacccaccaaaacttgctgtagcgggtcgtatttgaatatttcatcaag

SEQ ID NO: 1139 - DNA, 1505 bp, Arabidopsis thaliana landsberg
aactcagacttctcgctatgaaagaaaaggatgaaagcacatctcagcttagctaggcttaaaggagtgatcgatgatttgacattaacaaaagttgttccgtttactaaaagtgaaggaaagaaggttgaggaaggtgatgatgatggatcagaatcatcacaaacaaaggtagtactagatcttgaaaagatggagaaatcagaacatgctatgaatgtgattatcgttcatgttggtgatgttgttctgagaaagattgatcattgcaagtctgttgcagagatgtgggaaaccttgaacaagctgtatatggaaacatcgttaccaaatcgaatctatgtggagcttaagttttactcatttaagatgaatgacacaatgtcaattaataagaatgtgaatgaattcttgaaaatagttgcaaagctgagcagtcttgagattgtggtaggtgaagaagtttgtgcaatattgttcttgaatgggtttacatcaagatactctcaactaaagcatacactgaagtatgagaataaagctttgtcactacaggatgttatctcctctgctaagacgttggaaagagagctaaatgaatcacttgatcttgaaagaagctcatcaacggccttgtatactactgaaagaggtagaccactagtgataaacaatcaaaacaattagaaaggtggtctaggcagaggtagaagcaggtcaaattctaaaacaagagtaacctgctggttctgcaagaaagaaggtcatgttaagaaagactgttttgctagaaagaagaaaatggaaaatgaaggtcctggagaagcggaaagaacatgtagagaatcaggtagatagaaaggttaagtgttgagaacagataatgggttggacaggtactgcaagacccatggtattgaaagacacaagacatgtgtttacacaccacaacaaaatggtgttgcagagagaatgaacaggacgatcatggagaaagtgagatgtttactaattgagtttggtctggatgagagtttctgggctgaagcagctgcaactgttgcatagatcattaacagatctcctgcctcagccattgatcataacgttcctgaagagttatggctaaacagaaagccaggatacaaacacttgaaaagattttgttcaatcgcatatgttcatcatgaccaaggaaagctaaaaccaagagaattgaaaggagtgttcttaggttaccttgcaggcacaaaaggttataagatttggctacttgatgaaagaaaatgcgtgataattcaaaatgtgatatttcgtgaagacatggtctataaagacttaaacaaagatgtgaatgatgcagtagcaggagactctgaagcatcaacatcaaattttggtgttattacagaattggtcaagaagcgagtcagctctaagcaaggtggagtaactactgatccagtagaagtcagtgaaagtgaatctgaagaagattctgaaga

SEQ ID NO: 1140 - DNA, 1066 bp, Arabidopsis thaliana landsberg
ccatagatatcttataaatcagcaaaaagctatgtattatccattacatcccttagatacattacatgtaactaagtactaaccatatcaccatcactttactatatagattataatatagtaatcaagcccatatgtttttattttttttacatacaaaagttttttttaccacacttcaccattccaaggaatggctcctgcttaagggcctcgacggtggccttggtttctcatcgaccggaatcagaacctccatgagcttcttgtatctctctttagtgctctcttcaatctccttcaaaagctgctcattctcctcctctaacttggcagccaaagtctctaactcaacctgataagcctgtttcctctctcgagacctagcagcggattcacggttcttgatcatcctcttctgtctctgagctgcagctttatccattgcctccatcatcactctccctctctttcctctcgttactcctccacccattgatccttcaaccatctggaacgaactgtgtcgctgcatcggaaaatcaaatgtatagctaccgtcgttgttgagtctctccgttggaatcttcacatcgatttcatctgaagctccctcgtccatttctgctttcgctaagaaatcctcaagtgtcattatatcttctggttcttcttccttcatcatgatcgtcttttgctctccagatacaatctctttccaaacatcgtcaacactctttccgttgttaacgctgttccgatctccgatactccgatcaacatcaatcgccatctcgaagggctttgaatcagacgcgaaagtgtaatcgttgactcctccgccgtaagcgaaactgattctggagtgatcggcgtgaggatttggtcggagatggtgcgatgatcttatagaaggggaagatgaagcataagaagaattacggcgagacatgtcggaattggaagagacatcaacttgaaggacgccattttccgagctcactggaattggaacgaatttttatctatctgggtttggtcaagaagaaagaacaatcggaaatgg

SEQ ID NO: 1141 - DNA, 6606 bp, Arabidopsis thaliana landsberg
aaacaacaccctttgagtgatggatttggacagagaatttctgtctgtttagatatatgaatcaatgaacaataatgattgttagggttcagaaatggagactggaatcagaacagtgttattaaccttgtgggagattgttggtgagaaaccaccacagcggattgagagtgaggagactgccatagtggctacaattcacaagacttttgatgatcaatgaacattgccttagtgttctatgtggataagaaatttctgattttcgtcatttctcggacttctccattcatcaacatgtggataaaaggataatgaaagatgcaaacaatatgtggtgatagatcgatttatgatcatttactggttagagaagatactgcatttgtatgtttacagtttataagttagtgagttttaaaatgagaatcttgataagtcaaaaacatagaacttgaattcaacaataaactgcaacatgaatgtattgtaaaacgtttttgctccaaaatactacaattaccagatgatagtaataataaatatcttaaaagcaaaactgagactacaagagacaaaaccacaatagtctttataactgcagagatagatagacttagatgatgccgatcttgttagcaacatccaaagcatcatagtctggtgtaagcctcacgtaagccttcttggttccatcaggcctgtaacaaaaccaaaccatagtgtcaaatatattgaacataatcaatctcacaacaaggcttcatagaaaaatactctttaaagtacctgatgagtgtgttcactttcttggtctggatgtcatacatcttcttaacagcatccttaatcttcttcttgtcagcacgaatgtcaacaatgaaaacaagagtgttgttgtcttcaatcttcttcatcgcagattcagtggtgagtgggtacttaaggatttggtagtgatccaacttgttccttggagtagcgctgatttttgggtacttaccagttctaggcttggtaagagtctttggcctgtggaaggtgaccttggtcctaatctttttgtccttcttcttgaaggcttgaccagacttcacagcctttgccgccttcaaggccttggccttaggatcagccttcttggtagtatcaactgcatattacatacaacagagagtttaagcatcatataatactttgatacaaatctgacttcaatacatgaatactcagaaacacgtctacagacaaaattcatttggatactacattaatctcacttagttgaagctaatcaggaagatattgaaactaatcacctaacgaaacatgattagaaaacattaatcgagaccagatactagcgggttcagcaaaactaaagtctagtagaagaagatccaaatccatcatgttccagtgaggattcaagtggttatcaatgaaaagatcgtacctttagccggagacatggcttgaaatgattcttcacacacgaaatctgtgaaattttttgatagaaacccagaaagcgaagctcagtaatgaatctgaagaaagaaatgtaggacgatttcgagagatagtttgcaaaatcgagacacgaacctggagaggtgaagcagctgattctcaaaaccctaacttacgccgcaacaacttttatagtggaaactgaaaccctaagatacttagttgggtctataatgggcctttttaccacaatcatcatctaacccagtaagctttggatcgaataaatgggccttttaccataatcgtccatcggacgcataagccataagtgacgaaaaatttcattagaaaaaaatgaaaatgagcataagatcactgattcttttggttgcacaaaaagatacataaaagataatatgggcttgcaacattgtaaataggcctttgaccaaaatcatcatgtaaaacccaaatagaaagtgagcgtaaatttaagttactagtttatttttaacgtaatggtattggcgtaagaaacatacaaacgtgtcttttggcgtaagaaacatatttgcttcttctcttgtgtctatgacctttcttatggttttgccattccaaagtaaattattacagaataaaatttagtcagctttggtttgacttaaaagcatacaatctttgaccaaaccaaagcaaatcgaacaatgactaaccaaaaaaaaaacaattggtcacgaaactaaacaataatcatttacttatgcttgacaataagagaacaacaagcctgctctacatgtctaatattttacgagatttgtgaagaagaaagctttagctgaactggcttctaccatttttcaaaggttcttctatatcttgggtcggttgtatctaatacagtttttatactacataataagagtttgagagggcacatatgtgactcataaccatgtcacggggtcgtttaattgcagttgaatctcaactgtacacgtgtgtatgatgactcctccaatcacgtgcgagatcccaaatccattgagagaacgccacgtggataattagcagagacgtctcttctaaaggctggtccaagtatctctgtggaggaatgtcttactaccacaacagtcgtagtagctagcctcaatctttctcttaattaccgatcttaccctcgccgtctcttcaaatttcccatttccttaccactctctctctctctctcaaaaaaaaaaacacactacaaagtctctctccgccgccggaaaaatggttgagccagctagtccagattccgacgaagggatctcgctgctcgagtttcacggtaacggtgaccgttcctggcagttaaatttcgatgatttccaggtttcaccggaacacaaggagaagaaatctccgagtaaactacacaactgtcttggttgtttgggtaaacaatttgctcctcctctccgcatttccattttcttatcgtcttcttcagtttcaatctttagcagcagctgataacatttgaattcggcctcctttgtttgctatctttagcatttttgattcttcaaagatatatttttactcttgttatgaagttgagatttagttgaatcttggtattgattagtcgagtttattaatcctgatctttgatttttgtctctaatcatgtagtgtctacaaatatgattttgtgatcaaatatgattttgtgaagagatcaaatatgattttgtgaagctatgtgtcttggtgttttcaggtccggaagacaatgtggcagattattaccagcagcaagtagagatgcttgagggctttactgaaatggatgaacttgcagaacgtggctttgttcctggaatgtcaaaggttagcctaaatgaggctactacttgtcacatttgttgaaaccatgatgcatttgttcttattgattgatacttttctgaatttctttgtgttttgtgtacataggaagagcaggataatttggctaaaagcgagacattggcgattagaatatcaaacattgcaaacatgcttctttttgctgctaaagtctatgcttctgtcactagtggctctttagctatcattgcctctacattggactctcttcttgatcttctttctggcttcatcatctggtttaccgctcttctctatgcagacactcagcccgtatcagtatcccattggcaagaaacgcatgcaaacactggtttgtatcatccttttaaagactaatgcacatgatctgtcttccattagtatatttctattatatgttatgttagtgaatcggagtaagcaagcatgttttgggatattgagatctctgagcaactattaacgccttcgacaagtcaataaagtttttccgatttctcaatatgtgatttttggttcaaatcctttcagggaatcctagtctttgcatcagtgatggcaacacttggattgcagattatcttggaatctcttcgcacaatgttatccagcgtatgtctgaatcttgatcacctagctttggtctagagctttgagagtcatacattattctcgaaatctctttcatacagcacaaggagttcagcctatcaaaagagcaagagagttgggtagttgggatcatgctgtctgttgcagtggtcaaaccgcattgggttggactgtgcagaatggttctgatttgttgggaagtcttcactacgatggggtgtgattgaaaatatggtctcagtttttgagctgacatgactacggccagtgccagtttttccattgctaaataacgggtttcagcgtctatcaacgttttactaacgtaatagatcggtttttgtccttcatgatcttttctcaccaggacaccgcttatcgcggttcgggagactgccgtgtacaggtacaacggttctccttgttcaggttttgtgagtatgggtggttcaaacaggtatgctttcaattgtttgaaggcttgctcgcagtcctcattccaatcgaactttttctcctgtcggaggagctgatagaaagggacgcgtttgtcggtagacctggatatgaacctgttgagggcggcaatacgaccagtcagtcgttggacctctcgtgccattttttggtgatggtatttcgatgaaggttgcaatctgcttaggattggcctcaatgcctctttcggttactaggtatccgaggaattctcctgatgggacctcgaaagagcatttctcgggatttagcttcatttcaaatttgtttaggattttaaagcattctcttaatcgtgggatgtcgtccttttcgtaagccaatttgaccaacatgtcatcgatgtaaacttccatcgtgttcctgagctggtcggtgaactttctgttcaccaatcgttggtaggtagctccgtcatttttcaaaccaaagggcattactttatagcagtaagtgcctcagtccgtaatgaacgccgttttttttttgtcggtaagtatttagttgtacccagagaatgtgtccatgaagaacaatgcgaccagtcaatcgatatgcgggagtgggaaacagtctttaagacatgcttttcaggtctgtaaagtcgatgcatactttccacttcctgtttttcttttttacgatgactcggttagcgagccaatcgttcagagctttggtccttttgggacctagcttgcgacgtttatgttttataggtcggtaggtcggatcgacgttgagttcgtgtgaggttaactcgaggtttagtccttggaggtttgcgcttgaccaggcgaagctatctttgttttccttgagaaaggttgtgagatcttctcgtaccgttagatcgaggtcgtgacctattccaacgcatcgtttaggatctgattcgtctatgcagacctgcgttatcagcgatattcgagttccacgttgagacgggtccaaggatctgactgttttcatttccgcgagttcgtcctctatcattagtaccacgggatcagcttttttgatatcctcgtagctacccatgtagcattttcgggagctgcgttggctgccgtacacgactgctatccccttgtaagaagggaatttaatgcattggtggtaggtcgatgggacggctttcatgacgtgtagccatggtcttcccagtattacgttgaaaggagctttcttatcgaccacgaggaagttcgtgagttgtcttactccccgtgcgacggttgggagctggatggttcctagggaaaaggtcgtatctccatcaaacccggtaagtggcgtttttctgccttgcaactcggaatcgaggtgccccatttttttgaaggcgtcgtagaagagtacgtcaactgagcttctcgtgtcgatcattatacgggagagttcgtagttgcctacgtcgattcggatatcaagagcgtcattgtgaggtttattgaggtcagtggtttcactttcccagaatgtgatctggtgatcgaggccggtttgttttaggagaaaactagatcatggtcgaggaacgaaccaaaatactaagtaggaagaaagagaaagttcaagctaaaccagctaggtgagctggacaagctggatgaactagctagctaagctatgtgagctaaaccagctggaagactggctagctcagctagttgagctgactaacagctcgactaagctcggtgagcggagtactgacccagatgggtggtccggtcagctgacactcgagctggtggactgtggtaactcacgggtgaagaggtgtcttcggatcggatcggccagacggatcggattggacagaccgatctttggacgggtcggatgggacaggctgatcgtcagacggaacgagtcggacagaccgatcgtcggatgggatggatcaagaaaagtgtttgaggaagcacaaggataagtgcatccgaacacacccaagggtcgcccatggatgcaatcttaccggtaaagggagaaagcaccaagaatgggtaaggaacgtgattcaccatataggatcaatatcgcggctgccttcatgtatctatctcctcagccatggtgaaaccgatcgaagatcgggaagaccaa

SEQ ID NO: 1142 - DNA, 1254 bp, Arabidopsis thaliana landsberg
  unsure (1)..(1254): unsure at all n locations
ttccagagtctttgttaaaatgcctgccttctgctcattcccagggatatgtttaacttccacttgactactctcaacacacgtgggtatgaaatgatatcttctatgtataacgttgcacatatccttttgcgacgagtcgggccttgtacttgtagatgcttctgtcgagtttctcttaagttttgcaccaaccggaagatcaacaagatcccatgtttcatttttttcgatggaccaaaattcatcctcccaagcaagcatccattcttttgattcctttacttcatagaaatctctacactcattattcaaacataacaacagtctttctccttcctcttcggctagcaacacataatttttaagatacttaggcatagagacttgtctctctgttcttcttaactgaacaaccgattgttcttgagacttataattctctgtttcacctccatgtgtcactaccggaatattttcctcttgttctttatcgacttatcattctctgtgtcactaccgaaatattatcatcttgttctttatcggcatctaagcttgtatcttcaatattttcagaatattcttcatcgatctgttccacttcgacactttgtctagtactttgaataccacgatttccaaactctccaaatatgaaattaaaactcttcatcttgtatttttttgagttagtgtcattcaaccttttgttttgtcaaaaaaaacgtctctacttaccacgaccttttgggttggtggatcgagcatccggtaagctttcgaccccggctatgttcctaagtgtacacgcatatgtgatctatcatctagcttcctcaaatgtagcttttctgtctttgcatatccgctacacccaaagatctgaagataactgatgtttggtttcttttctcagagtacttcatacggagttctatccttgagagcctcttatggctattagattcaaaagatatgtcaaatatcgtatcgcctcttcccaaagatagtttggtacatgcatatgcttcaggatgcttgtgccatctccattaaaattatattccttctttcaacaatagcgttctgttgaggtgtataaggggcggggangatgtctctttacacccgtattatcacaaaaaattttgagttcctgcgatgtaaattctcctcccctatccgtccctaaaaattgtatgcttgcaccggtttcttattccgctaggcttttaagtttcttgaattttt

SEQ ID NO: 1143 - DNA, 677 bp, Arabidopsis thaliana landsberg
  unsure (1)..(677): unsure at all n locations
gnctccttgcttcttaaagtgtgatagtctctatgatcctaatcattaaacctaaactgtacagcttaaatgttgtaacctatgctcaatccagtaaaccctgactcctgactcctaaatcctatacacaaaaccgcgaacgcttaacccgaaaccgctaagacaaatccctagagcctacaccatatggtccaaactttaaaacccatatcctacttctggcttctagaatctggacgcggtcctagctcttatgtgcactgatacacagcgcatccagtcatattcaactacaaattcggtatcaaagcttcttgatgattcccaaagctttgatggagaagctgaagttcttttgagtactctcgttatatcttacacacgaactctgaaccatgaaccgtacacccgggaactcaagacctaagacctaaacgcaaaaccttaaccttaaaccttaaaccctaaatcctactttaacttcctggatctttttgcgtttctaatgcccctaaacccgaaactcttaaccctaaactttttaacctaaacccaaaacccaaaaccatagatcccaaactttaaaacctaaaacctactttaggcttctggaatccagttgcgattctagttcctatgctcaatgatacacaaagcatctagtcatatttgactac

SEQ ID NO: 1144 - DNA, 3177 bp, Arabidopsis thaliana landsberg
ttacctgtatacgaccaccctcctctaccacaaggtcgagtacattcatcaccttcactcgttcactttaccaccaagccgagtaccatcatctgtattgggagacttcatatttgactgcaagcttcagagtcttcttcattccgcactcaaccagacactcgagcacaagaaagaaaagaagactccagcttatcactcgacctctcactcgaccacctgggtcgagtacagttcttaatccgccccaatactgcgtcgttttgagtattaaggttttggaatattttgctataagtagcatgtactttacattttcgagaacaagtttttatctaagttttattccgcagacactgtgttcttgaccttttataattcggatttctctttatctattcagtattcagtattcagtatttgttcttgaattcgtttactgttgttcatcctgttaccatcctgctattactctgttgatatcatgttttcatcctgctatgacgtctgagtagtgactaggtttctgaggatgggtgttggagctggattcccctccaggaatccacctgcaaaaataccaagccagcccacaaagcccaccaagcccaccaagtagaggacctacgcagctgatgagcccacatacgcgaatgggtacttgggccagataagcccggtcacttgatgaagggagataagcgaataacaacctaggaactgatgaggagatattcgcggagcggacctgatatctcggaactgacctgccgaatattcaggagaatctccgcagatcccggacggagctaccacgtgcgtagacctatataagggagcaaggacgacttggaagagacattcaatccagctttacattcacgcacatacttttacacttgtaatctcctttcacattgtaaaagctttgtcacaatcaatacaaaaagtccattcgttcttaacagtataactctcaaggtttccgtgaagatctagccctcatttctcataatctcaattacaaatctgtagtgtggatttcagaacccacaagcctctccaagcttcggtctacacaatgacctttaaaactatatatatgacctaaaacacgtgatgggccttctttagaaataagggaaagttctgggccgaatttgaaaattttcaatacatcaataagttgcgtcttcgtattggagtcactcgacaccagcggtggtgtcgttcgacaccgatgcggtttttagtctctagatttcttgagctgcataaattctctgttttcctccagaatgctccattatctccaaatgaatctcaaacatgtaataaccttaaaaagactagaaaggactctagaaataacaaatagactctaaaacatatacctaaaacatagttaaaaccggtaaaaatagggatatatcaactcccccagacttagcttttggttgccatcaagcaaaacacaaaagccaaacccgtggaagaggttttgaaaacaaaggaactcccaacattctctagtctattgcaatgatcatcctaaccaaatccatatgcctagcaagtctaattaaatcctaaccaacatgtacttctctacaatcttacacaacatcctagattcaatacctatattccacaactatatccaccaggctttcatcgctgggtctcatcaaacaagctatcattcaatatccttctagactcattcctgtactataccataataaattgaccatttttttatatatatttttttctttggtgttctttctcttcccagatttattctttttagagagtaaataaaggggaactcgcatactggatcgacaccctcagcatttttccaacctttgtaattgatcattccaaataatgtgtgaataagtgacccaaatgcaaattatccttaagtataggaagcctctgttcaagaaagaaggtcttcggttttgggttagtcaaagcttaacacgtgagggcacacatgtgaacgactaaagagattggctagactgcttattggctttggtagattgttacttaaaccctgctctgctatgtttcatgaacgagagttgagattaggaagtgttagagttatgggggtctctttcacgagagtggattgacccgatttttgaatctatcgtctaaggtatctgtcttttgcctgttatccaccttatgaactttagagttgcccttatcaatgaatccatccttaggacttctattcttcttagatttatttgtattcaccccctgattgcacttttatttacttgttatttgagccacctgttagttttattttagttcttaaaattgttacctgttggttctactcgacccaatgatcgagtagggctcttaagttctcatttttgttgtttgaatcctgacctaggattgttactagaaaccagccatcattataatctagcttgacttagttgcttctatacacatcttgattggtagcaataacagtggacaggattaacacaccctatagctggactgaacctcacttcagcacataagtaggcttaaaaaacctacttatcaatactttccatgataacaactatggaattttattttgatctctcaacggatttgttcttgaaatcttggttaaacgttttcttactgttgttttgtctttcaaatacagtgaattacgttgaattcaatcctataaataagaacttcttaagtggatctatcgatggaaaagcttgaatatgggatttggcagaagaaagagtcgtcgcttggaccgatgttcatgattacatttctgcaatgtaaatttgacattatgtctcttttactaaaatgatcattatggtctctgtctctcagatgtcttaagaactcaactttgctttgtttttgcttatgggtttgttgttggtggcatcactgggaattgtaggttctaccaaatttctggtaacgatgtggtaatggatgaacaaattcttatccggggacggcatagaatcaccgctgtggagttttgtcatggaagctcggataaaattttagtatcttttgatgattccaaacctcgtgtatttgataaaacacaaataattcaaaaattcaaaggtatgaaaaataatatttgaatcttccttttcggctttt

SEQ ID NO: 1145 - DNA, 6300 bp, Arabidopsis thaliana landsberg
gggtaatactatcattactaggatataactatttgaatgaatcctggtaacattggtagcactaagaaagaactatgtatatgatctgtaggtaatacttacataactaggatataactatgtgtatgaattttgggtaacattggtagtactaagatagaactatgtgtatgatttttggataatactatcattactaggatataactatgcgtttctgggtaatactgtcattacttgaaaacaactacgtgtatgattcaaggtaatactgtcagtactaggatataactatgtgtatgattctaggtaacatcggtagtaatatgaatgaatatctgttgaaggagatcgacgaggaaatagaagcaatactgataagtgtgtattttacatgttttgagcatccatttgtcatcactttagcatcatatcatcactgttttataccatttctcatcatttgtcatcggtttacatgtttaggatagatttgcatgcatgttgcatatttgcgttgatttcagctgatttggagatgttgacgagctatctggaagaagcggacctgatcatgtcaaaccactcgaccccgaggtcgagtaaggagcttcaagatctcaacagatcactcgaccccctggtcgagtagaggacatcactacttcaccacatcactcgacctcggggtcgagtgtcttcaccttcattgccagaccactactcgaccccatcactccacctggaggtcaagtatcaccatcaccaccactcgactgcatactcgatgacaagcttcagagccttcttcattccgcactcaaccagacactcgagcacaaggaagaaaagaagactccagctattcactcgacctcccactagaccacatgggtcgagtacaattcttaatccgtcccaatacttcatcgtttttagtataagggtttcatgtacttcacattttcgcatatttggctataagtagcatgtacttcacattttcgtagaaaagtttttatctagttttattctgcagaccttgtgttctagaccttttataatccggatttctctttatctattcagtattcagtattcagcttttgttcttgatttcgtttactgttgttcattctgttatcatcctgcttttatactgttgttatcatgttttcaacttgttcaacgtctatgctttctgttatgatgtctgagtagtgaatagatttctgaggatgggttagagtagtgtagaattctcagtatgctaggtgattgagtattggttgatagatctcttctggattagttgttcttaatgcctattgctttctgatcaactggaatttgagcccagacatttccacgcccaaaaggtgttcgatgaaatgtctgaaccactaattctagagattcgtgaccctgtaccaaggtattggttgcagggagcgttttggctttacttattgattcgtaatgtctgttaggttagctctcgtcaatggtgattgagtctgggactaggtttacttaagtctcttttgcggtggcacttagatttggttaatgaatttgttgtctagggttatttattgagcatgtcaatcacctgtaactgaggaaacgaaactactcaattaccccatcctgggaattctttatctgattgaattctttgtttactctactgttgtttactgcatcctgttatctgtcgcttaatttctgcaattctttcttgttactcgacctcgtacctcgaccacccagttgtctggcaacagactgtgcagtcgagtatctgtgttttattttctgtctgttactcgacctgtcactcgacctcacccagtgctttgcaaagagctgtgttggtcgagtgttttattgtttctgcttgaatttctgttttctgcatgttcatttagaactgctataacacaccaaaacctgttattgcttggcttgacttagtgacttctgatcacatcttgattgttagcatcacacccatttggattgacaacctaaaatactacaacgatatgattggtgttttaggataattgactaaaaaacctattattaatttggcgacgttgccaattgggtgtttgtttgttacatttgagatttcagacttgcttagatcaagttcattttcaattttcttttcagttactaactttgtgtttttcttgttgtcttcttgatccaggtacacctctgctgtatgcgaactcgatcaacaggcaatcagaacctccttttcgacgacaacatcaaccgcatagctcgcgaactcagaaaaaggagaaccacagtcaaccctgtacctcagcaaccactcgaaatggctgaagaacagaatcaacaaaatggccctgccaacattggtgctagagatgcaccacgtgatcaccgccagaggaaaggaattgcacctcctgcaatccagaacaacaacttcgagattaagagtggtttcatctcgatgattcaggggaacaaattccatggtctgccaatggaggatccactcgaccaccttgatgaattcgataggctctacgacctaacaaagatcaatggtgtcagtgaagacggattcaagctccgtttgttcccattctccttgggcgacaaagcacacatctgggagaagaatctgccccatgactcaatcaccacctgggatgattgcaagaaggcttttctatcaaagttcttctccaatgctagaactgcaagactcagaaatgagatttctggtttctcacagaagactggtgaaagcttctgtgaagcattggagcatttcaagggttacaccaaccaatgccctcatcatggctttactaaagcctctctgctcagcactctttacagaggagtcctaccacgcatcataatgcttttggataccgccagcaatgggaatttccagaacaaggatgttgaagaaggctgggaattggttgagaacttggctcaatcagatggtaattacaacgaggactgtgataggaccgtcagaggcacagctgactctgatgacaaacacaggaaggatatcaaagcgctgaatgacaagctggacaggattcttcttagccagcataagcatgtgcacttccttgttgatgacgagcagtatgaagtccaagatgaggaaagtaaccagttggaagaagtaagctacatcaacaacaaccagggtggctacaaaggatacaacaacttcaaaaccgacaatcccaacctctcctaccgcagcacaaacgttgctaatcctcaggatcaggtgtatcctccgcagcaacaacaaagtcagaacaaaccttttgttccctacaaccaaggtttcgttcccaagcagcaattccaggggaactaccagcaaccaccaccacctgggtttgcacctcagcaaaaccaaggtcctgctgctcctgatgctgaaatgaaacagatggtccagcagctgctacagggacaagcatctagctcaatggaaattgctaagaaattatctgaattgcaccataagctggactgcagctacaatgacctgaatgccaaagtggaggcattgaataccaaagtcagatatttggaaggccaatcagcatctacctctgcatcaaaagttacaggacttcctgggaagtcaatacagaatccaaaggagtatgctaatgttcatgctatcaccatatgccatgatcgagagctgccaactcgacctgtccctgatttcatcactggggacagtgatgttcaagaagggaggcttctactcaggttgaagtctctgttgttgaattcaaccattccgctggttctcgccatctcactcaatccatatcggaagaaaaggccgccataatcgagagaatggtaaaacgattcaaacctactccactaccctcacgtgctcttccgtggacattcaggaaagcatggatggagacatacaagtctgttgcagagatgcaagcttgccggactgaaccccccatattcgcaaaacccgatgacggcgaactgttgtacctgtacacgacagtctcctgaaccgtgataagcggtgtccaggtgagaaagatcacgaacgacaaaaaccgatctattacgttagtaaatcgttgatagacgctgaaactcgttatccaacaatggaaaaactggcactggccgtagtcatgtcagctcaaaaaatgagaccatatttccaatcacaccccatcgtagtgatgacgtcccaaccaatctgaactattctgcatagtctgacccaatcaggacgacttgcaaaatgggacatagagttaagcgagtacgatatagaatatcgcaccagaaccagcttgaaagcacaagtcctagccgactttgtaatcgagctcccgttagccgacctggatggaaccaactctaataagaaatggctcctccacgtcgatggctcatccaaccgacaaggatctagagtaggaatacaactcacctcccccaccggggaagtcatcgaacaatcgttccgacttggattcaacgcatcaaacaacgagtctgagtacgaagccctcattgctggcattaagctagctcaagaaaaggggatccgggaaatacacgcctacagcgactcccaactcgtcaccagccagttccatggggaatacgaagctaaagacgagcgcatggaagcgtacctcgaactggtcaaaaccttggcccagcagtttgaatcgttcaaactaactaggatccccagaggagaaaacacctcggcaaacaccttggcagctctcgcttctacatcagatcctttcgtcaaaagaattattcccgtcgaaggcatagaacacacgagcatcgacttaacagtcaaacatgctgggatggaactcgaagcaccaccaccgcagctagagctctcgcggcagctgcggaggcaagtgcaacggaagaggagccagaattcgaaacccccgatttttttcctcatagtgttctcacttgcatctatcttttttattgtaagaatattttggaaattataatagatatgctcagaaaaacaagagattaagaatctatgctagaagtttttttatttagttctctctcatatgactcaacttaataccgaaaatatcctctgtctcatatccacgggcgttaacaataaaattatcagataagcggtttagaaaactatcgatgatgattgtgagaaatgaggaggcaaaagtgacaccgtcaatgatgatttcatgtcacgtgtggtggactggtggtggtgatgatgataccaacatcgatgatttcaaaagcagtggtggtgttggtaggaaaattacgtcaaatggagacggtgatggaatggtggattggtggtggtgatgatgataccaacatcgatgatttcacaagcagtggtggcgttgggtcggaaaattacgtccgatagagatggagatggaaagagttaatgattgaagattagacagtggcagcgaaaaaacataattatgttgttttctagatttaccttgttggtgaaaagaataaaaataaagcatgtttttgttattgttatcatgttaacatcgttatacacgttaatataaatattatctatatatcacattttttggcataaatattatcagtggtaatataaacattatcataccaattataaagttatcgcgatacaatatgatttcgaatgatatatttataaattgcttgatatatatggtgttatcgcgttaaacaaatagataatcatataactcatcatatattcttacttacatatttgatggaaatctaagtaaaacaaaacaaaaaacttcgataactaatttgttatatgtagaagagcatttttgtaaattatggagagagaactaattatataaaaactatgcatagattcttaattttgaattcttctgagcatagatttttaattcatccaatatttttatacatgcaatgacatttgataaaaaaaaaatgaacaacacagattacaagtttaattcttggaaaatatcaatggataagctcagacgaaactatgcatagaagtgttttgcaatctttgattctcatttataaatatgaatctaagtgacccatataatcattcaagttgattatatggtttgaataaaaaaatattgtattagtttcaatattaacatttcattttgaaaatgttaaacattcataattcatacttaatgaaaaccataagatcatcattgatgtatttga

SEQ ID NO: 1146 - DNA, 557 bp, Arabidopsis thaliana landsberg
  unsure (1)..(557): unsure at all n locations
tgtctggttctatctcctagagtgcactaagtaattagggactaagtgtgagctagtgtaatgcattcatgtatgtttgattgttcagaaattctaatttgaaatttaaataaaaatatatcaaaaatctttttttatttgtgtgctgattttctgatccggtcgttagaaccatcttcctcgagttctatgaggactttgttccttgtacgcgcacactaccggtgtttagtgccgacagcgcaccacggggtaacccacgtagagcttttggaaggacgacaacgtcgattgctactcgatgatatgtgtaggggaacgtcggaacacaggggatttatacaggttcgggttgcgcaagtgcgtattaccctacgtactgtgtggtgctgagtattggattcctctgagtttgaagaatacaagtgattgtgggaggtggaagatgaagttgcctatcaatttaatggagtgttctctctttcttgtagggggtaccttggaaccttatataactgactgaagagatatnnccttatagatcattgagtgcactc

SEQ ID NO: 1147 - DNA, 586 bp, Arabidopsis thaliana landsberg
attccacaaaacacagtgtatattctcttctagagccttttaataagattttatacttcttgatatactagattatttcatcggtgaaagttagaaattttacttatttcttaccatatttattttctcaacttctggtgattatttaagttcttgaaagaactttgactatcaaaattatgatatctttttaagataccttaaactagtcattcaaggtaatatgaatttgtgcaagatttgggtaaaatgatttcgtgcaaaattagggcaaaaccatgaacagtttttacctcaattactgaaaattaatgcagatcttttaagtaaattattcgtgcaaatttagggtaaacaatattcatgatcaactcttttaacttaaaacaataatgcattaactattacaaaagcattagatctttatctttataaaaatatgaaagagaacttatctttgaataagagagatatcatcataagagatccaaaataagatgaagttggtggtgaaaattacttgcccaattgttaatatcaaatccagatgctgataattcgtgcgaaataagtgtataaatcgtac

SEQ ID NO: 1148 - DNA, 4858 bp, Arabidopsis thaliana landsberg
ctaaacttattagcagagtgacctagcattaccagaactaatatcagatattatagagaataaatagcatctcatccaaaccacatgtaacaggaaaaaatatcgctggcttctcaactaatatagagaaaactaagacgttcaatatgttaaccttagatccgattaccaataaattaataaatttaccactcgtcaattgatcttgtttcttgtaccattgacattgagaacgtacttcattaaacttatgttttatataaacaaagaccagagattaaataaatgaacaaaaactgtcacatgcacgtcaataacatgtatagttctactctaatgtacgtagtgggtagtcattaaaccagactataagacttaattaattaatgaatcaagaagtgtcaagtcgttgagattaacatcatacatccataatccattacagttgtattacttatatatataaacaaaaatttacgttagcctaaacacaccaaattaacgaactacatcacacaactcaatggatttagacatagaaaccactttgagtgtgagcgtagcaacctttcttcttcttcctatactatgggtaaaagtacagagatcgaaatggatccagccgaaatataagagaggtatgatctttaacagtactatttaaaataatatacagtttctttataaatgttattgattttcttagaattcttattggttttaaatttattttctattctaagttgtggcgatgtaatattcatgcactcttcatttgcatcttttccaattatgtctacattgctttttcttttttccaatgttttattcatctcataaaaacaaaagactagtaatttttgtttttgggcctcacagaaaactttgatttttgttctattttttgacaggagtcacgatgggattaattctccttttcgctcttgtggtattatgcacaagagcatatacggagtatgaatactacaccgatatatttcaactaggtttgtctccaacattcaaaaaatattcataaccttatttgatcggactcacaaacattctttgtgctgaaaatagctacacttctcgtttgtgtcatactcatcttgctggtaacgagagcgtgctggagagaacgaatgtacaaactaggtatatccacgccaaagttctttatctcattctctttcatttagtcatatatgatatttacatttaaatacatagtaaattagtattgcaattttttttttttttaataagagaacgtatttgcaggaataatgatactcgtagcggttatcattgtagcatttgtggcattttttgcgagagaggtatctccaaaatactcacgaggtatattatttattcttgttgagccgacgatgaaacatactactatgtgccattgagttgtataatactgaaaaaaattatcgcaactaattatagagtttattgtgtttttctttcatgatttgcgtaaatcaatagagacgatgcctcctccctctcctatggccatgtccatgatgcccatgccaggctcgtccatgcccccggaaacgctggtgaataatttgatttatggcaaaaaaattaaaataaaacaaataacatccaaagtgtgctttcttgtgttcgctgtcttatgtgtctgttatggagtttagaaagggccattgtttacgactgagatgtatacgtccatcgtttgtacgtaagtatgaattattcgtaaacaatatttttctttgttttttctattcatataaacacaatgttagaactcttagaactttttatgcaacactatgttacatatctagttatctacacgaaactgaataccgacttttctcaagaaatacaattcagacagagacagtgaataaaaataagtaaatgatgtactagctaggcggtgactggtcattgagagcttaccgcactaaactatggtttatataaacaaagaccagtaaaaataccttcatgtgcatgcacgtcaataacatgggtgtagttctaatttactgtgaagcgtattaatgattaaatgtgaagtcccgcgttgagattaaacatcatacatccatcacccattacttgtacagttctactgctatatatatacaacaattcacgttagcctttgacgacacaccaaattaatggactaaaaactcacaactcgatggatttagacatagaaactactttgagtgttaataagagaggcaagataatcacgaaaatgttgaagaatttgagaagaactcgaggaggacgtgaacctaaaaacacctctattgcacatgaaggagagtgtttacccacaattaaaatataatatatataaagaaaataaattactttaatgtttgagtgtctttaagtttaaaacatcatgtcttaaaggttttgttagataaacttttgagaagaatgtctcaaaatttaaagagacatattttgtaattaaaaaaaaaactatttattaaagacactctctaatgtgcaatggaagtgctcttgtgggtgttgttcttctatgtttattttatttcatattcttaatggaatttaaaagtatatatgtattaaatctacccaaatgggccaaataggcttttgccttacaatacatatccaattacaaaaaaaaacaaaaacggaaagatgactggacctgaaacaggctgccagcggactcagcgttcccaacttctctgctgccttgaaagattaacaaccaccgccggaagagttcggtttccgactaaagtcactttgcgctctgaaagctcatcacctcgacaaacggttctaccgtaatcggatcctaacctagtaatctgacccgctatggtatatcccatcccttgccattccagatctctctgaatgacaacgcatggagacttcaccggaccggtatacagaggttggtggcctttgaagataaaaatccatgcatgccaagaagataaagtcactacaacgtcaccaacttctgccatagacaccgcaaaggaagaaatgctgaaccttgatgaattttgaagccatccacaacgtcctctactagacccggctctaaacttctgaagtccctagaaatttcttggttcatagtttaagcacaaaagcataaactctcattcttcttcagcaagtaaaacgtaatccccaagatattttggtctaccaacctgtctttgtgttatgcttaacacaagaaccagagagacattaacactgatttttgaagtctcatgtttgtcgttgtgatcatgattctcgtgcgtcgttgattttgattctccatcatcaccagattcacctgaaatttctttatcctctagagcttcccctgtttcactatgcatctctggaatcctgtgactttcaatcgtaaccttaaaacctccattaccatcttctgttgagtcatcttattcatcttggtgggacggagtgagtattaaatagtagcgtagttcatgattggattagtttcatttggtattgtttcttatatactgagattcatacttgcaggtgcaaatctcattggctggagacaaacatatgcgagtaagttgggatacgagtgacaaatcatctccttcagttgttgaatgtggaacatagccagggaaatacccttatcttggtcaaggagaaagtacctcctacagctatattatctcatgaatcttggatcaattatgaataaagcacaattttgtatagggtattgtaatataagggcctttttagagtgcttacggaatcaagcacttctaaataatcaaaaagacggatttaaccttcttattatttgttcaggacgccgaggagcttgatttgatggtgagataagaaaccagagatgaagaaaatgattgagaggcttatgattatccagatatgaagtgatttcgttgtttgaatcgaagcttgtatttgatttgagaggtattcatggtggtcatcgatgaaggagagatgatatttgggttagatttgatttccagaaaaatcaaaaagctagtgttttatatatttgtcgatttagcaaacgacatcgctttcagctcgatcctcgaatcataaactagtgacaaatcttcgccctaatcaaaatccacaaacaaagatcgatcgatcaagtctagaattgatcccttgggttcccaacacattatccttagggtttagatttccttcataaaaacgtgttcgattgaatctactggattcacggtgttggtagcaagtcggaggcgaagatagtgaaaagttaggttgtcgtcggaatattcagtgaagaaacgatgaagaaaatatccagcgacaaaaccaactaaaggaaggaggaatggacaaaattgtcaatacttgtctcaacaagtgcccattctcataagcccaataaaaagtacccttgttctattttttggcccaataagtacctaatcctacaaaagcccccatgaatctttgttattgttattcaaaatgtgtttatcaagaatgtatcaaaaaacttgtatagtttgttttctcggatcaattatgggagaattaattgtgagaaagggatggaaaagttaaaaacttataagatcaagaacaatgcataagtgtttacgaaaacaggcactttcatcgtatgaaaagatgtttctacccttccattatcctaactcatgtgactgttgaaatatatcgctctcgacatgtgttacaaacggcaacactatgaggaactccggcgataacactgcttggatggtggtgcgaaacaaagacaataacttacaggtacaaaagaaacaac

SEQ ID NO: 1149 - DNA, 1628 bp, Arabidopsis thaliana landsberg
agaagtcaattgcactccaatgatgccatctggatctagtggtatgtttctgaactatcagcaaatttcataagcataacatatacatttcccacttgccaaatttgggcagtattaccacagtgcaaccaggcaaaaatagacatgtcgatccacatcctctataagttctgctatgacacataccacaactattatcccctaggttgcaaaaattggtaagccccaagcatatagaacatgctaatcaccaagaaccgcagctcatactttggtgttctaaattatacaaaacaaaaccattttctgcaatgtctctaaccaagtcacacagttttctttttttccagtatctctcggtcagttttagcagtgttaagatataccttagtccctagtgagctcaagagagaaggtagaaacttgagtggtctaaaaagtctttatctgtttccagcaactagacatacacaatttcaattcaaataagtcattttcagggtatggaagtcttccttaccagattctgtcatctttatcaacatcgttcagtttccgaggtaaatactaaagaatctttttcttgttccagtcttcattctgtccacataccatttgatgccttcacatttatctgaaactgaataagaaagttgagagtaaaagaagggccaacaacggtcaagtctttcttcatagtcgatttttaacccctttggagattttcttctatagtctagttttatctccttttctactttgcctggcttttccaagtaaagttcttgtgccggcacttgtttaggtcatcctacaaacataaaagaaattaattatttaatagcaaccactcaaaaattttttttttttattgaatatcttgattgtctattcgaagactaagtcctcctaacccacctaattccaaagaaatttcccattgaaaatattatcagataaacaacaaagaaaaaaagaaaccttaataatattttctttctttcaactcatataaaactatgacttagacaaacacaattcaccaattcctaatctgtcttttacctcttattctttgtcttcattttcttgttcatctccaagaaaaaaaaaaacaaacaaacagaggagatcaccatgatcaatctttctctgtctctgacaaaatcttggtccaatacaatcatatggatgctctttgtgatcccctcttgtgttttctcagttgttgatgagcaacacaaacactgcagtcctaggtttaaatgcggcaaccagtcagaactctattatcccttttggatatctgagagaaaagagtgcggtcacccagatttcgaggtcaactgcagcggagattttgcagagcttactgtatccacagttaagttccaaatccttgagatgaactatgagtttggaatcataagactagccagaatggattatcgcaacaatctttgtcctcagcatcctgcgaatgcatctatcaaccatgatgtccttccattttctcctgataccaagctgtcaactttttatcacgactgccaatcaacggtagatgtacatcccaatgattacattaaacagcttaactgtaggattatctggtgggaaaagtacta

SEQ ID NO: 1150 - DNA, 636 bp, Arabidopsis thaliana landsberg
  unsure (1)..(636): unsure at all n locations
ttcagtgtcctactaattgactataagatgatagcttatagatcttttttccacggagactctagtgttgaggagaaaacggtttcagaaggaaatgaggtatttatctcgaccatctgaatagtacaaatcgttagccatctaatgtggtgtatatcatctttgtgttaatgtaggagctcgatcgtatggaaataaggataagaatgaggtacgacgaaaacaggaggcgcgataagggtgttccgatcgagtgtgattgcaatgctaaaattgccttaacgttagttaatctacgataagtccgccttaacgttagaataactcagccatcacacacgaataactcaaagaaacatcaatttaatctacgataagtccgccttaacgttagaataactcagccatcacacacgaataattcaaccaaacatcaagttaatctactataatctgaaagagagacagattatatataaatcacacatgcgaatagaaaaaaaaaattgaagatntaactttgataacataggagtattgcaattcaataacataaaataaaatacanataacttcaataacatanaataaaatacanataacatggagatgtaatttgtatgacgatcaatcaca

SEQ ID NO: 1151 - DNA, 618 bp, Arabidopsis thaliana landsberg
ttttttggataggatgcttacattctttctatgttcttcactcttgagatgcgtggagaaattttcaaagccttggacaacaactatgcattgcgcacaaggaaaggcagtttcacacgtttcactacacttgtcctcttctagtgcctccgaacccatagcatctgcccgtaagcttgccagtaagctttcccagaataagtacggccctgggaagtggaagcggacgcgcgttgctgaggatcatctggaaatattgaccgaacgacgttgtatccgaatccacatagcttgtcaagaagactcgagaagattaactcatttgatatgagcattatattagacggaggtagattgtcccaagtccaataaatgacagccgaactaagttcaaagatatctgtttcagaaacttcaagaattaaaagataaactctcaaaaaactgtagtccagagagttgaatgaaccatttaagcctgggaaaaaaaaacgaaaccgattaccagaatcggaatcaaccgaaaaattagcccgaaattgacccaaaaatttacctattgggtcttaaatcctctacccgaaaccgaaccaaaatttgtcaaaagtaaaaatgatt

SEQ ID NO: 1152 - DNA, 1635 bp, Arabidopsis thaliana landsberg
ggtattgtacttgtacttgtacttaactttttcattcacaagaatcaaaattgtcattaaaacattgcagtgatctctttgaaatgtggttttgattccttttttcgcagtgaacaagaacgatatagagtcatcgaagctcgctttcgtttcatcagctggtgcatttgagaaatggactactttgacaggtcttttggaacagcttaagggactgtgataggctggctacaaattctttactctttttttgtattttccaacagatttgtcaaagagggtcttttttttctccaaataatcctttgaataatcatcattcactttcttaacttctttggttattatttacctttatacattttgtttatacttactatgcatcaatatcaacaaggttgatttttccatcgaattccaccacaccaaaaggaaccaagaaaccataccaaaacttctttggttatttatctgaaactaattcaaaaagatctgatcagtaaacctttgttctattgaatctcacattaagagaaacccttttaacttgagaaggcatacagatatagagcatcacaaaatccccgaaacaaaaccgaaccagtcataaccaagaagggggaaagctactagatgaagctagtaggtggaagtttgagtcatttggcctattactacgcactagttatgatcttttctctgatacattgaatactttattaaaaaccattacataaccaatgtaaaaacaaatatttaaacgttaaacagtccaattcagctttgaaaaatcctcccagaagaagaagactagtcaatattggttgcgatggccttgtagaggcattattatctgttagataatattactataaacagtgagggataaagcagaaatgcttctgtataaatactatcactacttttgatcaaaacaaaaaataccatcactattttacttgtgtgttatttcatcaccttcaccttcaacatcaaacatcacatctctttctcttttatctctttttctcggtcttcaaagagtttcttagttaccaaatcaatggcaggtatcaaagttttcggacacccagcttccacttccaccaggagagtcctcatcgccctccatgagaaaaacctcgactttgagctcgttcatgttgaactcaaagacggtgagcacaagaaggagcctttcctctcccgcaacgtaagtatatttatctatctatgtgttgttttgtaagacaagagaccaaacttttttgatgtacgtaactgatcggaatcttaaatgttttttgtgtttgaacttctttcctatcttcagccttttggtcaagttccagcctttgaagatggagacctcaagctcttcgaatcaagagcgattactcagtacatagctcaccgatacgaaaaccaaggaaccaaccttctcccagctgactccaagaacatagctcagtatgcaatcatgtccattggaatacaagtagaagctcatcagttcgatcccgtggcttcaaagcttgcttgggaacaagtattcaagctcaactatggcttgaacacagaccaagccgttgttgcagaagaagaagctaagttagccaaggtccttgatgtcta

SEQ ID NO: 1153 - DNA, 478 bp, Arabidopsis thaliana landsberg
  unsure (1)..(478): unsure at all n locations
acttatgcacaattgaagattacaaagtcgttttcccacaccgttgggaaattagggtttagaactgtatatagaggaannnnnnnnnnnnnnnnnnnnnnnnnnntaaaggtcttgaaggatttgaagggaaacagtgacgatttcatcaacaaagtcaccagcatgagccaaacatctcatgtaaacattgtttctctgctaggtttttgttatgaagggtccaaaagagcgattatatcagattttttggagcatgggtctttggatcagttaatgtctagaaataaatcattgactccggacgtgacaacactatatggaatcgcgctaggagtatatgcactatggctgcaaaacaagaattgtgcactatggcgacaaaccttattctacagcaaaatttggtccgccagctttgaaagtagaataaggttcgtttcctaaattttatgaacaattgatctatcttacaaat

SEQ ID NO: 1154 - DNA, 980 bp, Arabidopsis thaliana landsberg
aaaaaaacagaattgctcaaccaaattgaaccaacccattaccccaaccccaaatccacttcattgacaaagcccttcactaaaccggggaaaagttgcacatacatattgacagaatgagtcaaaatatggaattggagtcaatataattcaccattaaatgtgtattaattattgagaaaaatcttattttgtagttcacatcaacataacacatgctttgatatttgcttcatatgtaaacagaaatcttcttaaatcagatcataaaaccgatcaatcaattacactattcacataacaaattttgagtaaacctaccggttaaattaagtttcttttggtacataactcatcacactaccttaatccttcttctaatctcagcaacacttctcaattccaaaaccctaatccttcgtattcaattaacacagcatttacatgagattgccaagacattaaaaaaggaggctctctatggattctgtagcacgagttatcgtaaccttcattcactgcctccgtcgcagcttcttctctccggttcgttcgtcaagatttgcaccgcacattcactaatctcgtagttgtccaatggattgtaggcgctgattttgaatacaaaacacaatgcatcgcagctaacttcagtcaagacaccattaaaaaaacacagatgtttcgttcgaatcccggtagaatggttagggtgttctaaagatacaactttactgccaacaaaccgtccccttccgtctgtgacacgacaccgtatctttacacgtctttggtttctttcgcattggagctgcctaggcgaaatcaagacgcaagccttaaacgcgaaagatgcagaagatttaacaagaattttcaaggaatttcctctggctctgtgattaaactcactaggcattacacttccagggaagcatgcgtgcttcacaagagaccgttggataattactctctgtgct

SEQ ID NO: 1155 - DNA, 652 bp, Arabidopsis thaliana landsberg
  unsure (1)..(652): unsure at all n locations
cttgatcctaccttgtagaaagctcttttaatatgaatctaacgccgctgagaattcaccaaacggaagtcggaaacgatcggaatctgattggtaaatattttgattttgttgatttatagtcaaatcgggatttatttaagccggttcttaaggttttgaaaccggttatagaatttatgtctatggaaaatactcgtttgaaatctattttggaattcatttgagttttgattttaaacccatagcaattctgaccggttcggctctttttaaaccggttttggcaaatcagatacttgttcttgatttcgcttaaaattaacggttgaatttagataaattgtttggtggtttggaatgtgtccaaaattactgttgatcactcgttcgatctgaatatctttgtcaggtgagttctaactcccttttagatattgtacaattgtataatattttaaaagtgagaaaattaattaattaaactagttgcatgataagttgtaaagattgatttggttatctagataaactaatatgaatatgnatcttggtaataagatatgttattttgtttaagaataaaatatgatattctggtaaaactggtnattagaataatatggtagatgtgagtttaaacacttaatta

SEQ ID NO: 1156 - DNA, 631 bp, Arabidopsis thaliana landsberg
attgtcaggcaatgtgaatgtatgcataacatttataattataagagatggattgctcggaaaattagattttaatttggattcaatcttagctttactgaataaactaatctgaattgcgttttttttcaatctaaaatttactataatctcaacaattttggtattttttgatcaaacttatccttatgcattatcgcaaatatggtagttattattgttcgaatacaattattgatctgtcaaaataatcatattactatttgttcttaaaaaaaagtcattcaaatttaaaagaaaaaatatttttggtgtgaatcaatattttctcattttgaatatttgcattaaaaattttaaacattggtattttaaactctgttttattgtttaaaaaaaaaatcaaatctagaagaatgaatattctaaaagcttgtatctattataatacgtttaaaaatatattttctttcatataattcaaatttagcttagcgatatatttttaaaataatgaaaattacatgtttaaaaaaatcctttaaaagtttatatcatttaaattctattaaaatggtaaatatttgaatctatactgataatatcttctagatttttacaaatctaaaat

SEQ ID NO: 1157 - DNA, 609 bp, Arabidopsis thaliana landsberg
cctgggaacaaacccttcgtcttcttcacgactcatctcttcgtctctcatctataagaattcttttacagcgtcttggtgttttccttcgttatccgcttttttagcctcttagtctctggtgaaagcatatcggtggctagatcattaatcggtgaatttagggcgaacttgatttagactgaagacgacaaaggattgatggagatgcatcattcaatcgatgaaacgatgttagggtttccgcttccgatcaatctaactcttacggatgttgcagagatcatcatcggcttctacttcactcttggatcatcatcatcatcatcatcggaactcacagagtctctgtataaagacataatttcctcgaagaagaagcgagaaatagagaggtttgatttctctcacaaggaaagaattacaagaagcgagagagagtatctatttataagcaaagagggttcaaaagaaaaaagaaatttgctaaatcacaattaacggtcacataaagatttcctttttttgctgtatgagtttagacctgttcacacacaacctctctgttggctaaatgtttgggagttgatcaacagcccagctactagt

SEQ ID NO: 1158 - DNA, 2918 bp, Arabidopsis thaliana landsberg
ttttcttctctcatccattttgcttccgcagtacttcctagagctaatgaaggttccaggagtagaatcgaagctgagagtgttttccttcaagattcaattcggtactcaggtctggtggtatttacctataacgttttggtttttgtcagtgtctaagtaactgtagattcttgatctcctttttttatgatgattactttgcagataaaagaacttaataaaggtttaaatgccgtaaattctgcatgtgaggaggtaagatatttgcaatacttaaaactcaataatttacgcagcccatttgcgtttatctttcttagacattttctccttattgcttgtttatcagatacgtacttcacaaaagctaaaagagattatgaaaattattctctgcctggggaacatattgaaccaaggaactgccaggggtgagtattataattattttcttacccaaatattttttttctgtagcttaagacataacacaataaaatttctctgttcaatgtgggctaagttcaagaatggcgcctttgtttcattacatcataaatacttgttttgtatgaacgcaaatcctttgtggttgataaagaccctttgctctgctttctgcaggcagtgcagtgggattcaagttggacagtttattgaatttaagcgaaaaatgttctgctaacaccaacatgactctcatgcattatctttgcaaggtaaatttcaatcaaaagaagtagaatctatttatactgaaacccctcatctttctttttctcaggtccttgcttccaaggcatcagatctactggacttccataaggatcttgaaaatctcgaatcagcttcaaaggtttgcatttgtacgtactttttatccgttcttagctgtaattggctcatcatttgattgtcctgttgattcagatacatttgaagtcgttggctgaggaaatggtagctataaccaaaggactccaaaaactgaaccaggagcttaccgcatccgaaagtgacggtcctatttctgaagttttccgtaaagtatgttgttgtttttcaatcttatccatcttttatcaatcatgaatttgagattaggtctatcactttgccacattactaaatctgcttccatcattttgtaaaatcaatgacagctagaaatagttcttcagctaagtgtgttttttcctacataacttcttccggacgctaaaatctagttttatgttcttcgacagttattgaaggacttcatatccgttgctgaaactcaagtagctactgtatcgagtctttactcctcagtggtaattgttgtcaacctctgctagattccaagttccttacatttaaaaatgtgtttgctcctgacattaattacacccgtgtgagaatcctatgaaggtggaccacagggaggaaacactgatgcacttggacactattttggcgaggatccgaacgattatccatttgaacaacgtatggcgtaaaatatataaacttcaatcttcttaggaaatacatagaaagaaaaaaaattccctatttgttatttaagttggaattgttttgtagctaacaataattacttgatggattgctgcagttactatgactctctttaactttataaagttgtttaagaaagcacacgaagagaatgttaaacaagctgacttggagaagaagaaagccatgaagcaggtgaaaggagtctctgtctcacaagaaaagtggttcaatatataatagatgacccataaactttaaatatttcactctgtttgatggacggtttttctactgggttccagattgaccttaggagagccaatgacacggaaattatgcttactaaagtaaacattccgctggctgatatgatggtaattaagctcctaaacctactttactggttgatgttttatagttttaatgataattgttcacattattctttgcatcatccaggctgcagtactaggaatggatgagtctgtactagatgttgatcaaatagagaatcttataaggttttgcccaacaaaggaggagatggagcttcttaaggttacctcttgcctttttgagtagcattatctacttcttaaggttgttacttgacacgagtccttattcttggtcgtaattgactggtttgttgtagaactatactggtgacaaggcaaccttgggaaagtgtgagcaggtctgtttttaagtcttatcacactctttttattccccactatgatatagttgtaacaaattgcttagttagctaaagctaaagctccactgaaagagcatttccgggtgattaatgcgtttccttcactcacaccgcagtacttcctagaggtaatgaaggtgccaggagtagaatcaaagctgagagcattttccttcaagattcaatttggcactcaggtctggtggtattattacctataatgttattttctgtctatctggttctttggagaaaatatttttggtttcatcagtaactgtagattcttgatccctttttttataatgatgattactttgcagatagcagaactcaataaaggtttaaatgcggttaattctgcatgtgaggaggtaagatattttcaataattatctctaaagttttaatttgtgcagtccatctttcttagactttttctcttcattaatttcttttgttcatcaggtccgtacttcagaaaagctaaaagagattatggcaaatatcctctgcatggggaacatattgaaccaaggaactgcggagggtgagtattacattatcttttggctttaagatatctcctaacgcaacacaataacattcgtgtgttcaatgtgagctaagttaacgaaaggaatggcgcctttgttaaatcgtgcatatg

SEQ ID NO: 1159 - DNA, 407 bp, Arabidopsis thaliana landsberg
atctcttcgaaaattgcaaacctaaacgaagaggtagccgtagcagcccttcgtaacggcctttggttctcctctaggttccgtgaggaactcattgttaggcaaccagtctctttagacgatgcccttcacaaagctctccacttcgccaaagcggaacgcaggggcagcataccttattttcaatagacaaggcaactgaggacgagagtctataagttgatctcggataatattgcaagtaccacaagataagggtacattccaccgaggagtgtcgcgccgataaaaagttaatcgcagctggggggaaagactataaaaggttcataccccaaagttgaaacccctccttccgacgaacaggaggaggagcaaactctcaagctaaaaaaatgggtttgaac

SEQ ID NO: 1160 - DNA, 1749 bp, Arabidopsis thaliana landsberg
  unsure (1)..(1749): unsure at all n locations
aaacataactttcgaattgtcatttaaatcacaagtttcgtttgacttttaaaaaaaattgtcaagtttcgttgacttggtcattttgggcacgtcgttaaattttcgttaacggggttaaccttctgttaaaaatttctgttaaatcgaaacgacgtcgttttgaaacatcgttttggaatgttagaaaataatgatgctaaatccgcattcacatgaaatcgaacatctgacctattagactcctaaaggataatctaccgctgagctacgagaacagtttgataaaaaaaacaaacatagcctatatatactaacaaataaaactacacaatcacttgaaaatatatacaataaattataaattacaaaactacaaaaaaacaaatatatacaaagtttttaaatatacctaccatacatatatattttgaaatttgaaatattaattttttatatagatgttttttatatttgagaaattgtttttagttttcaatttttttgtattccaaatatagaaaatacaatagaaaagacttatgcaaattattttcaattttcagtttttcagtttttatctattccaaaaatacaattgcaaagacttatgtgaattctagagagatctataatttttcaaatatagaagatgtctttatatatataattaaatatttgaaatttaaaatatattaaggtaagtttatttaatatttttagtttttttaattttgttatttttaatttattgcatatatttttgattaatagtatattatatttgttagtatatgtatggaatgtttgttattattggaaattattgtcgtagtttagcggtatattgccccatatgagtccagtaggtcatatgttcgagtctttgtggacgccaatcttgcatcattattttctaatgaaataacgtcgttttggagctttaaaaatgacgtcatttcgatttaacagaagattaactctgttaatctgaatttaacgacgtgcccaaaatggtcaagtcaacgatacttaaacaatttttattagtaaaaaacaaacgaaactttgtgatttaaataatatttcgaaagttcttgcattttcgtcccaaatttgaaagttcacgatttgttctgacattttcccttttcaaataggatcaatttatcttaattaagtactcctgtattttgagctaagacgtaaaatcaattcttaaagtgaaaattttgtattgttaatcttagagttttctgcaaaacaatctttcaagtcgatctcgtttgcaaatttatcctccaagtccgaaatatgcaagtcaatcccacaatctcaaaagtcacccgcaatacagccctcccgtgtaccgatgacgtggacctcaattactcttttgggttttgtgcaaaaaaaccctcaatttaatttttttttgcaagacaaacctccatgtcaaataaatacaggtcaaaccacaatctgaaaaatctcctgcaacatagcccttccgtgtatcgatgacgtgacagtcgataattcattactttaatgcatataatttataagtctatcgaatatattactttaatgcatataatttaatagagttattgatttaagttttaaataaaataaaattgaaccgatagccanacaatcgaccgaaatatccagaaacttagtagatatcaaaattaatactgggtacgagctcgaatcgtatcatggtcaagctgttcctgtgtg

SEQ ID NO: 1161 - DNA, 2206 bp, Arabidopsis thaliana landsberg
cgttaatagtcaagattgtgaatttcaatgggtaaagtcatcctacgttcacagtctcacagataaatttataacacatttaataatagattttttagaaatttgcaaaattaagggatagatttggcacaaactcattaacgtcacacaaaatatgtaaaaaaattaaaaggacgaggcagaaaaagatcatgttgttttctaacgtcgatacaaaaaactctgatcaagttctctttagatgtttttgtttattaaaaaaagaatgccaaaagagtcgacgcatagagtaatgacatcattgtggatgctgaaaacgtcatggtatgcataaagacacacttccgagagtgatagacagcttatcctatatatgctcctaaaatagactttctaatagcacagaattttatcaatataaggggaaagaaagaaatagcgactcaatgaatctagccctaaaagcaatttataaactctgttaactaagtggtttcttggaggtttctggggtatatagaagacaaaagtaactctttcttttttggtttttaataactcacaacaacaaaaacaaaacaaaaaaccttttcatgataaaaaggtaacatgtgtttggtttctctcatacatttgtttctaatctcagacataaataatttttgttcccgacttcaaaaccaacgatgattatatcattccacattcattttcttctacttcttccttctccttgatctcatttccctagaaaatccatctatcatgtaagttcctttgagattctctgctcttacttgcaagttttatcttgacatgtttgatgattaaggatttggtttgagattaggggtgaagatgatatagtggagctcttatggaagagtggccaagtcgttagaaccagtcaaacacagagaccctcctccaatacaccaccatctcttcctccaccacccattcttcgtggtagcggaagcggcaacggagaagaaaatgccccgcttccacttccacagccttcacctcccctccatcatcagaatcttttcattctggaagacgaaatgtcttcttggcttcaccattctcaccccggcgttacgtccaccccggcttcttctgtctccctgccaccaccacccaatgctccgtacagctccggttttttttttcctcttttaattctcttactttatgcaatttgatgagtctgatgctagggtttggatttggtttgaaattaggcgtgaagatgatatagtggagcttttatggcaaagcggccaagtagttggaaccaaccaaacacatagacaatcctacgatcctcctcccattctccgcggcagcggaagtggcagaggagaagaaaatgctcccctttcacaacctccgcctcacctgcatcagcaaaatctcttcattcaagaaggcgaaatgtattcgtggctacaccattcttaccgccaaaactatttctgctcagaacttctcaactccactccggctactcacccgcaaagttccatctctctggcaccacgtcagactatcgccacgagaagggcggaaaactttatgaacttctcgtggctaagagggaacatatttaccggcggtagagttgatgaagctggaccgtcgttttcggtggtaagagaatcgatgcaggtaggctcgaacacgacccccccttcttcttctgccactgaatcatgtgtaataccagctacagagggcaccgcgagtcgagtgtcgggaactttggcagctcatgatcttggtcggaagggaaaggcggtggcggttgaggcggccggaacaccatcttcaggagtgtgcaaggccgaaacagagccggttcagatacaaccagcaacggagtcgaagctaaaagcgagagaagaaacccatgtgagttagtactcccataggttaacctaagcacccatgtcggcgggtgttactcactttaccggtgcattttatcagtcaaggcttatttttttttctttgtttcgtggtgtacagggaactgaagaagctcgtggttcaacgtctagaaagagatcacgaactgcagaaatgcataacctcgccgaaagggtttttatatttccattggagtttcaacaatggactctctgtttcatttcctttaaaccgtacctttgtttgtaaaacttgtttttgtttaacaata

SEQ ID NO: 1162 - DNA, 2522 bp, Arabidopsis thaliana landsberg
gaacgagcgcttcgattgtttcacggcgtttcttgcccctccagctcagaatcttcagatcaccgaccccaattcttcatcgacatgcacactagcaaacctacaataagggaggtttatgagaggaagaggcttgccgcaaaggagaagcgtgtcgcgaaagagaaacatgctgccgagagtgtgaatgtcgatcccgatacagccagggattgggaagttactcttgaggttgttttgcctgctgcgttggagcctgctgaggtgggtgataccggcttatctctgacagatccgccggttgaagtagctagtcaagcgatcgtcgcgattccgaccggcgacaaggcctcgggaaaacgtccacaggttgacgactccaaggagaagaaaaggaagaagaagaagaagaagaagaagacagcgaaaagggaggacaagcctcctatttttgaggataaggctgcttcggcgaatctcctcagaaagtgcgcgagtagcctacttccggcttcagatactctactggagtctagaaagtacgctgagacggcgtcacattttctaagggtaagtgccttaatcattttagctacttggcgcgttctctgagctattatgaacgtggatgtctgtctttttgtttcaggccgttggttagatgaatgggatggtccagtcctataactcggcaatgcaaaacaatctggaggcggttaataagttggttgaagctgaggccagggcgaaagaggtcgagcaggcgagtgacgtggtgatctcccaggccatcgagggaaaattggcgagagaagaggctgagaaagaagccttggtcaataaggagaatgccatcaagatggtcgagcgcgacctgaagatggactctgaggttgttcgttgtaggcgacttctcgccgaggcgagaggacttaggaacatgaaagtggctcgggctatgcaaacagcaaggcgagaacttcggaggccttcaccgccaagttcagggtggccgaggagaagatgtcgctcttcgaggatgctaacgaccagtttatgtatttgtcccaagcgtgggctaatccacaactgatcaaggcgcttgaagatggcagatctttggcgaccgagaaaaaacaggtcgaggagtggctgaaggatttcgccgatgcagaggtcaaccttgttcgtctcacatctgaactgaaggaagagctcaaagcccctgctcctgaaccagctcctctaagccctcgaggtaatagatcgatcgagactcttgcggattaggtggaggtcaccgatcagtctggattgtacttgcctgccgtaggcattctcctgatcgaacagcttgagtaaatattcgtggtaggacggcttttatcttaagactttgtgcctggacggttttatccatatttctatagaacctatgcctggatggctttatccacttatttttctttaagaacttggtttcgctcctatgaccctgatgcattctatttgtttgttgtaatctaatcgtgtcgttctttcggagaattgcttgctaattccgtagcgctttattggttagggccagtgtgaatgaactgggtttaagtttttagtgaaaattgtttcggttgcgactcgatccgactcactctttggtagcgtttagcaacgagctagggtaccggtgttaagatttaatcgggttttctaaagatagaacaagattttgcgcgaagtatttccggcaagttctaactcgaatatttatatagcgcgctgtaactgaatggacgtaaaagatactcctagctgtcgctcgttgtagtatgaaaatatgagaagtagaactattatttatgccgaagtaaaaacttacaagataaataaaagtgggagtatggatatacagacccattcctcttttttaatggggggggatcaagccacctcgtagttcaagtttatgcttctcagatttagttgtagtaccttctaaggtgcatggcattccaggatctaagaatggctttgccgcttaaatcggcgagtttgtagacaccgggtcagacaactttagagattaagtacagtccttcccagtttgccccaagcttcccagcgtttggctcggcagtattttgaaatactttgcggagaacccgatctccttcatgaaatttccgttgccggacatttgaattgtagtatcgagccgtttcattctggtaattttgtattcgcactagagccgaatctatccgttcatcgatcagatctaactcgtcaagcatacgctgattgtcgtgttgtccttacggtaaaagcctgaggcgaaataaaacacacatcagtcgccatgtggccgaccaaactttccgtaaccctgaccatgaatgtagaaaacacatttgtctggctaaggctcatgctctatagtctctgcttctacagcaaagtggacatgcttcttccgtgtaagtaggttgtggactgaattgacttagtattcagttcatcca

SEQ ID NO: 1163 - DNA, 937 bp, Arabidopsis thaliana landsberg
cacgcttcgacttagcttattttcgagttcgtgcccgagcctcctttttcggcccgtgcgccatggcgaacccctcgttttcagcccagacgcaaggccgaacggcctgccgcccgtcgtcgcgtgcctccgtgtcgttttccctccgttccaccgtgcccttcacccataacttacacattagcttcggtgtctttctacacgcttggacttagcttatttccgaggccgtggcgaaccgttgttttcggcccgcgcgccatggcgaacgccttgttttcagcccaaacgcaaggccgaacagccatgccgcccgtcgccgcgcgcctccgtgcccgagcctccgttcgtcgcgtgcctccgtgtcgttttcctaaaccctcagtgcacttcaccaaagacatgcgctctaggttcggtgtcttttcacacgcttggacttagcttattttcgcggccgtgcccgggcctcagttttcggcccgtgcgccatgggcaacccctcattttcggtccagacgcaaggccgaacagccatgccgcccgtcgccttgcgcctccgtgccgttttccctccgttccgccatgccgttcacccaagacataaatattaccttcggtgtctttccacacgcttggacttagcttatttccggggccatgcccgaacctcggttttcggcccgtgcgccatgggcgaacccctcgttttcggcccaaacgcaaggccgaacagccatgtcgccccgtcgccatcctgcccttcacccaaggcatacgtagcagcttcggtgtctttccacacgctgggacttggcttttttttggtcgtgcacgaacccacggcggtcttcggcctcttcccacgctgcgccttggccgtttccgttcggaagaccaggtgcccctctcccgtgggttcgaaacctagtcgcta

SEQ ID NO: 1164 - DNA, 1605 bp, Arabidopsis thaliana landsberg
atgacgagggtagactatcctgtcttgatcagtgtgtatggttcatctcactgggccagaaagctgctattttctccatactaaaagtaagttatgcacctctgtactttggaatctgtccttctcgcttggatgcatttcgcatgtgggttccttgcctagtaggagtctctttaagctatatagtatatatgtctatatcttaagattatgctacgttttatcattcagaggattatttgatgagatctcacattcagtttgaatcacagttcttgaatgacagtggctgttaatttcaagtgttgatttggttaaatttgtggttctatatggtttagtcctaccttatgttgcaatcatattatgtacatatgttggttgtctactacgtctctgggtttctgttgtgaattgtttttgggcctggtataaggccctgtcgattgtttaacggatctggtttagtgttttgcagcctgtcttggtttctgtgctgtttttagggtttcccttgatgcgctcgtgccttttaaacctagcagctctcacagaaggctcattctccttctctgcttctcaaacctcaaaattcaaagggtttctttctctaaaaacacaagtcaccatgaatcaagaagcgacctcgttgactggagtctctagtgctggtcagccttcctctgcgactccttcagaccctccaccgcctccggttgctccaatgttcattcccaagactgaaccaggcatctgcatgtctaagaaaacaaagtccaaggtctctgctccgactcagcgcaagagacagtgtacggctgcatctgccaagtccagatctaaagcgcctgctcctgctctccgacgtctgtcaagaaggaaatccaaccgatatgcctctgctgcaggacaaactgaagatcttgtccgtgactcttcagatctgcaagatggtgatgtcactgagattctccgcctctgtttctgtctcgttaccgagagaaccgtcggcttcttgctgttcgtgatcgttagtatccggagctcaaattcccatcggagactccctacagtagctgtttttttactgaggaaggtcttgggcgctacaaggtcatcgggaatcgctgcttcaacgacatgcgtttccttcctctggatggaaacaacactgcgagtactcaacaacttctcttcaatgctggtctgcttcctactttcaccgaaattgactcttatgtgcatgaggttgtcatggagttctatgcaaaccttcccgatggtgaagaagcttccaaatccttcctatccgctggatggtgtgtctgagattcaagttcctgagtccatggatgaagttgcgattgctctgtcaaacggcaaagccaactcctggaagatgctcacttctcggctgttatctcctgagctagctctgctcaacaagatctgctgtcacaattggagtcccactgtgaaccactctgttctgaagccggagaggatgactctgctttacatggtggccaaagctctaccgttcaacttcgggaaactcatctttgatgaaatctgggcgtgttcgaatgcagttgctgaacctcc

SEQ ID NO: 1165 - DNA, 1532 bp, Arabidopsis thaliana landsberg
agagattaagtttgggggagttgataacactgtattttactcattttaggcatgtatttatcatcatttagcttagagatcactcattgtttcatatcatttggcatacatttaacttattttgcacacttaggcatttaggatcatgttgcatacatattgcatgtttggtgtgttttcaggtgcagaaggaacttacaaggaactcactcgaccctctactctatcaaagcaggagggaagcagcagagcatatcactcgaccacttactcgttacaggcagctacagaggaggcagtacacattacttgaccctctactcgatcccctactcgactagttactcgatcaagggcaacccattctacaagacttgctgatcgttcaaagcgtcttcggatcctcctcattccccactcaaccagacatcttagcatatagataggagaggaagaagcatctactcgaccaattgatcactcggagcatagacataaaggagcaaactttgcagcaccctctttactcgatccccaagatcgagcactagcccaaaccgcctcaagtttcttgtcttctagtgaatctaggattttcaatatttttgtataaatagatcactttggtatttttccaaaggatctagcttttatcctttagtttttctttgtgttcttgaatcttcaaaacttaagtactcttaatctatttcgtttttgcatttagttctttgagtaaagttgtttagcttgtttagatctacattttggtatgatttcagtaatttctgggtttgtgttcttagttatgttgcttgagtagtgattagggttctacattcagaaccaaggagggttcatcaagggctacaacaattacaatcccaacccaaacctctgctacaaaagcactaatatagctaacccccaagatcaaatgtatccaccacaacagaatcagtctaagccttttgttcagtacaaccaaggttatgtccctaaacaacagtttaatggaggctaccgatagcaaaatccaccaccagggttcactcaacaaccacaacaagcaccagcagctcaagatcctgaaattaagatacttattcaatagatcattcaaggataagctactggagctatggcttttgaaaagaatatagctgaattacacaacaagatcgattgttcttacaacgatctaaatgtcaagttcaaagctctgaattccaaagtcaagtatgtggagagtcaatttgcatcaacctctgctccgaagcatcctcagcaacttccagggaaagtagttcagaatcctaaggactatgctactgcaaatgctatcaacatccaccaagaagatgagtctccaccaagtcatcagactcccactactgaggacaatatgattcaagaagggggggattcaactcaaattgatgcacctgtcatccaacaattcatctgagactatagagcacacacctttactgaatactcatcactctgaaaagcatttcaaaagagaaaaa

SEQ ID NO: 1166 - DNA, 1626 bp, Arabidopsis thaliana landsberg
acttggtggttcgataccaatgctactaggcacatatgcctccgccacatcaaagattgaaggttacggttatgttatcttaaagctcacctctgtacgtgagctgattctaaccaacgtggttcatgtgcctgacatgcgcaagaacttggtctctggttctctcctgagcaagcatggcttcgctggcaagattgatgcagataagctagtgatcacgaaaaagggaatgtatcttggaaatggctttgtttgtgatggtctttttaactagatggaatgtatcatggaaaaggctttgttgaatctgttattcgcaactagatgtaaccaaggctttgaccttgaagaagaataagactaagttgtaacctttgttccaattaataaaaatttagtgctttttcttttattggatttgagtctttcatagttgacatcactacaggaaaagcgggtattaatagcagttgaagatagcgtttttgtagtatatgctatagttttgttttgaccattttttttatagcgtttgtttaaaacaaacgctattttatgttgagcggcaaaatgtagtttgtctcccgcttcaatattttgtttatcgatagcatatgcataatttaaatgctatcaaattgtgaatcgcgaaacaaatttttgttgacccgcaaaattaaaattgactaaacctgattaaaagaaaaaaaacattttacccagaaaaatcccctttctctcgactcacgactgttcgactttggttctcacgacatctcgtttctcaaatcctcaatctcgttctcttgctcctaattagacgctaatttattcattctatgtgcaaatcgttgcctcgttcctttaatttttgttttgatctctctatcaatcgatctctgtgaatgcttagtagatccaaatctttttaatcgccatcgtcttcatcggtctaaatcgaagttgtctggtcgaatttgggttataaggtaatattagggttttgatttcagatttgggaattaggtttaattgttttgatttcgataatcgatttctaatttctcaatatgatttgatatggttttgcagttcagtttagggagtaaccgacaggtatgtgagattttggatttaatcgaaccaactacattaaagtgttgggttttaattttaaggtagtgatgatattgatattgttttgcagacggttttcaaagctgcaaggttttgttgttggcgactgttttactctgtaagctgttattttcatagtaatttgtttattccaagtatgtgttgatttgaatgaaatttagctgagtgtattattgtttgaatttatcattacaaaatctataattggtggtggagttgttgtcctattgtcgtgatatggacaagggatgggtgtggcttccaaggtatgagtcttgttgatactgagtcttgtttgattcattgattttaataacataaactaagtcgaaatatagtgatatgaactctttattgtctgatgaaacatatagggcaagccaagagtatgtggaaggagcaacaaattttgttattgttgcatcaaggagattgggaaatccatctgaacttttttgtccctcttta

SEQ ID NO: 1167 - DNA, 575 bp, Arabidopsis thaliana landsberg
acaatgattgataaggaaaacgaatttgatagatatcaagagttggggattgccaatatttcttacctttttcatagtaaagttccctcttgtgatgagtggtatatatttgagctcaacaaaaagaagtcaagaacaaatggtagcggtaaaaacttgcagaccaagctattccaacatcaataattgttgctctatagtgtaggccattggaacatcaaacttctcatatcttctgaaatttggagttacgtttatgcaaaaaaacaaatgagttgtgaaatattttcaagagtaacgatatacctctactatgatcaatcctaatcatcggggagactaactattcatgctaaaaggtcgttgatgcattcccttcttttacggtctgtttaagaacttttgaaaaaaagaaggaataagtagcaaaattagtctccatgattctaagagatcaagaaagattctaagtttgctaagagggtgactgcaaaattgatcggaaaaaatcttgagaccaaaaaaataaatttcgtaccttgtctcataactatagcagccatcacacattggat

SEQ ID NO: 1168 - DNA, 572 bp, Arabidopsis thaliana landsberg
  unsure (1)..(572): unsure at all n locations
agcaaatcangccggatttatgttattgcactgaatccgcgaattgtctgtttgatttgcttacattgcaagggtagtttttggaatgagtttgttatgtttgatacatagaaaaagaggcgtaagtaggttccttgggtgattttatttcctttggctaaaagtgtcgaatttttatatgctttacatgttttcttgctatattttgtccacttttgattccaagaggaagaatttttatatgctttacgtgtttatgtttgatagatttgcaaagaggaagttggatgaatcaagttttttgggaaatcggctccaaatttcatatgctcctgaatacgaaaatgtaaatgacacaaaggataagttagaatctacaaggaaagaagtgcttgcaagactgaaccgtaagctttctatttacgcttcagctagttttatgatacatcaagaaagattatcaatgaagaaattggaaagacattgtgtcttctgtagaagatgaatcaaaacattataacctattgacgtatatgtgatatatctttatccctttatcttaacgtacttat

SEQ ID NO: 1169 - DNA, 542 bp, Arabidopsis thaliana landsberg
tgaagagagagagcgaagttgttttccactgacagtctctttgattgttaatctgcttgtctcgaggaaacggggttcaatgtttcctcttattttttttggtactaatatctaattaacctaataattactcacataagataaggatattcataagccttaagaccattttcattggtgactttttaaagatgtctttactatagtttataataaaaattaacattattttaattttgagttatttattagtcaagtatgatgtgtttaaaagtaagaaaatatctatctttgcagagacatgaaagacactgggttttccttctaaaaacactaagggtccgattggtgaccactttttaggaaaggaatgcgtaaaaacatgttgttccttttttttttcaccattcaacagtaattctttttttaaattgtaacatgtggaccccatattattcctaatcattccctcgagaaaaaaattgtttcttcccaaatttgatgaggaacagaatagaccataaattagatctttattaatt

SEQ ID NO: 1170 - DNA, 1923 bp, Arabidopsis thaliana landsberg
gtgaacaatttttgcgcacggctctctcattgcttattttgtatgtacatgaacaatgtagtttccaagataaatcatattatagtacagagagcacaacttcttttgaattggaacatgtcgctgttttatacatcatcaatgctgcgttttctccatattgacacaattctgtcactttttagtttaggctatcgatcgagccggtagcttcataaaacagaatctctggccgaacctttctctcttcacagaatccaaccacacttttccagttaccaacatcctatggcattaccagaaatgcatcaatccaattttggcctatctaaattcataactcaaatcaaggagagacagaatcagctggttcgtcttacctctcttgttaaagcatcatgtctgagattgaaccaccgattattttcataagctatgcaaatgtgttcttcttcttctacaccacaaccaacctgcatcacatcccaaactctaagactgtaacaaataacacacaagaacaataaccaacacatttgtgacactgttttagatgatttaccattgacacaagccggtacttagtgtttggtttcaatccttcgtacatcctgctgatatctatctcccagtataaagcctttgttgtttctgatatttgtttttcagtttcactcttctcccattctaacactaatgttgcaaacccacaaaacaccagcattggctttatcataagcataataaatgaaatgaaaacaaaacatcacaaacatggtggtcttaatttaccgattatgaagacaggtggacatttacttaagatgtgatgaacaaggtttgttattccacagcctccggttttaacatcgcatagcattgtataatccatccggatcaccttaaggatatccacaaactctatattcccaagagcacactgcatatatataagcacacaacacaaccatatcaggggaagtattagtttctctaggaagcataaagagggaaataaataaaacgtaccttcaagtctctgatagaatctgcagccataacaatgccatatgaactttgctctggataatttggtttctttctgcattttctacaactcattctttcattttcctccaacgtaaaaaggcgagttaccaagctttccctttcagcattcttccagcaatgccaagactcaaggatggttacaagaacctcagcagcatcactcgactgaaaagggtataaaaagagaaatactttaaaatgacaattaagcttacacacagaaattatattaataccatgcttagaagcttattttctccacacgaaccatggaaataacttcttctagggaagcaagtaagtcacgcaagaggcagctgtagactccctcaacattgatcccatctgacacaatagcagtaaagaaatttcgtagtgcaggaggaacgtgttcttccgggtggtcttgaaatggttgcatcaaatcttctttgagaatttgaatgttcaaaagggcctgtaataccacatgtttttgtgaacttctcaaagataatcatttgattcagaagacgagagtttaggtattgtatagtgttttagttggtaaactgttttaccttcagcgtcatgtcaagagctgaattgtatctggttgcagcgtctctaagagctgactctaaatgttccgactgtgaatcttctacaggaatgttttgcgtaacttgaagatggagaatgaaagaaataagaattatgtatataaccaaaatcaactttagtaccttcctcttggttgactgtgttgggtgagatttccaatcgacccctttcacttgaaagagtggcatctggttccatagaatcttcttccaccttccctagtgatggagacgtgctggccggttcaag

SEQ ID NO: 1171 - DNA, 2448 bp, Arabidopsis thaliana landsberg
ctcttataacgttgtttaattactgaaccaaattcttttggctttatgtttaccatcattctctttgttgtctttctagtaacactatcctcctctgtagcatagaagcataagtccttatcaaagtgctgatcgataaatgctcccttgcgaagcatctttttagggaaggcacctttcagttccatatgcaggcgtaacatttcattgtttgtggagccagggaacataattttcccgctaaaaagctcatacagacagcaaccaactgaccatatatctaacggatggtcgtagggaagtccaagaactacaatgaaaaaagagagtacagctttagttataatagaacatacagccatgaaatatccaagtagatgattaagacaacagcaacagtggaacttacttatttctggagctctgtagaagcgactaacaagatatggtgtaacttcgtttgtaccagcaaacattgcactaccaaagtcacaaagctttaacgtgtttcttccctcattcacctggataatcaaggaacgaccagaagttaaaatttatgtgcatcaagcaggagaaaaacacagacaagtatagcttaccagcatgttgtcaggctttatatcgcagtgaagaaccccacagttcttgagatgtttaagggatatgaataactgcgttgcatacactctaacaccagatagttgaataccaatgttgcgaccatacttcttcacaatctcacggagattcagatgaagagactcaaacaccaagcaaaggtggttcctatacttaaaagttgaaagaaaacgaacgcagtggcgcttattctctgggtcagagccagctagcttcttcaatatctgaatctcagtctggccggccttatgcctacacaaaacgtgatatgatagtgagacattcacaactcttaggaagataaatcaaacatcacttgataagaattttgataaaattagttggggcctagagaatgcaccacctacattgtctcattgttacggataatttttatagccaccttttcaggttcacctagttcagcttttgtgtctttagcacgaaccacagtagagaagacacctttcccatgagtagccatgatttcatatctatcatcaagtagttcaccaaagctgataactgtaataaccttctgcatcatcccaattatcattgagtccactccttacaaaaggaacaagtgcattccctttccgagtaccatcagctagaggagactccccaaagatatcatcagtgaacatgtcactctttgggctgcctgcggaagctagtgtcatatctgagtctgatatcacaagccgtgcaggtgtttccccaactgctgaagatagcttggcgacttcaccatctacggcctcagtatccaacccagctttagcttgaacatctgccacagtagaggactgctccaactttttcttatatttctccaatatggcttgcgtaatcctcttgctttcctcgattcttttcatctctgcagcttcttgttcttcaactccccaaacaacatcttcaccgtcatcatcattatcaacttcagacctttcaacgttgccctgagtttcaccgttaggtttatggctttttaaagaatctaagtcatcttctgcatcatgcctaacttccccatatccatcaccaccacttttatagatctcctgatcactctggtcttctcttcttcctctatccctatcttgatccttacgtctctctctttcattctccctcccagtctctctactactagacctagctttatctctactactcctacctctgtagttgtctctattgctttctctatcaatgcttcccttcttcttcaaattctccccttcctccaaatcaagttcaccatcgttaccaggattccccaaaaatggataaacattcttttcattgccgtcctcatcaagatgatgactgtgtcgatgcttgtgatgatggtgcttgtgccgcttggaagatttaacgacttcgtcggaaggagaatacgacctacggtgtttgcggtggcttgattctactatcttatcgctcaccatcagatcgtcgtaaaagatagacaatcgcaaaattagggttagggttcgattttctcccgcgctctctctgtctccgtgaacaacagacttccattaaaaaaattcacattatataaaaattacagtcggcatcggcaaattaaaaggaaatcagaatcgtctatttaaaaaaacaaagggcccaggcccattaataataaatgattaagaggatagagccatcatgtccgttgattattcgaaacctttccgatggatggatgacacgtcatcgatccgcatgaaactcgggtaaccaatgaaagccagcagaagcctctatataaacaaatgtctcctcatcaga

SEQ ID NO: 1172 - DNA, 1760 bp, Arabidopsis thaliana landsberg
cggccataaactgatcattcatggccacagacaaactgtcatcgtctgtacagctccgcgaacgaaagttctcaaggttgggcacattaagaccgtccaacaaactgacagtgatgcttcctttgctagacgacatctgcaaaacgaggtaaacctatcccccacatagtcatctaaaagacgaacaaccggaatctaatgttgcattctgcgactcaaatttactctctaaaatcattgaaaacccaagtgaccacgagcatcgcataaccatgctttgataccaaaaattgtaacgcctccgaatcaccctatggccggacaagccacgggcgacccagttacgctacagtgaagatgatcgaccaaaacttagtagaggttttagatgaatccggttccttaaccaaattatattcgaccctcctcccactaggaacaccacttaggcttgtcaaccctcgtgatattctagtgttgagcgacctagactaggtcttatatcattaaacactcggctacctttaagaaaacactttatgcatagtatatagcttatacttggcaaagagttacccaaaaatatatctttatatcggatctttgttaaatttagataataacaagtaattttccagaagcaacgtaaaacatcctatttctggcatttcctagtgtttgtcttcccgctatggtcatcccactatggttacctgtaagacaagtagaatcatgagtaatctaagattactcagtgagctgggtctatgcacaaataaatctctagggtttaatcaacttaataggtaaagttatccatcagagatcacagagtacgtaataaacgtattatcatatacttataataataccagaatatgcagccaaactagacacatgaatgaaccttgggcccagcatactaccaaccttaccaaaaaggtgcaccacaacatcaacacaaactcctgcatacgtgtatatgtgttctccacacgtatgctaccacacacacgtacgtgcacacccacaccacacgtacgtacacaattgtgaacacccgagctatagccacaaaggcttataaccagaacatcactttaatgcatcgtcatgcattactcggcatacgctccgagtcttgtgccatcatgtaagtgaccactcaggatcaaaacttactaacataccacttagacacaataaccacatgcagtactatatatataagtagtttattataccccaaacaagtatagacaatcaaacaccaaataacgtaatatatatgcataatatagcaaggatttactcgcaacctcatagcatatctcatataagtataaccacctaacaaggtaagtaagccctcgaatcatatctcaatcatcaagtaaacttaattaagtccatgttcatttaacctagtcatgcaccagtctgtttcattccttagtaatagtattatcaagttcgtcgaatgcccatattcactttaagattcaagttctaacttaagctgaattccgattagttaagtctaagtgagtaagcatgcatataatctaaagactagctctagaaaacatacaaacaaacacaaaattcgaccacaacttacggattcgatagcttggaaagttttctgggtcttgggtagaacttctcgagtacggtcgacgattccttacccacggtcaagttttctcgaccacaggcgatgattctcaggtctcggacagagttttccttggtcaagg

SEQ ID NO: 1173 - DNA, 669 bp, Arabidopsis thaliana landsberg
  unsure (1)..(669): unsure at all n locations
tcttcctgcagtagagtaggaaaagttgacatgcgcgcaacaaaatgaacaaatcatgtatggtgcagttcccggttaaatacaatattatcggaataataataataaaaactgcatgattagagcataataccttcgctggaagctttctcaggatcagatgcatcaggagtaaagagtaaaataaaagtctccataaactttagagcaagaactttcacccctacacaaccaggctattgtgaaagaaacaacggacttgggttagaaaaccttaaattgagagagaagcagaacaaatactcaaccaaagatcatacctcgcgagaggaacagacagacaaaaaaaaagagaggccataaacagccagcatacctccaatgcagtggcaaagacagtatctttgaacttaaccatccatgtccacagttccccacaccaacgatcaactttcccacggtgatggaactgcagagatcatcaagaataatacatatcagcgagagtatcatatataatatccaacanaaacttaaaacagaaatttacaatgcagccttatgaaactagccttaaacttcaaataagtagcatcaacgtaaaaaccaaccgagttttgaaaatgaaaacaagaggaaagttccatgggtaatatagttcatctcatc

SEQ ID NO: 1174 - DNA, 3609 bp, Arabidopsis thaliana landsberg
ctccccttataaaatataatgagagattgagacgattttcagatagtgtataggggtaggaatgtttccaatgaccccattattatacattatttagaatgatcaattacaaaggttggaaaaaataccgatggtgtcgatcctgtatgcgagttcccctttgtttactctcgaaaatgaataagtctgtaggagagaaagaacaccgaaaaagaaaaaaatatataaagaaaggtcaatttatcaaggtataatacaggaatgagtctagaaggatcttgaatgttagcttgtttgatgagacccaacgatgaaagccttgtggaacttaggtatggaatctagaatattgtgtaagcttgcagagaagtacatgttggttaggatttgattagacttgttaggcatatggacttagtttggatgatcatggcaataggctagagaatgttgggagttcctttgttttcaaaacctcttccacgggttcggcttttgtgttttgcttgagggcaagcaaaagctaagtctgggggagttgatataacccaattttcagtgattttatctatgttttaagtataggattttgagtctttatgttatttctcgagtctttttagtgtcttttcaggtactctatgcagtgggacaacaatggagataaagagacattttggagcaagagctaaggaaaaggaagctaaggacgatttttagatccaggaatcagcgaggagtatcaatcgacacactcttggtgtcgatcgacaccagtttcggctcaggaaaagtcctagacgctttcgagtttatagaagaggaaatttggagagacagaagacagtggagtcaggccagacgaaatattggggtatttggagttctgtgcgtatgatgtagattatcggcttccaatcgagcatctagagatgatgtatggatttccaagctgaaaggacacaagtcatcgttttgacaagaaagagctttagtcattctgggccacgcttgggtctaaacatggattttccttctctagacccaaaagcaacgaaataaggagtccgatggttagatactttcataggtcttttgccaatggagagttagagttgatagagacagcgctgcaggagttgctttgtttagcatcagatggtacagttctagctagagatcagacagacgcttcaatctcattctacctaatcgaacatttgctgaattacagaggatgggctaagggacttaagaaaccaggaagaatggttgtgggaggagttttgaccccaattttgagagcatgcaatgtacctatgcattcaaaaccgattcctccgagatggattgatatgcagcatcttatcaattccaagagtttttggtcgcagtagaagaatggcctatataaatataggttcggtcaccatacaacaggactatctattttcgtcctcccaaatcccgcttccacttcgatcagatattgtggcaacatttagttttgcccaccagtggagaacctctatacttcaggtgatgaagttgtcccgatggaaggagtgaacgatgatgaggctccaattcatcattccgataatgaggcagaacctatggacgagtcttacgcaacacaacagttttactttgaggagtactccgcaccaaggcaaagtaaagactcaaaggaaattcacaagcaccttggctttctccaaagctggtgtaaacttcaagacaaggctctcgcaacactcaacaagaagtttaacgctctccagctcaagttcaccttttcttcttctacgacggcgatgccaacagacatgcctttcaggagaagcggatccactcgacatgaacctatgcaatatgatcagccttcgccaccaagacagtcttcatatgagctgagagaacaccatgctgcaccttcaccaccaaggcaatcatcttttgaacctagggagaatgagaagaggagtaagttaaggaagcgtagaaggacaaggaaatcggatactggggcaagccactctaccgcaccacttgaggagccactcgatcaacaacccgagcaaagggtagagcatccaactaattaaagtccaacacaatccactccctggagctatacaaaggagagcatggatgaccttgtctccgcctacttcacctgacaactgaggtaacaccacctcgaccattgtatttaacatcatctttttatttttctttgtgtgttttgtgttttggttttgaattctttctcagatttttattacataagggactgtgtaatttaagtttgggggaggattcaagacatgtttaacagtgtgttctcttttcttatttcaaattctgcatcatgtcaggcatagaagataccatatttattgttcaaagtttcagaaaatgatttcacaaaaacagagtgtcatgtagattgcattttattttaggattgtatatagagtgtttgcattaggattgctcatttgcataggggattatgattttgaatcgttaagcataatttgattcaatgaagaaagttcaatgcccatgttgttagttctctgttgcataaccgattgtttctctaaagtaagactgcaccctgctttgaatttacaacttactatactgctttgattcgaaactcgcttatctcatgtcatttgctatctattagaacctgaactgaatttgcaattatcatgtctatacattgtttgtgaactcatggctaccatatacatacttggattatcttattcacttcaccaccctctgttaatccaagtagctgtctctcatttttagagcagtttcccatacccttagcctagccttatttcaagccaaagatcatttgtgtgtgattgtgaggtcttttttgattgagcttggtataacgtgttaggtatgggccgacaaagaccagtctttcatgtagacctagcccacgctttttgagttagctaggactaggtggtgacttgtatttgggattgggatgatgtatggaatgattggaaaagagaatgggaatgaaaaaaaaagaaaaaaaaagagagtaaaagtttagagttcttaagggggatacaaaaagtgttagtgtagtaaagggtttggaattcaaagaagttaggcattgtaattcaaagaaaagggtaaacgccctatatgctgagattagaagaaaagccttaagtgtgtcaaagtttaaaaccaaacccgctagactcttgaatcgttttaaagaagaaccccttacaacttgaaccaaaaagagaaagaatgagaaaaagggtagagttaggacacctataggactgggatcatcttctgagctatcatacgatatcattgggtagatgggagtccgttcttgtatgtttccattggattttacctttagcattctactaaagctcaatcttttctctaagtgtctcctgttactcgaccaatcattagaggaaccatttttgtctcttagcctaagcctgaaaccaattgagttcataaccattgcattgcttgatccattgttcgtgcttaatgaatgttaaagggaatggataaggcatgggttag

SEQ ID NO: 1175 - DNA, 552 bp, Arabidopsis thaliana landsberg
tgcttagaaatattagatctaccaatctaccggtttttacaaggattcttgaaacctcgaggttagctgcgtgcatcgtgattactagagcatcatcgtgaggtctttcgaggtgctgcgtttctttttcctcgaatgatattgaagcgccttgaaaatctaactcttcacttaaacttgactttagagtcacggcaaagtttggaacctccaagaatcacgttgattttgccttttaaacttcttggttcttcttcgctagtcagtcttggtctcttagagttttaagcttcggaattatcccttgactcatggtattgcttaacgaaatcttctatgttgaactttgaaagacctctgtgtgcccatagttctacgagatttcttttaagaagactacagtctttggtcagatgcccggtcactctatgtatatcataatacaaggattcatctcgaacccaagtatttgactttccttttccctgaaactgtttcccgacattattctttgaatggttgtgaaccaaacttccttggtccctgattctc

SEQ ID NO: 1176 - DNA, 1352 bp, Arabidopsis thaliana landsberg
caacgcaattggcgggaaatttttctacagaaaagtttctactaaattatggaaaaaccgtaaaatcattctcaatcgtctactaatatttattgtctaaccattttctttcttgtgttataattttgaaatgtgataaaataaagagaatttataataaatgactatagatttgaaaagaatgtacaaactaaccttgagtcacagtaccttgtcggaaacatattggagagcacatgtaacatgtttttttttccgaaatacatgcgataacataatatcctctttttatcttgttattttctcttattacatagtatttataaaaagcacatggtattttatggaaaaacattctattcagtttaatatctcttttttatcatgatattttgtaataatacacgttttttattaagatcacacgtgatttctttaaaaatatattcttattttttagtaatacatggtttttattaaaatcacatataattttttttttttaagattctgttcatgtaaaagaatttcataagaatattttttcttaaaaattcataacgttttttgaaatagcatgtttttaaactaaatataacatgtgaaattttaatgttacatgctattttgaaaaattacacagatgtatttcgtttactgttcatcttacaacaaatgaagggtagatttgttatttcctttcttccgacaacgtgggatccatggttattttgtaacaaaaaactttctctctgctagtttcgtgcttagaatgcatgacctggcaatagaaaaatatcaccccacctctttagctatatttccgaatcagttttttttttctttattttgttatgtttttggagataaatttacgttcatgttattataacttatttgtcaaaaacattatctcgcgtttacagtttgttctcatataagttttaatgttttgttttgaatatttttataaacagtttgtgattgtgacaatgataggggttgtaacgatcgaaaacggttacatttgtagtaaaatgctttccacgttgtgaaaaaaagaagaaaaaaggccaagcaaccaatgaatttgttataccaaacaaaatatgacaaaaatctatgtgcacctaacgataatatgccatcaaactttctgtatgactgactatataagtctatatttttcttaataaaagtaaatctcaattattttaattttatcaatattttagttattgtcaaatggatcaattagatagataccaaattgttagatcaaattagataattaattttacagaaaatgtttaaataaatatagaaattttattattagttaaaaggtagac

SEQ ID NO: 1177 - DNA, 566 bp, Arabidopsis thaliana landsberg
tttggtttttatggattttatggttttagagggactttgtttatttttatgtggaagacattagcaggtgcgtgttagatgtagaggacagattgtgcttaatgtcgcctcgattggcattgcgtctttgttgttagaaggtggtaggacagcacattgaaggtcacacctaaatctgatcttgctaatttgattaaagaagcatctcttattatctgggatgaagcgccaatgatgagcaagttctgttttgagtctttggataaaagcttatgtgatatactcaataaaaagacaacaaagtttttggtggaaaagttgttgtttttggcggtgattttagacaagtacttccagttattaatggcacaaggagagcagaaattgtgatgttttcacttaatgcttcatacctctagaaccactacaaggttctgaaattaacaaagaacatgcgactcctatcaggcggtttaagtagcgaggaagccaaagagatacaacagttttctgattggttattgggctgtggtgatggtaggattaatgagcctaatgatggagag

SEQ ID NO: 1178 - DNA, 1805 bp, Arabidopsis thaliana landsberg
gactattttattatatatgaacttaaattacaatttgattaatacatatggtttttcaactaactaaacctaaaagtaatggttttccatgactcagttaatacaattttaatttggatgtttgctgtacttcactactttacaaaaatatttgttaaaattctgaaattcacatatctgagatggatattagtatatataaaaaaacatgttaacttaaaaagatggtacattttgccccaaacaaaaagactgtaaattttacaaaaatgctagtacatataatttaagacattcttattgttttcatttcttctgtattctttcttaccacctctcaacattttactgaaccactttttcttatttggttggcagtatacagtaaaaaatataatatgtaaccaatcaattaaaatgcaacgacaacacacaaaaacaatgatacaaaaatattggtattaataaaaacgagacactaaaacttaaatcgtcatataaaaataaaaatggtacacatcgtttttctttttggccgcattctttcttaccagatcttccaacattttactgtaccactatttatctatctgactaaggtaaattttatgtttatgtggttatcaatcaatatgattgactaattatttatccagtagacaaaaaaaaaatattaatttttccacacgtctctttaattgcacgtgtggaggagcgagagacatgacgaagttgagcttctaacacatgtatgttgatcacttgatctttacttgttgaccatttcattttcattaatcataaatacgtaaaagagttctcctgtatatgttttgcatgcgtgtagcaaaattgaaaaaatcataaacacaattacgaatcgtactacaaaattataaattaactagattttaacccgcgatataccgcgagaacaatttatctttttaaagttagtataattttttttttgtaaattgtatctatctataatatatttttattttatagtttacaattgttattaagtaacgtcctgtcaaacccgtcccgccaaacatgtgccgtaaaaaaactatttatttatattaatattgatgttatttatgatatgtttataaatcattgtctaaacattttagacgatatgagacgttgaacccacacatttttcgtcaattgggtagcatatgtccgttttaaaaattttgaatcacaatatatgtaattttttttttaaacttaatatattatacaatgatttaaaacagttaaaaaaatcaaacaaagatgataggagattcatagttttaaatcttaaccaaatgttctaaatatatgtattgttaaatatagaaatatcttgtataagagatttaaaacgggtttagaatcgatttttatttgaaccgacccaactaaaatttaatgaaaaaacttactaaatgggcgggtaccaaatagatccaaatgtatttttgctccacccacacaaattccttgcaaaaatactatatagatgcaatttattcagatcatgatttatgtttcattgattgtgtctaaataatctacttgttaaatttaagggttaaagaataattcttgggtttcacccttagggatgaacctctcttgtccacatggctctgataccatgtcaagaaaactagattggtgtaaaagatgttcttattcaattagatacataggttgtgccttttagtgtaaaaggttttcttattcaaatagatacagaggttgtgtcttttatacaagtgtttcacctaattaaaaagtatata

SEQ ID NO: 1179 - DNA, 1237 bp, Arabidopsis thaliana landsberg
cttagaaaataaaaaaataatgacataaatacataatgtatattagatatagtatagaaactttaaaatttaactcagtttcttatgtataaagatcactatttcgtgtttattcttttatttgatccagttcttccatagaatatccaaattccaaaggattacaatatttcatttttcttagagttatgtttttggaaatttgaaatgtaaaagatgagtgtattatacagataataaagctaacgtggatacagagaattggtcatttctaattaaatatgaagtgttatacgattgaaggtggaacgtcattatcaaattttcttattttctttgcttcaactgtatcattaatcacatcttccataaaattcaacgatatggcgtaaaaggatttgaccttttaccctaagcaccttaactctaatctgcctaatctcaaaatgacataatttactctcttaattcacagcttctttcctaattacataattataaaaaatcgcagtaaactttactaattggttccgtagattttaattttcattattttggattccattattatgtatagtaaaatggaaatttaacttgttggaatacaagagaaagttttgccgtatgattgaagatagagcaagatcgatcatacaaatataacaaatcaaggttaaggttaaaattgaatattgtaaccaatcacgttcgtcagatccaccaaaatcggtgcttcacctcacacatatttgcttcacgtaaacatcaagaatacctaaatatatacgaaatcatttatttacataaacgcaaacccaacaacactaaccacgagatcagaactagtagtagcaaacgcatctccagcgaccgcagggacagtagtacgtatatctctttacctgaggagacagcaacttcgaattgaacgacggaggaaagggctaaaaggacgagagccaccgtgatcatgactattaccggcaacggagacgtcgatactctacaccgtgcgcagaagcaaccgtggtaatgcatcgctgatcgccttctcactgttttctttggtttgtttaatggtttctattactcggaagataatgaaacaaagaaagataaagagagtgataatggtttgttaggactataaatgatattattatgatcgatgatgataccactatttcgagaaaaatcataagtactagctagtgcagtaacgaaggatctttaatca

SEQ ID NO: 1180 - DNA, 7034 bp, Arabidopsis thaliana landsberg
tatcgtgattaatagtattaaaaaaagttattttcaccgtgatcatcgtcctgagtttttctttcaggtattggcagagtgggctggaccttccaatgtttagccattaaggcaaattcatacgaaaatgccctttaactttgtaacgatgtagagtgcgtacacataacttagttaggagtgaatagatgtacagtgtttagttgtaaacaaaaacaaaaatcccaaaaaaacaaaaatctgagttcatgtgtaattgaaaatgaaaaaaacaaaagtgaatgtgtcatcgaagaagataaacgagattccggtgagaaagcaagtgttcttccgaagtaattgacttaaccactggacaattaaacaaaactcaaattctttatctttttgaactaaaaatatgctagatgtacaatatttagatgtaataagcattcaaaacgtaaatccaaaaaaatcaagatttctgagataattgttaacaagagactgcaaaattagggttaaagagattgaagacgagtccaaaattacaattatacccttcattaaaaaatttaagtgtacgtatttataatttacaatgtacgtatatatggacatgtaaatatgtaagattatattttattgtaaaagcggcatacacaattatttattgagtttgtacattagaaatctttggttatttcgattagatggaatatatttttggaggttttcctataaaatctatgcatatataataactaaataaaaatatatggtcaatatatatttgttcctcatactttctgttcgtcatcaccaccctctttctgttcatcctctttatcgtcctcgacttcttcttcctcatctacttcttcttcctcatctacttcttcattgttttcaaatacatttggtacctcaaatatggtttttattgtgttttcaccttaacccatggttagtttcatcaagaaggtcccacatcattaacataatatttacactttacttattggattggacaaaatgacacagaaatgtttacacttagatccctactatgaataaaaaaaatgttcgcattgatgttgtttagatgagaacctatcaacactggaggatcaagtacttggtatgctacagtaaaattatatgtgagtctgttaaagagaattatagtctttttacgaaatctttgtaatgtttggtatctacgatggtgcatacggcgagttagccaaatgttatgtatttagtacgatataggtgatactttttgttttgatgttgttatttctattgaattgttattttgaaattttttaatgagcgttatgttatatgatattatttgtgtaaaaaagataaaattttaaactaaaccaatagacgtacacaacaatattgagatacacgtacacgtgtacgactgctccaaacagttacatcttaaaaatacctaaatcacataaatcttatactatgtacgtacataaaaatatttgttgaagcgtacatggtacaacattaaaatgagtataaaaaatttctaacaattgtctacgaggatagatagacagaggatgagaattccgtacacattcattacaattatacccttcattaaatttcttatgtgtatgtatatgcaatttacggtgtacatatatgtggacatgtaaatatgttagattatgttttagtaaaggcgacatacacaatatttattgagtttctacattagaaacatttgattattttttattttttttcataaatctatttatatataataattaaataaaaatatattgttaaaatatagttgttcctcatacttttgaaaaatgttatgtacgtatagggatgtcaaaattggtaacccaactcaactcaactcataatcaaatgagtttagagttaaatgagtcaacacataactcatttaatttgatggattgagatgttaaatgggttaatccatttaattaataatttaattaattattattgtaaaacaataataaacaattatcatcatcattaattcattatcatcaaacttaagatatttacggattcagaaatttttacgggtttacgtttttagacgggaaaatcacaggtttatgtttttggcggaaaaattataggtttacgtttttggcaggaaaattacgagtttacgtttttggcgggaaaattacaggtttacttttttagcagaaaaatcatgggtttacattttttgcggaaagattacgggtttacatttttggcgggaaaattacgaatttacgtttttggcggaaaatcacgggttttcgtttttggtgggaaaatcacgggtttatcttttttggtggaaaaatcacggatttacatttttggcgggaaaatcacgggtttacgtttttggcgggaaaatcacgggtttacatttttggcgggaaaatcacgggtttacgtttttggcggaaaaatcacgggtttacgtttttggcgggaaaatcacgggttttcgtttttggcgggaaaatcacgggtttacgtttttggcggaaaaattacgggtttatattttttgcgggaaaattacgggtttacgtttttggcggaaaattatggatttacgttattggcgggaaaatctcgggtttacgtttttggcgggaaaagcacgggtttacgtttttggcgggaaaatcacgggtttatttttttttttggaaaaattacgagtttactttttctcaatttcatcgcttgtatatttaagaaatttggaaaaatattaattttattaaattggtttagatgtgttggttaaacttaaaaaggcattggtttagagattttagttagtttaattcaattttacaaaaattgatgggtttaaatagataaaccattgactcattacaacccaactcatttcattcataaaaccatttgacccaataactcatttgatcaatcaacccatttgagttaaaaatttcagcccatcagagttcatgaattgaattaagttaagatgagttgacccatgaatcttaacctattttgacacccctataatcaataatctttctaaattaattacaaatagaatatatttattgagtttaaaaaaaacaattttttttttgatgtagtaaaaatattaaaattgaactctataaagaattaatatatattgaaaaaataatactagagccatattatactaaatattttacatataatatatatgtttatattagtaaatttatataattattaatatatattgatgggactatattttatatatgatttttgaaaaagatataattttattaattcatcgattaatattattttttatactagtttcaatttaaaaccagaataatttattaatttataagtttttaccgtacatatatatatggctttgattggcagtgtttgatagaagaaaaaaaagagtagaaaaaaaaaaaaaaatcttcttaaatacattgacttgtcaccagtcagatagaaaacacaaaacagtaaaaaggagagaaaaaaattccaatacgtaaatcgagctcatatcattcttctaaccaaatacaagtggtacattatcatctagattaatgacacattttccaatgcaatataatcaattttaatcatttatatgaaacaagtgggaagagaaaacgtgattttattttgctatatagaggaatgatttcttctatagtttatacaatcaacacaatcaaccaaattttctatccctacaaaacaataagctctagaaagtattttttgttttcgtaattttttttcaatctaatatttcattccaagaattagcataactcaatcttgaaggtattttttaattcctgtatatcacatgtattattaatttaaatttatggtatatttaatatctataatttcttttaactagttgtttttctagcattaaattagggagttttttgttttaatattagtacttattttgaatgagtcagattataattctttagaggtgtatttagttttatataattactactagtacgggtgttatacatattttaatgtattaagaacgttcgatgcaggctataatggaatggcaaactagtttggttagaatatttttcgatagtttatagtttaagtagtataatttctatagtatggaatcgtgcagatgatttggaagtataatttttttaagtaatggatttacatcttaataattttatgatatattatgaagatgactggcaggtcagataatacacgtagtagaggttgtcgtggaactatcggtagaggacgatcgattcgtgaaaatgctggtgaaggaacatcgagtagaggtgcaagcaatacaagatgcaatgtatgtttattaaagttttgtgtatactattttatagttttacctacatattatttttaaaatataattgtgattgtttaaaatttaaaaatgtggttagcataaatggacgcctggaacaacttaaatttttctagagcttgtaatcgctgaattagaagcggaagactatacgattaggaaaccattagctgctggtaaacggagaatcgaagaaaaatttgttgaactaactggtgattcggttaaatgggaccgtgagatgaaaagcaaatttaactatttgaaaaaatagtggtttttcaacaacatattattcaagcgtagtggtacacatgttgaattatcggggcaaatcataatggaaccgtcatggtgggacaatcgatgcacggtaataatataattttaattatgtttaacatatagtttcttgtaaacatgttaatcgcatactcataaatcatatttattttacaggaatttggtgaaaccaacaaaaaaatatataactgtgctacaaaataagcctcttcctttcaaagatttactagatgttatacatagcaaacatgatcttgagcaagatttcgctattcaccccacatacttggagttcagcttgatctcgaacaagaaccatatgatgatgatggtgtgccagcagatgacatagaagaacatggtcaaacaacacatccctttgagaattctaatctaagagcatatgatgatgatttaccacgactctctcggtcaactgatagttaggttttttttagcctaactatgtgctgaagtgtggtgtgttcagttcaattccccttaaacactaacatgtcaatgcagctatagggggtgtcaatccagtccactgttattgctagcaatcaagatgtgtatagaaacaactaagtcaagccagattataatgatggtgggtttctagtaacaatcctaaatcaagattcgaataacagaaatgagaacttaagagccctactcgatcattgggccgagtagaacaaacatgcaacaaatttcagaactaaaatgcaaataaaaggtgacaaacatgcaacaggtgaataaaagtgtaatcacggggtgaatacaaataaatctaagaagaatagaagtcctaaggatggattcattgataagggcaactctagggttcatcaggtggctaacaggcgaaaggcaaatagcgtagacaatagattcaaaaccgggtcaatccactctcgtgatagagtccctcataactctaccacttcctaatctcaactctcgttgatgaaacatagttgagcaggctttaagcaacaatctaccaaagtcaataagcagtctaaacatccaatctcttgggctagaatctacaaatctctggaattcgtagatcaggcatccatttgaacgtcttttggacgctggatacctatggtctaattcccatattagccagcgaaaactgcataggagccaacgaatccagaagggatctaacctaatcgtaaccacctgactaacctagagattaccctaatctaatccatcctcaagaaccctaatcactactcaaggaacataactaagacactataagaaaataggcgatttgcgagggaaatttgcgatggcaaatacgactcacaaattgctacagctttgcgagatgtttgcgaggtcaacgagcttccacgcaaatccgtcgcaaactttgcgagggataattctgttgcaaaattgcgaggggtttgcgaggagtttgcgtggacagcaggattcgtcgcaaagtcgtcgcaaaattgcgaggcaattacgggtacaaagaagacacgcaaaatgcaacgtttttgcaacggaactactaggtcttggcgggttaaatgagcacgtttgaaataatcttacctaactagttggttggtgcatttccctcgcaaattcctagcaataaagctcagttcctagcaaatccctcgcaatccgccttgcaattccctcgcaaattttttttggacatctataaataaccaacgtaacatgtaagaaatcataactcaaatcacaacaacatttacttacaaacaaacatatttattctaaaaaaaatattatttacgaaaataataatgtcttggggtggagagcatgagatttacacattacgaagttggatgtacaatcatagagatcaagcgaccggtgaggtgatgagagagtattatgaaggactgcgcggtttcatgtatcaagcgacaaacgaaccatttgctcgtgagaacggcacaatattatgtccatgtcgtaagtgtatcaatgtgaaaatatttgaaatttaatgtagtgaataagcatctttataatagaggatttatgccaaactactatgtttggttacgtcatggagagggttgtagagatagagcaggaactagtaatacaaattatggtgtcgagtatcctagtaattttaataatgatgcgaattatggtcagcaagtacctgatcaatttggttatgggtataaccaggaaaatagagttcatgatatggttacaaatacatttcatgaaactattgctgcatttcatgaacctattgttgcatttcaaccaactcctg

SEQ ID NO: 1181 - DNA, 800 bp, Arabidopsis thaliana landsberg
cagctccttcttcttcaaccttcgcacgacctcaaaaatctctcaacaacacacaaaaagatccaaaatccaaaatcatcctctccctccatttcggacgaccctctaaattcttttgtctaccggaaaattttcgattggatccaaattttctggcgcctaatttatcgatttggttttctattgtcattttcttttcacaggtcactcgattttctccattttcttttcatttgggactctcttctcgccgtcgccatcaccggagataaattccgtggtgctgcgtttggccttaccaaaatttgagatctcaattgaagaaagaaacatagcgaagaagaagacgatcaaggaattggaattagattctgttatctctctatcatcttcaatttttttaatttgattgttttcaccaaaaaaaaaaaactatgaacacgacgttacgttacgatccgagacagatctcgaggcaaacgaaaccgtcagatacaccatcgtcttctccgtctcgtagtaaccggagacagcctttgcttcagagaagtctctcttctccgtcaccacgagcttcttgcggcggatctactcccgccgagttttgcggtggtacgacggcgagttgcgccgccgtgtggtgttgttgtccctgcggactcgttaaccttctcgttctcgcgatctacaaagttcctaaaggaatctgccgtcgcgctatcagaagtcgccgccgtaaacaactcgtgaagaacggaatccttccgccgctttcgacggacgggaaaaacgagcggatg

SEQ ID NO: 1182 - DNA, 578 bp, Arabidopsis thaliana landsberg
  unsure (1)..(578): unsure at all n locations
aaacacccgacctcatgttgtctcccactgcgcattttccttcaacagntttcacttcatctgacaaattgagaggcacccggaaatggaagtgtgattgagcaaatataattgtaatactacaatcaagtaaccagaaaatgtacctttcaattgggtgaagtaaggctcttggacatgaagctcaaagttcacctccttcaacatctgaaacaaagaaccttttctgtgtaaaaattccaaaaactaacttttcccactctgttttgatgcaataatagttgagaactaaagttttcatatagacttacatttattaagtcatatcccaagccatgaatcagtttgatgtatttttccaagttagaatttttatcaccctcggaagctagacattcagacaaagccgttgctagaagcttgtacacctgtttttctgttaactgaaacatttatgaggaaatttcagttatgtcttcttttcagttgactctgtatctttctcgaggagatgaaggcaaaactctctggtaggtccagaccgaaacttggaacagattcgtctaaatgagagcgca

SEQ ID NO: 1183 - DNA, 1789 bp, Arabidopsis thaliana landsberg
tctccgataatactttcttccatttcctttctcgaaaacttactctttagcttttcattgctatcttgaactctgattcttacttggcactttttaacaccatactaaagcgaagaaaacatgagaatccaaattacatttccattatcacaagaaatgtaattaagtcttcccaaaaagaactaagcagatatgttaaactcaatcaacaaaagattactcaacgcaatcaaagaaatcaatcattaagttcaagcaatacacataattaatcatttaaaatgatttttttttaattcgtttttaaaaatctgaccctccgggtcggaaccggagtggccttaaccggctcttataccaaatgtaacacccgtccagccgcataggccaaaacgacatgttattcatctgatcttgcaaaatgttttctttaaacttctcacacgaacaaaatattgcacataactaactcatcacgcttagtaacctgaggaaaatgggaaaaatggggtgagtaaagaatacattcatatgacaacacactttttaaacatagaacactttttaaagctatacaaccatcatcattttttattcaactccgccttataggccaagacggcatgttattcaactctgcccactgaaacatagaatacttttaaaagctatacaaccatcatcataacatataaacttagacacaagcaaacaaccgaacatgctttaacttctaacaattcattcataacaaccatcttatctataataatataaacatacacatcgttaggtctagtcatccttgtgatgactacaaccttatgagtggaggctggccctcgtggctcagacactcccatttcgggctcatcaaccgttcttgaccagttgataacccgtcagtctatcactctccatattactagggagaccacggcccatagcttgattctcccaatcattcatacaaacatacataatcatcatagttacatacttatacttaaccttctcatacataatatttcatagttaaatattatcaccatacatatcaatcaataatcatcaaatcatatcatcacataatcttatcctatgcaataagatctagcctacatatcatgagtcaggaagcataacaaaagaaaatgataccatgcttcgcaaataccaccctcaccttagcctagtcaaatatgacaacacacttctccttctttcacatttagacaaaattattatctcaattgcgaccacatgctcttaagctctatcttgaatctccttcgaccaggacctcaatacatgagttatgaaagctcctgcaaagcttcagctccaaccgagctcgtttgcgccatcaaacaataaaactcgttacgatttactctatataaatctgcctcggaaatatgcgcataagtcaaagactaaccgttagaaacgtaatcccactgtttattatgtagccagtattatcatgaataactccacaaagtttcatcccgatcagacttcacatgaatctctcccgtgtttctgaagatactgcatcagacctgatttctaggtttctacaacttgagatgtttctgtgcagaactttcaaggtcaattccggatagatattagatccgattgacaaggtgtcagctactctgagttccttgaagcgagatatttccatagaggtcttgatattgaactaattctttctgggtcatcggaaaaatgcatcacaaaaccagtagccacgtagtggtctgcatttatacttcggcac

SEQ ID NO: 1184 - DNA, 6219 bp, Arabidopsis thaliana landsberg
ttgttcttatcgattcttcttctaataataatttaacaaaggaacaaaaaataatgccaatttggctcattggcagaatcttgaaagctagaaacaatcttgtttttaacaagtacagagagagtccttcgaagataatcgcacaaactgaagcagaagtcaaagaatggattgaaaacatgagacagggaggacgagttcctatcacaaaaatcccaacatcaactacaatacacattggacgaaaccctcgtcttcctttgtgaaagttaattttgatgcagggttcaatataacaaggactcaaagcaacggaggatggatcattagagatcatgaaggcttagcgaaagcatggggattatcaactatagctacgttaacaccgctctggaggcagaaacaaaagctcttttggtcgcaatgcaacaagcgtggataagaggatacaaaagaatacaattcgagggagattgcgaggttctcatcaatgctatcaatggcaagactactagatgtgaattacctagtttacttcgagatgtggattattgggctttgatgttttcttctgttgtctttcaattcacaaaaaaccattgtaatagtatagcacatcagttagcctctcctatctacacaactagtgtgttccaatcatattcaggaattcagccgaggtggctcaaacacttcctttgtaaagatttacatatataaataaaattcagtttgcaggaaaaaataaaaatatatatatcaaattcaacctgtgcatgaagtctatatattcaatttagactcgcaatgaaaaaattgcgtgcgcaatccatcattcaatattttcaaaattgcatgcagaaacaaaatttcaaatatttagaagtgtcaaaccttatttgacacatctcatcatatattcttaacatgtcgtctcttatacagatcataactctttctatgatataatacatattatttaacacacagtttgctataaatatttttaaaatatatgtttgaatttgcaaaactaccctttttttactacttttttgcaacaatacccttttatgttgtccatttttaaaaataccctttcccttgaacagaatgaccaaattaccctcatctaataggaacatgtaattggaaactgaaaatttttcgccaaatttttggcgtcaaaatttatttttcacgccaaaaaaaaaattccgccaaaattttttcccgccaaatttcttttcgtaacaaattttttttcagccaaaacaatgcttttaaaaattcttgtaaattttttttggcgggaaatagatttacaagggattttaaaagggttataaaagatttacaagggattttaaaatagttttaaaagatttacaagggattttaaaaggttttaaaaagatttacaagagtttttaaatacccttgtaaatctttttaaaaaacccttgtaaatcatttaaaacttttgtaaaccatttaaaaatattttaaaaacccttgtaaaccctttaataatttttgaaccattttaaaactcttgtgaaccattacaaaaggttttaaaaagatttacaagagttcttaaagggttttgaaattcttgtatatgttttttaaatcttttaaaaacccttgtaaatcctttaaaatccttttaaaccagttaaaaatcttttaaaaaccctggtaaaccctttaataatttttgaaccattttaagactcttgtgaacctttacaaaaagttttaacaagatttacaagagtttttaaaggattttaaaacccttgtaaattctttgaaaatcttttaaaaacccttgttaatcttttaaaaactcttgtaaatcttttaaaacccttttaaaatcttttaaaatctcttgaaaatgttttaaagcccttttaaaatcttttaaaatcccttgtaatctattttccgccaaaaagaatttttttacaggaaaaatggttttgtaaataaaatttggcgggaattttttcggcgggaaaaatatttttaaaaaaaaaatttggcgaaaaactttttttcgaaaacttttgacgggaagttttttccgaaattttttggcgggaaaattttgtcgggaaattttattttggaatattttaggcgaaaaatattaatatttcattttgttaacctaaatcaatttacaaataggggtaaaatggtcattaaaaatttaaaaagggtataaataaaaatggtaaatagaaaagggtagaattaaaaaggagtagtgtgcaaagggcactagaaagaatttttcaactttaaaattataagaacaacacaatgcaaaattataataataaactttataattatataattataactttcaatattattaaaaaaaaattctgaatttatttattatacttggttaaaataatgaaagtagacaatataaaatacaacatttattctgattcattttctgaatcattataatcattttctgactcaacgttttcatcagattcgccgaattcgtcttcttgtttttcttcttcggaactgtctgtggtgatgtcttctaactctctgttttgtaggtcaatgtggataacatcttctgttgttatgtctggaatggaaacttctctaatgctttcttgttacatcacaacatcatcaactaagccgactatacggcccctgggattcactttaataacggataaccacacttcaggccgtgaccttacacgcgggtaagatagaaagcttacttgccctgcttgtgatgctaggataaatggttcgaacttggcataagtcttgtttgcattgacatcgaccacgcctaagttatttttccgtacccaacgaccgatcaccggatcaaaccaatcacacttgaaaaggacgcatttcaaattcaaaagtcctggatatccgacttctagaatttgcagtagaatcccataaaactcagtttcaccttcgacatggattcaataatttgcagttgcccttcgacttccatatggatacgtatgaaaagtatagccgcgagtgaagtacatcagagcagttctgatcttagatcttggttcttgaacaagctcatgcaaccaaagtggtaatggttcgtttccacatccatttataacctacacatagaaaatattaaatttgtcatttttaaaagtaaataagtaatagaatttttactttcaaatattcttatacttacatagtattttaaccatctagcaaaatcacgatctttgtaagtttcatactctttttcttctaatccaggacatgcttcacggatttgtgaatcaaataacctacaaattaaaatgtagctgtttaattagcttccttaattaatatcacactaattattaaatataaaaattatgaataaaactaggttgctttatacctttcaaatttttgaatgtaatcaactaagtatgtaattgtgagctgcgcgagaaagcgcatggtcgtcccaccaaacttctttcaacttccctgcgagtctaccaatttgggcataggtatctggaacatcaggaacgttatatgtaggtgcaacgccttcatcgtcatatcgtcgaggacgagtctttttggttctaacgcttggactaaagatactttgtttgtgccaattgtgagtgcttccatattcatcaggcatatttgtcgggatgtgccaattacctccacgtttgcatgtttcctgagcaccataaaaattgatctggtcaaacaaatcatttcgagaaacataagatggcgaaggaagatagactactttattcttcttaaagagtttcttgttcctccgatacggatgatgcaggggaagaaaccgacggtgacaatcaaaccaacatgatcttctgcctttctttagttgaaacgcatcggtacgactcatacaataggtacaagataatcttccatgcgttgtccatcccgataacattccatatgccgggaagtcactaattgtccacattagcactgcccgcatattgaaattttgtttgctcgagtaatcaaacgtatgaacaccttcataccacaacttcttgagttcatgaatcagcggttgcaagaagacatcaagccctcgttttggatgctttggcccaggcactaaaatacttaagaacagaaattcgctttgcatacacatatctggaggaagattgtatggggtcaagataacaggccaaagagaatattgtcgcccagacaaaccgaatggactaaatccatctgtgcataagccaagatacacattcctacactcgttagcaaagtcaggatataccgtttgaaagtgtttccacgcctttgcatctgatgggtgcgttatttctccttctgcagttgtatgttgagcatgccatctcattttcgccgcagttctttctgattgatataagcgtttcaatctatcacttattggcaagtaccacatccgtttatatggcactcgcgtccttccgccagtagtctgatatctcggcttcccgcaaaaccgacattcctgcagatttacatcatctccccagaaaatcatgcaatagtcaatgcatacatcaatcatttctgatggtaatccaagactcgaaaccaacttctgtatttcataataactctcagccgatatattatccggtggcaaatattccttaattaattctgcccatgaatccatacagttttcacttaagttattatcagctttaatagtcatcatcctagatgccaaagataacttagaatgcccttctctacatccctcgtagagtggttgatttgcagcatctaacatatcgtaaaagtgttgagcatctacgttgagttcttcagtaatattttcagaaaatgaagcaatagtttcatgaaatgcatccgtaaccatatcatgaaatctattttcctggttatgcccataaccaaattgatcaggtatttgctgaccataattcgcatcattattaaaattactaggttgctcggcaccacaatttgtataactagttcctgcgctatctctacaaccatctccatgacgtaaccatactagtttggcataaatcttctattataaagatgcttcttcactacattaaattccaaatatttttcattgagacacttacgagatgaacagaatattgtaccgttctcacgagcaaatggttcgtttgtcgcttgatacatgaaagtgcgcagtccgtcataatactctctcgtcacctcaccggtcgcttgatctctatgattgtacatccaactttgtaatgtgtaaatctcatgctctccaccccaagacattattatttttgtaagaagttttttttttgaaaatattttttttgtttgtaagtaaatgttgggatttgagttatgatttcttacacatttcattggctatttatagatgtcccaaaaaaaaattgcgagggaattgcaaggcatttgcgagggatttgctaggattttgctagaaatttgcgagggaatcccacctaccaaccagactggtaagataattaaaaacatgctcacctaacccgccaagactcgctactccgtcgcaaaagttgcgacagaataatcgatcttcgcaaactcgtcgcaatttgcgagggattttggttactcgtaaatccctcgcaattttgcgacgagtttgcgaggattgatgctttccacgcatattactcgcaaacgtctcgcaatttgtgagggattctgtttacccgtaactccctcgcaattttgcgacgagtttgctgggattggtgcggtccacgcagatttctcgcaaacgtctcgcagatttgcgagggatatattcgtcgcaaattttgcgagggattcgcgaagttctcttcttccctcacaatacacttgcaaatccgtagcaaattgcgagggatgttttccaccgcaaatttccctcgcaaattgcttgttttcttgtagtgtgtatactaagagaatactcttaatcatcggtatttttgtggatccattaacatagtattatcatttttattaagaatcacaacaacaatcttatcattctgctcttaacacccatttgaccaacaattcattcatacatgcattgcatattttctccaaacaaacaatagcaaaaaaatatttacagggctttaaatattctga

SEQ ID NO: 1185 - DNA, 590 bp, Arabidopsis thaliana landsberg
taatgcacttcaggtatacttaggttcagttaaacttttttttctataactgtggatttgtaactgctaagatagggtccttattttttacagcaaatatcacaacagctccatggcttatggtcagctccctttcgcatcattgtgtctatgattctgctctatcagcaactaggagttgcttcgctttttggttcattgattctgtttctcctaattcctctccaggtatttatttagcttcattctgttgttttatctattttgaaattgtacaagttgtgttaaatgcatatctttcttgaaaaacagactctgattataagcaaaatgcggaaactgactaaagaaggactccagtggactgacaaaagagtcggtatcacgaatgagattttgtcatccatggatactgtgaagtatgattgatatttttaaaagtattcacttttcagcttttctgaatggcgcattcttaaagagttattctataacttttttggaatttctgcaaacgtgatagatgctatgcatgggagaaagagctccagtcccggattcaaggaatagaaacgaagagctctcatggt

SEQ ID NO: 1186 - DNA, 574 bp, Arabidopsis thaliana landsberg
  unsure (1)..(574): unsure at all n locations
acgaaaatgacaagggacgaacaatggtacatatcttttatcagtccatttatttgaaatgcaggctaggcgttttatgatatggaaatgcaaactatgatttctcaaattgttcaaagttttagagttctccatccatccaaaaccagatttggcatcagaagattaatgtaatacctcgatttttaaaatgttatgttaattcgttgaaaactgtaatatccctctttctttcttagcggagacggagttcgccaataaaagaaatccctattttgtaaacttagctcgtcgagaaactaccaagggttaataaaatgcgaacacttaattagaatatgattaatggtttactccatgttgattgaaacctgaagttagtgtccaagaacccaaagctatatttgtcataagataagaataatattgttgatgacaaanaaataagaatactattgttgttatttgatgaattatagttgttttttatttccccaaaataacatgtgaagggtattaaagccaataaactccaaatactaatngcctatatcacattctggctacacacaca

SEQ ID NO: 1187 - DNA, 1207 bp, Arabidopsis thaliana landsberg
tatatatagacagtatatggttttgattgggttagatgatcaaagaatctaaccacgaatcttttgtttttatccacccacaaatatcgtgtaccaatattatttatgtatatgaaacttccttgtcgtttcttagactcattggcagagacaaacaaacaaaatgcagaaatatatgttggtttgacgcatgttttggtgtaccatttcttggtaataaaatggtttaagattaatctctcgattactgataaaacaaaaaaaaaaatagtctattttgtaaataaaatagctctactatgtcagggctgttgttgttgggtttcaaatttgacgacttatgtgatagtatataagtctcgaggaaacaatatatatgtcagcaaaaatgtactgctactaggatttaacccgtggtatactacgggacaaatatttttcacatatataataatattaaatttgacggtcttaaaaatttagtattaaattctaataattttatattaatgttgtaaataaaaaaaaatagttaaataataaatagagattcaacctgtattatatcaatccaaacccgtcccgctatataactcgtctcatgttattttaattttttataagtataatattaatgtggcgtacttaattttttatgaaaatattaaagtaatatgagatttaattctttttattaactaaaagtaaatgatttaaaacgaaaaaatcaaggtgattaatgctaattgatccccttaaaaggaatgtaagtgtgttatatattttagtgtagatttgaaaagatttaaatattttttgtgatttttcttttagttttttaaattttagatacaaaattgatttatatttaaatttgagaatacatttgttaaaacattaaatgccaatggcattgggttgtaaataaatcccaacttaaggatttattttataaaggtgttgcaaaaaatgtatatgtagattttgatattattatgccttgtgaatattaaaagttgatttgactttaatgagaagattttatcactaatttaaaatcatttaataaactcgcatccacatatgaatatggataggctatatcttcgatgtataagctatctgtaacaaattgttgacaaaaaaagttatatatacatagtttacacgtggttgaaaaaatatgattctattagtccattatatc

SEQ ID NO: 1188 - DNA, 1231 bp, Arabidopsis thaliana landsberg
tttaattcaatttggtaatcatccctttttaattttggatcaaaaatttaataattttgtggtttaatttaaaataaatggtatattaagcaaagctcttaaaggagccaaaggagccaaatgagccaagagctttaatcgcagccgctcttaaaataaactgatggtaaaacgctgctgctgctgctccgatcatcggtccaacccaaaaaatccactgtttcaattataaaaacaaaatgttataattaaacactaatcaattcatataacttttgaaaaaatatgtttatataaaggttaatgacgtacttggtcgtcccaggccttttcgttgttgtaaataacggcagctccaaagctacgagccgggttgataccggttccggtgatgggaatggtggctaaatgaaccatgaagacggcaaagccaatgggaagtggagccaaaactggcacgtgagagtcacgagcatttcgcttgggatcggttgccgagaagacggtgtatacaaggacaaaagttccaatgatctcggcaccgagtccggtacctttgttgtagccatcggctagttcgttggctccacctccatatctaaatatcagtaccaatattagtaaaacagtgtaatatgatcatatatatatctatgaaaccaaaaaaataggagttttgagacgtgatgaaacctggtgtagtaagaactttggaatgctttgacgaaaccgcaaccgcagatggcaccaaggcactgagccacaatgtataacactgtccgcaccaatgacactttacgagccaggaatagtcccaccgtcacagccggatttatatgaccaccttcataaacaaaaataaattgtaaagaagtatttaaattttgataaaacggaccaaactaattcaaactgaaccgtaaagaaacaacaatagtatggtatcaccatctcaaattaaaattcgtaaattatatttgtttgtttttatttgtggaaatctatgtaacgtgactcgaacgtttgtatataaacatacttaccggagataccggcggtacagtaaacgagaacaaagatcattccaccgaaagcccacgcaatacccaatattcctacgccgccacaatccactcctccggcggttgcatcggtttgagctttgtagccgattacagtcaggattgagacgtagaggaacagaagtgttgctacaaactcagctatgacc

SEQ ID NO: 1189 - DNA, 1612 bp, Arabidopsis thaliana landsberg
atcctaggagtatgtccatgctatctccacagttagtaattctgccactgaggacagtgggattcaagtatgggaggttttgcgaccaagatcaagacaggaaattaaactcgacttctttgctcggcttgtcgaacgagcacatgacccgagcaacccaatccctattccacctccctatgaacctaaatcggcatttccagaaagtattgcacagattaatgaaaagatcttccagaaacataagatgatgttcatcaagtgtatcaaagagttggaagagaagataccctttgttgatactcccaaggaagtgattatggaaagatcccaagaagctcagtaaatagttgaattgagttttgagtgtagtgctatgattcaaaggaaggtgataccaaagaagctaggtgatccaggttcctttagtctaccttgttcactaggatccttagtgttcaacaataatctttgtgatttgggagcttcggttagtttgatgcctttgtctgttgcaaagggattgggatttgataagttcaagcctagcagcattcatcttattctagctgatagatcagtgagagtgcctcatgggatgctagaagacttaccggtaaagattggatcagtcgaaattccaaccgactttgtggttgtagagatggatgaggaaccgaaagaccctctcattcttgggagaccatttctaccaactgcgggcgctcttatcgacgtgcaaatgggtaagatcgacttgaaccttggtaagaatctccatatgagctttgatattgctaagaagatgaagaagcccaccatagaagggcagcttttcttcattgaagaaagaaatttagatgctgagttgttgagtgggtgggaaaattttatttcgtactccattacgactcaccacctaggagagcccgaggagcctcttatgatagaaggagaacctagctcagaggttgagactaagaggaaccattttgatgttggtcctattgctagagagcttatggagctcaggaaacagtatggagctcaaggggaaaccattgaaaagctggacctcaagatggaagagctgaagccgagtaagaaaaagaagcccatcaggcccaaaactgtactcgacacgcgcgtcgagtatgtcggccgagttcacacgtgcgaggtcaacacaattcaaattcgaatttgaattcaaatttactcggccccaccaatcaaatcctgctccccaaagctcattagagattcttctgcaaatagtgaaagcatgtctccttgaccaaatgaagggtgaagatctaaggtgtttggagggctaggatcaaatcttcttgtctataaaaccacactcaacaagctaagtcacttacactctctctttgctcaaaaatttcaatttttacttcttctctccaaacatttcaagattttactctcacttctctctagaattcccagaaacttagccataatttcttgttttctctccatacaaaccttttcaaaacctctcctacagcctttgttcagttttaaacattaatttctcttctacttttgacctactttgggttattttgtggtgactatctga

SEQ ID NO: 1190 - DNA, 887 bp, Arabidopsis thaliana landsberg
tactatttttatttgatctaattatcttttacaataataaataataatatataaatattcgttttaaatattattggtttgttaggtattgataaaaaaaaaatatgaaaatatcttataagtttatttattttttggtcgttttaaataagtttatttatctttgtaaatgtttttaaaattattagtatagtttcttaaggaaatatattaaaatctaaaatatatgatgatattaaattgattttttcgtttccggaaatatctcaaaatatattaccaaaatatttcgaaatcaatagtctgatttttatgaaaactaaatttatttagtggtagttaatttacttaattgcccatgtaaaaatttatttagttaattttaaactactcttacaatgttgtagttcacaaaatgtttcccaattaatagtatagattgtagtctttatattattaaaggggaaaattggttgggatgtaggacctatctaaagcctaatttttcttctacaataaaaataaattatcaaccaagctatgtttactaaagctacaatagaaaaaataaaattggttgtatatgccctgtaggatttttcattttttgactcaaaagttaactttatataattgtcatttcagctttttttcttggggcaaaaatcatttcaacttacatttaacattaattttctgtcaaaaaatcttgcactgaatctaatataccttatctaacattaattttctatagtcaaaaaatcttgccctggaatctaaattacctatctaaccattaatttttctatagttcaaaaaaatttgcacctgaaatctaaattataccttaatctaaccaatttaattttttctattaggtacaaaaa

SEQ ID NO: 1191 - DNA, 944 bp, Arabidopsis thaliana landsberg
gagagcaccaggagaggagttaggggagttcttcaagatcttctttgattgagcggaaacaatgagcgtagacgatgcgagcgagtacatatacaccttatttctgcttgctaacgaaacaacaccacgtattcttgcagctacaataaagctcataagtgacaaccctaaagtcatgaaggagttgcatagagagcatgagggaattgtccggggtaagactgagaaggagaccagcataacatgggaagagtacaaatctatgacatttacccaaatggtgagtttaaatcaatataagattggctaagacatagtaagtagctcatacaaatatggttgtttgttttaggtgatcaatgagtcccttaggatcacaagcacggcgccaacagtatttagaataattgatcatgagttccaagttggttcttataaaattccagctggttggatcttcatgggctatccaaacaatcatttcaatccaaaaacttacgatgaccctttagtattcaatccatggcgttgggaggtgaatgtcatatgatcttttacttatttactacaaatttagtaaaccaattcatagaatttttaagctaaatgtttagcgaaaagacttgggcgcgatcgtctctcggacttacattccctttggtgctggctctagacaatgtgtagcagctgagtttgctaagctgcaaatgaccatttttatccatcatttgtctagacacaggttcattttcataaactaatgattgtgattagatttcatttttgcttgcaaccaaagttttaactcacatgtaatataccttatatatggtttgaaggtggtcaatgaagataggaaccacaatacttcgaatcgttgtactcatgtttccaaatggatgtgaggttcaattcttaaaagacactgaagtggataactcgag

SEQ ID NO: 1192 - DNA, 587 bp, Arabidopsis thaliana landsberg
  unsure (1)..(587): unsure at all n locations
atccgacttgaccattttgaatccaaggatattgctttctggtcctgcaggtacaagtatcttgtttgtgtggttcctgtacttcttttaggcggcaatatcattttctctttttgtttggaattgtctcagggtctgaaatataccaagagatattagctaaagcacttgccaattcattcaatgcgaaattgctaatatttgacagcaatccaattttgggggtaagatattgtatgtgtttcttaaatatgacatccgaggaagctgtttgtaaaaaaatcaatgttggttacttacaagtatgatgatatgcttgttagtttacaagaggaaagattttgcatctacacttatttatctgctttcctgactacgggtatgatatgcatccgctctgcaatttcctgcaggttatgactgctaaagaatttgagtcactgatgaatggacctgcgctcattgatcgcggaaagagctacaatttgacatcaggccatggagattcatctatcccttctcctgctacttctccccgttcatttggaactccagtgaatcataattngaagaaaggcatgcccctt

SEQ ID NO: 1193 - DNA, 589 bp, Arabidopsis thaliana landsberg
aaaaaacggctttcattaccgaccgaggcacttactactataaagtaatgccctttggtatgaaaaatgctggagctacctaccaacgatgggtgaacaaaatgttcgccgaccagctcgggaagacgatggaagtttacatcgccgactagctcacgaaaaggaccacgttccacaataatgaaaatgcttcaaaatcctaaacaaatttgaaatgaagctaatcccgagaaatgctctttcggtgtcccataaggagaaatcctcggatacatggtaaccgaaaaaggcatcgaggccaatcataagcagttcctagccgactttgtgatcgagctcccgctagcggacctggatggaactaacaccaataaaaaatggctcctccacgttgacggctcttcaaatcgacaatgatccggagtcgaaatacaactcacctcccccaccagggaagtcatcggacaatctttccatctcggattcaatgcatcaaacaacgagtctgagtacgaagccctcatagctggcattaagctacctcaaggaatggggattcgcgaaataaatacttacaacgactaccaac

SEQ ID NO: 1194 - DNA, 445 bp, Arabidopsis thaliana landsberg
  unsure (1)..(445): unsure at all n locations
cggatgtngccgagtgttcccgagntattttggattctagancgagcgacacggttgctgggtttagtcttgcttggatagctgctatgccagaccgggaggatgtgcatataggggatgggatgatgatcgattcggattgtgaggatgattgtgtgatcacgggagtgaggacggtggagcaggagctggctccgaagggacatgagatcgtgatggtccatgactatgtgactattgtgaggatgattgcacttaacccgtattcagcgatatcctatgagtcacatccggatgaggatgaggatccttggtttttccatactttccggaggctatagatcactttcaccaaagcccctttgcactgttattggagggcacgttcccatatttccttttgcggcggacatgagggctgaccctatttctgacatttaccggg

SEQ ID NO: 1195 - DNA, 586 bp, Arabidopsis thaliana landsberg
  unsure (1)..(586): unsure at all n locations
ggctaatcaaaataaagtgtgtgaaaataaatgggcttaagacatccttagctcacgttggagtctggtggttgtcggttcgggtcttgaaaggaggaaacaaagtcgctatgttcctcacgtcctggagaatagttctnnnnnnnnnnnnnnnnnnnnnnnnnnnnnnnnnnnnnnnnnnnnnnnnnnnnnnnntacatcctatatttttgttggacttggttttgattttatgaacaaacaaattaaaatctaacctcaaacctatataacgaggttacgcttcacagatagagtaacacttaaacgttcacacatatatgaaaataaatcttctccaacaatttctctatgtcttaaattaaatctcgagagtatcgtaaaaactatgttcctttgagtggtaagaaaccagtttatagaggttgtatcatgggatccttgaatcacataaaaactgtcacactacgggtgattcaataattaaggaaagagttcatcaactcgacttctctcatatctttccttaaaaaatntatgatttcgatttcattatttntacgttttgctaattttagctcacact

SEQ ID NO: 1196 - DNA, 584 bp, Arabidopsis thaliana landsberg
taatttgttgttttatgtacgtgccttgttttattgttcaaatcctctcgcaatgtacgtatagtttctggtgtacgctatcgtgtacgtataagttttggtgccttcaacatcaaaaactattagatttatacttatgttgtgtacgcaattttccaatgtacgataaaccaagtttaatgtactatatagtgtacgtacacgaagacatctagtaaaacttaaaggggtaattcattcaaaagctagaaacataaaaaggacaaacagtttatataaagggaaattcataagataaataaacttgaacatggaacagagttggaacgattcaaaaaacataaatttttcaacgaagcatacacatgtgttgcaaaatatgtgtgcatccctcataccaaaagacttgagagtagagccgagtagagtagcttagaccttatcagctttgcttctagtagaatatagcaatctccctggcgtaccagtagaaaaaacaagccctatgcaactcggcgggtggacaaacttccaagacctttcccagcggcgagacatttcagtgtgaagctggctgatgtgat

SEQ ID NO: 1197 - DNA, 543 bp, Arabidopsis thaliana landsberg
ccacttggaaccacaccttttcttctctatggtaaagcttgtcatcttccagtggaattagagcataaagtagtttgggcagttaagatgatgaatttggacattaaatcagctggagaaaggagatttatccagttgaatgagcttgacgagataagaattcatgcttacgacaattccaagctctacaaggaatgcaccaaagcctatcatgataagaagatcctttctcgaacctttgaacctaatgaccatgtactccttatgattctagattgacgttatttcctggcaaattgtcttctcgttggtcaggtctctatatagtccattcggttaggctatatgctgttcatgatttctttcctcagactttgaggtttgaggaagttgaccgtaatgtcaactttggagctgtttttgcacatcatttggtctttcttaagaccaagccctttacaggaacaaggaagaaaactgagaggattggtagtctcctcactcatatctttgagcactttcacattagtactaagggagaga

SEQ ID NO: 1198 - DNA, 348 bp, Arabidopsis thaliana landsberg
ggtaaaggggacaagggatgaaattcgtcagagctttgtggatttcgtggacagagttttggctttgctttgcgtgtctcccattaagaaatccctgagatattcctcagtaggacactagttgagctgaaaataagaagtgaacattatgttgattggtggcgtagagatagaggcactgtcttaccaatgcttaagactcttgacattgactcagaatctattcattgtggtacgagtgatatgtttctaccttctttccctgtgcttgagtatttacgaatggctaatatggagtggacagagtcggatgacaccgtgtcaagtgcaaccatcaagctgctaaga

SEQ ID NO: 1199 - DNA, 744 bp, Arabidopsis thaliana landsberg
gtctgatggaatttgatgcagcttcctgaaatccatcacggttctgatcgccatcagctgattgattgaactatgcatcttcaatctccccctttttgactgagtttgatactgaagcattcctccattgatataacctgaaactcaaatggaagacacaccacaaagccaatagatagaatctagaactataaaccaatcaacataaagtaataagtttaaaaaaccctgtattaaacatcttattacacacccgtgatgatacaatcactcgagcaaagcattgttctggtctgaataaccctagacccaaacgactagaaacactcaaaacaacttaaaacaatactcccccacaaactaaaactcccccacaaatcatgcgcccccttagttcatagatcaaagtccccatccacatccgcagttctcgcatcatctccccatgcttgagtgcacaactcagttaaaaatttcaatgcgaagaacagagagcagaggcacaacacttacatgcatccaatgcagcatgcagaatgttgacctagagaagtggctggtgctgttgaagatggcaccttcctaccagttgactgaccttgtgaagcacttgcagatgtgcgtctgagtatttggatgtcaggatgttgagtctgaatcaaccgatagataagactagggaacatcagaaagaacttggagacagactttagagcaagttgaaaaacatgatcatacaccatt

SEQ ID NO: 1200 - DNA, 861 bp, Arabidopsis thaliana landsberg
tttcagatactcataataccctggtttagccgtgtagatcccaaatttttgtggcagccattcatttttatcctcggctcccttagtactcagctttaaactcaaaatctcctgctcctcttatttcctccctgtcccaataacaagttacaggggatatgaggtctgacatcataaaggcatgactgtggaaaggtccaggtttgttggggaaacacatgatcttatgatcatgttttcgtcaagtagtgtacactgtacgtaacgatatataaacgattttcaattgaatcattttttggtgaatagtcatcatagcaacaatcaatagaaatttaaaaataattcaatacaaggtcataagaatacaaagataaaatctaaaaatcaacggcaagtattggtgttagctttgatctctaccaaagcttttagaataagaaaacaataacactttgttttttttttagaaacagacaaaacaggaagcaaagtggagtcgtagctccaataactacaagcaaggaaaatatgaacgagatggttatgatcctaaacataaggagaacagattctctcttatttctaattgaagcaaataacagaattaaactaaaaagagaaagaaaacataaatcatttattctttacggatgttctccgttgtgcttttactggtcgttttgcaactccatcacttggctttgatgtccacttctccaaggaggacatctcaacttaattttggagtactccttcttacttttggtgattatgtaacagtaataagaacaatactgttgctttcttttcctaagaatgaagggacctaggcaacgacaatggcagcggtggcaaagt

SEQ ID NO: 1201 - DNA, 717 bp, Arabidopsis thaliana landsberg
  unsure (1)..(717): unsure at all n locations
aaagaatttggcaccggctctgaaatttatccatgggtcggaatgagccgagttctctaggtggttatgatgagcaaccacttgcgtgatctttcgttggttctaaatctgataagaaatctgttcaaattgatgatgatgaatactcaatatgtcttgaggagcctaaagttgaggaaaacaaggttgttatcactgggaagaagaagggtaagaaaaggaataagaagggtacgcagcagcagcaggatgacgacgatgattttgctgataagtttgcggtggaggaagaggttgttccggataatgcttttgtagggaataataagaagtcgaaaggtaaaaaagacggtggctctgttagctttgccctgcttgctgatgaagataacagggaggaagcagaggataatgatatcacgttttcaggtaggaaaaaatcatctaaaaagaagagcagcagtgtcttggcctcaataggtgatgaagaaagtagtcaatctaaaacttctgattctaagagtgtggagcttgtagaatcggcaaggagtaagaaacataagaagaagaacaagagtggaaggacacttcaggaagatgatgatttggacaagcttctgacagaacttggagaaactcctgctgctggaaagcctgcttncgaagaagagaaagatcaagctcagcctgagcccgttgcacctgtagagaatactg

SEQ ID NO: 1202 - DNA, 757 bp, Arabidopsis thaliana landsberg
aagactatccgactcgtagctgcttctggatacgaattgtttctccactatctcaatttgtctccgtttgctaagaaaataaaacaatttgtaattctagggtttgatcctctctctttcaatcgtccctaatttactggtagtttggattgtaatatcttaatcccgcggattatactaagattacaagttcgagaattgattcattcactgcaaatttccttcgtttgctttgatttcttggaaacttctgataacaaatcgtttctgagaacatgtttttcttcttcttgtgattgtgtctttcaaagcatacttctccaattctctttggtttcttccttgtgatttttgaataaattgtgttattttggtttccttttagcttgatgttgttgttttgaaatctcaggttacaatggcgaagctaaggcctagacagttggaactgagcaagactgttccttccaagttgggttttgatggagaagaagacgcttgggtctttgttaaaaagcagaaaatcttcattgtcttgccttctcttccacttcctcaacaacagcatttcactttggagaaacctgcaatatctcctcaattagaagctgggtttagagaaagcatggaggttacgcaagatagtacctttgttcacactgtggtgccttctcttcctctgcctgaaactcctcaatcacaagctgagttaagagacgctcttgcggatacacactttaccactcctgttcccact

SEQ ID NO: 1203 - DNA, 573 bp, Arabidopsis thaliana landsberg
cacggaagttcgaaccggcttgggtggcataccgatctcatccacctcgcattccaccgatctgttgcctccacgactctggggatccaaggtagaaggaacataaggaatggccaactcttccataacttctttaaggagactggtatatgtcgcctcggcgactacataatccttctaccagctccttctggtcctccaaatgcttcccaccctcaagcgcatcaatcagctaggtgtttgctttagcctgagccaagtacatccagcggtcgctggcttgatcaaccatagtcaatttcgcctcggcgaccttcatcttctcaacatacacagctgcagaccgacaagcctgagcaactttattatctcggagacctctctcctcagtcaacatgtgtttgtatctctcgactgttgacgacatcgtaacattggcctcggcgacacggacattcgttacttatgagtgaaagcgttgcgcgtcgctttctctctctcttgccacgccacagccgccttggagttaacatcagcccgagcatgctctgctgcggctaatctcttttcttg

SEQ ID NO: 1204 - DNA, 3169 bp, Arabidopsis thaliana landsberg
attgaacctccatacaagataaaattcaaattacctatataatatcaatatgtatatactctttccataacaatatatgatatcttaactaaaatattcttagaatatactctctaatatattaagttcgtctaaataacaaacttggcttttacatttaaaattagatatttacagatatttagaatatttaatcaatatataacgtttcagtttttcgatttttggattttttataactgttttctcaataattgcaactcttcctctaatataaactatccatatccgactttgtgtttaccgttttctttgagttttctttgagtcttcttctaatataaacagaacgggttatcaatttcaatggagataatgaatcttttatctgacatagatgttcacaatacttaattgagagtctatgtgaagatttttgctctctgccatcataatccaccccgagatggtgttgtaacaacgatgatgcttgtcgatttaaaggtaagtttatagatttagcatagcttacactgtgacttgattctctttgaaaccctatattaaaacgattatttattttgtaatttttatgtagtataatcgaattgatgcaactattcaaggaggcactaatacgtggaagtacaaggatgtactgaaggagggttttggtattacatgtccgacttttaagttgtggttaatatcatgccagttagatactcattctgttcaaaacagatcaagtttctgagaggaacaaacatagatgtggcatgttccttcactttcaacaagtagattttttgagtttgtggctccgattaatattaagaatattattaaaaagaaaaagaataatttgatttttagttatcacgggacggatttatatggcgggatgggtttagaggagacgagattacatggtaggacgagtttggatgagacgagtttatatcgtgctatgagtttagatgggacaaatttggataccaggggtatactcctagaattaacaatcaaattacaaatatacaatactaaacaaaagaaacaataataacgtaacaaatacaatttaaagtttaaatttttaattacaaaaatacataaaatcaacattatagtataagtgttaatcttctttgacacctctaaatgttattcttctttgatacatttaaatgtgtaattttaatacattatgaataaaaaataaaatattatcccgtggtatgatctatcacaagtcaaatcctaaaagataaaataacacatattagacttactaatatcataattatgattctttaaaaggcatacacaactttatcgataattattaatcaacacaaacaataacaaacaacaaattctattttgtaatacagaaactaaaataaaatatttaacctgcggtataccgcaggccatatcctaatactctaggttttggctgagtgagcgcggaaaatcttgctaatcaagcatacaatatcttcaaacggttttaattttggaattgagtaagatggcaaattctttattgaatatgttagcaaatttgttgcagaattaacccgcgatacaccgcgggactaattttttataaaagcttgttttattttgccatcactttagcatcatataatcactgtttataccatttctcatcatttgtcatcactttgcatgtttaggatatgcttgcatgcatgttgcatatttgtgttgatttaggtgatttggagcagttgacgagctaactggaagaagcggacctgatcatgtcaaaccactcgaccaccaggtcgagtagaagcttcaagacctcaacagaccactcgaccccttagtcgagtaggggacttcacaacttcatctcaccactcgaccccctagtccagtatattcacctccaccacctgaccgtcactcgatcacatcactcgacttcgaggtcgagtgtcttcacctccactacctgatcatcactcgatcgcaccactccaccttgaagtggagtatcaccatcacaaccactcgactacatactcgatggcgagcttcagagtcttctccattccacactcaaccagacactcgagcacaaggaagaaaagaagactccagcttatcactcgacctctcactcgaccacctgggtcgagtacagttcttaatccgtcctaatactgcgtcgttttgagtattagggttttggaatattttgctataagtagcatgtacttaacattttcgagaacaagtttttatctagttttattccgaagacactgtgttcttgaccttttgtaatccggatttgtctttatctattcagtattcagtactcagcagttgttattgatttcgtttactgttgttcatcctgttatgattctgctattacactgttgttatcatgtcttcattccattcaacgtttatgttctctgtcatgatgtctgagtagtgaataaatttctgaggatgggttagagtagtctagaattctcattatgctaggtggatgagtttgattgatagatcccttctggattagttgttcttaatgcctattgctttttgatcaactggaatttgagcccagatatttccgcgcccaaaaggtgttcgatgaaaagtctgaaccactaattccagagattcgtggctctgtaccaaggtattggttgcatggagcgttttggctttaacttattgattcgtaatgcatgttaggttagctcttgtcaatggtgattgagtttgggactaggttaacttgagggtctctgttgcggtggcacttagatttggttaatgaacttattgtctagggataatttattgagcatgtcaatcacctgtaaagtgaggaaacgaaactactcaattatcccatcctcgcgaattctttatctgattgattttattgtttagtttactgttgtttagtgaatcttgtcatatgttgcttagtttctgcaattctttactgttactcgacctgatattcgaccacccagttgtttggcaacagactgtgcagtcgagtatccctgttacattttctgtctgttactcgacatgtcactcgaccacacccagtgctgttaaacgagctgtgttggtcgagtgcttttttgtttctgcttga

SEQ ID NO: 1205 - DNA, 557 bp, Arabidopsis thaliana landsberg
  unsure (1)..(557): unsure at all n locations
gcggatgatgttaatggatttgctggtcttgtatcaaggtcgagtatgggctcaggtactgcagttggtttgtcaacttgatcttcattgagactgaaatcctccccatcttggtatgcgctgtccttagtgactgacttgggtctctctctagtggataactctcttctactcattatggtgataacatgaacattagcatactccttgggattctgaattgacttccctggaagtcccgtaactttgggagcagaagtagatgcggattgctgcttgggaacaaaaccttgattgtagggaacaaaaggtttgttctgaccttgttggtgatgtggaggatacacttgatcctgtggatttgcaacgctggtgttgcggtaagattggttggggttgttagtcttgaaattggtgtatcctttgtagccaccttgaatccttgattgttgatgtagctaacttcctctaactggttcccctccccatcttggacctgatatngctcgtcatcaacaaggaagtgcacatgcttctgctggctaagaagaatcatg

SEQ ID NO: 1206 - DNA, 2727 bp, Arabidopsis thaliana landsberg
  unsure (1)..(2727): unsure at all n locations
atgggaacagacttgagatagtgatagaatgggaaccctcatactctggaacactaaagaggggtggggagatgggttactggcggcatatgtggtgggtcatacaaaataaaaaaaattagacatggcaataagtatatgtaaatcatgtgtgtccaaattatcatatccaaagttatatatctgcatggtatataacatatagacttctagaacatgtattgttacaggcaattcatgtggaactcatttattggggattcgtttctagaattttgtttttgctttggtaaacatgtgaagagactaggttatacatacatagactgaactcattaaacaccaacaacaatgttagattgataagacttaggaaatataaaaatgtagatggaatagcaaacaagaatttcacataacaaagtcagaacagtagacgcagaaatgcaaaagatacaagttttagaaaatataaacatgtagatggacagataatgatggacaacacattacgaacaccttttctttcaatatttgggacgattggttcctttgtgtgctcgggatttgcaacaggagcaacgtggactactctctcgcggacgtggctgagcccagtaagccccatcgatttgtacccatcctctttcttctccataagtctccatccataaactagctccatccatgtggattggtggccttaagacactttgtaaagaagtgataatagatggagtgcgacattgaccaccacataaaataccgagatctgtccaggcggacacaactaattgaattgtttttgacaaaaaaaaaagtttgcagttttactagaggttataatcgtgtcgatgggaaattttaccgctataaaacagtttttcaattttccggagggaactcaattctgaagcggngtaatgtgatctactatattatttgagacgtacacttaatgaggtgggcatgaagttttcaggaataacaagtttgccattgggttaaaattttatgtcatgaaaaacccgtttagaaacgcgcagatccttttgacccggattttaaaataatgggtaataacttctaatcttggccattcaattgaattgtttttagccgttcggtttcgtagtttcacttaaaaaaacacgcagattattttacccggttttaagaatttaggtactcgcgtttaatcttggccattgaattgaattgtttttagcattttgatttcacatttcacataaaaacacgcggttctttttatcccgtttaaaaaaatcggattctcgcgtctaatcctggccattgaatagatttattactagccatacgattttttagtttcacgcaaaaaatcttccgactatatttcaggcaacgaatcgcattaatttcatttaattcattgcgtatattcgtttccagctttcaaatatatcacttctccataattatacatctaatatttcgtttggatcttcatttagaattatcataaattttccacaagtattccatatatatacataaccacttttacggtaaatgctaaacattttcctataattatgggatttgtgatatggaataaacttgaattccacgaataatatcttctgcgcatatgtttttgacctaagcatttattcttataaatatcggacgcctcatgtcaatctactcactcatcttcacctcatacattcatttctaaaatcgctcaagccttacaagaacgcttggcgtattcaggttaaattgcttcatgtttggaggcaatattctgtaaaggctggtgaatccatcgaaatgattttggttgatgaagtcgtacgtattatatttttaacattacattttgtccagccttatagtgtgggcaagcatcatttgtcacttattaatgtagatttttaattcatatagggtgataagatgagtgctgctgtgagaaaagagcagatcaagaagtttaaaaggtgcttaactgatggtgtttggaaaatcattttggagagcctttcaggcagagatgggtactaaggctacagattagcacggcttatcatccacagacagatgggcaatctgagaggactatccagatacttgaggatatgttgcggatgtgtgtcttggattggagaggtcattgggcggatcacttgagtctggtagaatttgcttataacaacatctatcaggcgagtattgagatgactcctttcgaggcgttgtacgggaggccatgcaggacaccgttatgtgttggggtcggatttgacccaagatagcgagccgacctatgagtcaccgcctcgggagccatcggagaattatcccgaaccagactaaaacacctcggagttctcgtcaagaacccataccgaggtgatgtcgagaacgcttcggggcagtctcataaagtgatcctcgacccgacctcggacgcctcggggataagacttgaaaaatcatcccgaggcgggctccaaaacacctcgggagcttgccttcaagtaccgcagaccaagcatcccgatcatgacccgaggccagcttaatcacggctcggaaagatctcgttttagacagaaaaacttcgaaagacttagccgataatcttcaaagatatcaccggatacaaaaatcccagaatcttcggaggataaagacaaatctctctcaacgagatgaagataaagagggatttccgag

SEQ ID NO: 1207 - DNA, 591 bp, Arabidopsis thaliana landsberg
attctactctatatattaagcccttcatgtaagaatttaaggagcctcaccatccaccagataaaaccttatccccagttccatacgtctctgtcggatgttgcgttcaggatcttcccacacttgctttcctttctttcgcttggaactctcaccaaattcataggtaggtctagttgaaggtctccatcctgaagctataggagtagaatcgatgaggtaggttgcctgcagtataaaaattccagcttagaacaggaaaatcatgcagaggtgaatacgttgagatattagaattttgtgagttaatctcttgatcccatcgattgaggctgttggagccttcaccatcatgcctctctggaattaccatcacttctgattcatcatctaaatcctcatgatgcactaaatacggacaatggctgacttgatgatttacacggcaacaattagtgcaaacttgttggagtttttcatacttaaaaccgttcatggccccttctcgagattcaaagcgcactcttctaaagaaacgtagtggctcaataaaatcaattctaaccttgactcgaatgaaggtaatctgcg

SEQ ID NO: 1208 - DNA, 1631 bp, Arabidopsis thaliana landsberg
gggtgacataattaatttcaggtgggaggaggaggcctaacaaaatggatcagcttattagacataatatcaattgctttggttttattcgtggcattggcgtcaatctggtttgttactcataatcccgtaagcggccaaaacttagctaatgagactcatcaaaaactgcttaaattcccaagtccatggttaaataacctcacacatgaggcccaaccgatacgtcgcaaagggcctaagcgggtcattgaaggtccaatccttgcatgcgttcaacatcctaagtctgagtttgtgcctgaaagtgagccaagaagcattgatttgcatataggtcgacgcttatggttcaacgaagagcaagtggccgaggccgaaccaagctttgtggtatgttgagtgaaatgtatgtgacatcaacatctttaattatatgctaaaataaagtttgatagtgtgtaaacaagttatatcaaaaaaggtgtttcttaaaaaatctcttaggtcatagatttttttttctttcaattaaattgtataaattgcatatggtcaacattttcttatctctaataaacaacatgatgaagatttgtgtggacattcacagttagtcaatggatgcattatcgcattttgtgaagagacatcaaagttcattgatttctttcttagatcgaaccatatcgaaaagaatgtgtctttactttttaccattttacttttcttttttttgaccttttctttctcttatagattaggtggtaaatgaattgatagttagattataatcagcataattgattttaatattaacataataatttcacaattactttttttgggaagaaacacaaaaattttatcagaatgttgaagatacggaaatgtccctgaactactgttgtatttaccggaagattccactggctaaaagtctttttaagataggggaattgacgaggtcgttagtgggctaatgggctgtaagatgttgtagtgtctattttattctcatactttttgcttgcaataaatccaatccaaagaataattcttggtttattgatatcatttggacaaactgagtgaaattaaaatttggatctatgtcaaatctcgacaaaatggataatattagaacaaaaaactaggttttagtttttatttaacgataaattaataagtatatttttctggcagcaaaaaatacaggtattattttgaaaattattaaataaatcagattttttttcaggaatttttcataaataaaatttaaaaaattttgacgatttggttgacattgatgacagtcgttatatcaaagggaagacatcggaaaaacgtttgttttttttttattttcaacccaatctaatttgattctttttatagcaacggaaaaaattcatttagtaaggctttatgagaatcttcccatatttgataattgacatttcataaagcctagaaactacacggttaaatctgtttatcatactatgtgtttagttacgttggatgccaattcatgttttataggccccaacatcaaaaagctaaaagcatactcatggaacgtgcaatgtccgactaattacgtcattttttgtagcatttttttt

SEQ ID NO: 1209 - DNA, 537 bp, Arabidopsis thaliana landsberg
ctttttcctctattacatacttctagcccttacaaaatatatctaaaaaagatagttgtctaaatttatatcattaattaaatttatttgttcttatatttaatttatttaattctatataaaatacatatagttaataaaatattataatttttctgcatatgatgtaattcaaatttttaaaaactaacatatattacttaatcgatgaagaaaaaaataagtggaaaagcttgatttatcagacatccaaaattaaagtgttatctggtttactatgattttttattttaaagaattgaatctttaaaattttgaaaatattaaaaataaatattacaaattttaaaattttgaaacatatatactttataaaacgttttaaatatttataatttttaaactggtatgaagttttaaatattataaatatttaaaatttataagaagtttaaatattataaatatattaatacgggacgacatactacgggtaaaatcatagattaacaatcaaaatccaccttttcaatttta

SEQ ID NO: 1210 - DNA, 2790 bp, Arabidopsis thaliana landsberg
  unsure (1)..(2790): unsure at all n locations
ggccggtaattagttctggtacgttaatgtcaaaattccaaaagagcaataaaagaataaactttgaaaaaaaaggcatggttgatggttatataaaaaataattaaataaagtaattatatctcaaacttaaatcaatggcacataaaacccatcgtgaaaaaaaaaaaaaaaaaaaaaagtatctactatatgaatctattctctagaaggctcttcgagacgaatgtaatcatacataactccttcaaatggtcttgatgctttagcttgtcgaagataaatcgtgttggttcccgtgcgtagcaaccttccaggtacattgatgctataaagccgatagagtccatggattccatgtcttgctatagcattatctcttccaatatatcccgttgagaaaaatggcctcgtgtattcgttattgaaacgtacttgtagattagcccatgcagccgaggctaaagctagctgcaatgtgtagctacctcgcatgtttacatatggaagatgaaacacagtctgccatgtagttggtgtgtacgttgaatcaccgatttttcttgtgacttgagagtagaaccagtctttgctatagttactaactccaattgtgtagatgaggtcacggtttggatataactctgtgtatcgttgccataatccgtactgcctaaacttgtccgtgtggtttagatataaagggttcattgtgttcttgtatggctccggtacaaagtattctcgagctcgttgatgtggatggagaacattattgactcctttgtatttgatgccagttataagtccttggggactcgagaaactgacactaataatcccgttgtccactatcacttctctagcactacaagaaaacacgtattttacgagggaaagtttcctcgtaaatccgtcgcaaaatgcgtatagcaagagaattgctacgccacgtcattccttgcaaatcgcggctcgcaaatttaatatcttgcaattccctcgcaaattttgcgagatacctatttcgttgcaaactttgcggggaccacaatctctcgcaaaacataagtgtagcacttccctaacaacatttgctagaaatttgcaagtctgctgcgagtcttttttgttttttcatttacaaattttatgctgatttatttttatggtgattttaatttgattttcagtaaacatataaaaacatatatgaaatcagtagacattcaaaaatattaactgctaaatgattcaaaaacataagtgttgagattacaaaagttgagattagcaaacccaagtcttaaaacaaaagttgatattagcaactatataccaagtcttaaaacagagagaaattaaaaagcttgtgaagtagaggagcctggtatggtaccagttcttgtctccgtctcagttccggtctgatcggtgaaggtctgatcacctccggtctggttgccctcagctggtcttgtggcgtctgcatttgctggttcagatggtcttcggtacatgcctgcaaacactggatccttctctgcgaggtattcaaaataggcatcgaaactattgatcttctcagcctgaagttgaagacgagcttcagcagcagcaagcttctccgatagaacaaccggatcatctcgaggaagcaccgcgtccgcatgcgccnnnnnnnnnnnnnnnnnnnnnnnnncagccccataaatcctgcctttcttcttaggagcaacatgtcacaaactcataaccaaaacaagcaaacatgatcaaagcaaagtcgaaacatatagacataatgcaaaactcttaggccgaaaatacaatgatattattcagaccaacaacacaactgaatcaggccaaaaacacaaagacacaacatattccttaattaattctgcccatgaatccatagagttttcacttaagttattatcagctttaatagtcatcatcctagatgccaaagataacttagaaagtccttctctacatccctcgtagagtggttgatttacagcatctaacatatcgtaaaaatgttgagcatctaggttgggttcttcactaatattttcaggaaatgaagcaatagtttcatgaaatgcatccgtaaccatatcatgaaatctattttcctggttatgcccataaccaaattgatcaggtacttcctgaccataattcgcatcattattaaaattactaggttgctcgacaccataatttgtattactactgcccgcactatctctacaaccttccccatgacgcaaccataaataatagttcggcataaatcctctattatatagatgcttcttcactagattaaattccaaatatttatcgttgagacacttacgacatgggcagaatattgaaccatttgcacgagcaaatgattcatttgttgcttggtacatgaacccgcgcaatccatcggtaaactccttcgtgacatcaccggtaactgaatctctatgattatacatccactgtcggagtgaatatatatcatgttctccaccgcttccaaacattttttttttttgtgtttgtttttatatattttctttgtgtttgtgtttgtttgagttgtgattttccatcaactaacgtatggtatttataggggaaaaaccaaaaatattgcgaaggaattgcaagaaatttgcgagggatttcacctaccaatatacctcccacccacctactaatttttatttaaaacgtgcgtatctaactattccttgcaattccgtcgtaaagtatgctagg

SEQ ID NO: 1211 - DNA, 1861 bp, Arabidopsis thaliana landsberg
ttttggcgaatcgaggggggaaatttgggagaaattgagcgtttgtagaggtaaatcatgtgtttaccagtcatggtatcaaaaaaatatgaagcacttaaagattatcgtagagaaatggagtctagagagattgatgaagatggtgttgtcgttaacgctcaatatatatcgattgtcgtggggcttcgttccctaagatgggcttgcttagtgatgagtccatgcccattcctgacctgcgggatgacggagcaacgttatgtactagagagggataggctgacttgctcgagcaatatgtttttccggatggtttgacagtaataataccgaaacaccatcgacgtccttggaaacctaatcggggattcttctgtatatacgaagattattttattgacgatgggcttcgttttccgctcctagatttactcatgcgatattgtcttttaaggaggattgcgttttctagcttgctcttgctgcggttcgcaatgtaattggcttgatgatgttgggagtcgactgtggagttgaagttgacaccgatcttttcgaagaggctacgacctttaatgttctgaaagataattcagacttatgtcaagtgaacgcgagaccctaccataagttagttaaagggatgaagaataaagttcaagattcgcggtgctattactttttcgtggaattatccgacatttctttttcggatcttgacatctttttcatttccgagtggaatatgtttcacggtagatctttttatttatgctcatgggactgttgtgaatgctactttcttatcgcatttttgtttgtttgcagcgcataactttcggcctcgaggaacttttggagggatataagcgagccttgctgctgttaggacgagagatcgtttgcattggccagacgttatcgactcatttgaaactcgtaagttcattgaaaatcttgttcgtttgtcaatttgtctcgatacgtttttttatggagactgttttgcagattcgccgtcaagttcagagatgggaaaagctagtcgccagtttccgatttacgtcgatacgttcagagaagatagttcggtagagacggatgtcaatgtatccgccgttgtaaccgaacagcaacaggtagtgacaaaggtttcagagagtggtgtgattgagactaaccgccgggctgctagcgaggataggatgacgcgactttcagatgctcaagctaggaagaaagcttcaggttctgttagtgaggatagggcgaggcagctttagaacgttcgtgccgggaagaaagcttcgggttctgttagcaaagttagagctattttccgtgagccatcgagtgttgacgtttcctcgcggaggctctactcaagatattcgggaggtcgatcactccttttctttcaattatgatagaaatggttatcgtttccagatagcagaagttattgcggcgagtttcctagaaaagttaccgggtcgtctcgtgagatccctcccgttgaatcccctatagcaaagaatctctaccagatttgggcttgtaaggaggttcaggtatgtttatcctatgtttttcgctttgtcgcgtttatcgttttcttttatgataactttttgttctattttttatctgttaccagtcgattaccaccggaaatgcattatacaattttctcgaggaacaggcgagagaggcgagggaggaaacggtggtcgttcagaaaaatgaaagatcgcggaatttattgcagcaacccgtttgtgtaaccttgaactcacaagagctctttggaaaagtctcaaaaaagttcggattaatttttaagttcgagcctgagaaa

SEQ ID NO: 1212 - DNA, 1864 bp, Arabidopsis thaliana landsberg
  unsure (1)..(1864): unsure at all n locations
ttgcaatctttgatcatcgtcggctagaagaaaccgtggcattttatcttgatggctaaggctcttcccccggaatgatttccacacgagcctccgtgaacttctttcatgactttgcgagccgcttctatttccacacaagtcattaagggtccggatagtcgccacttgtagagtttttcctcgaccagaacgaagcgcgcagctgagctttaagtttctgagcttcccatttgtctgagggcactttccctttgaatatgtagcttttgatgggatatatccattcgaagtcgcaacccaggtctgggctatcatccgaagcgtcgtcgcaatccgcgccaacttgtatgtggaagacaagttcgttnnnnnnnnnnnnnnnnnnnnnnnnnnnnnnnnnntctaccggaatgactcatctcaggcttgggtcagttgttgaggccagagcagctagggtgtcggccgatgtattttctcctcgagggatcctcgttaactcgaattcgtcaaaatgcttcgccagattttgtacatgagccagataggcttccattcttttgtcccgagccgtgtattctcctttgaattgatttacgacgagctgagagtcacaaaaattgagtccggctacgagcgcttcgtactcgaccacgttgttggtagcctcgaagtttaatctgaatgattgttcgagaacctctcccgtatgggaagtgagacggatgcccacgcccgaaccttgctttgatgacgagctatctacatgcaatagccaagttgtatcgagcggattctcccgggcctcctttctgggtagttccgatactcgatggcatattcgatgagctcgatttcccatttagccaggcgtcctgattggcttggactgtgtaagacagtgcagagcagcatggatcccattactacgatggaatgggattgaaagtagggtcgcagtttccgagccgacattacgactactagggcgagttttccatttgcgggtagcgatactccgcgccggtgagtgtctgcgagacgtaaaaaatcggtttatgctcgcctctgtcttctcggactaacactcccctgactgcagtatccgacacgacaacatataagtagagtggttccccgattacgggttttgcgaggattggtggggtcgccaggtacttcttgagtttctgaaaagcctcttcgcatcgggttgtccattcgaattttttgttcccccggagcacatcgtaaaaagccaagcatttgtcggtagattgagagatgaatcggttaagggctgcaactcttccagttaggcgctgcacttctcgcttgttttgaggtgatgtcattcctaataacgcctcgatttgcttcggatttgcctcgatgccgcgatgcgtgactagatattcgaggaagcgtccatgaatgatagcaatttgtttccagaggttgattccacgaggcgattgatatgcggcaatgggaaactgtcatttgggcaggcagactctccatttgccgtttttctcttttactacgattagatttgcgagtcagtcggggtaatttgcctcggtgatggagccgaagcttaacagttcctctacctcggctttcgcagcttctgctcgctcccaacataattttctcctcttctgcttaacaggtttatacgttgggtggacgttgagttcgtgtgctacaattttgacgcttacttcgggcaagtcttccggggaccacgcgaatatattgacgttttctctgaggaaagaagttagctcggctgttaattcttcgcctaggtctccgccaatttctacgcatcgttcgggtttttcgtcatcaaggc

SEQ ID NO: 1213 - DNA, 1124 bp, Arabidopsis thaliana landsberg
atggaatcacatcatacacattaagaaatctaatatgttattaattattgtagtatataagattataaattttcaaaacaatatgtacgaaattgaatataaatattcaaattatgacctagtactcagtagaaagttttcttaaatctatttttgacccgttataatatttttttcatgtattaaacagtttatattcgtttttaaaaatccaaattagggcatatgcgaaaaattctaattacttttataacgatggtattattttttcgcaaaaatagaatcatataaagatgagaggtgaactataataattaataaaaaattaatatcataatttagatagcaaatctaatttgttgattttaattggttacttttttggaaattaataatgtatttcgttttttaattaaatttaattaattaaattagtatttgactttttaattcttaaagagatgaattaatttactttttaaaattttatttctaatggcatacttatgtacttcccaaataatatagtaggatcatattgcaacatctaacattggagaaacaaaggtggagagggaagagtgagttacaacaacatgtacaaactgataatcataggtatattacaaactaaagtgtaacaggacaatggtaaacttggtaatagtaaatccatagcaaaactcaataagaccaagccatcttcaattataacagatttagtagtagaaagtattcaaaaaggcagtgaaaacaaccaagcagtggaagcataccaacgtgttgccaaagtaaaaccggataaagccatagtggcatccaaaaatagttgcaacatcacgcacaagttagacctgaaagaggttcattattttctaataaactgaaagctttatcagtaggataaaacttgaaccttataattaaaagcttgataacaaaaatataaacattacaagccaccacataaagcaagtattcttaagtacacgtgtcaccaaacacttcaacccaaacaaaacaagataacccattgaaggaggaaagccatgtgtctacatcttgttcgtaggatgacgataaccagaacgatggtgagcaccttgagaatcccgccgaaaaac

SEQ ID NO: 1214 - DNA, 572 bp, Arabidopsis thaliana landsberg
  unsure (1)..(572): unsure at all n locations
atttgtaaatcacatagatcaccagcaaatattatttaggcttttgcatacaatttttatagatttccaatatattaagtattaatttcttataatttatatcttgaaatttatggacatcaagagtatagcttgaaaagtaagattttaccaaccatacatnnnnnnnnnnnnnnnnnnnnnnnnnnnnnnnnnnnnnnnnnnnnnnnnnnnnnnnnnnnnnnnnnnnacaccggtacttgcaacaaaagcaggtttnnnnnnnnnnnnnnnnnnnnttacagaatatttagaaccaaccccatgcattagtgtacagaaaaactcagtcctaccgaaaacgctatcctcaaacttaaaattatattcgtatgaacgagccactgtgtgaataccgagatcatcatctttagatttgcaatgaaccgtaagaacatcataattcctgctaaaagagtttctaaagtgtaattggttttttggccaaagcttgcttccattgttcgatccccactcaaagctataataatgagcaaaacaaaaagattattcataatttcacagagtagaaa

SEQ ID NO: 1215 - DNA, 1469 bp, Arabidopsis thaliana landsberg
ttctgtatatatatatacaagttaattttttgaataggaaaaaaaaaaacattgctgttaaaaattaatcaacgaagataacaattgaattgaaatatgctaatgctgattattgacttcatatttatatttaccttttctaaattctacagaaaaagaagtaaataaataatataatactaccacactaaaagataacgactagtttgatggaaatgtgagctgtctcactccttcacgcatcgttaagagcgtttaaacgtttataactgcgcacagtcattttgtataacacgtgtccggttaaaagtctacgtggcatttaagtgacagcgacatctcatagaccattggtccgacgtggcattacgttgcgaatgggcctgaatagaataaaattatgcccaataaaaagtctctcgacctaactcttaaaagcccaataatttgatccattcttatataagggcctgactggtttaaacgcagcgggtgtggttgcgattgcgagagtttgcagaaacgagcggttgcggtttgagcgtttgataatgggtgcgtttgcgggagttttatgatcggtaaaccagcgggtgcgatagtaattaaatacaaaaccaaaataaatataatatattactattaaaagaaaaaaaaatacaatatattattatgataaattgataatattagaaaaattaaacatggttaataattaaaaccataaataaaacattaaatttaaaataaataaattttgtaagaaaaagtttaatactttatgcatttggtacatcaccaaaaattgcatcaagtagtgtgataaactgtaaataacgttgaactcgcgggttttccggattgcctctatacatatgataaagtttcttcaagatatccaaacgatttttaacacatctccaactcaaatttttcccaaactggtcgttaatattcttaagaatattttctttttgaacatcacttagaaatctgattttgggatctttggaatcttccgttagatattgattaggttttttttaataagaataagatatatagggtttgggtagaagacataattattttaattaattaaaaaaataataataatctaactgctaccgcccgcaaccgcaaacgcttgcgggaatgagcttttgaaatctggcgattttgaacggtgtaaagcagtatctagcgatttgtatgattggtgtcaatcgctaacaatcgctagcacccgcaaatacagcgtttgcgagtaacaaagggagaaccaatcaaaccctaagtaattgtctttgtctttgatattcctttcttctgacccaattaagacaaaaccctctacacacttttctctttcgaagacaaagatgaactgcattaataattcaacgagcccaaacaggcccaatggcccaatacggtccatcgactaaatatatcagaccctagttccc

SEQ ID NO: 1216 - DNA, 599 bp, Arabidopsis thaliana landsberg
tgtttttcctctttttttgcatgacgtttagatttccgatttccttccttaaaaatttggaaattagctatattgaccaattttatttccctatattttatctcttacaaataaatgttagatctctcttttcacaacaacatccgaatatgaccgctcattcaatcgtcgcacacgttgatagcgtccttcccaagaaatctcgtgagatcgaccgtcgccgccgcagacggaagcggaagaagaagaacaaagcatctcaggccgatgtagatgcaatggacgtgtcaaaatctctgtttctcactcctactggtattgagacaccggatgcaattgaacttcgtaaggaacagagaaaggaacctgatagggctctataccaggtacttgaagaaaagggagagagtgttgttgctcctggaacattgctgagaactacacacacatacgttattaagactggtactcaggacaagacgggaaccaaaagggttgatttgctgagagggcaaaagccagatagagtggatttcagtttacagccagaagagctggatgctatgggacatgtttacagtatgaggaggcaagagaag

SEQ ID NO: 1217 - DNA, 2596 bp, Arabidopsis thaliana landsberg
  unsure (1)..(2596): unsure at all n locations
catataaatactccacatttgaatagaaaataagctccacaatatctgagaaaatagaatcattatgcatcggtaaaggtgtcttttagacttgaacctttcctagtaaacacttattggatttactctgtaggtagtgaactcttgtcttgaactaaccacgtttgagagcaaatcgagacaataagtgaaacacataaactatcagctcatttcatgtttatacagttgcgttcattttggtcctgaacatatcccgacttcgtgagagctctagagaatttagccatttcaattctcataggtgcgaccacgacaccactccaatataggtaacactcttgtcttgaactaaccacgtttgatagtaagctgagacaatacgtgaaacacataaattatcagctcatttcatgtttatacggttgtgtttattttggtactgaacatatcccgacttcgtgaaagctctatagaattcagtcatttcaattctcataggtgcaaccgcgacaccactctcatataggtaaccttaattaagaatagtccattctattccacttttaaaaaaatattaatgttattaagaaaaatattcatccctttaaacatcaatggaaatacatttaatttcataggaataagtagtatgtatctctttcttgagtcttcctcagccagttggaaatgtatctttgacttgagtcgtgtaatatatatctatttcaattcttgagtctcggtgggttctaccgaggcaaagcctttgaggatgtatcttccacttgagtcgtgtaaagtccatccaattgccactttgcttttagggctagtccacgaggcatctgtataacagcagtgagagggggtttgacgaatcacttcctgaaaagaggtagggttattcattttggttaggtccttcgggttagcctgcgagggacaagaaggatttgcctccttccacattcgtaaatcaataagagcaatctattgttattgaaaaataaatcattcttggctttccatatgcgccatccaataaaaggaaagacttggctcttgtcttttagggcaaataatgcctgaatatacaagagttgacacgagcttgggtctcatcctccaaatgtaaaagatatcttctggatggatcatcgcctgcaacttctactcatcccattggttggaatacgacaacataagtcctactatcttttaaatatggtttagtactagtagtttggtaagtttggtcttgccggattatccagccattgatcatgccatattcgtatggtattcccatcacctacttgccattttagaccttgtttaataagaaaagtaccttgatatatgcttctccacgcatgactcggtctgcggccgagctgtgcttccttccaaaagtgtacctctaggataatatttagctttaatcactgatatctagtgtttttggttgttttaaaacctcttttctcttaaattttttgttgctttgaattcatattttggcatatagtattgcatttgcatttgcatttggttttcttaggtacatgagtggagtttagagtcttcgaagcaaatggagcaaacaaaggagctaagagaatgcaaagtgaccaaagaggagaagtgtagaacaatagatcaagtggtcgattgcttggtcgattggtcaggaccagagctctagaggaaatttgaatctaccaaaatgggcgattggtaaggaccttacctttaagtgcttttcataccttacctttgaaaattgttgattagggtgattcgtggctagatagacttgtcatttatgcttattgatcatttgattgcctttggaaattgttgatgattgattgattaataaagggattaatatcatggaaatgtgttagtcttgcttagtgttctatggcctaaggatcattgcttgttagaagttgtttgatgctccataatccatctgtttatcatttctaatcgattgccttaacccgagaattcgtctttagttatcacttagtaatttgttaatttcccgctttgtttactttcgaaacttgttagtcttttgtttcttggtttcttttactttgttttgcattgtttgcttgataatgcatggttattaagatttagaatactcaaatcatctgttagcttagattaagcaattgtgtgtatcttggtgagttgattgattgcaaattgtggttcgataaacaattaaataaaatgctacatcaatttggcgccgttgccggtttgcaatatttattagccattagaatttcatatttgcttgagactaaaccttttactttcattactaatcctttatacttgatatttgctcttgtcttataggtgtatatgaacctacgaagtcacgaccgagcaaatttaatagaagagattagcgaaatccgccagtttgaaagagaaaatgttagagcaagaagagaacaagaaagacttgaacaccttgctcccttaggcgtcatgtatgaacccggacttggaatccatactaagtggccnagaaaatggggatgagtcatatgccaggacatccgcc

SEQ ID NO: 1218 - DNA, 2063 bp, Arabidopsis thaliana landsberg
caggtatgtgtactttcttccatttgtcttttgtttaaggttaaattgcctaatttggttgagcttctatgaacagccaaggttgctggtgttaagcatattgtcgtggtcgggtcaatgggtggtaccaatccggatcatcctttgaacaaactgggaaatgggaatatactggttggtggaaatttctgtgtgtttgtctttcccaaatgagtttagtttcttacactgcgatcaatatttggctacctaatatgtgttcaggtttggaagagaaaggctgaacagtaccttgctgattctggaactccttacacaattatcaggttaaataaattctttagagtgcttctattacaataccctttttatattaccacatcaaaattcatcccaaattctgtagtttcaaaaacttctagatacattgtgtcctggtaattggttaagctttttattctgtggatcaaggagtgttattctctatatttgcgagcctgttcttacttgttttcaccatactttttctgttgatgaacttagagctggaggacttctagataaggaaggcggtgtacgagagctgctagttggtaaagacgatgagctacttcagacagacacgaaaaccgtccccagggctgatgttgcagaagtctgcattcaggtctactcatctgctgtgtatgtgtgttaacaaaattttcatatcctctccttggtttattattttcagatcttgatatttcttctttgcaagtacaggcattgctgttcgaggaggccaagaacaaagctttcgatctcggctcaaagccagagggaaccagtaccccaaccaaagacttcaaggctctcttctctcaagtcacctctcgtttttaaatcattatctttgttgccaataagaacatttgggatcaaaccttctaaaataaattctgtagtgtctatttgaaaggatacgttctttcaattcaatgagaatattggggttgaatgttcaaaatttaaaattttgatcatacagtaacttctccagagctattcattgaggtgaaacacttattttcatttagtctaacacatcaatcttatagccaacccctttaacaaattaaagaatctactttgttaacgttttggaattaaaaatagaaatttcagttgaaaggagacgatgaaccctttaagagacgtcatgaagatcgaattaaatctgcagttgaaatcgctagacgggatactttggatgattcgttatcaatttggtgttataggagcgtgaagaacgaaagaaacgaatgagatttgacaggcactctcgaaactctcagctggtttttcgtgatcagtcttatcagaacagagacattagagtttatgatcaaagcaagctccctcagggtaagtaaattatatgctttggcacttgttcaaatgttaggttcattggtttgttaaagtatgttttcttcttataataggtcggctagattgtcctggttttggtctggagataggattgtatgcttccttgtttatcttgtatgtgatgttttttattggtgcgtatgattttggtcttgaatacgacattgaatctgaacactgctgtgtatcttactttgacatggctagtaagagtgttactccaagagcaatatcaatctttattgttcatagctaatttttacatgtctctctgctgcagactgattgggaaggtggattctttccattaacgatgcacttcagtgaggattatccgagcaaacctccgaaatgcaaattcccaccctaatgtctatccatctggaactgtctgtctctctatccttaacgaggattacgtaagtactcttctgtttctttcttttcatttctccatcagaaaagccaaatgtatcctcaagctctcttttcttatgttgtatattgaccagccattaccgtgaagcagattcttgttggtattcaggatttacttgacacacctaatcccgctgaccctgcacagacccgatggttatcattatttctgtcaggtacacttacaaacg

SEQ ID NO: 1219 - DNA, 1669 bp, Arabidopsis thaliana landsberg
tgccaacaacatgtgagaaggtgatgatacgagttgatgataaatccgcaattgcactgactaaaaatccgttgttccatgggggaagcaaacacattcatcggaggtaccatttcatacgagaatgtgtagagaatggtcaagttgaggtagaacatgttcccagaattgaacaaaaggctgatatcctaacgaatgcgcttggaagagtcaagttcggagaaatgagggatctcattggagttcaagatgtgccaaaggaagatttcaagcttaagggggaggatgttggtttaaacttgaagataacttgagtgataagttattaattaaaagagagataatgtgggaatcattaggagttctctaaaggttatatgtttaggagttatctaaacatattcctaatgtgattaggattagtcttaggattagtcttaggtgtggtatacctttaagaattttaagagagagattgggaatctttggttttgagttattttctaaagttaataagagaagtgcttttatatttccttgatcttatattcaaactctagagagcctataagattattttcaattttcatttttagttcaaggatttaatccatatacatggtagttatgtatatgcagaacctgaattagactatttaatctttttaatgtaatttgtcgtggatcaatttgaagatgctttgaaaatgttagctgaaatgtttagtagtaacttgtcatgaattttgaactgattcaaaaggagcttataaccattgattcaggtattttaactcttccaatgaacttatgctataagttcatttattttaattcattctattagttatcatttgttttcagaattcgaattacacaagtacaaatgtttagtttgccatgatcaacttttttgccatagagcttcaaaacccaccttcttcatagatttacatgggggaacaaggattcattcaggtatcgagaagctatttaaatgattattacatagccttaaacatggagcttgtaataattttgcatgatgctaatgttatttaatttcatatttatttttgtattcacttttactcgagtttacatatcctaactttttctcacggcttaacttttttccagacaatatagatgacattgggaaactcatcaattagctcatgcacattattcaccataacatcatgtcatcatctccatttgatccgtatatacccgttgtcgttcatcatctttgtggctacatcatttttgcagttgatagataaccactaaaacattctgggaaaaaagttgaatttgaacgaacccatctgctgtagtctccttttctaaacttacaggtactgcagcaattggatgtttgtttgcaataactgccttggcttttgatataattcttcgaggaacgccttatcttgttctttacttcaaccaaggagctcaaccgggtttggtaggttatagtgatagcagccataacgtggatgtggatgatggtatgagtataggcggtcatgttttgtttttatcataatgtggtataactattcccgagcaccacccggaactagaaccagcggactagcttgtagtcgaggaactacttgtagccgaggagcagcgtgtagcggaggaagctttggaggaa

SEQ ID NO: 1220 - DNA, 2903 bp, Arabidopsis thaliana landsberg
  unsure (1)..(2903): unsure at all n locations
ggttcctctactgctgtgtgctgcatcctgtcacctgtttcttattttctgcaattctttactgttactggacgtagtcactttacctcacccagtgctctgcaaagagctgtgttggtcgagtgtttaactgtttctgtttgattttctgtttcctgcttgttcacttaggattgctagaacacaccaaaacctgttattgcttggcttgacttagtgacttctgatcacatcttgattgttagcatcacacccatttggattgacaacctaaaatactacaacgacatgattggtgttttaggataattgactgaaaaacctattatcaatttggcgccgttgccaattgggtgtttgattgttacatttgagatttcagacttgcttagatcaagttctttttcaattttcttttcggttagtaactgtgtgtttttcttgttgtcttcttgatccaggtacacctctgttgtatgcgaactcgatcaaaaggcaatcagaacctccttttcaacgacaatatcgaccgcatagctcgtgaaatcagagaaatgagaaacacagtcaaccttgtacctcaacaaccactcaaaatggctgaagaacagaatcaacaaaatggccctaccaacattggtgttgggaaaataagtctcaaccttggaaagcatatcaagttgcagtttggcatcaacaaaactccacaagggtcaacagaggatggaaaaacctctgaaaatgatagagtgatctcaggagaaggatatgagactgaaagagtgaaagaacttaaaagaggtctgataagcaagatgaaactatagagaagctagcccacaatgttgaggaacttaaaagtnnnnnnnnnnnnnnnnnnaagtaagctcaacctaaaggcaggattgacactatcccgagaaagaagttcacttcaagatggtctgaaaagatagattaccctccagaagagaaagaagcatattttgaagagaggggaattgagtattcttctgcagacctctccagggaggacgttgagtatgatgatgatatcagagaggactatgcagaccctctctatcattcattttcttcttgataagtgtgaggagtcaagctaatgactttaaacaagctcacttgggaggaagtcccatgcttatccctgtatatagtttttattttatttagttacttttgatttgttttggttttggttttgattctcaggaaatgaataacagctggagcaacatcagggatgcaaccgagtgttcaaataaaaaaaatcaattttttttttgatgaatcactcgatcgtaagatgagagtaaaagctcgagagtgcgatctagtggttttgggacaacatctttctcaacgacaatgtcaatctactcgatcgcaacatggaagtggtgtgattgagtggtcttctagtggaattgcccaaaccactcaatcgcaaggagaagtgaaaacgcccgacaggacttcaatgataacccgcctgaagacatgccatccagctgccataatattgccctacaaaggcaatccacctatcaacagagggaccacaccgttctgcaagttcccgtaaggcacgagtctcatgagccaatggagcacaagaggcggaagagcgctaggatggtccgatcatcaagcaagggttggataatgtcgggtcagagaacatatgagcgacgtgctgcacaacctgctggggttgcgatcgagcacaatgacaaggagatggcggagccacaccaagaaccggtcatgcctactgaggtaacacaccaaaactctttgtacataccgcttttgtttttggtttctgtgtttatcttgaattctttcacaaaatttgattacacaagggactgtgtaatttaagttttggggagggttcaagacgtatctgacttattttttgtgaatatcatttgagtgtgcatatcatctaagtcatagaaaagacaaaaaaaaaattgaatttttttgaaaatcaattccacaaaaacagagtgatcatttagttgcattacatttaggatcgagtctaaagtgttgcacttaggtttttctacgattcaaacgtgttcgatagaatgcctggaagaatgtgaattgagcaatgtatttctagccaacgaaagttgaagttaggacgcattgtgaactaaatgaacttgtttgataatgcgaatttgactaggaaattacatgcaaagtttagtaatcgagtagtcaaatttagtgattaatgttttaagaggaaaattagtctaaatttatgttcatgttcaaaaacaatgcttcattgttgaaaattcttgtgtcgtgtttctattattcattgaatctttgaaatacccataacccaatatctttaattcataagtttaattgttaagttatctacaatttttatttaattacaatctgaaaacccaaacaaacaacttttttgttttaggtaagaactagtctcaaaaatgcttaaaagtgtatctttggtccttgtagatcgacttcgaatatactactttttggttaagtgtattgagttaattacttgagcaatcattttaaatattatatttttgtttttttcataaaaaagttatatttataaaccaattttttgcttgatcattaccacaatctactttttaaaaatttcaatccctttcaatctattttcaaattcactttgtttgatttttaaatcagtagattctacatggatttccaaatctactaaaatctaaaagaaattaaactcccctgttttttaaaaaagatatattatctctactaagatctctcattaatatttttaaacatataaaattacatcttaaatttattcaatcgtaataatcagttat

SEQ ID NO: 1221 - DNA, 487 bp, Arabidopsis thaliana landsberg
actctagaggatcccctttttaattactaatgctttcaaggttgggaaagccgatccaactctttttactaagacttgtgatggtgatctttgtgtgtaccaaatttatgttgatgacataatatttggttctactaatcaaaagtcttgtgaagagtttagcagggtgatgactcaaaagtttgagatgtcgatgatgggcgagttaagctatttccttgggttccaagtgaggcaactcaaggatgggaccttcatctcccaaacaaagtacacgcaagacttgatcaagcggtttgggatgaaggacgccaagcccgcaaagactccaatgggaaccgacggacacaccgacctcaacaaaggagttggacaagcactccccggacctcacaagtccatttgcaagtgatgcacatatttagggggagatgtgctacaacttgaccctttgagactaactgtgtgcttgagtttgcttaattta

SEQ ID NO: 1222 - DNA, 348 bp, Arabidopsis thaliana landsberg
atccctgcttatcggtatgaaaacatcattatcccctatgcaaatgagcaatcctaaatgcaaacactctatatacaatcctaaaatgatatgcaatctacatgtcttgaaccctcccccaaacttaaattacacagtcccttgtgtactaaaaatttgagaaaaagttcaagaccaagactaccaacacacaaggaaacatatcaatgctacggtatatacaatggttgtggtggtgatacctcagcgtttaggtgaagtaggaggagacgattcatccatactctcctttgtgtagctccaaggcacgggttgtgctggacttagagtagttgcatgcctacctta

SEQ ID NO: 1223 - DNA, 605 bp, Arabidopsis thaliana landsberg
  unsure (1)..(605): unsure at all n locations
acaacccaaacgcagcataaacttctttactagtttcgtttttgccctagctccgcttatcgatcttttcatctcaatgtactccatggacgatcttaaacattctggaactgatgatgagaacataatttgttcattctactcgaattcctctagctccagctcctgcttataaataaataagaagtagatgaataagatcaattatctgcatgttgatgatgtgttaccaaacaagaaccgatgttttttctttttgtaggatacttgggcgatatgtatcgtcacaaagcttgggtttatccaacgattcatgacaccaaccaataaaactcacagtcacagagaatcactgaaacagggtttaaaaaaaagaaaatgttacatacctatgatgagaaaagacaaagacaaagcgcactgtggagaaatcagaacttagcctgcattgtaaaccgcatgatcaagactagttaccggtacaatgttcctgacttcttcaacgatgtccttatagagtgaagaccttgatnagctacctactngatgtngctaatatagagtgaagcaatctgggtatacatcctctacatcaatcatatgat

SEQ ID NO: 1224 - DNA, 895 bp, Arabidopsis thaliana landsberg
atcccagagtagtattttaggatcgaatcttcgggagtgtagctacaaggaataattcaagttaggtaacctggatcaagacaaacaaaagtgtgagggttgttgtatgcggagaaaataagtaaagactgcaataaaactaaaaagaaataaacggaaactaatgaaaaaccaataaagtaaatgccaataagaagagcggtgtaaaacaagtaaaacgaaacgctaggtcatcaggggttctctccgggcatcatggttcaataataaggtatagatctcaatctaggtgataacatggctaggtttgtttacttccaaattcccggacatacgaaactctaccaagaccagttaaccctaacggctagtaggtgaaaaccggctattatcactaatatcttgtgtactcagttgccctatcggctagtaggtgctaacatggtttcaaaatacaagatcaaagcattaagttcaaatttttattcagttgagttaggtcaagcattcaaacaagcattaagaataaactaggtggcgttccgaacatacaagcattaagaataaactcaactagaagaaatagtgtaaacgatcaaacaatgccataaaaaccgccaacctagatctttgctctattggtccccatgaattgccctttgaaacccccctaaaacttaactagagatctactcacacatactcaaagaacacaacatcatatgaataagagatttcataaaaagagtataagtttagcacagggtttagagatcttccctggaaattcaaagcttgataaatctgtttcctttcacaagtagacgatcgagaattatagagacaagagagatctaatgaagaacaagaagaggacgactttagggcggtgaga

SEQ ID NO: 1225 - DNA, 550 bp, Arabidopsis thaliana landsberg
  unsure (1)..(550): unsure at all n locations
tgcctacagaaaannnnnnnnnnnnnnnnnnnnnnnnagcgttcttcagtgaattgcgtgtgccaaccggtgaaggtcctaatctagatgaacttaggcagggcttagtaacgtgcagagcttggcctactgaaaagcgtagatggtttgggttattgactcctctatccattggactttttggcttgcatactaactctaggataccatttgagagtgccaaaagagttttcgacgacgaagccatgaagacttatccatggggtcgggcagcatatgaagcccttgtcgtttctataaagttgctgaggcctattggcaagacgtacaccgtcagtggtctggttttcgtgttgcaggcttgggcgtatgagtcaatcatcaccatcgccgagcgttttgggaacgctgttaacgcggatgagattccgttgcttcaaagtttgaaggaaggtttggatcgattgagaacgatgtcaaacagattaaagagcagctgaaggcgatagctgattcaaaatcacgcagctatattagagatatgttttta

SEQ ID NO: 1226 - DNA, 16486 bp, Arabidopsis thaliana landsberg
  unsure (1)..(16486): unsure at all n locations
gagtatcaacaggactgcccacatcatggcttcaatgaggtacaacttcttggtacgtttttcaatggagttgattagagataccaaatggctctagatgcagcgagcaatggtaacttcaacacgagatatccagttgatgctactgctctgatagagaacctagcttgtagtaagagcaccaagaatgctgactttgagaggaaaaagattgctggagctgtttcaggtaatcaaattgcagaggtacatgctaagctggattcggttcacaacctgcttacagggaagaagcatgtctaccttgcagctgaggatgagaccattgagccttagactgagttagaaaagggagtcttctacatagatgctcagggctacaagaagtttggacagccacagggcaacttgagtggcaacaggtttacaaggaactagagttcctcgaactacactccaaagcctgctttctagaagacatttccttagagcaacttccagagaacctatggtaattcagtttaccaagccccccatccaccctcatcagagaccagaatagaatccatgcttgagcagattcttgagagccaaacaaagctcgttacggagtttaatggcaagtttgatgctgtctacatagatcttaatgggaagatcgacaatctgagctctcgctagaagaagctagatgtataggaagctcaaactacacaatctatcaagagacaagagggttttcttcctggtaattctgatgctaatccaaggaagagttgtaatgccatcttgatcagagaaggagatgatgtgtgggaagaattggatactgaagacgagttggagacgacaccctcctgtgtcgatcaacaccatatgggacgctcttctcagagacgactcaatacgacagtgtcgatcgatacccctctagtgtcgatcaacactggatcaggactgcaccttgtgaggtgcaagaacctatgcagcccaagtctgtctacactcctcctgtcccttatccaaggaggcgtcgttctaagcaggagcttcatgctgctaagtgcacatccataatcgaaaagatcctccacactcttcctaaggatgcttcagagacatcttccgcctcactcaacaggtatgtcaagcgacttgttgacaatggaattagctcagatgaatcgttttagtgtgttttacatacttaggacgattttgcattaggattgcatgtgcatggcatatttggttgttttcaggtactttggatgcttttgaagttcaaacagaggaaaaacagaacatgaagtcagaatgcccaatgacgccttcaacaaaagtactctatcgcagcctctgagccctgccagggtcaatcactctatcgcaaccccggagaagccaacagctcagtttcactcagtcgcgaagccggaggaatcacccactctatatcgttcacgtggcaatctttggttggtcccggactttcgctgcgggattcgacaccaacaattagccccccaagtctttcgaagtgttatccttattcggaagactttaatgctttaatgtacaaagattgcgctcgatgattgtatgatttcccgccaaaatcttgttactcccttgattccgacactgtccatatttacccgtatgacatctgttaccattatgaccacatcttaattatttaccattaaagcgggaaaatccttcaccttcccccacgactcccaaggcggttccatcatcatcaccagcttgcgtaaggtaaatttattttactctctccttattatttttcactctttatctttcttttagaacaaagttcctttctattttctctctgtaattttctcttctaagaatcaccggactatccattttctcacgatgaattctgaaaatgaaaggcccgaatccccatctttcgaaaatgtggttctagtaacgacctttacacccggccgaatgacatcgccagtccacattatcaatctacatgcactcttcaatcccttaaccgactgagagaactctgccgaatcccacccgaagttatgagggattcacagatgccagagcccaccgaatcgccggaggaccaccgtcccggattcttttgcgtctatgaaatctacttcaaaggttgcggattgaccttcccccttcccgaagctttggttcggtatttggctgctcttgaaatcgccctacctcaattgacccctaatctcctccgcaccatcctatgtattattaccatcgcggcggaggccggtttcgtcatcggggttcccgagttgaatgaacttctcagtgtgagagttcgtcgaagaaaactgggtacttctcggcgtacccgaacgccaatcagaacctcatttcgaatctcctgaacaaggatgagaattggcatcatccttggttcctagttaaaaagagccctccctcgattggaaacctttccgatatgcttccatcgaagtggtcnnnnnnnnnnnnnnnnnnttaggtcacgtacgatttttgcttatccttgtttctgatttaatcgattttattgctttcaactcgcagcttttatcactctaaccctcccgaatttaaccgtagagttcgtcgaatttttcaagatcgtcattgaaggagagaccctttggaattctttcactctcgaccggttcgtcgaagccaatcacaagctcatgacgaatcctcccgggcaactacttcaacttccaccacctccacctctgcctcacggaacttctgctagggccatcgcttctcgtcgcaagactttatccaagccgatgacagaggcttgtgaagcaaacaagtcgttccttcagtccgctgttgacaagaaggaatatagcagaactctcctggttgatgatggtagcgctgaaggtgcaagatctgctggtgcatacagacctacacctcaccgtgaaggccatggtagccggtcacctcgcagagaccaatcaccacgtcgcgactcgcctcgacctgcttctcagactaggttaagcagcgagccgatagcagacctgtatcggaaaaagagggaaagagcaacccgcagcagttcttctcctaaaagagataagacgagagctcgaactgaccgttctcctcaattgtctcccccacctcgctcaatgggtccccctcctccagtcatcgcatcttcttcttctagatctgggggtgaattgactggtcggagtgcagatcctcgacaggaagaggctgagccccgagatgccaaccctaagtctaaggccgttctagttcctcaaaccaaatcacttgcaggttagaaattaccatttatcctctttacttgctacatcgtttgattcatcggcctaacttctcatacacgggttcgaatctctttattactttgacagcgatggaaacagagggaaacttcttccaatgcttcaagactcggaaagacacaatcctgccaacctttgacaggtggcgtcctgcaattcgcgagcgattcctacttcacgcccatcactcatctcgggttagctctctttatttgtgacctttaagctccactctttcgcttatacgctaattcacctttgtaacccttggttcaggcaaacatcgaactcaatgacatgattaagtattatgagagattgttgcttgatagggaacaggatgttatggcctggaaagataagttttcttctcttgagtccgatctacgctcttccactgaagtcatgcaaaaattggaagatcaattggacaatctttccttcaaactcatgaaatcgaacggggagttgcaggatcagtatcagaggtatgacaagatccaggaggaactctcgaatgctcggggcagactctcagaatctgaatctagtgcttacgacttgtccaaccagctatccgaattgcaggccaagtacaaagcaatcgccaaactttgagatgctgagttggctaagtcggcgtctaaagccagaaatgaggtgaagggtcgcaggatggagttgattcaaggggccattcttttcattcaaacctaaggttttgaattaagctaaacaaatagattataaaataaaagacaagacaagaaagcaataaatgagattgaaggttcagatgattaaaacgtcgggtttagagaaattctcaggagatatcagaatagtagatctagcagtaaattaggagatattatcgaaccattcgaaaacacaaatcactaatataaagtaaccggtggtgtgccgtgctacttgctatgcttaatagtattgatcccaactctcttgtaaatccctagaactaagcaagcattataatcaggtttcataagttcacctaagtaatcaacgctagcacgcatctaaatactaggctcatctcagatagttccagtattagatatctatggtggacatccctaataacctaaaatcaagttctagctatttactctagaactaactagaactagcattaagaataatcaaagatgaagaattctaaatattttattctaacagggtttttgatctactaattcatccaaatccctaatgagaatccctaaacccaacaagagaactactcaagcatgatcatagaagaacataacatgattgaataagaaatcaatgatgaaattaagaggagaaaatagtttagaagaatcttctctaaagggagtctccacatggttttgctcccaataataaaagagataataagagttaggtctaatcgataacctttaaaacttatatatatatatatatgacctaaaacgtgcagggacttctttaaaaataggaaaacgttctgtgccgaatttgaaaatcttcaaaacatcaataagttgcgcaattcaattccccggcaacggcgccaaatttgatatgagtcaaattaccctaatgattactctctcaaataaagaggtggttatagctgatatacctcaaattttcttaagcttactccctcaaataagagatcgtcgttagtacttaaggatcgaattccactgagctctcgatgttcacacaatagacttatgattttttcaattaagctagacaaagtaaatgaatgtaaaagacgaataaccaagtaaacgagttgtagattcaagtgattaaagcgtcgggtccaaggaattgtctcgggagatagataaattgccgatctagctaatatttggattgttattgcaccattgtcaaactcaaactatgatattagagtaattggtggtgttctgcgaaactctctatacgtagagctaagagaacctaagaagccgagaaatcatatactaaagcatgcattattatcaagttttattagttcacctagtatctaaaccaaagcccttctatgagcctacatgttctttcttaaatgcctaggctcatctataatagttataataacaagtatctatggtgggcatacttattatctaatatcaaattctaggtgatcaatctagaactaccaataagaataaacaaattgaagaactctaagaataatcttaaggggtttttgatctaccaatccatctaaatccctattgagacaccctaaacccaacagggtgattactcaaacatgataacagaaacacaaatcataatctgaatagtttgcattgatgaattagaaatagagtaaaaggagttcaaaatcctttctgcatgggttggattcttctctcgaaatgtatatcaatctccaaaacaaaacttaggtctaacaatgaccaaataattaggtatatttgtgactaaaaacgtgcagagagtactttgctaataaggaaaatttcagggcttctcaaagacttggcagaaaacataaattccctcagccaaattaagggtatcgatcgacataggtttggtgtcgatcgacaccatcgcgtgaaaaacgtcttcgataatcttcattgctgaaaagcttccaaaattccttattatgctccatatctcccaaatgtgtaagtgtacctgaaatgactcaaaacatacgaaaaagagtagaaagactctaaaaactactctcaaactatgttagaaatcagtaaaaatcaggatatattaactcccccaaatttgtgaaagaggtttgaaaaacgtaaaaactcccaatctctctagcttattaccttgatcatacaaaccaaatccatgcactaaacagttctaatcaaatcgtgaccaccatgtaattctccgctagcccacagaacatcctatattccataccaaaacacgcaactatatccactaggctatcatcgctgggtctcatcaatcaagttaatgattcagaaccttctagactcattcctgtactataacataacaaatcgaccgttcaattttttttttttttttattttggtattctttctctccctcagacttattctttttagagagcaaacaaaggggaacttgcatactggattgataccctcgacatttttcaaacctttgtaattgatcatttcaaacaatgtataataatggggtcataggaaactttcctaccctatacactgtctgaaaatcctatcaatctctcatgtatttatttctatctattttttttaagggagaggaatactttctttatatcacattggtcgacttatcaagtatgaacaaggagtcaagtcccacgaacactaaccgttttgatgaggtaaaaggaagagcagtgagattagctccagcctttgtggattatgttgggaatggatgtcgttaagtttgttggttggctttctggatttgccattagtcagattgatttgaatctacaataaactccaaagatagatcataatttcagacaaaagttttgactcaataaaacaactgtctaagttagaatgacacaactgactcataagaaaagaaaagatgaagttagtaacttacttcccgagacttaaataacattgtccctagagttattaagctagaggaatcgaaagaaaaatagtcaatagttaaaagttagagaaacgtgagttgccacctgagagtggtgtcgatcgataccagggtggtgtcggtcgacaccctagtcgtttctgcatagctttgcgaattcagctcattgttgtagagctggggttagtgttttcacatggatcctccagttagactgttaaatcactaaaacacacatcaataggttcaacaaagcttaagatgataggtgcaacaagtttcaaaacaaataacaaatagtctgaaacaaagcaaaaccaaaggttcctataaaaccaaaaattctaaggtaaactcaaatgaatgaaagaacgaaaaagaagtatacttactagtgggttgcctcccactatgcgcttgtttatattcaatagcttgattctgcagttgcttaatcaacaggtgcgtcctgaagatccaaaggcttttctactggaatcttggttcagcccagtagtgtttgactctctttccattcatggcaaatgggtttccattgttgtttttgagaatgactgtgccatatggcctaaccgagtggattgtgtagggacctgaccaaggagaagataattttcccggaaatattgtcaagctagaatcataaagaagtacctggtcattaggctcaaaggtccgagtgaggatcttcttgttgtggtaagcttttgtgtgttccttgtagagcttcgagttgtctaaggcgtgaattcataattcatcaagctcattcaactgaataagactcctttctccagttgatttgatgtcgaaattcatcatcttgactacccaagctgctttgtgctctaatttcactaaaagatgacaagctttaccatatagaagatgaaaatgtgtggtcccaagcggagttttgaaagctatcttgtaggcccacagtgcatcatctaacttgtaggaccactcctttttcgctttacccactgttttctcaagaatctctttgatttgcctgttgcaaacttcaacttggcctatcgtttttgtttggtagggagtagtaacccgatgctgaactgcatatttgtaaaagcaattttgcaagaatcttgttaatgaaatgcttacctctgccactaatgactatgcgtggcacttcaaaacgagggaagatgattgacttgaagagtttcatgacaaacgccgaatcattcttcggactagctatagcttctacccatttggagacataatccacaactagtaggatgtagagattcttgttggaaggtgggaagggtcccatgaaatctttaccccaacaatcgaagacttcgacttcgaggataaatttttgaggcatctcattacgcttgctgatctttccctttctctgacaagggtaacattgcgatatgaacttctgagcatcccgaaacattgtaagccaccaaaagcctgcttgaagaactttggatactgtcttgaaagttgcaaaatgaccaccatagctagagctgtgacaatgtgatagtatatcaggaacctctgttgcagcaatgcatctcttttaaactccatcagaacaatgcttatagaaataaggttcatcccaataatatcgcctaatctctctaaggaatctctttttgttgtaatctgtgaacttatcaggttccacatctgcagctaggtaattaacaatatcagcataccatgggtaatctttctcgaccgctgtgacggcgcaattctcagttggtgacccatttctcattgattcagaagagtgtcgatcgacaggtgcagtggtgtcgatcgacaccatcacacaacttggactatctacttcctctgaaatgtgagtgtcgatcgacataatgggagtgtcgatcgacactgaaactcgattctgcaaactatcaagtttgtagtcatcttcttcaactgtatctatcatgtatatgttctcttcaggcatgaaattgttaatagggacatcatcatcgatcctaatgcgtgacaaatgatgtgctacaccattcttaactcctttcttttctctaacctcgatgtcaaattcctgaagaagcaaaatccatctgaaaagtcttggcttagcatccttcttttgcatcaaatacttcacggcagcatgatctgtgtacaatacccttggttccaacgagataagatatgaacttctcgaaagcaaacaccacagctaacaactccttctctgtagtttcataattcctttgagcatcatcaagagttctacttgcatagtagatggcatgaagtttcttatccttcctttgtcctagaacaactccaactgcagaatcactcgcatcacacattacctcaaaaggtagatcccaatctggtggctgaacaattggtgcgctgatcaagacttgatttatatactgaaaggcatcatgacactcttttgtaaactcgaatttgacttttttgcagagtaaagcagttagtggtcttgcgattttgctgaagtctttgatgaatctcctatagaaaccagcatgtccaaggaaatcctcactgctttaacattatcaggcgcttgaagacttgtcatgacctcaatcttagctctatcaacttctataccatgctcagaaatcctgtgtccgagaactattccatcctgtaccatgaagtgacatttctcccaattcaaaactaaatgtttctcctcacatctcgctaacactttgcaaagattctcttagaaatcctcaaacgatgatccataaactgaaaaatcatccatgaaaacctccatgatatcctcaatcatgtctgtgaagatagacatcatacctctctgaaatgttgcaggagcattacaaagaccgaagggcattctccgataagcaaatgtaccataggggcaggtgaaagtcattttctcccggtcatctggatgaatcgggatctgaaagaatcatgagtatccatcaaggaagcaatagtacttatgatttgttaacctctccaacatctgatcgataaatggtaaggggaaatggtcttttcgggtagcagcattcatctttctgtaatcgatgcacatccgatgtcctgtgattggccgagtaggaatcagctcgtctttctcatttttgactactgtgacacctcctttcttaggaaccacatgaactggactaacccaactgctatctgagattggatagataatccctgcttccaacagtttcataatctctttcttaaccacttctttcagattcgcattcagccttctctgatgttcaacgaagacttagactcatcctcaaggtgaatcctatgcatgcatacatctggagatatacctgcaatgtcatcaagagaatagccaagagctttgcgatgattgcgcagcttgcttagcaataaggtgagctctgcgggattaagagaaacattcacaataacatgataagtagaattttcaccaagaaaagcgtaccttagccctgctggaagtggtttcaaatcgatttgaggagcctttgctggatcccaatctgaattaatagtcggtgttggaatcacagatggaagagcttcttcaaccgtaagttgcatcacatgttcggtctcatcttgcagcttagtatatgtagaagtttcactgtccaaatctgcactatccactatggaagagaccaaaactcgctctagtgggtcttctaattccatctctgaaatactatctgaagctgatgaagtgaaagaatctatcaagaaggttttcccttctatgatccgtttcttgaccaaagtgttcatattgaactgcatagtaagatcaccaacattcagccctatcctcccttggcaaacatctatgattgctccagctgtgtgcaggaaggatctccctaggattaatggatccttaggttccttctcataaggcaagactacaaagtctgtaggaatcatgctctttccaatcatcacgggaacatcaataagaattccatctggaattcgggtaaaacgatctgctaacacaagagtgataaaggtaggctcaagattggaatacccaagacgcatagcaactgaacgaggcatcagattcacactagaaccgagatcacgtaaagcttttgggaaggaatcatgattaatggtgacactaagtacaaaagttccaggatcaggtatcttcctcgggattcgttcctaaataatgtcgctgccttgctctaaaatcatcataacacttcattctttcgtcaaattcttagtaaccattgtcttaacataccttcttattataggagatagatgaatagcttcaactagaggcatctcaacaatcagcttattaatcatagccttgcatctaacatcatctaaggcttgtcttgactttttaggactcttggggaaggaaattcgccgatttgctgacttgcagttggaatttgcacatagtctgatcgaagtgggtgtcgatcgacaggagctgggtgtcgatcgacaccatcgggaattgtttcctcctcttccgcaaaattgtcgattccactcgacaaaggaaaaacagagtaattggtgtcgatcgacaccctggtgtatcgatcgacactgattcgttttctgcaattggagaagatgaaggctgagccgattgttcgcgctgaagtattgggttgagctgctttccgctgcgtagtgtaactgcattgatagaagctgatgtaggtgagagattagagaattgagagcgtagattgtcaaacttgctaatgagatttgtggagagagaatcatatttggtatggagatctgtggagagaaaatcatatttggtatggagatctgtggagagagaacatggactccattctggtttctgatgagggtggagggtgggctaggataggagcagaaattgccgaaacatgagtctctttgctcttggtagctttctcggctcaaattcttcgttctttgtcaattcctgcgttgaatgaccagttaaagcattggtgattaggattaatgcttcactagtggttcttgtcatgaagttacaggagcttgctgcatcatgttgaatctggtatggctagtctattcctttgtagaatatgttgatgagttggctctcttggaaaccatgttggggacattcacgctgataagacctgaatcggagccaagatgctctaagggattctgctggagcttgggtgaacaaataaaattgcaaacgaattgcctctgtcacggactcatcgaagaaatgattcatgaatgcattctttgtatcagtccaattggttaaggaacctggttccagttgacgcaaccatgatgttcctctgctcgcgagagagtgggggaagagtttgcaaagtaggtaatcagctggtacaccttctgctttaatagaggaaccgatgcctttgaagacttccaaatgatctaatggtgattcattggaggtagcttgaatgctgatcggtttgtgtagaagagatcatttctgttaaatcgcctattgtagccgtctggttctgcagagggtgtcgatcgacaccctgatattgtctgtcgatacagccgtgaaagtctgccatgggaaagtgattctcaatttgaaggtaccggagacacaagagaccaaaagacaaagaaacacgtcaataggtggtagaaaagtaatatctagacttaaaatgacacctagtctaatggtgaactaaaatagaacttcggcaacgccgctaaatttgatatagctcaaattgccttaagcttactccctcaaataaaagatcgtctttagcacttaagggtcgaattccactgagctctcgatgctcacacaatggacttatgatgttgtttaataagctaaatgaagtaattgaatgtaaaagacaaataagcaagtaaatgagttgtagattcaagtgattaaagcatcgggtctaaggaattgtctcgggagatatataaattgtagatctagctaatatcaggattgtaatcgcacgattctcaaactcaaactatgattctagagtaaccggtggcgttccgcgaaactctctatacttaaagctaagataactagagaagccgataaatcctatgctaaagtatgcattgttaataagcttgattaattcacctagtatctaaaccagagcccttctatgagcctacctgttctttcttaaatgcctaggctcatctatgatggttcaaataacaaatacttatggcgggaatacctattatctaatgtcaagttctaggtgatcaatctaaaactagcattaagaataatcaagatgaagaactctaaaaataatcctaaggggttttcgatctactaatccatctaaatccctattgagactccctagacccaacatggtgattactcagacatgacaatagaaacacaaatcataatctgaatagttttcattgatgaattaagaataatagcaaaggagttcagaatcctctctttagggattggattcttttctctaaagtgtaacaaaagctcaagaacaaaaactgggtctaacaatgaccaaacaattaggtatatagtcctaaaaacgtgcagggattattttgcaaataaggaagacttcagggcttctcaaaggcttggtggaaaacgaatattctcttggcaacgataagagtgtagatcgacataggtctggtgtcgatcgacaccagcttctgaaaaacgtccttcaagatctttattgctgaaaagcttccaaaattccttattgtgctccatagttcccagatgtgtgagtgtacctgaaatggctcaaaacgtacgaaaaaaaactagaaagactctaaaaaccattcggaaactgtgttagaaattagtaaaaaccgggacatatcaactcccccagacttagcttttgcttgccctaaagcaaaacaaaaggttgaatctgtgaaagaggtttgaaaaacatagaaactcccaatctctttggtttattaccttgatcatactcccaatctaatcaaatcctgaccaccatgtaattcttcgttagcccacacaacatcctagatttcatgccaaagcactcaactatatccattaggctatcatcgttgggtctcatcaatcaagtgaatgcttaagaaccttctagactcaatcatgtactataccatgataaatcgaccattcctttatttttatttttttggtgttctttctctcccccagacttattctttatagagagtaaacaaaggggaactcgcatactggatcgacaccctcggcatttttccaacctttgtaattgatcgttccaaataatgtataataatggggtcataggaaacattcatacccctacacactatctgaaagtcttctcaatctctcgttatttatttgtttatttattattttttttttatttggggcgaggaatacttttcattttaacacattagtcgatctatcggtataaacaaggagtcaatcctatgagcactaaccgttttgatgagataaaaggaagaacagtgagattagctccagcctttgtggccttctggatttttcattagtcggattgatttgaatctacagtacttaaacaatccaggcaataaactcgagagatagatcataatttcagacaaaagttttgactcaataaaatgactatctaagttaaaatgacacaactgactcataagaaaagaaaagatgaagttattaactgactcaccaagacttagatagcactgtccccagagttattaagctagaggaatcgaaatggactgaccggccacgggacggcgaacgtgacgctcagcaaggcgggagggtaagaaggggatgacagactttcgtgcagtgtgtctaagacgagccatctacaaaagacaccgcaagcaaaagagtgagaacagaattaatatgaccagcaagtaatgaatcataaataaatgaaggattagaacaaaacacaattttcagcaaggtataatatatagtagaacatagtttttgttcgatatgacaaacttttgaagggatatcaaagtcaaggtgagaataggggtctataatccttagaacgaccattctactctaggttagaggtcatacagtcaacacggctttgataccaccttatgtcacacccggttttagacggcaaaccgaatgcgaaccatgtacgtgccaggatcgagcaattcacgtacacagcagttacataacatggacatcatcacacagtgctcaaatagtattagaaaaggacataatattctattacatcataatgtctgagacatccacatagtctttaacaataatcaaagtgcgaaaatgaaacgtacatacacgcgccttcacaggcagccgactggggttgccgctaacccacgcctaaaacttgtcgtaatcttggaactactggaagtcttcttccacggcttcatcttctcctgagcagtggttgcaacgcggacaacttggggaggggggggggtttggtgtgtagagcaagggtgagtacacatcaacatactcagcaagtgtcctgtttggctgtagtggactagctttatgtgggggtaagtcaagcagttgcttttagttggtcaggttattatttactagtagaaagccaggttttagcattaacccaagttattaacccgatgtaccctttccaaatggaaagaataccacttaccagtaccatagtcataaccaaaaccatcatcctcgtcaccacctgtaaaccatacatctctgatcaagtatctctaatcaatggagctcccttggccgctcataaccgcgagcacggctgatatatcagtttcataacactctgcaaaggttgcgcactttacccacaagccatgattcccccttgcctcgggccgatcaaacccttaaacactaccaaggtgaataggcagggtctcactatgtagcctttataaagattccctggggctgtagccgcccgttaggtttcctaaatgcaccgcactcctccccaaggggcgaaccaaccttggcagagcgagccgcatacactgatacacccagcccaggtggggttgccaaggcccaacaagttagggttgcttggagcccaacagttcattaagcacacccaactcagggaaaggcccaatcaccctaaaagactagtccaatgggggaagggtggctctcccttttaaagtggctccctcctcccaagttaagcaaggtaggataattctaaggctcacacggtcgccgtccgactacaattgggccaactggaccagttgtgtctttgccaacgggtaatagtggaggatgtccttcatcacaggggggccaagtaccagagagaagttga

SEQ ID NO: 1227 - DNA, 553 bp, Arabidopsis thaliana landsberg
cctgcaggtcagaatgatccccttaggattagaattttgtctaagcatttattttttttattgtttttactgaatctttctcttttctttttcttgtgtgtttcaggtgtttatctaatcacaaaaccatgaacaagctagaaacatgaacgagagtaagattgccgggatcaaaggttttccgaatcagagatttgatcaccaacaaggctacaaagattcctatgggaatggtccaactagctacactcagaattctcagttccagcaaccgcttcagaatagcaatagtttcagcttcacaaggaactatgatcttgcttcttaccaagccccccctccacccacacctaaaagcaagatagaatcattgctggaacagatttaggaaggtcaacagaggatcttagagagacctatccatagatggaatgagagcagcctcactacttcttggcattctgcttcaatggaaagtgagtatgagttagtgaagattgaggagagtgacaatttgcaggtgcagaggcagtgtctacgacacaacccttgg

SEQ ID NO: 1228 - DNA, 597 bp, Arabidopsis thaliana landsberg
caggatacgattatctttggagataggaaccaaggcaaggtcaaaggcttgggcaagattgccatcacaaatgagcactctatttcaaatgagcactctatttcacatgggctacaattgtttgtttacaaatgttgatgtatatgtctttagaaggagtgatgtttcattagcttttaagggtgtactagatggcaaactctacttagttgatttttcgaaagaggaggccgatctagatgcatgcttaatcgctaagactagtttgggctggctgtggcatcgccgtctagcacatgttgggatgaaaaaccttcacaaacttctaaagggagagcatgtgttaggactaaccaatgtatgtttcgaaaaaaatagaccttgtgtagcttgtcaggcagggaaataggtgggaagcactcatcacggcaagaatgtgatgactacatcaagaccactggagcttctccacatagacctcttcggacccgtcgcctaccttagcatcgggggaagtaagtatggtttagtaattgttgatgatttttccgcttcacttgggtattctttttgcaggataaatcaaaacccaaggga

SEQ ID NO: 1229 - DNA, 4174 bp, Arabidopsis thaliana landsberg
gatcattgacatataaatgtaatgtgaattaggttggcggtgacgattctagtcagaaaggacagaggaaaaagtccagttctaaaatggattcccaatctactacgccactaaaacgagctaaagagaatgagtaggtgtcaagcacaaaggtctatttatgtctgtagatttcctacactagcacttctttatgttgcattacacccacttactttcactattggatattgacagattggaaacatagaagaagtgcatgcacacaaccctgtaagacttgatagttatgtttatagtaaaattatatgttctacatgtgtccgctgaactatgcacatttgtatatgtttgcaggatgtcgttgcaatagagcaattggatgatgaagtagacattctgggacctattttttcattgggcctaacgcaagaaactatggatgacatcagcaggtggtttccaagagggaagaagaagacatcccccagaaaagttgttgttttgtggtccagcaaccggattagggacagtctaagcatgagcaacagaagagtgtaagtctttacactgactatattttcatgagaacttggttgtgttatctcctaaggcaaactttatatgttaccatgtaggtcttatgctttggtgatggcaatgtaaagaaaaatactgactttctaaccattttagaggcccacacactgttagatgaatcagtaagttctacatgaaatatgtcttctattgtagctaaaaatgtggtctcacttcttgttgtttaggcatagtcgtatacatgctgtgtgctaataaaaagttcatacagatgcggctggataaaaataagccacttcattttgatttcctacattcaagtttcttgccagagctaagacgccaataaaaaaaattatgtggagcttcagataaaagtgctttttacttcaccacgctgacaagagtcccattcatggtgtgcccgaaatgttttgacgaggttgatgtcatctactgctcgatgctggtcgagaggcagcattgggttgggcttgtcgtagatttgaagaattgggaagtgcttgtattagactgcaaaagagaagtgttgaaagacgagcaggtggagaagtacatagaagacataacaatcatgctcccgtaccttattagaaagcatggagtaaacatgagaatgctaacacagaggttggatccaatgacaatgagtagacccaacatacaatgcagttgttcttcattaggtatgtttgtgtttcatttttgagtttcactaattgtgtacaacgtgattggtttaataaaaattgtaacgagaaagagtgacttacatactgacaacatgaaattaataaaaaataattttagcaccctaatcattgttgaattacaggcattttgtagttggaacttgcatatgtttccaagtagtacaattattatgaaatataatagtataacatataaaactatttctcctatatgcatatgcactttgcttgtttgcctatttaatcataatattcataaacctgtagctgaaagataaaatcttgcgttggaatgaaattttatattctcatacagcataaactgaaactatgtatatgtcattcatgaacatatggtattattccttaagtttcatcaaacgtttaataaaactgattgattgggttcatgaggcagtataagggtttagttttgttatggtttatcccaatgctgatgttaaaacaaaccttgtgtctacaattttagattcctcattgcttgggttcctaaggtagtattagggtttagtattttgtttttttgactgtatagtaattaagaaaaatatggatgaagcagaatatgaagcaaagaagggtactcacacaaactgcgaggtttcatatatatacatttcaaaagcggtgttacaaggcatacttaattacatcgggattaaagataccaacacaaatatacacggatgacagggagtacataacaatcaaaatagtaagatatacaccaaagtcggatataccaaactattatgaaaaatgtattgtagcctgcattagtagaagtaaacaaacccgcttccgcaacatatgcgggaacatccattattatgcccaaaccagaaagtttcctcataacaccttttaacaccccatagcattagttgatggtttatatagcattagggtaggaggttttgttgtggccaacaccacaacaacgtgaacacctctgtcgggaccttggtctgtttcgctgcatatataaagtagagaggctgttagcttttaaccactataatggactttgtactgtttaccgttaggaactagccttgaattcaccacgaaacaatattcgtatcttccttggtctccctggtggccgacgaacaaaagatggatgcagctcgcctgtagttcctaaagcaattcctgttgcgacctctgaagcaacatagtgaatatgatagattttctcatcgtaacttagtttcactaactcattaaaatatttgtttgcttctaacgaatctgtatggacgccaagcctagcagcactggctattgcgtgagcacaagggatccctaaaccctgcaattccaagcacaaacaagtagactcgtccaatatgacaattaaacattccctagtccgaacttagacctggaattcaaagttgcaaataggcttaacagacattgacataacagcttgattgttttcctcaactctttcatgcactcttggagctaatgttgtagggcagtcttcagcttgagcccttctagttgcaaaccaatccatcaacattgttcttatgtactccaacatgcaaattagcgggtactccccgtgcctctgtgataacgttgttccaagactcacatatgttactatctataatattgaaatgcctaccttttgaatacacattggtccattctgaacacctatacaaattacaaaatacatggttatggagtcaacttcaagtttgccacgttactatcaatatatgtaagctgagaaacacacatacccaaatcaactaaatatgcagcacatcctgggtttaatttttggatcttcaggaatatccgattgaaatcagtgacatgaaaagcttgtgcaccttaagacattaggcggcagaggatttttggcttatatagatgtctaatattgcgccaaaggtgaaccgtgcaagcagcaaggttggcttgcgtatagacctgcaacaatattagggaaatcattcattatccaatcaaaatagaaccagcttattggcagattaagtaaatcgatatatgtatactatatgaagcaacgtgagatggatggttgtgtctaaccttactcaatcctgtgtatatgcttgcatggcggttagagataaacattaaatccggattgtctggagctataatgcttagccgctgaaaaaaccattcatatgcactatcattctcgctgttaacgattccaaaagccagtgggaagatctgaaaattcccatcttggcaacatgctcagatgagacaaccaccatatcaccccttcatagatgttccatcaactacaatgaccttgcgcataaatgcgtaccctttaattgatgctgcgaatgcgatgaattgatatttgaaacggcgtggaccagtaggatcatcatcatactctgtaaagcagagactgcctgggtttgcttgttgaaggagtccagcgtaagctggaataagtgcatagctaccggccatagatcccaaagacttctccattgccacctctcgagctcgccaagctttccaatatgatatactaacatgatagtcgtcaagtaggaacttcctaatcactgcagcgtttggaccacgtttaataccaagaaagcgagattgcataagctcgcctatcacttgagtggttgctaaccggtggtatctacgcctttgatcaatcgtgcatgtgtgtctctgatttgcctgccgaacttgaaagctgtcagaagaatcaaccttagatgcatatacacgccatggacaggtcttggaaatgcatttcagaaccataaacttaggagtagaacgcgcagttctgaagtgaaacttgcggttgatggcgtgtatagcta

SEQ ID NO: 1230 - DNA, 2098 bp, Arabidopsis thaliana landsberg
gatctagttttgagcccttctatttttagtggcagcatgaaagaactttgtatttctgtcaccattattagcccactccaatctgcttttttggttccagaattgctcttcttggtaatactttttgtttggctcttttctcaagtctttgattacttggggatcaaaaggtagctgccaaggtagccgcgtcaatacgaaactggagctcgtggattcttaaggctgaactaggtttggtctgcctccagaaaccagctattagatccacaaagccctccctttgaacccatcgcttgtcatacttaaacccagcccatgacttccattccattcccattaggctattaaataagggactgtgatcagaacacaccttctgaagataatttgcttgagtttttgggaaacagttcatccaagcctgattcgcaacagtcctatcaagcctacattgaaccagctcatcattttgatttccaaaccaagaaaattggtaccccagatgcttgacttcccataaaccacacgcattcaacatctgtctaaactccatgcaggaggaatctctcctttgagccccaccaattttctctgttggatcaaccagctcattaaaattacctgtcatcatcaaaggtttgtctctagtcgttcccagcctggagagtttctcccacaaatcccctctttcgctttggactggtttcccataaacgcaaatcaggaaaaattccttattctgccatttcaccaaagcatcaatcatccgtttatttgattcaataatcctaatattgacactctccttccatattataagctaaaccactgcttttaccaactggttctactgtatgcaaatcatagtatcccaggtggcgtacaacattctctaggtaacttctcctgtttttagtctcatagaggaatataacctctggaaatactgaccacgtatttcccttaggtgtcgaactgtaggggtattccccaccccctaacaattccaactcaatatcctcattgagatttcgaagggttagaattacccatcaacccttctttaaaattggtgtcactttcattcctacattttgtaccagaggaattaggacggttagctgccacagaggaggcagaatgatttgagacttgagctgccataccggcaaaatgttcagaatgacctgatttcagtagattatgagtactcgaggatgagccctgagagccaagacgttcaaagactaaaggagagtgtttcgtcttctcattggaacctcttctttccgcactcaaagtaccatcaccaagattccccaatctctcgaacacaaatggtgagtgctgcttagactctcctgactctacccgggctctcttattagattttcccccacttgtgcttgatctactttttttactgaggttagtttggagatcctcagagccttgataagccatgtttttggcaggtgtatcctgcactctacccgttggtctccaaacctgttgactctggctagcagagataccaccatgcttcccattccaattgggtctgtctttggcactcgtagttctctgagctggtgcggatttagaagaagaaatcctgcttttcttttgcattggctgatccgatggagctccttcatcaaacaacttcccattgcctttgcccttttggtttggctgctccttccctttcactgtctttcctctggctgccactgagccctcaatcacttggtaggagcaaaccgattggtcataggtgagccttttgcagaggaagctcacgtttaacaacttctcatacacaagttcaatgcgcgcgacttcccctgtcctaaaagttgctgtcttcacgaactgtaagggttcatccgcattaatccagattcttgctcggacatactccagagactaagagtttttggcgtgtaattctacagcatcaattttgcttagaggcccaataatgctatccaccatttgtcttttgagccagtggatggtgatacctataatgtgcacccagaaacgaatcttttgcaagaaatccggtcatgggtttggtttccattgatcc

SEQ ID NO: 1231 - DNA, 4721 bp, Arabidopsis thaliana landsberg
ataaaaaaaacttacacactgcatttctctccaagaagcttcccgaagttccagatcgtggcgacgtgattgcgtaaagcaagatcttctgtccaagtatcctcaccggccaccacgagccattcttcctcttcacccacacaatcgatcccacagtccaatcaaccgcacctgatcctggacttgccatccttgtctctccctctctacactcaagatcacactttctctacgggtttcttctacgtcactaaccacacacaagcctcaaaagtccaccattctccaagaaaaatctttctacggttgtgtattgatctacctgaaaatcagctccgccgccggtaatacagacgaatcccggcggatccaaaaccacaactgaaacagacggaagagaaggaagtgaatccggcgagaactaagctttccattcagatttggaaaactcccataaccctacgctctttaacgccggttaggttaaaacctttcctctctactttttccaccgtccctctataagctagctacgtaagcgagttctcgtcgtcctcgtctctctcgttctctctgaaacctccgcgtcctcgtctctctctcgttctctctgaaacctccgtgactctttcgccttctctctctctctctcctccggatgatggtgattgcgagcttcgcagttcaattaatttacacgcgctcctcaagagcgcgtgctttctacgttaccgaatcataggcccatcttacgatccaaaatatgggcttttatattttaggcccattaaattcaaaatttacgctgcaacggtcacttgtgcgcaagggagttagggtttatgttcgcctaatggtataaatatccttcatcttcggatctttagagacatagcagaaacgtcttgtttttcaactgtcattttctcaaccagatcaaactttttgttttcattttctctaattcgtcgccatggatttccacagtcttcctcgaagagatcttcaatttttctgtaagaggaacaaaatcccagccaatatgaccaatattgccatggccgatgctctcagagatcttgagattgtaagttgttgcctctcttttcttcagattttgttccagtagtcttcgcatcttgctttttctcagtaatatgaaaatgatttgagatcgatatcttgttaaccatctagagcgtgtcgttgtttgtggattcatctatttctgaaattgcttggacgattgataaattatggatgtttgttagagtatttgaatatgaaatcggaaagttcctcgaatggttttagatctggatggttgttcgattctgtttgagtccagtgcttttaaatcttatatgtttgatcttaacattttgatggttttgctttgcttgtgagttttacaatttgtaattagtagatccctgagagtctgaccattttgatttgttaggtggaaggtatggatgagttcatggatccatctcgtgaccagtctccaaccagtgttgcaagaaatttgccaagtgctgctcgaactgctgctagaacaactcgaaggaagtccaccaaggatgaaactcagtcatcagaattggtgacccgttcttgttatgtggtgagcaagtccttagctggagaaatggatcaagaaaacaaggacatgaatatgctccagaatccatcagtacctcagagccgtgctgtgaagttagatgtcaatgatatcatgcctgaagccaatgtgagcaaaactccagcggctagaagcacaagaagggctcaggccgctgcgtcttccaagaaggatgagtcggttcagcgggtttacagtaccagaaggtctgtcagattgttagaagaatccatggctgacctgagtttgaaaaccaatgtacctgcaaagaagcacgaagattctccagcaggtatgaaatccaatctctctctcgttttcaaaacagatgattgtcatgttattatatattgaatgagtttgtaatcaaaatcagttgtacaatgcaggttccaaattccaggcaaagtcagatgagaactcagaaaatactgacaagggtggagtaatgtcagggagagatttaaatgattccttggagaaggaatgggatggctcaaagaatgatccagatcttgatatattatatggtgatcttggtgatatcactttctttgatgcatccaccagtaaggaacatctgaatagaacaggtatacacgcaaacaagcacacccttcaatgttttgtgcttcactattttcttgttgcctttcttaatttccatgggggatttctttgcagattccagcacggtttcagcttcagatagttttgttctagtcaatgaacatgaaacttcgcaggaggatggttttgttgttgtagaccatgctacttctactaccaccacaaacactttggcctgcaacaaagaatcagagcctgagcaaatgaagattgattctgaatctgaatcagaggaaacagaatatgagactgatccatgggagggtgatgattttggtgttgctgttcacacaacccaagaggcatttgagtctaaagtctcagctagtgataatgtgagtaaggttgactcagtggcgactgttctgatagctgatgaatcgaaagaactcgatttttcttcttcacctcttgctgtggaggaactcgaagaagacagcgatgaatggtctgattatgagataggcgaggtcgagttggaggaaaacagctgcgggtctgaagaatccattgaaattgaatcagaagaggctcctgtttcagataagaagactccagcttcttcctcttcatcaagtcttgctggtaatgagacaagaacttcgttgtctccatttgaagcagaatcaatcttagagagcgaggaggacaaggagatggctgttaacaacaatggagaggggaaagctgaggccgaggttaagaagacaaagaagaagaagacgattgatgaagagctcaaagatgtgagcatgaggcaactaacgaagatggtgaaagaacttgctatcaagagtaagcaacaacacaagggtcctgagtaatgaagaaaaactgttttagcctttttgaaatcatttccttctctcttggaaaaatgttgatgtttcttttgtttcctttagggtgttgttgtgttgttctttttttatagaaactcaaagagaagctctaatgacatctttttctttcaatctcattcgaaatttcttcatggctgcacttttcattatgccttgagaatttactaacattagattccagaagcagagccatgtgaagacaaaagaagaagaaaaacgcttccattacaaaagtttagagagattttcattttgttcagtggcgaagaagaagacttaggccatggaatctaaagtatataatggtgaaaagacagggagaaggaattagcagtgggtgcttcaaaatttgcagagtgccagagaactattgcttcatgaatgctgagaagaatgaatagactctgaaatgtggatgatgatgagcatatgaacttggaattatcattcattgaaacataagtgtagaggacacgtgaacgaaaagagtctctgtatacatgagtaagtaaggctaagccaaaaaggggattgagattatttgtcaatagaaacaatggaaagaaaagattatagtttttctttcaaattttataaaattatatccattcagattctattgactattgtcaaggtcaaatcaaatatacaagggattaaggaccgttgtaattatttatgaccgttgtgatcaatttccttttttttgtagtccaaacaaattaaaaggaaacaaccaaaattgtcgataaaaggaaacaaacgattcttttccttataaatactcgtcgtctctctcagaaatcgaaatcaaaatcatattcattctccttgttcgaaagtaaaaccattcattatctccttataacctctattctttttctttttgatacgtgtcgaacaaattttgccaatgtttgatcgccaatcttgtaaagccgatgattccatgtagagccactctctgcaacaaattcatctgagaaacctgagaagaagatctcaacggattcatctcagagattgatcgtctcgtttcgtagattgatctctatatcgtctgttgtgcattcgatattacgtgactaccttctacagtcaaaccctaattccatacggatcaccaccgcaacactttcattggtgggttatgtagacggcggctaatgatgcgagggagggacagtgaaagcgaagagcaagtagcagcagctttggagtttccatggctggacgagtcaccaaatctaggtttgttgctttctcacttttatttttttaatgaaatatctaaattgtgaagtataaaaatatatatttttaaaagaaaatttaaaatttaactgttaattttcaaatgacgttggaaaccaatcgaacttagcatccggttagaatctcttaagatcggttagaggtgttaagttcaatttgtttagatgtaattaaattttaacatttattttttagattttctttttaactaaaaacgttttaaatttaatttccggttttctaactaagttttaagaattctttttgtaatttttatagtataataatacattttaaaggacgctgaa

SEQ ID NO: 1232 - DNA, 486 bp, Arabidopsis thaliana landsberg
tactaatttccaatgctactaatcatgatttcaagttgtatcaaatggacgtcaaaagtgcatttctaaatgggccactacaagagttggtctttgtggagcaaccgccaggatttgaagatccaaagaagccaaatcatgtcttttgtaaggaaaatggacctcgggtcatttggctaaatagattttggtgtttgatgatcaacataacatgtggactaatgtgtttgctagtgtttatgattgtagttcacaggatgctaaagttacttggaccaagacattgaggaaagcaacacctcaaaataaggcattatgaagatcaagtgaagtccaagaaacaaagaaagtgttgcctgcggactgtctggtctggagtaccacacgccggactgtccggtgcaccaggaacagtagccctaatggctagttccaggtggcactatgcagagaagaccaccggactgtccgatgtgacatccagag

SEQ ID NO: 1233 - DNA, 3657 bp, Arabidopsis thaliana landsberg
gaaaaaggcctttgtcaataagagcaatgcgatcagggtggccgagtccgacatgaagatggactctgaggttgttcattgcaagcgacttgctctccgaagcgaaagggctcaaggacagcgaagtggctcgggtcgcgcaaacggcgaggtggaggagaaaatgtcgctcttcgaggacgctaacgatcagtttatgtatttgtcccaagcgggggccaatgcacagctcattaaggcgcttgaagatggtggatccttggcgaccgagaagaagcaggttgaggattggctcagggatttcgctgatgcggaggtgaatctcattcgtctcccgtctgagttgaaggaagagctcaaagcccctgctcctgagcttgctcctctaagccctggaggtcatagatcggtcgagactctcgcagatgaagtgggggtcaccgatcagtctggatcgtatctgcttgccgctgggactctcccgactaaaaagcttgagtagatacccgtggcgtttttctttagactttgcgcctggagagctttatccgtatttctgtagaacctatgtctggatggctttatccacttattattgtagaacttatgcttgggatttttttttgcttgaatgttttaaaaactgattcgttcccgaagcgttttattgactggggctagtgtgaaagaacaggacttttgagtgaaacttctcggttgtgatctgatccgattcacttcttaaccagcgtttagaaatgtgctggggtaccagtgtttagagtataaccaggtttctgaagataaaagaattccgagcagaagttatctgaaggattttatcttgtatttatatagcgcgctgttgccgagcaggcgtaaaagatactccgagccgtcgctcatcgtatttagccgaagcattcaaaaatcgtgaatcgaattattatttatgccgaagttaactttcaaaatagtaaatgggagtatggatatacggacccactccccccttattaatggggggggggggtagctgaactcgtccgaagacgagctgcttacgtacccttttcagggatcaagccacctcgtagttcaagtttagtcacctcggatttagttgtagtatttccttaggtgcattgcgttccatgaccttggaacggctttgccacttaagtcagcgagctcatacactacgggtcggatgactttagaaattaagtacggtccttcccagttcgtcccgagctttccagcgttcggtttggcagtgttctggaaaacttttcggaggacccgatctccttcatggaatcttcgttgccgaacatttgggttgtaatgtcgagccgtttcattctaataattttgtatgcgaaccagggctgaatctcttcgttcatcgatcagatcgagtttgtcgaggagccttggagcgttatcaggggtgttctcgggggatacactccggcgtaggctcagcactatcatctcggctggaattacgcattccgttccgtagactgaggcgaaaggggtttctcccgtggctcggcgaggagttgtccgatgcgccaaagtacaccttcgagttcgtcggaccacgagccctttttagcatcgagccgtttcttcaatccgtcgaggattgttttgttagcggcttcggcttggccgtttctttggggatatcgtggtgttgacttgctaagttgaattccgcatttatcacagaagccttggaagcgggttgatataaactgctagccgttatccgtaacgatctcataaggtatcccgtggcggcataggatatgtttccacacgaagttctcgatttgagcgtcctttatgctggcgtaagatttggcttctatccacttagagaaataatcggtcaagacgagaactaattttttctgcttcgagggatgcataggtccaattatatccattgaccatcgcatgaatggatacggcgaggcgattgatgacaagagctcggctggctgatggattgttggcatttgacatttttcgcatcgctttgaaaaaatttcgcagttttttatcattgtcggtcagaagaatccgtggcgttttattttaatggctaaagcccttcccccggaatgatttccgcacgaaccgccgtgaatttccttcatgatcttgcaagtcgcttctccttccgcgcaggtcagcaatggtccggataatcgccacttgtaaagttttttccctattaagacgaaacgtgcagcctgagctttgagtttacgagccctccatttatccgagggcaatttcccttcggatatatagcttatgatgggttccatccactttgggctgcattcgttcgggtcatcttgatccgtgctgatttgtatcaggaggacgtggtcttcttcgccgagctcaatacttggtttttcaatgaattccactgggatgattcttctcaggttcgggtcggaggttgaggccagagcagctagggcgtcggccgatgaattttctcctcttggaatccttgttatcttgaattcgtcgaaattttttgctaacttttgaacatgaatcaggtaggcttccattttttcgtcccgagctgtatattccccgttgaattgattcgcgacgagctgggagtcgcaaaaagcgtggattttttcaatctttaacccccgagctagattaagtccggcaacaagtgcttcgtactcggccacattattggtagcttcgaagtttaacctgaatgactgctcgaggatttcacccgttggccaggtgaggcggaatcctacaacccgagccttgttttgatgacgagccgtctacatgtaggagccaagttgtgtcgagtgggttttcccgagcttctttggtgggtaattcgacgataaaattagctaggacctgcgattttgcgcatgttttgttccgatattcgatgtcgtattcactgagctcgattgcccacttagctagacgtcctgattggcttggactgtgtaagatggatcccattactacgatggaatgggattaaaaatagggtcgtagcttccgagccgacattacgaccgctgaagcaagtttctccatttgtggatagcgagattccgcgccggtgaaagtctgtgagacgtagaaaatcggcttctgttcgcctctgtcttctcggaatagcactccgctgactgcagtatccgatacggcaatatacaaatataatggctctctgattacgggtttggcgaggatgggtggtgttgctaggtacttcttgagttcttgaaaagcttcttcacatcggatcgtccactagaactttttgtttccccgtagcacatcgtaaaaggctaagcatttgtctgttgatcaagagatgaaacggttgagggccgcacctctcgcttgttttgaggcgatgccattcccaacaatgcctcgatttgctttggattcgcctcgatgccgcggtgggtgaccaggtactcgaggaactcgccggatcttacatcaaagcgacactttgtggggttaagtttgacgttgtataagtttagttgtttgaaacattcccgcacgtgggctatgtggtcttcccgatctgtaggcgaaaattttgttaacgaaacg

SEQ ID NO: 1234 - DNA, 5103 bp, Arabidopsis thaliana landsberg
  unsure (1)..(5103): unsure at all n locations
atatacaaaaacatatatatatatatatataatgagtggatctacatagtgctgagagtgaggcacgtgccatatactcaatattaataattttttagataatagctctgttataaaatgtgttagctcnnnnnnnnnnnnnnnnnncaagtaaactcttgtgaacaaggttcgatgcatttctaatatttttcttttcgtttctcctgaacattttttctccagacatgttgtatataaaagaaatttatttgtttaaattataactttttatcttagatccgcttctgcatatatacatataatatacataatttcaataactctgaaaatgttgatataaattctatgtgtttattttatcgataaaacaaccctatttaagtttactttttattttgatcacttaaaatattattaaattatttataatttgataactattttgtccgtattttatttaccattcaaacattctcccgcaacacttattttttaataaccgcacttgttatgcattatgtgtttttctccaatttaccgcacttaaaccgcatcgcagtactcaatccgcttgttccgcaccgctcgatccactgtcaccattcggtgcctacagcggattgaacggtgcagaacataaagcggtgaagaacataaagcggtacggtttagatgtggttagtgagagagaaaattattatgcggatcaagtgtgtttcgtacggaacaaacaatgcttgaatgatgactattacaagtgtggtataataataataagttattaaattttaattttaaaaaaaataatttttaagtaaaagaaacaaattattttttgaacaagattatgttatttgataagattaatacataaaataaatttcataattttctaaacttaaaaatatacatatattatatattatatatgtatatacacatatatacatacaaaactgaaaccacacctaaaccacatcataattggggtaaatcaaagcatgtgcggtttagatattcaattgaaaaaaagaagatgtcaagtgtggttccactaattaatacgcactttgcatttatcgtatgcttgaatggagacatttatttactttttcatgttccgctgaaaaatcgtgttgcacactcacaacctatatatatgcactacaaaaaaagtcttcattgatagcataccattatagcacggattactcaattgctattgaagatgtcatgtaattttcgttattatattacaacagttgataaacactaagatatagttttaatattacagcactttataaacgctgatataaagttttaatgagcgggaatacaaaatacttattccgccaaataacacttagtcattttcgagaaagaaacccaaacacaaaacaacttttcgaaaaccctaaaaaagaaaactctctcagtcctcagtcgtcagtccgacgaactcattatgccggccaccgattaaaccctccgttgcctctccgtcgccgtcgtgaatgctcttcgtgcaactggaacctctgccggcactcaatccgctctatatctgtccacttcgagatcgaatcgaaggcaagtcattttctatgttttttttttctcttttgacactcaattcgttaccctagatctgtttccatcaatctctgagactcaataaccgatgtttgtgtgattttagaattcgttaccctagatctgttttctttatcgattcttaaaattttgtctactttgcatgcctttgtttattgcgaattcatatgaatttcgtcttagtaatgttaacctgaactgctctaggtgtttgtgaacaattttgcattcgaaattgtgtatttatttgggcattagagttgcaacttttggattttggctctgtaatgtttgattttttattgagtgataaaacttgagaatttcattgtcagattgattaagcttcgtctgttgtctgaatcgtgttgttattgtcacatcgatttagtattttgttatgtcaaactatcattgattcactttcttgaatataaaacattttgctcattctatatattttgtttaatttgcaagtgttgctgagcgaatcaatggacatttggaagcttatcaattctctcttttcataggaaaggttagtatcattgtctcccttttgtgaattgttttctcttgtcatagttagtatataagtttgagttatttgtgaatgttgtctgcttgttctaagattgtttacttagaagaattcttttcagttttatttattttaaaacatgctaatataatctagtaactgtacttatctactgaattattttgatagagtgatttgtaaatgttgtattttgtgtttgtttatattgaagattcttttgagttacatttgtttaaaacctgcaactataatcgagtagcacgtacttaaaacctgaattgctttgattgattacgtttataagtttgaattatttgtgaatgttgtctacttattgtgtgattgcttatttaggagattcttttctttacacaatatggtatgctgcttaggttactaaaggtttatattacggttagcacatagaatggtggccaaggattgggtgcatcttggtaggtaaggaatataattataattataattatattccttaggtttcagtaagggttttgggcagtttacttcttttttttctctctttctacttctacaacaaagagctgatcctgcttatggagagaggggctatcaagtttgtacgggatgtggctgcggctttgggagatgatatgattgtatgtccttgcattgattgtcgtaacatagatcgtcactcaggctgtatagttgttgatcatcttgtgacaggaggaatggatgaggctattaagatgcgttgtgattggtatcatcaaggagaattggtgtctggtggtgaaagtgaaagcaaattcagtcagttgaatgatgaagtagttgagttgtatcaggctgcagagtatttggacgaagagtttgctggtatggttcacttgggcgagattgtagagcgtgacgacaagaaagaagacgagttccttgcaaagcttgcagatgctgagacacctctatatccaagttgtgttaaccatagcaagctgtccgcgattatgtctctgtttacactgaagaccaaaaatggctggtctgacaagagtcacaacgatcttctagagacattgccggagatgctatcagaggataatgtgctacactcatcactgtatgaggtgaaaaagtttttgaaatcttttgatatgggctagcaggagattcatgcatgtgttaatgattgctgcttattcagaaagaagttcaagctgcttgagaactgtcctaaatgcaatgcttcaagatggcaaactaacatgtacactggtgaattaaagaaaggagtcccacagaaagtattacactattttccaataattccgagacttaaaaggatgtttaggtctgagcaaatggctaaggatttaaggtggcatttcagtaacaagagcgaagatggcaaactccgtcaccctgtggattcagtcttgggatcagatgaatcacaaatacccatcatttgcagtagaagaaaagaatctgagacttggactttctactgatggatttaatccattcaatatgaagaatacaaggtatagttgttggctagttttgctagtaaactacaatctgccacttgacttatgcatgaagaaggagaacatcatgcttaccttgttaattcatgggcctcaccaaccgggcaatagtattgatgtctacttagagccactcatagaggatttatgccagctgtggaattatggtgattgacttatgacgctttcagtaaaacgacttttactctcaaggcaatgctgctatggaccataagtgattttcctgcttatgggaatcttgctggctgcaaagtaaagggtaaaataggctgtcttttatgtgggaaaaatacagactcgaggtggttgaagttcagcagaaaacatgtgtatatgtgccacataaaaggtcttccaccaacacatacttataggggaaagaagtcatggtttgatggaaaagctgaacacgggagaagggaaaggatactaagtggtcgtgaaatttttcataacctgaaaaacttcaaaaacaactttcgaaatctgaaacaagctgcaagaaagagaaaaaagagggaaactgttgaattagatggaaaaaaggtcgattttattcaagttgccatattgggaagaattccctgttagacataacatcgatgtaatgcatgtggagaaaaatgtggctgcgagtattgtgtcaacattgttgcattgtgggaaattaaaagatggtttaaatgctcgtagagatttggaggatcttggtattagaaaggaattgcatccttaacttagaggaaaaagaacatcttacccgcagcagtttggtctttatccaaggcagagaagaagattttttgtaggcgactttttgagttcataggcccagacgggtactgctccaatatatccagaggcgtctcattagaagaatgcaagatcacaagactgaaatcacatgattatcatgtgattatgcagcagtttcttcccattgctcttagaggtttgctgcctaaaggtcgtagggtagcaattgtacgcttatgctcgtatttcaacaagttgtgtcaacgagtaattgatagggagcaaatattggctatggaggctgagattgttgaaactctctgcatgtttgaaagatatttccctccaagtttctttgatataatggtacacttgacggttcatctaggaagggaagctcgtcttggaggaccgattcattttagatggatgtatctgttcgagaggtacatgaaagtccnnnnnnnnnnnnnnnnnnnnnnnnnnnnnnnnnnnnggtgcattgctgagtgttatcttgcagaagaatgcatccaaatttgtaatgaatttttgaagaagacgacacattttcaagagaaagcagaccgaaacatgagtacgagaaca

SEQ ID NO: 1235 - DNA, 1090 bp, Arabidopsis thaliana landsberg
  unsure (1)..(1090): unsure at all n locations
cagtccggtggtgcagcggacaggtcctattcactgtccggtgggccttctggcgcctgctctgacttctgcgcgcgcaggcatgcactattcactttcactgttcatttgcagacgatcgttgacgcgaagtagccgttgctccgctggcacaccttccccttgttgccggactctcccgatggagtcttcctgtggcttgtggcgggcttctcgccggtcatgacctcctnnnnnnnnnnnnnnnnnnnnnnnnnnnnnnnnnnnnnnnnnnnnnnnnnnnnnnnnnnnnngataccaattgaaagtcgcctagaggggggtgaataggcggaatctgaaaattataaacttaagcacaactacaagtcggggacagtccggtgcgccagaccagggcagccttcggttgtcttttgctctatttatttaaaccctttcttagacttcttattggtttgttgtgaacctttggcacctgtagaactcataatctagagcaaactagttagtccaattatttgtgttgggcaattcaaccaccaaaattaattaggaaaaggtgtaagcctattttcctttcagctccacaggcattgggggtggtgggggaggcagcggctagggatgaggctcctcctcctgccagacacgctgctcctgttgggcacgcctccctcctcggtgcctgttgtcagacatctatggaagacattcacacatcagtattgatctcgcaatctttcagcataggaataggcatacataattcttcatgacactgaatgaacaaggatcttcactagttctcaacattatcaaacacagcttctcaaataaagaggaaagtagaagtaaaaggttcccaactaaataactaactttattaatcggtactaactaaaccaactatatgggggacccacatttgggcaacaatcattacaaagatccaactccaagggctatgaggcctagaagcaggaggccagctcaccatggtagaatattagtctcattgtaagtatcccttggctataaaggggagaccacccacctagacaagcatcgatcatcacactggccatac

SEQ ID NO: 1236 - DNA, 658 bp, Arabidopsis thaliana landsberg
  unsure (1)..(658): unsure at all n locations
gtttcatccacatttcatctcattaggagtcgttttagtgtgttttgcatacttaggacgattttgcattaggattgcatgtgcattggatgcttctggagttcaaacagaggagaaacagaacaagaagtcagaatgcccaatgacgccttcagcaaaagtactctatcgcagcttcggagccctgccagggcaaatcactctatcacaactccggagaagctaccagctcagtttaactcaatcgcgaagcggaggaatcacaccatcagaaccacttgaccatcacctaatgacatccactcgatcacagggtcgctggaccattcaatctcgacttcactacatctcactcgatggcaaggcggacgcctgaagcctagttttatcaatgacatactcgatcacaggaaaactcatttcagcccatcagatgccaatgacacattcggccgcagggtaatgacgtgaagattcgctatatatctagtttccttatttgtttcatttcttgctgataataggtttttagtcaattatcctaaaacacgagacatgttgttgtagtattttaggttgtcaatcanataagtgtgatgatacaatcaagatgtgatcagaagtactaagtcaagcaagcaatacaggttttggtgtg

SEQ ID NO: 1237 - DNA, 2213 bp, Arabidopsis thaliana landsberg
aatcgctcgactttgagttgaagtgaaggagaaagttatagttcaatccacaaaggaggaaattgatggtttcattaactgtattttgacaagttctttacgaccaagtaatatattctataaggtagagggagaaatcgatctgccaagtgaaaacatggaagaagccgaagttaataatatatctttagatggtgaagatgatgaaagtgtattcgattgctgcaacgattctgatggaaccgatgtgtctgcattggagctggcggttggacaatgttttgaaacaaaagagcacttgaagaaatgtttgaagatacttgtcgttttacagaaatttgattttgatgttggtaaatcgactctacaaatttatatagtcaactactgggttaaaggatgtcggtggagggttcgagtgtaggcgactctacaaagtttcatgtgatattatttaagttggaacatatatgttatgttacagattgtttcatcacgcgcccaacacacaaaatacttggattgctctataagaattacgttggtaggattggacctaaggttctcccaatgcacgttgtcgaagcattcactaaacaatttcaaatcaaggtacgatttccaatttcttggctttctttgtttatgaattacaccttgttttcaaccaactaatcactaaagtcaatacattttgttagatggattactggaaggcttatcggacactaagatctgtccgagaattggttaggggtacaccagaaagtggttacgagcaacttccggtatacttgtacatactaaggagggaaaatcctggaaccttcacgcgacttgaagtggatgaaacacagcgatttaagtacttgtttcttgcgtttggtgcaagtattttaggattccctttcatgaggaaagtggtggttgttgacggtacttttttacagggaaaatacttagggacacttcttacaacaacaactcaaggtggtaactttcagatatacccgattgcttttgccgttgttgatactgaaaatgatgcctcatgggaatggttttttagacaactcagcagtgtgattcagaatgatgaaagtctcgccattatttctgacaggcaccactccattaaaaaagcaataatgatagtgtatcctaagtctagccgggaatctgtacataccacttgtacaagaatatattagtttgctttaaaggttgggatgcatttggtttggcaaagaaggcagcaaacgcttacagattagtcaattttgaaaggatatttgatcagttttaggtttgaatcctgctcttcatgcttagcttcaaagagctgatgtacgtttgtggactcgtgtgcatttccctggtgataggtacaacttgcttacaagtaacattgcggattcaatgaataaggtcatgtcacccgcgagtagccttcctattgtacaactgaaggaatgatgcattgaatttttctacatatcttcctcgtggagtagagaagatcttgcaggtttcatttctaatacaaacacaatttatatacatccgtatattggtgattatagctaactaatgacaatgtattttctgtagagtcgtgtagagtatgccaaattgctaagtgtgcaagacatagatgcaaatcaagtacaagttatgtttggagcatctctgcatgttgttaatttgaaagacaagatatgctcgtgtcgcaggtttgatctagaaaagattccatgtgcccacgcgattgcagctgctgtaaaacgaaaactttctcagatatcattgtgtcatccttactttcagaagaattatttatgcaagtcctatgctaatgccatcatgcccaggaactttgatataactgttcccgaaaatgtcgtgtcgaagatatgtttaccaccagaagctcgtcaacaaccaggtagaccaaagaaatagagaattaagtctacattggagattgctatggagaagaagaaggctagaaaacaacacacttgtgacaattgcaagcaaattggacacaatcgtaagacatgcaaggcttaatgtcttttatgactttttttctttttctggttgtttgtattatttgaatctcaacgatgttttttcatttctatgattctgttctaatagaataatcctcatcaccttcttcgtggctgtttgcattgcatatcacagac

SEQ ID NO: 1238 - DNA, 585 bp, Arabidopsis thaliana landsberg
tgcaaaagatggattctcacggcgagctaagattatgttgcctatcaatatgtctttaccatctggaaagatttagtttaatgcagttcgtcttgatgagataatctaataataaattgagtgtgggacagtaaacgaaaaacaaactccataagttcacaaaggactgttttttcaatgttttaaacgataagatttgttgttctgttgttgaacaacatcagtacccactataatttcttattaaaccccatttacaattttagaccacagagattcaagaatagatcatcacagaatttgaagaagagaaagttgctggcctttattattgacagtagaatatgtcttatctaaacaaaacattgagcaaacaagcccttgtgaattgcatatggagtttgttaattatctcaccaagacaagttacattaatgcatcttttccaaatggtagagacagaaccatgtgaactcttgctctagtttgtccacgcttcaagaccaagagtttcaatgattttttcagagaggtctaactccttcattgatatttctatatatcacacataacccattctttcta

SEQ ID NO: 1239 - DNA, 2786 bp, Arabidopsis thaliana landsberg
ccacatattattgatgaactggtaggttctgacgactcttcccataattagttgttttcattattgaaattctcctaaattcattaaaatagatgctcgtagatcacagtcaaatagtaacaacatgtatttcaaaattaagaaaggaaaattatgtaatgtgttgtcatattgatgttacatcaaatcaaaatcaaatattttcttacttaaaaaaggtcaaattatcaaaaaaaagaaaaaacattgaacagtttgacatattgctaataaattaaatcattttattatggttcataatttataagcatttaattttaaagatatttacagcctctataaatttcacataaattctaaaacacataaaacaagaaaaaatgttaaatacgtcgataaaaacttttcattggcttgtttattggttttacttctttttgttgtttcatcataatttaatacgatggttacaaagatgagatatacaccaaacaagatatcaattcttcattttgtttgaggttgtaaatgcaaatcctgaaattgctagattagatttttctgattttgccaaatgttttgctcatttatcaggctcaaaatatttcggataccctgacgcagtttaaatttatcaagagtctacacgtcggatattgattctaaatatcgcttattcatagaattatatatgaaaatgcattcgacaatcgtgattctgccctcagatatttggctgccaaagactatgacaacgtaaacactatggtcagtgcaaagttgatagatatgtttacgtgtaccacaattttttatgatggaaagtaatgttgttaaagatttgtctaacattatcttagtgattctcgaatgtttcataagagaaaataaaatattaagattatgtaattctcgcgatctataataataataacattaatatgattattgtcattatcttttttttaatatataaaaagtaataaaatataaaaaattctccactccctctgcttacaaatctttcatttaaagctacactttttctgtcatccaagctaaattcttctctaaatcgttttaatcgactcgttgactcgtgagttgcctcttgagctatttagctaattgcttatagaaattttatacgatgatggaagaaactagagggaactggcaaaggataaagaacccatttcttctacgtagattggtggttgtttggtagcatttatgctctatgttatgctaaggttataaattctcatattgtttttgcttacgctttgggattaatagttgaaataaatgattgatcgcatcacttttggatttaggaccgaggccttacattctattgtattcattcagaggtatgatatcagaaatggatttttgtttcatttgtgtgatggaccttaacatgatggaccttaaaattgctacatataacaaaaacaaaattttatttatatgatgatttatatatccatcattctgtgaacggattagattttctttgccttgtagatcaattgtgtgtctagtatagtatagacaagttcaaacttgcttggctttgcttaaccaatcattaattcgtattttaatttcaatctcacttatcaaaatcactgatacttaacttagctcatggacagtctctacggccaacaagacgtaaatactaaaaagacccatatctagagctctctaatagacacaatcaaaaagcatttacgtaatcaaacataatctcaatttttcttatgttgtcaacctctaatgacccatatttttcctcctctctgccctcacctccttcctaaccctataaaactttctctttgttcctttgtctcttccattttcccaagaaacaaacggatcgttatcttttcttatcaaatcttcaatcaaacccacttagagatcaattgcttacaccaaattctcaaattaagaaccgatgatttcctcaattaaaccggttttaccttccttaactgcaatcgtcggcgtaagtcaatcaattcaagcaaagcttcaatttttgccttacccattatcggaaacttccaaaagcctaatcctttacctcataaacatcttttatcatttcagaatttgtcgaatttcgctttagtggcggcggcggcgcagaggagtgatgtttttagggttggagcttacgaagcttcaatagtgagtatgtctaaagtagtagtgtccttcacacacacatcatcaaaagcagtgaggcagcctttagcgtccttgtctcaagcctcttcttgggcgagtcattccctctacatgtttacctctccctcttacccattatttgaggatgtgctcttgctgctgttacggagctcaacttcaatatgataggtacttaacaacatcctattgataccttaagaagctaatgcaattcaatgaaatgttttgagatgttgatatacgggtgtttcttgggggttttcagggtttatgggggcaatgatatcgaatttggcgtttgtgtttcgtaacatattctcaaagaagggaatgaaggggaagtcagtgagtgtgatgaattactatgcttgcttatctatgatgtctcttctcattgttactcctttcgccaattctgtggaaggtccccaaatgtgggctgatggttggcaaaacgatgtctctaaatcggaccaaactttgtctagtaagtttatattgatgttgtacaatacaaaagagacaaaaaaaattcgaaccagttgatttaaaaccttgta

SEQ ID NO: 1240 - DNA, 6468 bp, Arabidopsis thaliana landsberg
gcaaaagaaagggcaaaagcaaaaaaaacttcacaaaggccttttagcctcaatccaagacttgtttcttgtggtggttgttgttgagttatcttcttcctctcgacatgaactctattagcttcttcttctttcctttcttatggtaacggatcttttgcttcacctcttctcacgtcttctcactttttcttttgcaagtttaatgaaatgtttcacgttcaataacaacttgttacgaaattgagctccgattagattcaattcagcgttaagaacgatcgaaatgatgttgcgaatgatcgatctcaacttatgcaagatcagagaacagaaaacgaagaacaaagacacacgatttgtttacccggttcagcaagatcggtgtgatcaagcctacatccggagccgaatcaatctggcaaatccactaagctttatgaagagtacaactaaaaccgagcttacaacaatggtgattctctcaagttctctctctctcgatacaagaaaacttcaaagaagaaaacagatgaagaagatgataatcgtaacagactctgttactctttatataatagtcaaaccctccactgcagttagagtctttgacttctcttcttcaatttccggtttaatcagaaatcccttaaccagagataaccgactgtttcaatcttcaattgacttaaccaaaaccaacttcagagtttgaatcagagctataaaccaacaacactccaccttgattcaaaccaacaacacttgggatgagatgtctttccacctcaccttagtagctttagaaactctaaagcagcctcaaacttctgcacaggaatgcctttggtaagcatgtctgcaggattccgagaagtgtgtatcttgagaacttcaacacttccttcttcaatcacatccctataaagttgtacttaatcgcaatgtgcttggttctttaatggaacgtgttgttctttgacagactcatggctgactgcgagtcacaccacaaagtaattttctcttgcttgaatcccatttctgttaacaacccctgaatccacaaagcttctttcactgcttcagttaaagcaacatactctgcttcactggttgataatgccattatactctgcagatttgacttccaacttagtgtatttccaccaactgtgaacacataacctgtcgttgaacgcctcctgtcaagatcttctgcatagtcagagtcactgaaaccctaaactctaaaatctttttctctggtgaaaaccagattcaaatctttagacccctttaagtatattagcagccactttactgcaatccaatgaatcttacctggcctgcccataaacctgcttagaactccaatagcttgagctacatttggtctggtgccaaccatggcatacataacgttgccaatagcacttgagtatggaacttttttgtctctgataatgtcgattcccagtattcgactagctgcacccatatccttcatttcaaaacatgtactcaacgcttctttgatcttgttaatttcagtcatggacttagctgctatcaacatatcatgcacgtgtatcatgaagatacacaaactcctcatcactcagttgttttatgtaaacacacgaatcatgaccacttctgataaagttttgatccatgataaaggagttaaacttcttgttccactaacgtggcgcttgtttaaacccataaagtgacttctttcacaagcacacttgatctttttgttcatcagcaatatacccctcaggttactccatgtagagtggtttgataataggttttttagtcaattatcctaaaacaccaatcatatcgttgtagtattttaggttgtcaatccaaataggtgtgatgctaacaatcgagatgtgattagaagtcacaaagttaagccatgcaataacaggttttggtgtgttctagcagttctgagtggacatgcagggaccagagattcaagcagaaacagtaagacactcgaccaacacagctctttgcagagcactgggtgaggtcgagtaacagatagaaagtataacagggatactcgactgcacagtctgttgccagacaactggcgtggtcgagtatgaggtcgagtaacaaaaaagaactgcagaaattaagcgacagataacaagatgcagtaaacaacagtagagtaaacaaagagttcaatcagataaagaattcccgaggatggggtaattgagtagtttcgtttcctcagtttacaggtgattgacatactcaataaattaaccttagacaacaagttcattaaccaaatctaagtgccaccgcaacagagactctcaagttaacctagtcccagactcaatcaccattgacgagagctaacctaacaggcattacgaataaacaagttaaagtcaaaacgctccctgcaaccaataccttggtacatggtcacgaatctctggaattagtggttcagacatttcatcgaacaccttttgggcgcggaaatgtctgggctcaaattccagttgatcagaaagcaataggcattaagaacaactaacccagaagggatctatcaatctatactcaatcacgtagcatactgagaattctacactactctaacccatcctcagaatcctattcactactcagacatcatgacagaaagcattaacgttgaacaggttgaaaacatgatagcaccagtatgataacagaatgaataacagtaaacgaaaatcaagaacagaaactgaatattgaatactgaatagataaagagaaatccggattacaaaaagtctagaacacaaggtctgcggaaataaaaactaggtaaaaaaaactctcttgcgaaaatgagaagtacatgctacttatagccaaatatcccgaaaccctaatactcaaaacgacgaagtatttggacgggttaagaactgtactcgaccaacgtggtcgagtgagagctcgagtgaatagctagagtcttcttttcttccttgtgctcgagtgtctggttgagtgcggaatgaagaaggctctgaagcttgtcatcgagtatgcagtcgagtggtgtgatggagatactcgacctctaggtagagtgaggaggtcgagtggttgtctgaagatgaaggtgaagacacttgacctcaaggtcgagtgaagtgattttgtgaagtgatcgagggatggaaacgaggggactcgacctcgtggtcgagtggtgaagtgaagtggtgatgtcctctgctcgacctgggggtcgagtggtctcttgaggtcttgaagctcctactcgacctctgggtcgagtggtttgtcacgatcaggtccgcttcttccagatagctcgtcaacagctccaaatcacatgaaatcaacgcaaatatgcaacatgcatgcaaaactatcctaaacatgcaaagtgatgacaaatgatgtgaaatggtataaaacagtgatgatatgatgctaaagtgatgacaaatggatgctcaaaacatgcaaaatacacacttatcaactcccccaaacttagtctttgcttgccctcaagcaaacaatcaagaacaagctggaggtgaggtttgaaagcggggactcagagccaaagcacctcataaaccttatgaaatcaatgtccaagttgatagttctaagttgcgatatgatcgaattctactcaaaaacgttagccatgccttgttatcaatcaatccgactcttatgctcgacctacacatgttttcaaatctaccaatccctttaacatttattagttctggaacgtgaatcaaacaatgcatcatcaatgacctcatttggctaaggtaaaggtcaagagacaaagatagtcccttacagaataggcttcatgaatcttttaagccctttttctaatcatttttttattttctcttaactctaggagaagctttctcaacactttgatacatctagcggatttggatttctttaacaactatggttcctgtttttaatcttttaaaactaagggctttttgcccttcttctttagctaacaagaaccccattcttttctttaacattcccaaaacctttactagcctttttgtttttctaacttctttagcttccttcccctagaatttttttccccttttctttcttttagacacatctcaacccataatatgagcgcctacctagtcttatccagcccggaaaacgcgaactagaactacatgagacactatctctgacgttacgaacctaacactttctaccaagctcaatgaaaataagacctcacggacactcacaagtgataaagggctttaaagaaggtttaggtttagtgtcggggttaactcctccaataaggggagtcagctacttgaactaacatgagtggttaaaatgagtaaggaagtccaagtattttagggtatccatgagttctaattcgatgctaagacatgataattgtaaatcagattcaggtttcaataatacaaaatcttttaaggtaggattttctttccatatttatttaatatttcgttttttactacatatgtcgtaggaaatacgatagaaatttctttcatcaatctaacgaatatatttcgacggaaattcgaaggttttggtaagtgttttttcttaccaaagttttggtaggaatttggtcggaaaacactatgttttcttgtaataatatcatgattttctacgacgttcttgatttttatgatacttttatattcttgaaaaatcatcagagcagtcaattacatgatttatgagtgagcgatatatatatttttgaaaaaatagccaaacgtttttataatttttaaattttaattatgcataactttcaattcaatagtcgaattggctatttaaatataataattgaggctactattcataaatttgaatttatgtatatcacttatatatgtgaattcatctttaatgtttgttatttattgataaaacttttatttttcttctaatattaaaagttcaatatttaaaaagcattagttttatttagatcaaattgttttacctcattttttaaaacttctgtataaattaataaacattataaaaattaaattacactataaattgataaatattaatttatacatcaaataatcctatacaattatttgggaagtttataatagaaagtaaccttgtcatttgtaggttattacattagaatcttattggaaataaaattctaagaaataaattaattcatcttatcaagaaaaattctttctaatgccctttttatgatgccctttttcgactctacccttttattttatccaattttatttctagcctctttaaatttttaatgaccattttacccttatttggaaattgttttaggttaacaaaatgaaaaattaatattttgttgccaaaagtattccaaaataaatttcccgccaaaattttcctgtcaaaaacatttcccgccaaaaactttcccgccaaagtttttcgaaaaactaatttttcccacaaaaattttttttttcgcgggaaaataatttacaagagattttaaaattgttttaagagatttacaagggattttaaaagggttttaaaagattaaaagggattttaaagggctttaaaagatttagaaaggttttttaaagatttttaaaaggtttaaaagtgtttagaaaaggtttaaaaatatttacaagggattttaaaagaggtttaaaagatttacaaggtattttaaaagggttttaaaatatttacaagggattttcaagggctataaaatatttacaaaggttttttatagatttttatagggtttaaatgtattttgaaaaatttacaagagattttaaaagggttttaaaagatttataagagatttttaaagggtttaaaagggttctaaaagatgtacaagggtttttaaaagatttataatgaatttacaagaagatcctttaaaaacacttgtaaatctttttaaaatattttaaaatccttgtaaaccctttaaaaacctttataaattccctgtaagtcaccctttgaaaatcttttgtaaatatttttaaacccctttaaaatcccttgtaaatcttttaaaactcttttaaaatcccttgtaaatctgtttcccgccaaaaaaaaaaaattggcaggaaaaatatttttgaaaacaaaatttggcgggaaattttttggcgcgaattttttttcgaaaatttttggcaggaaaattttggcgggaattttttttcgaaaagttttggaaggaaaattttggcggaacatttattttggaatattttaggcaaaaaaatattaatattttattttgttaacctaaaacaatttccaaataagggtaaaatggtcattaaaaatttaaagagggta

SEQ ID NO: 1241 - DNA, 3904 bp, Arabidopsis thaliana landsberg
ctttttggctgatcacatcaagtttgcatgccgccagaagactccatgatgcgatgctgagttctattcttcgagctcctatgctcttcttccacacaaacccaactggacgtgtaataaacagattttctaaggatattggtgatatagatagaaacgttgccaacctaatgaatatgttcatgaaccagctatggcaactcctctcaacatttgctcttataggtactgtcagtacaatttcgttgtgggcaataatgccactcctaatactgttttatgcagcatatctctactatcaggtaattttctacttcggggcaatgtcagatacatgcacaattgattttaagatatatggtccacttggaattaatatcacttctgtgatttgtagagcacatctcgtgaagttagacgtttggattccgttacaagatcgcctatttatgctcagtttggagaagctttaaatggtttgtcaagcatccgagcctatagagcctatgaccggatggccaagattaatgaaaaatccatggacaataacataaggttcactcttgcaagtactagttccaatcgttggctcactataagattggagactcttgggggtgtcatgatttggttaactgcaacgtatgcggttctgcaaaatggtaatacaaataaccaagctggttttgcatctacgatgggtctccttcttagttacactctgaatatcactagtctgttaagtggtgttctaaggcaagctagcagagcggagaacagcttgaattctgttgagcgtgttggtaactatattgatcttccttctgaggctacagatataattgagaacaatcgtcctgtatgtggctggccttcaggaggatcaattaagtttgaagacgtccacctgcgttatcgacccgggcttcctccagtattgcatgaactgtccttttttgtttatccgagtgagaaagtaggagtggtgggaagaactggggcaggaaagtcttccatgctgaatgcattataccggattgtggaattggaaaaaggaagaatcctgattgatgattatgatgtggctaagtttggactgacagatttgcgtagggtcctaagtatcataccccagtcaccagttcttttttcaggtttgtgtgtagtttaagacgatattgtaagtatgatcctgaattctgagaaacagttcttcttgttagggacggtgagattcaatatcgatccatttagtgaacacaatgatgctgacctctgggaggctctagaaagggcgcatataaaagatgtcatcgataggaatccttttggcctagatgcagaggtatagtttatctttagtgacatatattagttagaagaattctttgatttcttatggagatggctgatcaaagtgttactttaatctgtgaaggtctgtgagggaggtgagaatttcagcgtggggcaaaggcaactgctgagtctagcgcgtgcattgctaagaagatctaagatccttgttctcgatgaagcaacggcatctgttgatgtcagaacagattctctgatacagaggaccattcgcgaggaattcaagtcttgcacaatgcttgttattgctcacaggttgaataccatcatcgactgtgacaagattcttgtgcttagttctggtcaggtaatgccaggattacttattcatggaactgacttattatatattctcttcagaaatggataaaagggattcttgtgtggcttacataaaactattggaaatgccaattttgttaggttttggagtatgatagtccacaagaattgctatcaagagatacaagcgccttctttaggatggttcatagcactggaccagcaaatgctcagtacctttccaatttggtctttgaaaggagagggaatggaatgagtgtgggtggataaaaatggtcactagccttccaagaatgagtttttaagtttgcttgatgacggaatttgcattgttaccaatttaccattaaccagagtcccaaagtaacaaggtgttagtcttcttatgctgaaaaatctgcagtcatgagtcatgaccaatagcactcttgtgtacatatgacattcttggcagtaggaatggctaacaatatatttgattgtttcaaaatgttctgtaatgatcccttttttctggtgtgtagaatagagtgataaacaatgcaagagcttctagtatcacttaatctgttcatatgtacaagactccattaaactatctgcaaaatataaaaaggttgtgttactatcatagtcttagtgataaataaaatcttaacgaaatcaacaagatccgttgtagtctagctggtcaggatactcggctctcacccgagagacccgggttcgagtcccggcaacggagatatttttaaaatatctttactatattaaaccggattttggttcagtctggttatgttaacccagtctctgtttctctctaggctctagcctaacccagtctctgtttcgatcttattgaacttctgttccaaaggcgattccttttttatttttccgtttctgggtttagatagagaaatgtagagattgagatcgcggttactagttggaactctcttggagttggagagcatccgagggttctgcacgagctcctttaagatcgtagcttcggttcttttttatgagattgcgcgttgtgataccaaaaccggattctactgtttacagtttccaggagttcaagtaaagaccaaaccatgtctctgttttttaagtcacacacgtgtgagatgacgtaaagaaattttttgttgttgttggtctgaagtagttgaatgtagttggcttctaacctttttatatatctcttcaatataaatcacacgaagaattctaacacacaattcgttgattcatcatatctcctcttcattaatgaatggcctcgtcgactcttctcgagataagaagatgaaaaatccgcgattttcgtttcgcacaaagagtgatgcagatattctcgatgatggttatcgatggagaaagtacggtcagaaatccgtcaagaacagcttgtatcccaggtaaactttttaacataaataatctgaaattgtttttaaaaagattgtttttttgtgtgtttcttctcacttatgatcatcaaaaggagctattatagatgcacacaacacatgtgtaacgtgaagaagcaagttcagaggctgtcgaaggagacgagcattgtggagacaacttatgaaggaatccataaccatccttgtgaggagctcatgcaaaccctaactcctcttcttcatcaattgcagttcctctctaagttcacctaattatgtttgtatatatataacgttctaagagcatctccattggaagtatctcaatgagatacctaacaaaagaaaaaaaattaaaaaaaaaagtatgagagaagggagaaaaagcaggagagaaggagagttaaatttctcggatgattggacagatgtaataacactattagttcaactattaaataataattaatgtatctgttttgattaaaatattaattaatatttttttgagaaactttccttgtttttactgatggagatggtctaacgttctatggttcatataacggagcaaattaaagcattgtaatcatatatgtttgcatgttcatagttgcaatctcgttttgattataaatcagttttaagcatataaccaaaataaaaaaacaaatcaattgtaatattccggtaaaacgattaccacgtgatgattatagagaggcatagagcaatatcgtctggtaaaccgaataaaaccggatttggtttccatagatttttctcaagccaaatca

SEQ ID NO: 1242 - DNA, 946 bp, Arabidopsis thaliana landsberg
catacccttagaaagggatcaagccaaccgtagtttttttttttttttttttttcggcgaaagtgcaaaatgatgctatgtggtagtgatagtgtgccacggtggtgatgtggagcagtgttaataatagtagcctttaaagtaccatccatggttaacaattgatagacaacgggtttgacgactttggatattaaataaaggccttcctagtgcgtctaacttgctagcatttatctcagctgtgttttcaaaaactttgcggagaacgagatcgccttggagaaagtagcgaatttcaccttattgttgtcgaatttcgccgcggcctattggtagttctagatgcgaaggagagttaggtcatgttgttctttgatggtgtggaggtttgttaggagcatcttatcgttgagatgtggatcatggacaaacatagaacgtcggatcgtggggaggccgacttcagacggtgccatagcttccataccgtaagcgagggagaatggtgtttgaccggtagatcgccgaggagaagtacggtgtgaccacaagacaccgtcgagttcgtctgcccatgcacccttgttttcttcaaggcgcttctctagtccataaataatagttttgtttgtggcctcagcctgtctgttgccttgcggggtgtagacgtactcagccagattctccattttgcacagaaaccctcgaattgaagtgaagtgaactgagagccattattggtaacgatttcgtacggaagcccgtggcggcaaataatgttctccaaacaaaattctggacgtctttcgattggatccgggcatatgattccgcctcgacccacttggtgaaatagtcgatcatgacgagaaggtatttcttttggcgggacgatgaagaggtctgacgatgtccatcgcccaacgcaatgaatgggtaagga

SEQ ID NO: 1243 - DNA, 2396 bp, Arabidopsis thaliana landsberg
aaaaggaacagtagaggaacgattgtccttcccgtttgtgttatgttgactaattcaatatatttggtttatatcgaattttttactttagttgtacatgagctttgacaaaaaaaatttttttaatttaaaacaaattcttcgttaacatcccaggctttgacaaagatttgattttcttgtatcattatcttctaagaatatatgatttagacgtttgagtgtagatcatacatgcatcatcatcttaaacacatgatttagacacaatctagaatttttttttaatagaggttttgggttctccaaaatttcataagcaataactaatcatccttctaaaatgccatgagccgaacatgcttttcggtatgtttcatacacaacaccttcgtaacttctcaaattctcatcacatgtcggccctctcactatatctaggactagaaggattctccaaaaaaaaaaattctcccatctcacggggaacatgaccaatcctcccaacttcaaatcctcttctctttcctttaaaccgttttcccgattggctccaagtaaaataacctggaatttcagcatacgtgagattcttagcaagcgaattgaccttattctgattcaaccaacccatgaacatagaatcgtcatctcctctaacttggaaagttagtctaagcttgggaacataacccattgttttttcgaaccagatgcgttatttggctacataaaacatataatgtaaagtaaaaaaataataatataaagagagagtttaatacaattatagtaaagacaaatatacgaacaaattactactgtaggaaaaatataattggtgaacagtagtaaatccaccaatttcacaactaatatcaaaatcaaatattagacatatttttccaagacgctattcatgatatcatagaactacatgtcctaattgtagaaccaaatagtgtaatctttaatttattttattattattcatgattaataaaataataatactcttttatcaatcacgcttttgttgattagaaaatttgtaaagggttactgaaacacaatatttatatatataaaaaacaatacacataccaaattaataataaaaaacaatatatttattagaaataggaaaaaaccagaaaaaaccaccatttaacataaaacattataaaaattaaaaataacataattacatcctaaagacaaaaaaaactatattaattaaacaaaaaaatatatacatgtacaacaaaaatagggttatataaaaaaagatatttcttttttcaaaaagtttaagaacaaaaacaaaccaaacccgtccaacgggcgggcttttccctagtatatatatatagtatagattttagggttcatattgattttatcttcttcgtttctcgtcggttgtgtcgatttctccaagactgtgtcttgccggctaaggtatcggtgtttcttatctctctccaaaagcctaagtggatttgatagattacttgtggcaatcttttatttaggtcaaaaactaaaattcgaagggtttgattttaacgtttatttttgtagaaaaaaaatgtccagttcgacacagatggattcgcaaatcatctcagataaagcggaggctgaacgaattgttaagaacgtagcacgttgccttgccagaaaaggattgaagtttgagaagaggatgatgaccaacgtcaaagatccaagaatcaactttctaaggaaccctgaagatccctttcacggatattacaagcagaagcttagtgattacctttctcagattcaacaaaatggaactatcgttgatgattttggtcatgttccagcaacgaatgttagtacaacagaagtcactgagcaacctccaggtatcatcagaaataatatcgagatgatggcgagttacatttccaaaggagggttggtggttgagaaggtgatgaggtatcttgttgtaagtgacgcaagatacaactttatgggtatttcagacccctttcacccgttttaccagcaaaggcttacccagtactgttctctgaatcaacaagacggagctaatcttgattatgatgctactcttgctgcttacatgcgaaaggctactgaattccgttctcggattcaacaagagggagctaatcttgatgatgatgatgctgatgctggtcaacgcattgttctgccacatcttctagactatagacttcctaaagggatgagtgtcaagaatttagaactatcaagctcacaacacagtttggggcttggtatgggaatgatttttggctagggttcaaggaaagagatggatttgagtttacgaatccaactgatagtaagttcccacgattcactctatgtga

SEQ ID NO: 1244 - DNA, 1459 bp, Arabidopsis thaliana landsberg
ttatttagaataaaagaaacaagaaataaactaatagacaacgactctgatttcttttactttcggtatatccggattagcaatgactttggagatggggccattggtcacagccttcagtttatggatcccggttagacgccaggatacgagtgcgataatgttttgaggaccagttagccgctggaagaatctttgaaattcgaaagcttggtcattttgtgcttcacattgaagaacttccttgctacagagaatatatattatacacaggatataacaaatatatagccaaaaacattaaaaataaacaacttactgtttatccattatcttaaaaggaagcttccgtccacggtagtcttcggtcaagttgccaacctcaatgagcgcaccaataacatctggtgtacgtaatggaagataaaagcattatgtgtacgtacatatttacaagaatgaatagacagtcaaatatactaaccgactaacactctggttgaaactgtcctctcgatgatgtagtcaaaaggagtaaaatcgtaatacggtattgcagccaatcccaaaactttggtaacaatggtctgatccataaaacagatccggtagtcatgggacgttgtgtgtatcccctcatcgtggagacgaaccgagaaagtattgataactatccactcattttctcggatacggtcagagtaaaacgaagcaatgcgatgattaatggtagcctctatgcgggaaccattccctgcaccaaatcatcatgattagtgacatgtaagatatgtgaaagtaaaaacgttataaacacattggcaaaatagtactcgattatcggccaagatgagacccacgtcgaactcatttcttcccacgcatttcttaaacaccctgaccacaaaagcgcgtatactccatccggtgatcattggacaaagttcggaaatggcatgatatccatcatccatgatgtcaacaaaaaaactcagaataaccgactttctgtattatttgtgtgatgggtgtggacttttgtttgaatgaattaagggtgttattaccaggttcttaaatagattttaaaaagacgcgatgattggtctcaaatcgatgtaacggtttagtaaaaaatataaccgtcaactctgaataattagatgtactaagtgtacgtacaaatgaaaacttatcaaacatacgtacagacaataacgggattgacaaaaaattgaaggataatcaaatacgaggtccacaaacgtacgtacagaaggtaacgtacagacaaaataatatgtaatattacaacatagactgatcaaaagatttccaaaaacgtatgtagaacatcttcaaaccatgttgacacgtcggggatggagcacaggttggtgtactgtcaaccaaaacaaaagtgagatctacatgaggtacatgtgtacccgtcgacgta

SEQ ID NO: 1245 - DNA, 859 bp, Arabidopsis thaliana landsberg
tctcagaacaagagcaaccacagttacggcgatgattcgagttcatccgagacaaggtctttctggtttaccgccgcgagtacagagacacgccataaccctaggcggaatgggtccaattcgtccgccgtcaaccagagctgacaagccaaagaagaaaaaggctgccaagcaaggggaggcacgccgatgacgaacgacgacctggtcgacctccggaggagatgccaggttccggcggaggtacatatgatcctcccaaggccaccgctgcatcctgagaacgtgccggtcgggtggtgctgcgcttatgccaatttcttcgagaaatgcggcctatttttcccaattccggcgtgaattctcgagatgctctactgtctcagcctcgcctttccccagatgtgtccgaacttcgtccgccatgtgttggcgttattcacctaggctcgggaagtaaacagagaattcagctgccatgacctgcttcagctctgcctaggtgaataatgccagcacagttttgatcccgcgaggataacaaggacctggtctaccaacctgggtcagatggagacctgagcctcttgatttttcttagttgtttgtgtcgaatccttgactgcttttgctggacgttagtattgaaactaatcgtttttttttttatgatttacagcaaggaccaaggaagttactctctcggagacggaacttgagctgttaacccttctccgacgtggtcagagtgaatggtccactttcaccagaaatcgcatcgtagcccctcttgccgtagctccagcagataccgaaactccagcagttcacgcaatcgttcctccagaagcacagctag

SEQ ID NO: 1246 - DNA, 2626 bp, Arabidopsis thaliana landsberg
tctccattcttgtaggacatgacctaggttgcttgttgcaaaaagattgtttgattgtgtgataagacattgtttgttgtatgactttctgttgttaaaaacacttcccaatctatagtatatgtacattggtacaaaccatgttgacacatacttcttggagttacagctggtgtacggtcacccgagtgagaaatattatctccgtcaggtacacgctgacttgtgtacgtacattctgccaatagacgactgaatttccatggatgttgaacagtcaattgtgtgagaatgacgttctcctcaacattccctattccatattcttctacaactacatcgttccacttgttgtaatcataatcttcgccactactttaactaccatcaatagtaggatcgagggtacttcccccccccccatagatccatcgttaccctgataatcatcatacccatcaccgtcttcattgtctccctcctcttcatcctcatctgttttatcgtcttcaatgtcgtcttcctcatctatggcctcattattttcatcaacatttgaaacactatcacacacacggtcactttcagcatcgtcaccatgagtcctagagacattattcccgagtgtcttgacggttgtaatgaaagagacaaacaagttgagagaaggataccgaccacgaatcaaaaagaatgtatccaatcccacttgactatcaatgaagacaagagggcgttgagtatctatcatgactaacatctctcccggcatccagtaactaattatgggattgatctctgtggacttaaaactgaaagcatcgcttagtgtacgtacaaattccgtgtatgtaatgttttccttaacacgtacacagcgaccaaacatgtcttcctttggtttaaatttccattcttcttctttgcatctccactcacagaccatagtaaatacgggaatatccattatccaactgcatcataaatttaagagaaacccattaaatgcaactaaaaacatgattatatctacaaaaacaaatagaatttcgatatacacacttataaacataaatatttacacatttagcattttcaaccaacaaaattggaaataaaaaatctctgggtttttctattaaaaaaaacaattttgatttcgaacacaatcagatatccaactgtgtaataacaaaaaaattctttaaaacttcattacttacacgatcaatgcttatcttggctccaaactttgtaaataaacaagttcaaaacttcttcaacatcaaatttgttcagaaaataatgtttgtttttgggttcatctttatctcaacaattattatctctaatattagaacaagtaatgatgatttttgcattaattgtaacaattgtcacgtctaaactttttttgcattaaatgctgatggcacattattttttaatgttactaatccccttttatctatacagccgcgcaaaacaatttaaaactaaaatatatttgtttaaccggaacattgtcctaactaaaccgtataactgaactgtacatctcgttacgcttgcaaggttaaaatgatcagattttggctgaattgttataacgtgaaaacaacttcccactttgccaatctgtgaaaataaaacaaggtcgtaggctgtggcctgcaatttacccttcataatagctagtcctgggagttcagatatatcggtttagtcgatttggtttattcggatttttaaaattctgccgaattgatcctatgaaaaattccattcgggttggttcggctctcggtattttttggtttggttatagggtataaaataaattccggatcaaaccgattttctttctaattcggttaatatgaaccgcataagaaacaaattaaaaagatgggcttaagaaaatgaaatctaataaataaataaatcaacacaattataggccaggtccactacaaaattagggttttgacaaaagatatgtacgactgcaactccaaactgctgactctccaatctactattccgacgacatattgccctacgaaacctgttaggcgctgtttgttacacatgaagtaatatattgtaagagaaaaaactaataatcaaacattagaaatcagggttaagaaagaacatgagatggatctagacgaagcagaacctctccaaggcgaccgatggaagtaacaccactccaagaggaagtatcgagaaagaagatgccatagaactagaaaatcgacccagatacatgaaaccaaactaagtcggtcgcaaagaaaccctaatcttccaaagaaaaaccttttaaaaaccgccgtccaacagatctgcgaatacccaccagaataggaccttcggcgagcctggatgccgttagccgaacggaatggagacacaggagccgtcaccatcccgccaccgtagaaccgtgttgaggaggaagaagaaaaacgagcttgccattgtcgagaaaaaccgtgtagaaccgtgacgacctccctcatcaaacgaccaccgggtgaaacctcatgcgtcaccagctcctagatctaaccgccttcctctctattttctcactgagaaaactctctctcctaat

SEQ ID NO: 1247 - DNA, 6186 bp, Arabidopsis thaliana landsberg
aaccaatactgaatactgaatactgaatactgaatactgaatagataaagagaaatccggattacaaaaggtcaagaacacactgtctgcggaataaaacttagataaaaacttgttctcgaaaatgtaaagtacatgctacttataacaaaatattctgaaactctaatactcaaaacgacgcagtattgggacggattaagaactgtactcgaccgaggtggtcgagtgagaggtcgagtgataagctggagtcttcttttcttccttgtgctcgagtgtctggttgagtgcggaatgaagaaaaatctgaagctggcagtcgagtttgtagtcgagtgatagagatgatggtactcggcttggtggtaaagtgatcgagtgaaggcgatgaatgtacccgaccatgtggtagagtagtgtgatcgagtgagtgtgaagtggtggaggtgatgatactcgaccagggggtcgagtaatgtgatctagtgtctctcttggcggtactcgaccagggggtcgagtggtcacatgaagtgctgaggtcttctactcgacctgggggtcgagtggtctcttgaggtcttgaagctcctactcgacctgtgggtcgagtggtttgtcacgatcaggtccgcttcttccagatagctcgtcaacaactccaaattacctgaaatcaacacaaatatgcaacatgcatgcaaaactatcctaaacatgcaaagtgatgacaaatgatgtgaaatggtataaaatagtgatgatatgatgctaaagtgatgacaaatggatgctcaaaacatgcaaaatacacacttatcaactcccccaaacttagtctttgcttgccctcaagcaaacaatcaagaacaagctggaggtgaggtttgaaagcggggactcaaagccaaagcaccagataaaccagatgaaatcattgtccaagttgatagttctaagctgcgacatgatcgaattctactcaaaaacgttagccatgcattgttatcaatcaatccgactcttatgctcgacctacacatgttctcaaatctaccaatccctttaacattcattagttctggaacgttaatcaagcaatgcatcatcaatgaactcagttggctaaggtaaaggtcaagagacaaaaatggtcccttacagaataagtttcagtaacaggggatctctaaaaaatgattaagctttagtagaatgctaaaggtaagtcccaagctatgcatacagagataagatcccatctacctagagtataaccaatgaagctctaatggtaatcccatctccaatcccaatataagaacctaactctaccctttgcattcatgaatcttttaagccttgtttctaatcattcttttcttttctcttaactctaagagaaggtttctcaacactttgatacatctagcggatttggatttctttaacaactaaggttcctgttctttacattttaaaaccgagggattttgcccatcttcaatagctaacaagaactctttcttttcttcacaaatcccaaaacctttactagactttttctgcttccttagcttacttcacctagagtcttttaccttttctcatcaatgaatcaacccctttttttcttttaaacaaatcccaacctaaagtataaccgcccacctagtcctatctagtccgaaaaacgcgaactagaactacatgagacactatctctgtcgttacgaacctaacactttctaccaagcttaatcggaataagacctcaatcatacacatgacatcaagtcatattcgactccaaaacactaaacaagcttcttttggcttctgaaagcattaatggtgtagctaaattccgtatgagtctttggctttgcatcttctaacaagtaaacactacgaaggcttttaagatcaggttgcggtttaagttcttatactcaatcatacacatgacatcaagtcatacacatgacatcaagtcatattcgactccaaaacactaactaagctttttcttgcttcgcaaagctttgatgggatagtcaaagtccgtatgagtctttggctttgtatcttctaacaaggaaacattactttagcttttggtcaccggttgcgattctagttcttatactcaatcaaacacatgacatcttgttatatttaactccaaaacactaaccaagcttcgtattgcttctccaagatttgatagtgtagccgaagtctgtattagtctttggctttgtatcttctgacaaggaaacattactttagcttttgggaaccggttgcgattctagttcttatactcaatcaaacacatgacatcttgtcatatttgactccaaaacactaaccaagctttgtattgcttctccaagatttgatagtgtagccgaagtccgtattagtctttggctttgtatcttctaacaaggagacaatattttagcttctgggaaccggttgcgattctacttcttatactcaatcataaacatgacatctagtcatatttgactgcaaaacactaaccaagtttcgtattgcttttccaagatttgatggtgtagtagaaattcgtatgagtctttggctttgttccttctatcaaggaaacattactttagcttttggaaaccggttgagattctagttcttatactcaatcatacacatgacatctagtcatatttgactataaaacactaccaagcttttttattccttcttaaagctttgatggtgtagccaaagtctgtatgagtctttggctttgttttttctaacaaggaaacattacttttgcttttgggaatcggttacaatctacttcttatactacatcatacacgtgacatatagtcatatttcactccaaaacactaaccaagcttctttttgcttctcaaagctttaacggtatagccgaagtacgtatgagtctttggctttgttttttctaacaaggaaacactactttagcttttgggttccgttcgagattctagttcttatactcaatcatacacatgacatcaagtcatatttgactccaaaactctaaccaagcttcttcttgcttctcaaagttttgatggtgtagtcttaattccatatgactcttttactttgtatcttctaacaaggaaacactacttgggctttcaagattcggttgcggtttgatatgtctataatttgcatgtttttagtgtccattcatcctcgttttgagtccagtttcgtatcattcatcactgttttatatcatttctcatcattcttgcatactttgcatgattaggatagctttgcatacatattgcatttctgagttattttcaggtgatttggagctgtttgcgagcaaattggaagaaacaagcctgaaccagaagacatactcgaccaccaggtcttgtgcatacagcaccatactcgaccccctggtcgagtgaatttggagccattcttcccatctactcgaccccaggtcgagtaacctcagctaaggccactcgatgacgccactcgaccccctagtcgagtatcactttgccacaccacctgaccacattcggccgttcactctaccaccttactcgaccccctggtcgagtatcgtcattcaccaccaacaccattacttgaccggacactcgatcacatcttcatgggctactcaaatccacacttaaccagacaagttgagcacaaggaagagaagaggagaagaccaagtgtttggaagcagcctgaagctccatcggatctcgacgcccatctgggcccattatcattctatgggccgggcgattaggttattggcccgtctactatcattttatttcgctttgtataaatagctgtcttaggatctgtcttgagacatctagtcgaaattgagtttttgcttcaattttattttctgttttactctggttgcgccacatttgcttctgcaacctgtaattcgagatttttccaagttattcagattccgcatttgatttcatctttaattcgagatattcgtctatatctcaagggattggctgtttaaagcgtttattgactttataagtctgttcttattgcctgcatagttagatttcgttaatgggaattagtctgggcttgctttgcttgaggatttctatcacgggagtgaattaatctgttgttgaccccgttgtctagggatagcttgattgcgcttgttaaccattcgaataggctaggatagcactctactcgattaccccatccttaggaatttctcgtctatcttatttctctgttttatcgttatcacttaatcgttctcattgcctgtttcttagtttttataatcactcgaccaacttactcgaccacacccagtgtctggcaacagactgtgcagtcgagtaagattgtcttgtttcttgtctgttactcgaccagtatactcgaccacacccagtgtctggcaacagactgtgcagtcgagtatagctgtttcatatcctgtctgttactcgacctgttactcgaccacatcctacttctggcatcagcctgttgtggtcgagtgattttagtaattctgttattgcttctgttttctgcatgttcgcttaggactgttagaaaccccaaaactgttattgcttggcttgacttagtgacttctgatcacatctcatctgtttgcatcacacccatttggattgacacctaaaatactacaacgacttgattggtgttttaggataattgcataaaaacctattatcacctcccaaggttgagatcaatcttaccatatctgacatctatcactgctcccactgaagctaagaagggtcttcccagtattaagggatccttatgctctacttccatatccagcaccacgaagtctgtaggcacttctactccattaatcatgactagtaggtctttcagcatgccgaagggttttctagaagacctatccgcaaggatcaaagtcaggtcacaaggtttgtactgaataaactctaaccttcttgccacagagagtggcattaaactgacagaggctccgagctcgcaaagacaatcgctaaaagctaattccccaatggaacatggtagagtgaaatatccaggatcttctaagtttttttgaacaatcctcttatcagcagctcgagatggagtggcatcactttcatcatctgaatcttgatacatattgatcctttccagtatcaaatttctcacatctttgtgaggatcatgaatcaggtagagaacttccatcagtggcatcactgcttcaatctcgtccagctgctttgttacagcagacttgtatctctccatccacgctttcctgaatgtccacggaagagcacgtgagggtaatggagtaggtttgaatcgtttcactattctcttgatagtggcggccttctcttccgaggtggattgaatgagatggcgagaaccatcagaatggttgaattcaacaacagagacttcaatctgagtagaagcctccccttcttgaacatcattgtccccaatgattaaatcagggacatgtcgagttggtagctctcgatcatggcagatggtgatggcgtgagcagttgcatactcttttggattttgtatggacttccctagaagtcctgtgactttaggtgcagaggtagatgctgattgtccttccaaatatctgactttggtattcaatgccaccactttggcattcacgtcattgtagctgcaatccagcttatggtgcaattcagataatttcttatcaatttccattgagctagatgcttgtccctgtagcagctgttgtaccatctgtttcattttagcatcaggagcagctggaccttggttttgctgaggtgcaaacccaggtggtggtggcggctggtagttcccctggaattgctgcttgggaacgaaaccttggttgtagggaacaaaaggtttgttctgaccttgttcttgctgtggaggatacacttgatcctgaggattagcaatgttggtgctgcggtagaagaggttgggattgttggttttggaagttgttgtatcctttgtagccaccctggttgttgttgatgttgctgacttcttccaactggttaccctccccatcttggactt

SEQ ID NO: 1248 - DNA, 887 bp, Arabidopsis thaliana landsberg
tcgtcaccagccagttccatggggaatatgaagctaaagacgagcgaatggaagcgtacctcgaactagtcaaaaccttgacccaacagttctagtcgttcgaaccgaccacgatccccagaggagaaaacacctctgcggagcaccaacaaagctatacttagcaacatcaagaaaagacttgattcaaacaaatcaatgtggtccgacgtactccatggagttctctaggcctaccgaactacacctcgcaaatcaacgcaagaaacaccgttctctctcgcctatggtttagaagtagtaatccctatcgaaaccatagtaccaagcgtgagaaggaccgccagtcctgctaactcggacctgaacacgcaaatgttacgggacaacatggacttcatcgatgaacgtagagatcatgcaatgatccgagttcaaaactatcaacaagctgctgcccgctactataactccaatatcaaaattcggagattcgaagtgggagagctcgttctacgaaaagtgttcagcaacacgaaagagctaaacgccagaaaactgggaactaactgggaaggtccctatcgaatcaccgaggtggtaagtgacaacgtctttaaactcgaaatgccatgcatctcaagcaataccacgaataggtactcaaacacaatcaaactacgataaggcttgatcccttggcagggtacgttggcagctccccccaagagcgcaacaaccatttcaattgaactaggataaggcttaacccctaaccaggtacccaggcagttccccccgcgaacgcagccaccgtcttaactcttccgtttgaaacagttttcttcaacaaggataacagacatcacatcttccatcaaagaagg

SEQ ID NO: 1249 - DNA, 3857 bp, Arabidopsis thaliana landsberg
tccgctacacttgcctccgcggctgctgcgagagctctagccgcggcggtggtgcttcgggttactcgtgtgaagttgcaagttgccgaggtttccatcccagcatgtttgaccgttaggtcgatgctcgggtgttctattccttcgaccggtataattcttttgacgaaaggatctgacgtggaggcgagagctgtcaaggcgtctgtagaggtgttttctcctctggggatcctggtcagtttgaacgattcaaactgttgggtcaaggttttgactagttcgaggtacgcttccatgcgctcgtctttagcttcatattccccgttgaagtggctggtgacgagttgggagtcgctatgggcgtgtatatcgcggatccccattccttgagctagcttaatgccagcaatgagggcttcgtacttagactcgttgtttaatgcgttgaatccgagtcggaacgattgttcgataacttccccggtgggggaggtgagttgtattcctactccggatccctgtcggttgtaggagccatcgacgtggaggagccatttcttattagagttggttccatccaggtccactacagggagctcgattacaaagtccgctaggacttgtgctttcaagctggttctagtgcgatattctatatcgtactcgcttaattctatggcccatttcgcaagtcgtcctgattgggttggactatgcagaatggttctgattggttgggacgtcatcaccacgatggggtgtgattggaaatatggtctcagttttcgaggtgacatgactacggccagtgccagtttttccattgctggataaagagtttcagcgtctatcaacgttttactaacgtaatagatcggtttctgtccttcgtgatcttctctcaccaggacgccgcttatcgcagttcgggagactgccatgtacagtacaacggttctccttctttgggttttgcgagtatgggtggttcggacaggtacgctttcaattgtttgaaggcttgctcacagtcctcattccaatcgaactttttatcctttcggaggagctgatagaaagggaggcatttatctgttgagtgcggcgatacggctggttagtcgttagacctcccatactgtctttggcgatggcatgtcgatgaagtctgcaatctgcttaggattggcctcgatgcctcttttggttactaggtatccgaggaattctcctgagggaactccggaagagcatttctcggggtttaccttcatttcgaatttgtttaggattttgaagcattctcttaattacgggacgtggtctttttcgcgagctgacttgaccagcatatcgtcgatatagacctccatcattttacctagctggtcggcaaacattctattcaccaatctttggtaagtagctccagcgttttttaaaccaaagggcattactttataacagtaggtgcctcgttcagttataaaagctgttttttcttggtcatctgggcgcataagtatttggttgtacccggagaatgcatccatgaaggacaacaattcgtgtcccgcagtggcctcaaccagtcggtcgatatgtgggagtgggaaactgtctttaggacatgcgttattcaggtccataaagtcaatgcatactctccacttctcgtttttctttttaacgacgaccgggttggcgagccagtcagggtattttacttctcttatcgatccaatcttgagcaatcgatcgacctcatcgtgcacagctttagccctctcgggacctagcttgcgatgtttctgctttataggtcggtaggtcggatcgacgttgagttcgtgtgaggttacctcgaggcttattcctcggaggttcgcacttaaccaggcaaagcagtctttgttttctttgagaaaggatatgagatcatctcgtatcgctgggtagaggtcttgacctatcccaacgcatcgtttgggatctgattcgtctatgcagacctgtgttatcaatgactttcgatgtccgcgttgagaaggatcagaggatctgactgttttcatttccgcgagtttgtcttctatcattagtactacggggttagcctctctgataaggtggtagctgcccatatagcatttttgggagctgcgttggctgccgtgcacgactgctattcccttgtccgaggggaatttaatgcattggtagtaggttgatgggacggctttcatggcgtgtagccatggtcttcccagtattgcgttgaaaggagctttcttgttgactgcgaggaaacttgtgagtcgcctcactcctcgtgcgacggtcgggagctggatggttcctagagaaaaggtcgtatctccagcgaacccggtaagtgacgttttcctgccttgcagctcagaatcgaggtgccccattcttttgaaggcgtcgtaaaagagtacgtcaactgagcttcccgtgtcgatcattatacgggagcgtcatcgtgaggtttatcgaggtcggtggtttcgctttcccagaatgtgatctggtggtcaggtcccatcatcgggctcttgccttttgtgtaaaaatctgccttcctctgatgagttttgatcgaattgattgagtcgttgcagagctgagaccctcccatgatgaaatcgatgcgtttaggggagaggtgctcggttgcgcttctgcagaatttcgagaggcgtaatggaaacctcatgtttttcttatgcggggcggtgggaggtgtggtgacgtaccttcctgtcccgccacctaaatcgagtgctgcaaagactaggtctatgcgttctctcatagcaggtgggggagaatcacttccatccggtgttcgttcccgtttcttttgcttgggagtttgctcctcctcctgttcgtcgggaggaggggtttcaactttggggttgaaccttttttagttttgcccccagctgcgattaattatttgacggcgcgacactcctcagtggaatgtcctctttttttgtggtacttgcaatattttccgaggtcaagttctggactctcgtcctcagctgctctattgcgaataaggtatgctgcccttgcgtttggttttcctttttgaagggttttttaattgcaagggaagcgttttgcgttttagattctttgaatcttaaggccagcacagcgagctccttttcggctttggcgaagtggagagctttgtgaagggcatcagctaaagagactggttgcctaacaatgagttcctcacgaaacctagaggaaaaccacagaccgttacgaagggctgctatggctacctcctcgtttaggttcgcaatcttcgatttgattgctttgaattttgcgacgtaagatcgcagggatttgttctgaagttgagtgagactccagaggtcggcttcagacgtcctgtgtttgataagtaccgaatattgttttaagaaagcggaagcgagctgatcgaaggtatcaatggagttccgttcgaggctagcaaaccattcgagggcgtgacctacgaggttttctacgaagaaacggcaatgacctgcttcgttttcttcgtctgtcaggtacgctcgagttatagcgaaacggaaggatttcaggtgagtctttgggtcgctcgttccgtcgtactccgggaaacggagtctcccgacgtcttagacgcgaaaatgagcgatcctatccctgaaaggggtgcgcgtggtttcttcgatcacgcgatccatgtcgggagcatcgctcactgctagatgcatttgccaatgcatttgagccatattcgcatttgattaagctgcggaattgcg

SEQ ID NO: 1250 - DNA, 2394 bp, Arabidopsis thaliana landsberg
agaccaattcggattataacttgaagtaagttcatttcttttgagaaagtatgaagaagcaggcttggttgggttgttagggtcaacgttttcgttcttcttcttcttggtcgccttctccttctgcaagagacaaataattatgatcctgtgagtctctgagttgaaatagaccttggtgagttaagtgtgagtgagagagagttattaccttgatcagattatcagttttctccttcttcttaagcatttgaagagcttcttgtttgtggagtttcaagagttcctcttcttctttcttctgactcagggcttcttcttcctttgtcctcttgtattcctccattgcttgcaggtatgtctccttgttcttctttgccacctatttaaacaagaatacctcaatcattcagtcttaagtctttaatggcagtgaaatgcaagcatatgtgtatggaaacagaccttctcgtagggtgcctttttcttgtctgacaagttcttccactcctctccagtgatctttgcgacctataaccacatttaaactccataagttagcttcacaatttgacaaaaactgatctggagaacgaattaagtaattagatttacctccacgacgcttttgttttcttcgcgtaaagcagctctcctctcgtttgcataaacaaggaaggcagatacgggatgttttggcttcagagggtccttctccttcctgcaaaccataaacagctctagttagtttactattgatgatcaaattgatatagtcactaagacttttggtttttacttgttcttcttcttgttgtcctgttcagcttcctggacaaagttgagatactgatcaagcaattccattgcagttctctgcttctggtcatcctccagaagcttcattgcttccctctcacgcttctcctttgtaataacctgaatataaacttctttatctgcctgatacttttcctcataaggcttcttctcttctacactcagagtcttccacttagcaccaagaatattcgaagtctccttgaaatcagcagctggattctgcttcttaacttcattccaattatccttacaccacaaaatgtatggtgtcgatggtctctttgtttcaacacaatccttcttcttcttctttcccttcttttcttcttcagtttgtgccaaagattgactaaaagcaaaagtctgtggaagcaacaacaatactcccaaaatcaatcaccaaataaacattatcacaacatagaaatgatacataaacttgaagtaatctatcgattttgcaccaaatttaacatctctatcttaaacacatgcgtagaaatcaatctaacatctgtgaatgatgattagtctcaaatctaagcgaaacttccatcaatcatctttaatcaatttcacagaacctgaactagcttcaatcttcatcaataagcgaatcaacaatcaacaagctcctaaacgcataagattaatcagattttctgaatatatccatccccaaaatcatcatgaatcaatttcacataacatgaacttagcaacaaggtccattaataagcgaatcaatcatcaacaagctccataacgcataagattaaccagattaaaatcatctcgaaaccttatcaaaaaatcatccccaaaatcagagccagatctataaaatcgtaccatgttaggcttgaattccttcatcttctgcagtttcttcagctccgtcttaagtttttcctgttcaacttccttcttcctcaagatctcgtccttctccttcaacaaatcctcagttttctccttctcgatcttcatcttctccaacatcgcttgcatctccatcagatctttctcaaacgacttcgattctttccccttgcctgagaccggtgacaacaatggtgatgactcgacgatctcattcttttgctttaacgcttttctactgtttctcgatttcttcgcatgagcaggatctgaagaaactgtcgacattgtaaagagagattgagcgagagcgagagagaaatggagattttggaatttagggttttgaggattagttgagcctctgggtttattaaataacaaaggcttaacggtcaaaattttgaaattcaaaactgttccttttctggatttaaagaaatttttggcgtccgaagaagaagatatgcagctatcaactaattttttttgtcggcaatttttcattaaaagaaaacccaaacttgggcttacaagtggtgggtcgaagtccaaatcccctacatttgcaactttaatttagcctatacaaccgtttatcccaacccaattataaagatgaggataaaataaaaaagtgccacgtattcaaagaagaacacgtgagct

SEQ ID NO: 1251 - DNA, 1187 bp, Arabidopsis thaliana landsberg
atatggccactcgggaatggaggtcacagattctatctcttaatcgggggccttttttgtcttctgcctctcattgtgtgtaggcaatcgaccttgtgtcaagttttatctgttatgccctgttttaattgtttggttgttctgttactctgtttccatctttggttttaatttctacgacgacaacatgatacaaacaaaacaaatttagggtccgcgttataaaaaaaaaaatgattttggttacaaattactaattagggaaacattattctaatcattatattgtccttgcaatttataagtaaaaacatttcttttctggtccactcgttttaacttccggcgatcgattttcacggcgagaaatgttgtcggcgcttggctttgctttactcagcatcttcgcgatcctcttgtcgttatcaaccttgtctaatggattacttcaacctcgtaggatttctcatggcttgacggaaagtagcaagtacttgacgagggatgagctctggttcaatcaaaccctagatcattactctccttctgtaatcaatcttcccgacttcgtttcttcttcaatttgaattttcttcttgcattatcgaattgtttctaatttcgggattcgaattgtttctaattttatctcaggatcatcgcgaattcaaacagcgatactatgaatatctagaccatttacgagttcctgatggacctatctttatgatgatctgtggcgaaggaccttgcaatggaatccccaatgactatataactgtaagattttatttgattgattaatctattctcatcgcatcgaaaaatttctaaatttgctctgtttttcttgataaacatgttcatcaggtgttagcaaagaagtttgatgcaggcattgtttcacttgagcatcgttattacggaaagagctcaccgtttaagtcattagccactgagaatctcaagtatctttcttctaaacaggctcttttcgatttagctgctttccgccaatattaccaggcaagtactagtcttatggtttttgtttctctaggatcatatgtttgagaagttgcgtttatagtagcatgttttgggattttttttgtggatgcaggactctttaaatgttaagtttaatagaagtggcgatgttgagaatccgtggtttttcttggagc

SEQ ID NO: 1252 - DNA, 1048 bp, Arabidopsis thaliana landsberg
aaagtacaactttaaaacatatgtagataagttttaaacaaaacgatagataggggtctgttgttacattttcagtcctcgtccacaacttcatctagctcaggtgtttgcattcgttgaaggaattgagttctgaaacagtaggaaaatagaaaaattaaaaaaaacgaagaccaaaattttagaaaatacaataaacagttaagggataatataaatataaatgttcttacctgacgcgatccatgttaatctctgggtaactttgattagacattgacgacctaaaatattaacatttttattatatgaagtagctatataaattatagataacataaaatgagtcttaaatataccttcatgatcatcaacattccaaaatcgtagcacacagattgtaggattcataccaaagttccagtgataaccaagttctagaccaagtctcctccataattgcacaaacaactcacaagtatatccgcttgcaacacatatcagagatttacccctaataacaatatcaaattattccaccaaaacatctaagttctatgaattaaaccaactataaagataacaatatttactatgtttgtgcattcaaatatataaccaaatagatgacaaattatataatggaaaatactaaccaagaatttttaatctcaaattcgagaaattgagaaagtatagtattttctgaagcttgagggacaaagtccggtcttgttatattcccaactctcacgacaataccataagcatctacaaacaaaaaaaacgacaatatgaaagattaatattttcaaaaaaatagactttatattattgaaaaatctaaataaaaaagttaccatgaacagttgaagaattaatagtcttgttttcgatcatagagaaggcagcaaatcggaaaaagctacttggttctctattaggcacaggagtcattttggtagtctgaaagaacttgattcttaacttattatcagttaagggaggttttctaccgccgactgatttgatcagaagtatgtttttc

SEQ ID NO: 1253 - DNA, 2577 bp, Arabidopsis thaliana landsberg
cgaacagacttttgaggatcgtattgggaagatttgacggctgtgattaacctaaagcaagtgtcttttttgtaaatattaaataataaaaaattgctagtacataggtcatttttgtaacgttattttctaatttacgtatttcttttaggttgtttgattatttctatatttcttttacaaacttacatataaatatgttaactaatggtgaatatcaaaattttgtctaagttgatcaatttaatagtatctttgatcaaagttgttatatatttgattatttggtaaaatgttcgtattaattcatgcaaaaataacattttatatggtatgtaataatttgatactaaagtacccatgaggcctgatcaatccgagagtgaactagaaaaactctactaagtagactagacattgtaacatcctctttattttgcatttatgtagtttgttaaagaattagcaaatgttgacccattcttaccccattgttaatataagaggttttttgtacgttgatttgattatatgatttgcgggttctatgcttagtggatctcgtgttgagcttgctcactttgtagatataggaacccaatccatttaaacatcacaaaacatgtctaacaaaaactttcttaactccataactatagcgtttttttaagatattgggtttgaatggttacaacggttgggatggacaaaaccgtcaacgaatcataccgctttttatttattattcatcaattataatccgcagtagtccggaaaaaaaaaaaaaaaaaaaaaatcgcagtggaccatctgcataccatttatacatacaaataaatttagtttgcagctgtttattgtccatcccaaaaatgaaatggattaaaccgcaaccaaattggaccgttttgtcttgctgcctccattcaaagccattatgatttgtcttcagtttcaatatatccctacaaagttgtttttttggtataatactttggaaattttctgccacggtccatcgtagttaatgatggagctttggtgcttattgcttatgacaagaaccaaaatttttaatacgaaacgtaaataagtagcaaactttaacgtcttctggtcataccctttagcatatcctcaagtttcatttaaatgtcaacatctttacggcattatttattatcccccatatctaaatatatttgttatcataaagtacacaattagtctgttcgtttgttcaccgcaggcggcagcggcagcggcggcggcagcggcggcgggaaactctaccgcagcttgttgttcgtttcgttagtgctgtacctagccctatccctgccgctgacgctttatttatgttcgtttggatgtcgccgacgctgccgttgccgctgccgcaagtctctatgttcgtttcgccgccgctgcgttagttttaaattgattcttattttttaaatataaatttgtattataattatattttgaaaaaaaaatgtaatttaaatattgttacatccataacaatttttatttaactagttataatttttagtttttttttggtaattatatcgataaaattttgtgaaaaatcataagcataattataacaataaagtagtacaccaagttataagcaaaaaagatagacaaagtcgtaagcataattataacaataaaccaagtcaataaaaaaaacatatctaataaggtaagcgacttttattacattcgttcgtgatgttgtcacgtaaagcttccatcgctctgtcaccggtaggctcatatgcaacatgttcttcttcttcttctccttctccttcttcttcttctccttcttcttcttcttcttcttcttcttcatcatcaacatgatattcttctatgctttgccactgtaaaaaatcatgatcttcccaatgtgaatcccttataaaattgtgtagtgccattgtcgctgttacaatcttaatccacttagtcagaccatattttggatgcttacgatctaaaatcctccattttgctttccatactccaaatgtcctctcaatcacagatcgcaaacctgaatgctttcggttgaacaactctcgtgcagttactggtggtcctcctctaccaaactgaccaagatgatatcgcatcctacgatgtggaccaagatacccagtcctggtgggatatccggagtcaacaagataatacttcaataagctccttccaattcttgcgtaagttcattcaacaacaacaacaaggaagaatcatattacgtgacatatacgttttatcttcagtgtttaagcaccaagttctgagattgcaactgttaacagtcactaccatatagatccaatgagcttaaactatttactagctgattaaaaacactacacgtctcatgatatgtccctataaggtcaacagagtattttgtgatggactagtaccaagtaataaagatctgatcgaaccatactattaactaagccaaatgttccagtaacgaaacaatctaaaaaggcatgatttgagataaaccaatgctgcttatacttctttaaaaaa

SEQ ID NO: 1254 - DNA, 529 bp, Arabidopsis thaliana landsberg
gatttgagtgagctatggaaaacaattctcttccttggatttagctatggattcttcattcatggggggattgcgttctagaaggttgctggttagagacaacagatgcatccgagttccttaattttagtccttcaacttctgtagccccttttgatccttcttccttcatgtggtctccaacgcaagacacatttaatagcttatctcagatgtatggtcaagattgtccagaaagatcaagtcttgaggatcaaaaccaagggagagatctctctacctttaacagacgttggtggattggaccaagtggtcatcatggcttttctgttatggaaagattgggtcaagcagggacacacattaaagatttcactagtgagagaggctctcttatacagttgtgggtgcctgtggatagaggtgcgtagctagttttgaccacgaaggaacaaccttttagtcatgatccaatgtgtcaaaggctcgctcattacagagagatctctgagaattatcagatctctac

SEQ ID NO: 1255 - DNA, 3259 bp, Arabidopsis thaliana landsberg
tggttaggtacgaatggcttgttgttgaatttctctgtctgggtacgaaaggtttggcctgaaactgctgaccctgtgatcccgtctgtgctggatacacttgatcctgcggattctcaacgttggtactcctgtaggaaaggttaagatggtttctgtagttcagattgaatcccctgttccggtagttgccctgaccgttgatgtagttcaattcagcctgattatcttccgaaccattcccattaaactcctggtacacctgagcttccccagtgtcatcacagaaattaacaaccctctgatctctcctgagtagttgctcaaccttagctgacaatttagcaagctgttttgattctcctcctccacctctattggacctgtcatagtcaacattgtggttgctgttgctagctgcaaggttctcaattagctatgtagcctcaatctcagtcttggtcatgaagtccccattgctagcagtgtctaatgccatcttgtaggccttgtcaactccccgatagaaagtgttgatcaatgtagcccgtggaaaaccatgatgaggacactccctgtagtagtccttaaacctctcccaagcttcatggaatgactttgtgcttccctattggaagctactgatcttattcctcagtagagcggtcctggactgcgtgaaatactgtcccaaaaacgcagctttgtagtcttcccatcttctcagatttacatgatccagtgacttcaaccagcggtgggctttgtctgccaaagagaatataaacagtctgcatttgataatgtcatctggcactccattcattctcgttgtcccacaaatatcttcaaaattatccaagtgatagacaggattctcagaggaatgaccgtgaaactgattctgcttcacaagagccaacaacccggtcttgatctcaaagtcattcctgttgatagggagttgttggttcctgtctctgaaaaaatcaaaattgggagcatcgtgatctctaagagtttgtcgagcaggcacaagcctagcattcaacgcagctgcacgggcagcgttggcaacaactacacgggcagcgttggcaacaacgacacgtgcagcgttggcagcagcagcattggtagcgtttccaccatcagcatgaagatttccatcaggaggtggtggatattgaaacactccatgatgctctccttcaaattggagtccatcatcatcaataacattagccatttcagcttctctctgaaccgctaactgcttctttttcttgttctttctttcaaaccttccaatatcttcgtggtagtgtactagatctgatgagcctttgctacgggtcatacacctgaaaacaccaaagaaaacacggaaatgaatatcagtaacagtaaataaaaatgctttagactagaaactaatcctaaatccttacgtaacgcaattggtccctggcaacggcgccaacttgattgctcgagtaattacccgaaatatctaaccgttaagtataatattcgaggtcgatccacaaggaccaaagatactctaaagatttccgagactcgttcttagctaaagcgaagaggttatttgtttggttttcagattgtaaattaaaatgcaagaaagtaaacgattagatttatatgataaaaagcattaggcaatagggtatttcagagatcaatgattattggaaataataaacaaggaattcagcataaagaaccgttctcgaacatgaacacaagtttagactaattctctctcaagacattaatcactaaatttgactacttaactactaaactttcatttgtaatttcctagtgaaatccgcattagaattaggttcattaggctaacatgtgaattaaagaacttagagatcaagaactccaaacaacaatcaaaccatcaattcattgaatcccctacttagaaccctaaaacccaattaagaaactactcactcatagcaaaatgaacaacacaaagggatatgaacgaaaacataattcaaattgagtaaatgagataaaggttcagaaatcttctccaaagtgtcaaagtggatgaatctctaatcccaaaggtgtttacaaagaaaagctctcaaagagttgtagaaaaagaagcataaaagaaaatgtagaaataaaattaggtctctggggtttttatacccaaatacagaaaagacggataaatccggttaaggaaaaccggttttctcgtcgagaaggttggatcgatcgatcccccttcggatcgatcgatctcgagctagcagggcagattcttgtttggcagatgatacccaggcggggatcaatcgatctggagctggcggatggttttcgacgatgaacactggatcgatcgttcttatgatgggaccgatcgatccaatgttgctgactctggtttctccattcccaccgttgttttttgtccaaatgagcctgataagtcccgaaagcatctgcgtcccgcttaaacacctaaaacctgcaaatgactcaagacacaaccgaaaagacgcaaaagacggactatgacacgacaaacgacccaaaactaaaggacctaagataccaaaaacgcaacatatcaacttcccccgacttggatctttgcttgtcctcaaggaaaaacaaaaatatttatcaagagaagaggtttgaaaacacgagaattcacattttcttcgaggtcatgctcttatcaattgcctgcaaaccaccatcacaaaactcatcaacccgtactagactgtacttcgccataaccgtagcgacaaaattaaatcccaagatctaaaagaactttcagagtcatagaacttcatcttttaacattcattagcagaggcgtatactctcaccaagggggtatcgaacacgttatgggcttggtcacaaaggctaatatatggtggttcaaagtgtttcggattctcaaacaatataaaaaaatgcatgtcattagcgaaatcacagtgagacacagaccaattaggtggtgcatagcttcccctaagttcggttcaatcccacccacacatactatcccaatcgaatcaatgagttcctatgatgcttaacaatataaccaatgataactcatcatatctggttccttgatctcctttcccgctctttctcttttgttcgtttttcttttttttcctgattctcgtgttttttttagagcggaggagtggagccggtgtctctc

SEQ ID NO: 1256 - DNA, 1235 bp, Arabidopsis thaliana landsberg
  unsure (1)..(1235): unsure at all n locations
atgcatctgaatctcacgaggtcatctcggtntctgcattggcaaggagagcttgatcgcgtttatttcttgctccctagcgtattcctcggcccatcgaacgttttgttttaatcctcaccgtcagagacttcgatctggtcggcctcggtagcttcagctcggggaataggaaaatgcgggtcggtttcctccacttggtttgtcgcgttctggtctcccaaaactaccggttttgctcagattcctccgattgctggcgcggcccggcggaaatgcctcgttgtgttaccaggcgtgttgaacacaagcctcgttggattgaggtctgccgctgctcgtcgatcatgaaaatgacgtgcgtcaaagcgggaagtccttacctgcccttgggaggtagccgcctcgagctgctgggccaaagacttgttcgcctgttcttgatcgtccacctttttttggagtgtgccatcatgtttctcagttctgctaggactgtgggagtggtggtctcaggagcgttcgtctggattggagggatcggttttcccttcgcgtcaacggtggtagcgggaatatggttgttggagtaagagaaatttctttcccctccttctagcaccaaattgtgagagtcaaaactcacataatcaaaattgtatttagggtttcttcaaagaaccggtctttgcgagactctcaaagataagtgttttagctttcaaagtcagagagttctgatagcctgaagttgagagccttcttttgtgtgtcctttgttagttccctgaagtgctttatataagacttagataaaccgcctctcgcgatattctcggaaaatttccatttatctcaaagtcggcgatagaggatggaagttttccttattcttcggaaaaactttcagatttgataatatcctcggagattcccggaaatgatatatcgaccatttacagaattcaccagtcttctcctcggaagaatatgtctttggctcgggccaaaggtttccccgagccgggttgaatcggtcctcggatcgtggtcagacgactcaagtctcctgggataacacccgagccgggtgacgtttacccgaggtgtttcaaggaccagctcaagatggttttctggagtgatgccgagccatgtaaggatatgcatggcgttctcgcatcggggagacgacgaacttagctttcatctaacgggctcggttacctggatga

SEQ ID NO: 1257 - DNA, 4924 bp, Arabidopsis thaliana landsberg
  unsure (1)..(4924): unsure at all n locations
ccaaagaatgggggaagatttcctgaactatttgaggaagggtgaagcctccccaacagaattcaaaggtgggctccaacagggggtttcaacaatgacaaaccccctcatcctaatctctcctacagaagcaacaatgtggccaacccacaagatcaagtataccctcaacagaaccaacagactcaagctaagccctttgtaccgtacaatcaaggctacaaccaaaagcagaactttggacctccaggtttcacccagcaaccacaaactacttctgcacaagtctcagagatgaaaactctacttcaacaacttgtgcaaggacaagcctcatgctccatgaccatggataagaagctggttgagctcaccactaggattgattcctcttataatgacttgaacatcaagatcgatgcacttaacactagagtcaagagcatggagggacacattgcttctacttcagctcctaagcaccccggagtatgcccatgctatctccacagttcatacttctgacactgaggactgtgagattcaagagggggaggttttgagatcaagatcaagacaggaaattgaactcgacttctttgctcggcttgttgaacgagcacatgacccgagtaacccaatccctattccaccttcctatttgcctgaactgccatttccaggaagaattgcacagattaaagaagggatcttcaagaaacacaagatgatgttcatcaagtgcatcaaagagttagaaaagaagatacccttggttgatactcccaaggaagtgattatagaaagactctaagaagttcaggaaatagttgaattgagctttgagtgtagtgctatcatacaaaggaaggtgataccaaagaagctaggtgatccaggttcctttactctaccttgttcactaggacccttagtgttcaacaatagtctttgtgatttgggagcttcggttagtttgatgcctttgtctgttgcaaagagattaggatttgataagttcaagcctagcagcattcatcttattctagctgatagatcagtgagagtgcctcatgggatgctagaagacttaccggtaaagattggatcggttgagattccaaccgactttgtggttctagagatggatgaggaaccgaaagaccctctcattcttgggagaccattttagcaactgcgggcgctcttatcgatgtgcaaatgggtaagatcgacttgaaccttggtaagaatctccatatgagctttgatattgctaagaagatgaagaagctcactatagaagggcaacttttctttattgaagaaggaaatttagatgctgagttgttgagtgggttggaaaatcctattccgtactccattccgactcgccacctaggagagcccgaagagcttcttatgatagaaggaggacctagcttagaggttgagactaaggggaaccatttggatgttggtcctattgctagagagcttatggagctcaggaaacagtatggagctcaaggagagaccatgaaaaagttggatctcaagatggaggagctgaactacgctatcctagagcttaaggagatgattaagggttacccaggtcctgagattgatgaatactttgaggaacccgatcttggagaagaggattatagtactgatgagaaagaggcttacttcgaggaaagatcaaatgagtattccacactccagctatcaagagaaaatgcggagtatgattcagactttgaggattcaacaagtgaggatgaggacttctcagttcctctcctcaatctcttctctacctaaacattgtgagagtcaagcttagtgactttaaacaagctcacttgggaggaagtcccatgtctatccttgtatatattgctttcttgttatttttgatgtttttgtttaagtgtttcagggaaaaagacttctagagaatttcaggccacactcgaccgtactactcggctacaggccgagtgtgggcttcaattgaccaaaggcccaagattgaatagtactcggcccacaccactcggcccaaggtcgagtatggacctcactgttcaaaggcccaacaagatgcagcactcggcccgaagccgagtcagaaaaagaagcccatcaggcccaacactgtactcgacacgcgcgtcgagtatgtcggccgagttcacacgtgcgaggtcaacacaattcaaattcgaatttgaattcgaatttgctgggccccaccaatcaaatcctgctccccaaagcccttcaaagattctgctgcaaatagtgagacatgtccccttgaccaaatgaagggtgaggatctaaggtgtttggagggctaggatcaaatcttcttgtctataaaaccacactcaacaagctaagtcactcacactctctttttgctcaaaaatttcgaattttactccttctctccaaacattttaagttcttactctcacttctctagatttctcagaaactttgccaaaatctcttgttacaaaccttttcaaagcctctcttacactctttgttcatttttaaacatcaatttctcttctactttgacctacctttggttattttgtggtgactatctgcagtaaatcacctcaagatcatgaatcccgaagaatcaagaaggagagcctctgctcgagcagtggcaagagggtttgagatgattaatgagaagaatcagtcaaggaatcagaaagctgcgagtcctggttttactcggatgacaggccgagtacaatggccgagtatggccccggagtcctctgagggtcgttctgcggctgctcaagaggaaatagcaagaggcaagagggtctgggagtccgagctagttgcagaagaagaagtgcctgagatagagaaggaagcatctgaggaagatgtgcaagttgatgaagaggtcccgatagttcctacaagtagaagaaggaacaccatgaggagaaagaaagaacctaccatagaagagcactaccaatatctcatggagctgagttttgaggggacaagatatccccatagacctaccatgcaagctttggggatatgtagagatgttgactacctcatggagatggccaagctggagaccttcttctcctacaagtatgaaggatacaaaactgagagctgccaattcctagccactttgaagctccatttctatgctgaagaaagggagagagagctgnnnnnnnnnnnnnnnnnnnnnnnnnncatggtgtttggaattcaatactcggttcccattaggcagttggatgctattttcaagttccccaccaagtatggaatccgccaaaacttcagcaaggacgagctccttgatctatggttgacaatcgccggtccactcccctacaagtcatctagggccaagagtttgttgatacggagcccggtgcttaggtatctccacctttgcattgcaagtgccttcttcccgaagaagacaaccggccatgttaatgagggagagctgaagttgcttgatctcaccttatgcttcattttggggcacacgagaaatgggatagagatggaaggggatagggctgatacatccctttcggtggtgttgattgatcacttgattggttttagggagtatgcagccggaatccaccaatccggctatggaggaagcttatgtgctggaggagtgatcacgcccatcctaatagccgctggagttcctcttcatacccccactcacacagcaacctacatcgatatggagtacttgaagaggaagtgctacttggataggtctgttccagcggaccaactctacttcaagttcaagcactccacgctaggtctctctaggctagcactaccttgcaagaagttcaccaccattaggattgggaacaacattgactttgatcctcctcaatcgatcttagtcaatgtccttgcgcctctacaagtagagccgagcataggaagtgagtctcaagaagaaggagcagagtggaatgaagaagaagccgagcaggaagcttatactcggccgagtaactttcagcaggccgagtatggccatnnnnnnnnnnnnnnnnnnnnnnnnnnnnnnnnnnnnnnnnnngatgaacaagaagattcgtgcgaagctgcagcggagcagtttttctttgaggattatgctgagtccgatccagagagagatcccggtcaagttcacaagaagttgggaatgctcaaaggtctgggcaagtttcagaggaagttgttcagtgggttgaagaagaaggtgaggaagatgaagagagcaatggatggcatggcggtnnnnnnnnnnnnnnnnnnnnnnnnnnnnnnntcaccaccacctcgacccgagttcaggagaagtaactcaacaagtgtggcgccgcgaagggacgctcgtttcgaccagccaagagcctcaaactacgagctcgggaggagctccaccttttcagatcgccgtttcaacagccgcccacccggtccagtgaaccagttggttctgaacgctgacccaagccgagaggagtactactcgggatacatgctcgaccggtcaaccgagtacaacgccaataaccccaacacctccacacgagatcctaagtacacacaacaccgcctggacgagtttgtccagaacctcttcgtctaaatgttgaggtatcactccatttcactgtacatatcattgcatttcttttatttcttgctttgtgtggttatttctcttgaattcttctttgaatttttattacacaagggactgtgtaatttaagtttgggggagggttcaagatgtatctaacattgtttcatgttcaaatttttgcatcatctacggcatagacaacccataaaaatttgaaaattttag

SEQ ID NO: 1258 - DNA, 2061 bp, Arabidopsis thaliana landsberg
  unsure (1)..(2061): unsure at all n locations
aatactaatatttagctaacgagataatatagacgagtttatatgggatgacgggttttaatcgatatcaataaagaacggtatatcacggatgaattcttaaaatttacaattaaaatacaattatacaaccgtaaacacaaaaaaccatataatattaacaaaacgaatataacttgaaacttaaaaaatttagctataaaaaatcgacccacggtatactgcagataaaatattcaaaattttaaaatccgccatacatcattacttaaaaaaatatgtgttttcatatcaatacttcaaaaattgaaacctaaacaatagtaatcataaactaaataatacagagattgatatctatattgaaaaatacaaattaatatgatatattttcagttaatctttaaaaaaataacattatatttttgtaaacaatatagcctcgcggtgtaccgcgggttaaactctaataaagttgatttttcaaaattgttaactcacatgatcatgagacgtgccaaatttatgattgttacacatatcaaatcaaattttgttataaaaccctctaacttatctatttttgcatctttattatcgacctccaacaaatgcataataatccaatgaattctaaaataatactcactgtaaccctttttgttcattttttgctaccaaaacattttgtaaatgcattacattatgcgtcgagaatatatcatatatattgggaatgcattacattatgcgtcatgattatgattttgagaacgagagtaggaaaaaatgggacatggaacgggaactacgccgactcctaaatatttttatttcactcaagcgggtttaatgatttttcgactgttttaatccaatttgatagctcacaagtttaatagaaatttaacgaggaccaatccggttgagttggaacacggtccgaccgctggatcattcctaattttaataaaaatgaaccattattatttgaactagattttaacccgcgatacaccgggaacaatttgttttttaaagttattatatataaaaatttacaaattgtatttatctataaaatattttattttatagtttacaaatgttattaagtaacgtcctgccaaacccgtcccgtaaaaaaaacatttattttattaacgttgatcttatttatgatatgtttataaatcattgtctatagatttttgtcgatgcgggacgttgaacccacacattntttgccaattggttaatatatgttcatttttaaaattttgaacataaaatatgacggaaaaagtaagatttttttaaactctatatattatataatgatgttaaaaattgtgatagatcaaattttttataagtttaaatattaataatgttttataaattttaaatatataaataataatatttaaaaaattaatatgtttgttcataaggtaatgacataataactctaaaagaaaagatttagaagatttaaatctttaattaaatattttcattaataaatcattaatgtcagtgacatgacattgtaaataagttcaaatacaaaatttatttatttaaacaaaaacgtttagtaagaataatatttatttaacaaaaaactttgttttaaaatattgttaacaaatatgtttatgccaattttaagggattgatttgaagtttgttgggattaaatttgattgataatgtgattgacaatttaaataaaaaatttaaagtaccaattaattattttggaaaaaagatttaatgctaatggcattacactgtcaataagtccaaatccaggatttatttgctaaaatggctgcaaaaatgtatatgtagataacagaaaccgaatggatacaaacctaaatattttaggtaaccaaaaatatccaaaatataattatattttcaaaaatattagttaattctagactaaataattcaaaatagatatataatagtaaaaatactcgaaagtaaccaaaaaatatatgataatacaaaaacaaatcaaaatattcaaattaaaataatcaaatg

SEQ ID NO: 1259 - DNA, 3784 bp, Arabidopsis thaliana landsberg
tgtcacagaggcggggcatggtctcccgctgtgggcacggtgggccggtgggggagacattcgggggcagtaaacgatggaatggcgtggagccgatgatgttggcgaggaatgcacggcggagatcatggaaggggagaggaggaatgaaaacgagtggcgcatggttgtgacgcctacatgtgagacatttggaattttttgtcattattaaaactaggttttgctactttgccattattttgagtgtattcaccatactgccattacgaaacatgccacacctgctggaatgtcatctaggtgtttaataaaacaatatatatagatacacttagaggacaattgtctcatccatgtcacactcggattcaggggtccaaacccggatgctaaatcatcaaatgtgtgctaggatcgagtctcacacatacgatgacccatggcacaaaatcaaatgtcacatctttaatatataacaaagttctgtacaaaatagataaataattacatcatatgaagacaacaatctagcaacccaaagttgactgggagacgacgacctagaccactcacgaactcatcacagcatcctccatgcgcctcatcctgtggtacctgttcttgaccagtgggggggtgtgagacagcaagagtgagctcacatacgttcatcgctcaacaagttgtggggaataatgtgtatgaactcgccaaaggtgggagctcatgtgaagtgtaaggcttaccaaagaggatggctgcagctgagcattgcttttaaagttggtcaaaattttattagccattactaagtataagtaaataccatcccaattaaatagtagaccaaaagtaacaacatcacctgcgatgcaatgcatatgacaaattgaatttaagttccatagattaatcatgtgagtgtccgagccgctcatgaccgtgagctcggctagtataccagttttacactctgcagaggttgcgcatctttacccacaagtcatgttacccatctgccaagggatcgcgacttcccatacacctctaccgaggaggcgaggcagggtaacactacgaggcctttacaaagttccactagcttcagaaaacccgctacagtttataggaagctccaatgcaggaattcccttgcaggaccgccatcgcagcaaaatcaaccaaggacctccctacactgaccactcccctactgcccttgcccctttcgggtaaggtagtcctccactagctttcctaattaatcagctaagggcgtcccattccaccctcatggttgtactgttatcccgggtggtcactccatgttccaattaacataatgatcttatcatgaacgataaataacaacggataacaaaagtataatcatgagtaatgtatcttcatacccaaaaccacataaagcactagcaagtactacccaaaaagttcagtggtaacaaggtataaagataatcaaactgagggtaacctattggggtcccatcaaaattaacctatgcagatcattatgattaatcagaacatgagtaggtaaaaagaagtgatcaagggcacaacttgcctgggacttgagattccaggtaccaggatgatcttcaggtgacacgtgttctcactgctaaacgtagcaatacagcaacatgtataggcaaaattaacatcacaccaaacataagatcaaactgaataataatgatctatgcgacgtacgagaccgtgggttcgagaatcgctaaattcagagttatggttaaggagttatggttttccgaagatccacgtggttaaatatagaatagactaagtgcaacttttaacctatatctcatgacaaaataaggttaccaaatgataataaatattattgtgagactaatgcaactagaacggatcaaaacggagtttatgaatttctgaaattatttagcacctagaatagatttgtcggcgtttcgagacaggggggtccccaagccgacgagtgagtgtgctgcgtgccccagcccagatgggtcgagcgcgtgggcgagcgcgaaggggggagaggcgaggtggccggagtcgagcgtgagagaggtggaagtcccgcggccttcgtgttcgtcccgcgcccaggtcgggtgcgcttgcagtaggggggttacaagcgtccacgcgggtgagggaagcgagcggccccaagagagcgcctgtcccgtcctcggtcccgcgcggccaaccttctctaagaaggccctggtcctcccttttatagtcgtaaggagaggatccagatgtacaatggggggtgtagcagagtgctacgtgtctagcggagagagagctagcgccctaggtacatgccaatgtggcagccggagagatcttggcaccctgctggcgtgatgtcgtggctgtcggaggagcaacggagcctggcggagggacagctgtcggagcggtcgagtccttgctgacgtcaccctgcttccgtaagagagctgagagccgccgtcgtcacagagcttgtggggcgccatcattgcccatctggcggactagccagatgggacaccggtcttgttctccgtgacccgagtcggcttggggtaggatgatgatggcgcttcccgttgacgtggcgggcctgcgccctaggtcgggcgatgtgggggctcctctgaagccgaggtcgagtctgtcttccgtggccgaggcgagcccgagcccccgggtcgagcgaggcggagatcgttcggcagaggccagggcggagttcgagccctggggtcgggcgaggcggagtttcgtcgtcttctagggctgagcccgagtccgagccctggggtcgggcgaggcgggagttcgccgtcttccgggtcttagcccgagtccgagccctggggtcgggcggagcggagttcgccgtcttccgggtcttagcccgagtccgagccctggggtcgggcggagcggagttcgccgtcttccgggtcttagcccgagtccgagccctggggtcgggcggagcggagttcgtcgtcttccgggtcttagcccaagttcgagccctgggtcgggcggagcggagttcgccgtcttccgggcttagcccaagttcgagccctgggtcgggcggagcggagttcgccgtcttccggggcttagcccgagtccgagccctgggtcgggcggagcggagcttcctatggtgcctgaggtcgggcctgactgcctgtcagcctcactctgtcaagtggcactgcagtcggagtggcgcaggcagcgctgtccttctgtcaggccagtcagtggagcggcgaagtgacggcggtcacttcggctctgtcggagggcgcgcgttaggataaaggtgtcaggctacctttgcattaaatgcccctgcgatttggtcggttggtgcggcgatttagtcagggttgcttcttagcgaaggcagggcctcgggcgagccggagatgtgtccgccgtcggaggggggcctcgggcgagacggaaaacctccggggtcggctgcccttgtccgaggctaggctcgggcgaggcgcgatcaagtcccttgaatggactgatccctaacttaatcgcacccatcaggcctttgcagctttatgttgatgggggttaacagctgagaattaggagtcttgagggtacccctaattatggtccccgacaagtttggtcaaaactcagaagcacaacagtaaagatgatagtcaactgtgctagagaggacatctcggagacccac

SEQ ID NO: 1260 - DNA, 607 bp, Arabidopsis thaliana landsberg
  unsure (1)..(607): unsure at all n locations
accgcccgtatgcgcgggtcagaatctagtttgtttttgctttttcagtcatttataatattgttgtattttgttttattctatagatagttttgtaaaatctggattgttggaaaattaacaaattggtttgatttgtatgatcttatgtttatttaatagaagattgataaaaaaaatatttcgtattgactatttattttatttatatgtataatactttaatcatggtttagaatggagtatttaattttaggaaagtaatttttgtagtttaaatgcattaaattttagtttatagattaagacaattgttcacagttatttgcaagaattaacattagaattttgaaattattatttttggcaaaattaggattcttcagattgtttagaaactgctgttagtataatcaaaatattattgtataaaataaatctattgtcaataagatatagtagaattaaattaaacaaagtaagaaatttgttgatttcacacgtagcacaagtgtttctcctctaatatggtcaataatttgttttgttaggaacaccatacacttgtgacttgtcaaataatataantatttacaatttatttcgt

SEQ ID NO: 1261 - DNA, 599 bp, Arabidopsis thaliana landsberg
aaagcaattacgaaatacatctggaaaattcattttaataagcctggcccatattataatttataaaccatgcgcgtattgtgtgttaatcatgtccagtatctcctagtgcatcatattagttggaaacttaattctagccatccaccatatctaaagcctaaatgaataggtaattccaagattcatcaatcgaaactgttaagtcgatgaatgcttctaatcatgcatctttattaggggaaaaacaatgtacctgtaaaaatggactaaacacctgttaccagcagctgatcaagctcggtttctagctccgttaactcaacctgattttcatttctgcattgtagcaactgcctccttagatctcggaccagctcgttaagcttctgaattttcttttcttgaaatagaattttctgccacaaatagacattcatatcatcattagatcatacaatgaagagtatccttaggcaatcaaattgcttagtaaagttaactaatagggcaggatttcagattaggtatgctttttgtttctgcgaatgcatcacttggaagaatcaaagtgatgggatgaaataagaactagcttc

SEQ ID NO: 1262 - DNA, 2775 bp, Arabidopsis thaliana landsberg
  unsure (1)..(2775): unsure at all n locations
aatattccatgtgacattcctttccagctttcactatccctaaacaacaatcccttgaagcacttttgttctgaataatttcagccaacacttcttctatacatctgtctgggacgtccatctttttactgcagtttagaagatattttttttgtttctttgaatatgtacgaccaacattatcgttataatcgtccgctgtcggtgaccttgcaatcatcgcattaaactcatcgtctgaaatgaggagtgacttgtcattatcgccttctttggccaaagttagatgagaaaacgatagcaaaaccatgatcgaagaaaataggatgaacatggttttattctccattttaaactattttgatcttttattcttaattgggttctttgtttatgttttaccaatgaggatttctgtgtgtatttatagtgtcgaatgttcattaacgttattatttagtaactctgtaatagtgaaaataacatttttctttagttatctctcaccaacaatattttattagttatcacataatttacatcttttgacgttttacaccgttaataaatattattcgtttaatacatttcaatttatgactatgaaataagttgaataaaaaatcttgagcatatcatagatagaaaaattaggatttaagtccctctatatgttcatttcaagcttcattgtagtacatttactgtttgtattcaaatgaatttgcaaagaaaataaagaaaacaaaatacaaaagtaatgaagtaagttattcaaataactaccaaacttattttatgaaacccattgctaacagtaaacactaaatatgcaccgaaggtccatacttaactatttatgaacaagtcatgatcttccaaaaatagggtaaaaaagcttcgactttctctcccaggcccggttcccgaggtaatatgaagccagctattaaccagatctcactagtgcaatcaccttaatatccactggtctctacaagccccatgggtttatctaaaggtaacttgctttatccagcccattgttcatcaatgttcttcaccggaatcctgtttcttcttgctcaatctgcattaaaggcttagaaacttcttcaccaaggctgaattcgagtttccctgtgcatttattggtggtgtatgcatatttaaaccctatcaacctttttaaacctttcaaacctttgaaatctgtctcgacactgctctccccactgtcctgctacttgtaaccctgaaagttcatctgacttaaccatgtcaaaccgcatcccttactatcaaanaggcaaaggcatcgagagagggtattcgcccccaccccgtaagcgaatccgagctccagacatagatttctcagatctcattgaagagaatgctctaacccttattggccgtcttaccaatccttctgggcaaatactctgggccctcttcttattccggtccaacagatggactcttaggggaaaagctactggttcagatctagggcagggagtctttcagctcaaatttgatttcatggaggatcttcaacaagtccttgacaatagaccctaccattttgaccaatggatggttatcctacaaaagtgggaaccagtcatctcaccttctttcccgtgcctgatccctttctggattgaactccaaggcctccccaaacacttctggaaacctgagatgctcaaaaccattggagaagagcttgggaaagtcttagaccaagaaatcacctcctcttctgtcaaggttaagattctgctggatggcttacaacctattataaaagaaacaattgttgagttcccagacggaagagaggcagttgtctatcttgattacaagaatcttaaaaaccattgcagtcactgccaccgtctcactcatgagaaaaagttctgccccggagtagcaaggaaacctgatgatcaacaccacatctctacctcaaaatctgcctctgctcatgcctctaagtcaaactcacgaaactactacaccccccatgacaacttcacaactcctaggagtaattctcatatctctgaaagaagtgtcatccctcaacagtttgtcaaccctgcaaaacgaaagttgaaccatgatggggccaagtccaggtccccacctgcccgtagaacctccccacagaggaagtcttatgctcgagaggactatcatcttcagggtgctgttcagtctccccgctatgaaagcaggcagggttatcattcttctcaacaattgcagtggcgagagaagtctaactcttcaacagggaatcatgtttcaccatcagaacaatctagagctcggagaccacctctcgagagaaatgttacaactcctgatcctcctacccctccacctctgcagactcttgaccccagatgctcggggatggaagtttcttctcctcctctacccccaccttctaaagaccaggtgatgagtgagctgagggatgtcactatccagtatatctcttgccctgacccaattgaaagtgctgctaggaaaatcagggtgttccaaggagaaaccaggaacctgatggagaacactgctatggtggtctagccctgttctggaaacaaaatattgaagttgaaattctcacctcctgtcaacactttatcgatacaaaaatcaaagctaagggtcggttcttttactcaactttcctttatggcgaacctgacagaactaagagagttgaagtctggaaccagttacatgagttatctg

SEQ ID NO: 1263 - DNA, 1222 bp, Arabidopsis thaliana landsberg
tagtcctataacaattatccatattaagtttgatttattctgatgtgataaaaatttatcatatttgtacagttttatataagctaaatttatagtttacattttatctatttcgaattattgtgtgtattaatctaatcaagtatttttttgttggataaaccatatatctctcccaaaaaacaatttcttgaaaattcacataaatttcttaattctctaaatccatattattccccaaaaaaaaccatatatctctctccccaaaaaaacaaattcttaaaaaaaaacataaatttttaattctctatattcatactattctcaacattccaaaacaaaccccccgtatatctctccccaaaataaataaaaatcttgaaaattcacataatttttgaattctctaaattaaatccttattattctcaacgttttattcccaaaaaaaaaaaaacactccacataaaagttattaaactggctcacaatacatgcatatatacaaattcttaaaaaaaaaacattaccattaacgtttatccgtaagaaaaatattttacccaatttaaacactctttcatagatacatatagctacaaatacatgtaaattaaatgattcacccacattatatattaagcttaatattaagttgttacgaaaatatatgtagagaggaatgctaatggatcatttccacttcctttgtccgaacatgcccttgcctcgttttcccccgaacatgtcatgcttgcctcttttgcctccgaacatgccgtgcttgccacacttgtgattccctcctccgatactttgctttcctcgcttgtactttcctcctccaaataatcctcttatgtattttccatggttgtggtgctcgtagcctgcgcgatgacccacatggtgaccacccattacagccactaccgctgttgccgctcctgctatcaatcccccaactcctcctccaagccctattatattcacatgatgacagtattcaatcaacggttaattggcatgtgaacccatcaaaccaaattgagcttataaacctagaccaacattatttataatcgatatgtctctaaactgaaccaaaaccatgttgacaaaaaaaaacactgaacaaaagccacattcttttatgtttctgaattgaacccaaaaaaaaaaaaaaatctaactgaacaaaagccacatccattatatcata

SEQ ID NO: 1264 - DNA, 1640 bp, Arabidopsis thaliana landsberg
caaaaataaacatatctatactatattataccaatcgatatatattattatgaacagagagttggccaatgttttattaattgttaaaacttgaaataaaattggtatggtttgaatggcagatgtacgagaagcaaacgatgctagtgcatttttatcatatctcatctgtttgcattacaccaaattgtattgataacctaaattactacaacgatatgataatgctttaaaaattgatacctaaaaacctattatcatttgtgttgtcattttcgtaagaaaaccagctttttctatttctacaaggatgacaatgagagatgcaatgaaggcataatcaacgttcttatcaacagtgacggagaaatggtcctttccgaagaaaaagcctcgcatcgtttgctttccgcacatctgtcattcaaaccataccacttttatttttcaagttttaacaattaataacaccttggcaaactcccagttcataataatatatatcgatgggtataatatatacacatgtttattccagatgtatcaaaaaaattttatcttctttaatttttaaatatttaatatactgtaaaacttgtagtaaaataatgtatcactaaatgcattttaaaaaaaaactttattcgatatttagaaaatatatgatataaacatttacatgtaaaatactgtcttctaaaacaaaaataaggaaagagagtttgtttacgtgggcaataatggtgtcagaatcgccggcgtagacaacacaagagtcgtcgagccaggcccctttgactttgaaatcacatatcttctcctctacgttgttagccaaaaacacctcaagtttgggggctagctgaatcatcgacgatcttttcaccgtgtatagtagagcaccctcctccgtactccctcctctaaacacttgccacctgtcatgcatggtcatcatctgcaatcaccaaatcttaatattaacaaatctagctctattagtaattgtatatatcaagttatgtgctctgttgtgaataaatttgtaccttccctttcaaagtcaagaccttagttccaaaaccatccatcaagatcctcttctcgtgaagactaaaaaaaggatccttcaccttgaacaacaagtttccttccgcattcgttatcacgaagttaccgtccgttatcttcaacaccttccgtacgatcgccaaatctacagggtgcagagagcagtactttggatccactatcactccggcttttggaggcggcggaggagccgaagggccagtgccttgtgggtaacggtactcatagggctgctgcattcttttctttttcctccaaatatggatactctctctcagttttgttttgatatgctttttttttgggtctggttatgccgtgaagttaaagtgtaaggttcttagaatttataaagtaaacatctgcctcgaatatgttgacttttaaaagagaaaaatctacggggataaacttattatatacatttttcttttaaaaattctaatagtttttaaactaagatatttatatataaaaaggagaaaaaaaaaaacaatatgtatggaaataagagaaccctaatcacttgttcctctgttatgttcctt

SEQ ID NO: 1265 - DNA, 524 bp, Arabidopsis thaliana landsberg
ttttgaaagcgataacattaatcctaaaagtttttcttttggccattgacattttcatttcttacaaaacacgaatatgtttacacatggtgttacaatacgaaaaagccaatggtagcaagagatagaatgattttaggatacaaagagacataaaacacatgagatggatgatcatctcaatggaacttgaggctggtcaagacgttgttgttgacgggatccgccaaatggtcaagaaggttctggtaaggtcccacaccggtgactagtccctgtaacctccggtgctcagtgaatcccatcagagccatctcgagaacaaagagtgtgtaattgtctatccagtagctgtatgtccctgtaggtggaatcacaccagtttggaaccaaggaagagcagtctctgctggaataagaccggcctttcctagaatctctggagcaatagctccagctgcacccaacatggcgaaccgttcgttgatgatctcttcgtatgctagccatctcggctcaatgaa

SEQ ID NO: 1266 - DNA, 2549 bp, Arabidopsis thaliana landsberg
  unsure (1)..(2549): unsure at all n locations
tctctaccgaacgataattaattaacaaatgggagagcattgaaaaagtaataggtgaaagacacgttgctttcacgacgaacattttagaccatatatatataccaaatttgaagaaacaacaaaacaaaacaaatccgagccgcctctgaagaattatcctgttatgtaaaagaatcaaatctcaaaaaaaaaatcttacttgtatgtaacagtagtgaaaatccaaattactgtcccaaagcaaccaacaaagtctataaaaaacaaacaacttgagaacaacaacaaggagaagctaattgaagtcagaatgtttgtaaatataataactttaacaaaacttacgcggtatacattatttgcccccatgctccacgtgatcatctccataaaaataataaaaatccggtcctgcacagaggaaagaatgaataaagtaatacaaatcttgtaagcgttgacaatggcatcatcaagatggtatcttttcgacaaaagtcggctcctttaacaataataccacaaatatgtctcattggcatttcatcgaacactttgactacgcaactgatagagagtattatttcccaatcccctgagtgagccttgtcaactaataattttgcagatcgaatcatatctgcagtcagagagacgtgcatggacaaaacccacatgaatatcagaaaaatatttgattcatttgtcagaaattaatgagataaggtttataataaaaataaaccatggtggacgatattatgataatcaaatggcttcacaatgtggataaaagaagtaaacggttttaatgtgaagtcctcacaagcatggagcaactgaataagacagacaaagtaatcaatgaacaaaagaacaaatgggttgctttcggttagtatcattacgtcgaacacttggaccatagtaccatagttgtaaaaactagccacctctaaagaatttttcttgatatgtaaaagattcgactttggctgtttggaatcatcatttctgccaataacaaaggttcttgtatgcttcaataatatctgttgccccaactcagctttttccggttaaaccgaagtgtaggtgtaagattctcactatgggattatcaggaccattgcaatcggccaagatttgtgaccataagaattgtaaaatgtttctgataataacttaagatatggtgggagagaaaaaagcctaactgaagtaagtgtagtgaactactactattacaagcaagcaactatttcttttggaaactgagtttgctcatgaagaaggcaaaaagagttgccacgataatgggataagcgatgagaacaaacgccacaacagccaatgattcatgtttgtaaccaaagtaatcctccaagaaagctgaaactctcttcttctctccaaatactaatatctctttgtcgacatctccatattgcgaactcagtaatccttccaacacccatgatgtcgggctcaggtagtacatccatatccaccattttgggattttctacggaaaacgatacattttttgtgttcaggagcctttatatgaatgatatacaattaatattccacgcaacgcagcaacatttcgagttaaatagacctgacatagctctaagcctactggttattgatgcaataagtctacaagaccacaggtttaacatgcactaagtgacacatacgttggatcttggctatatgtcaaacggcgtgggggataaggggagccttacctgttttggaatgacaaagccagcaaacagatttaacatggagaaaaaagatgagcgtagagtcactgccatgtgaatgtttggcgtcaaagcaaccataagcatcccactgtagttgaagatgagtaacgagcagaagatgctgtacaagctccaaaacatcttgtaaacggacatatggtagccgatcgtaggatatacaattatcgtacatagtagggactggagtagtgagtatggaacctcaattaggacctgcaaaacattaaattcctggaatatgtagaaagatatttgctagtggatgctatatccaagaaaattataaacagcctaagcgatttgctataagatctatttcttaaaagttgacatannnnnnnnnnnnnnnnnnnnntgttaacctgagaaaatgaatacgcccatgaggagtacatccgtgcaaacctttcacggtagaaaacattgcgttcnnnnnnnnnnnnnnnnnnnnnnnnnnnnnngttgttcattcccgggaagactactagagtgtacatggatccaaatatgctgataagatcttgctgattatttctgcaaaggtaaactcaaattttacccaccataaacgaacagaatattctataaaaaaagacctgatacagaagaaaagagaaattatgtttactagtaagatcattttagttcgaactttacctctaagaaagaaaaactgtgattccactatctagtagcatacaatcatatttcgaaatggggagcagagacttacatgtcctcagcttt

SEQ ID NO: 1267 - DNA, 7277 bp, Arabidopsis thaliana landsberg
agtttgatattcaatcattttttttttcttcataaatttccattaataaaagcaaagaaaaatacaaggcccgaaaacccaaaatgcacacaggcccaacaaaaagggcctaaaccacaaaccagtctaggacccccaacaaaatgaaaagcccaggaagttgacctaaataaacaagcagctaaaaggcccaacaggcggctaaagaacaaggcctaggccaagacgacacccacctacgcccccaacggcgagagagagagacacaaaacagaggcactccggatcctatcaaaccagaaacaactcaaaccaagtgatcataatagaagcgcgagaagcatttgagtgactaacacgagagagagggtccagctttgcacgaagaaggacttgaatttccttgatgatctgaggaggattcctgaaaatgttagagggaatcctacaattgcgctctctccagattagataaagcgaggcttggaagatgagcttgataaggagtgagagattcttggaggtagaagccgtttttaaccaagtgaggatagcaccaaaattatttggaggagacattcctgccctctgagtgaagaacttccaaatgtctgagctgaacgggcattgaaagaacaggtgatcatgtgactcgtcgcaaccgttgcagagcacacaaaccgctggaatgatgagaccctagtttcgcagcttgtcacgagtgtggagcctattccacgcagccacccaacagataaacgcatgttttgcgatcctgtctttaaaccagacagagctatgccacgaagtagaagcagtgcttgggtgaagagcgtcccaagttttcttcgctgagaagatatttgaaggagcatgatggtccgacttccacttatagacatcatcatgcgtacaatcaatcatactctcaggcgaaggaagagctcactttaaaatgactatagtcgggtttcttctccgactagaagagagccaccagcggggaaaccgtcaggacccggagcttgagaaggtgccctgttttaaagaactccataaccgcagctatagtggcgtctttgaccacatgccaagtttcccagaagaactcagcggggaaaccgtcaggacccggagctttgttcttaggcatggaaaaaagagagtgagtaatttcgtcctctgtgggaattgcaaccagttgagttttcaatgtctcatcacaccggaacgggtgtaactgataataggtttttaagtcaattaaacctaaagcactatcatgtcgttgtagtactgaaggttgtcaatccaaatgggtgtgatgctaacaatcaagatgtgatcagaagtcactaagtcaagccaagcaataacaggttttggtgtgttctagcagttctaagtgaacatgcagaattacagtgagttttcaaggaataccatcgcatatctgatcaactcgattgaggtttgttttaaactgttattgtttattcagcataataagactataatataatatggtatctacttttatataggttggcaaagttagagttatgtgcacaatctatacaagtcatgtaatattacatcagctgtaagtcatgtaataagaaggtcaatcatatacatgctggtgttaattgtgttaacaacaagggaaagaagcctagattctggtgtgacacatgcaagtctgttgttacaaatgtggtctctaggtaaatatgcttttaacactagacttacagagtatttaatacattcatctctttcttgagaatgatattttcattagttaatggatctgttgatgaggtttggttttgttattagttagctactttatgtaaattaaactagatttggcataccataatactgtcttgcagattgaggatctagataacctttgataagtgtgtattttgcatgttttgagcatccatttgtcatcactttagcaccatatcatcactgttttataccatttttcatcatttgtcatcactttgcatgtttaggataggattgcatgcatgctgcatatttgtgttgatttcaggtgatttggagctgttgacgagctaactggaagaagcggacctgatcatgtcaaaccactcgaccatgaggtagagtagaagcttcaagacctcaagagaccactcaaccccctggtcgagtaggggacttctcgatttcatctcatcactcgaccccctagccgagtgtcttcatccccatcacttgaccatcactcgatcacatcactcgatcccgtggtcgagtgtcttcacctccattacctgatcatcactcgaccacatcactctaccaggaagtcgagtatcaccatcaccaccactcgactacatactcgatggcaagcttcagagtcttcttcattctgcactcaaccagacactcaagcacaaggaagaaaagaagactccagctattcactcgacctcccactcgactccatgggtccagtacagttcttaatccgtcccaatactgtgtcgttttaagtattaggattttggaatatttggctataagtagcatgtacttcacattttgaaaacaagtttttttctagttttattccgcagacattgtgttctagatctttttgtaatccggatttctctttatttattcagtatttagtatgcagtatttgttcttgattttcgtttattggttttcatcctgttatcattctgctattacactgttgttatcatgttttcatcatgttcaacgtttatgctttctgttatgatgtctgagtagtgaataggtttctgaggatgggttagagtagtgtagaattcttagtatgctaggtgattgagtattgattgatagatcccttctggattagttgttcttaatgcctattgctttctgatcaactagaatttgagcccagacatttccgcgtccaaaaggtgttcgatgaaatgtttgaaccactaattccagagattcgtgaccctgtaccaaggtattggttgcagggagcgttttggctttaacttgttgattcgtaatgcctattaggttagctctcgtcaatggtgattgagtctgggactaggttagcttgagagtctctgttgcggtggcacttagatttggttaacgaacttgttgtctagggttaatttgttgaacatgtcaatcacctgtaaactgaggaaacgaaactactcgcttaccccatccttaggaattctttgtctgattgattttattgtttactctactgctgtttactgcatcctgtcacctgttgcttagtttctgcaattctttactgttactcgacctgatactcgaccacccagttgtctggcagcagactgtgcagtcgagtatctttgtttcattttctgtctgttactcgacctgtcactcgacctcacccagggctctgcaaagagctgtattggtcgagtgttttactgtttctgttttattttctgtttcctgcttgttcacttaggattgctagaacacaccaaaacctgttattgcttggcttgacttagtgacttctgatcacatcttgattgttagcatcacacccatttggattgacaacctaaaatactacaacgacatgattggtgttttgggataattgactgaaaaacctattatcaatttggcgccgttgccaattgggtgtttgtttgttacatttgagatttcagacaagcttagatcaagttctttttcaattttcttttcagttacggactgtgtgtttttcttgttgtcttctcggttgaggtacacctttgctatattcaaactcgatcaacaggcaaccagaacctccttttcaatgataacatcagccgcctagctcgtgaactcagagaaaggagaaacacagtcaaccttatacctcaacaaccactcgaaatggctgacgaacaaaatcaacagaatggccctgcaaacattggtgctggagatgcaccacgggaccaccatcagaggaaaggaattgcacctcctgctatccagaacaacaacttcgagattaagagtggtctcatcttgatgattgaggggaataaattccatggtctgccaatggaggatccactcgaccacatggatgaatttgataggctctacaacctaacaaaaatcaatggtgtcagtgaagacggattcaagctctgtttgtttccattctccttgggcgacaaagcacacatctgggaaaagaatctgccccatgactcaatcaccacctgggatgattgcaagaaggctcatttctgagtggcttttcacagaagactggtgaaagcttctgtgaagcatgggagcgtttcaagggttacaccaacaaatgccctcatcatggcttcaagaaagcttctctgcttagcactttatgcagaggagttctaccacggatcagaatgcttctggataccgccagcaatgagaattttcagaacaaagatgttgaagaagggtgggaattggttgaaaaccttgctcaatcagatggtaattacaacgaggattgcgacagaactatcagaggcacaactgactctgatgacaaacacaggaaagagatcaaagcgctgaatgacaagctggacatgattcttcttagccagcataagcatgtgcacttccttgttgatgacgagcagtttcaagtccaagatggggagggtaaccagttggaagaagtcagctacatcaacaacaaccagggtggctgcaaaggatacaagaacttcaaaaccaacaaccccaacctctcctaccgcagcaccaactttgctaatcctcaggatcaggtgtatcctccacagcaacaacaacaaacccgatgttataagcctaagtagtgtttccttgttagaagacacaaagccaaagactcatatggaatttggctacaccatgaaagctttgagaagcaagaagaaggttggttagtattttggagtcgaatatgacttaatgtcaagtgtattattgagtataagaacataaaccacaaccggatcttaaatgcgtaagaattgtatccttgttagaagacacaaagccaaagactcatatggactttggctacaccatgaaagctttgtgaagcaagaagaaggttggttagtgttttaaagtcgaatatgacatgatgtcatgtgtatgattgagtataagaacttaaaccgcaaccagatcttaaaggcgtaagaattgtatccttgttagaagacacaaagccaaagactcatatggactttggctacaccatgaaagctttgagaagcaagaagaaggttggttagtgttttggagtcgaatatgacttgatgtcatgtgtatcatgatacaagtgttttcggtgtgtcaattccctaaatgcatcttatgtcattgcagcatttaaggtgtcaatccaaatgggtgtaattgctatcaatcaggatatgattagagaatactaagtcaagccaagtgtgaataggtttggtgtgtttctactaaacctaagcaacaggttaacatgtaaatcaaattcagaaattgaactatactaagcagaagataaagaacatgagtgataaaaccaagaagtaaatgcaagaaccagaaagtaaaccaagcacaaagagaagcactcagtcgagtaaactaccaacaggtcgagtacaatactaaaaacaccaattttgcacgagacgaacagagtactaaaaacacgagttttacacaataaaacgaaacatatctcttaagaatggggtaattggtcttagtggactcctcaatccattagctaactaacaaactcaatcaagctatccctagacaatagattcaaaaccaaatcaagccacttccgtgtgaatgattctcataactttagaacttcctaatctcaattttcattgatgaaacataataaagcaggctttaaacaccaatctattaaagtcaataagcagtctaaacatccaatgccttggggtagaatctacaaatctctgaaattagttggttcagacatttcatcaaacaccttttggatggagaaagtctgaaatcaattttcaattgatcagaaagaaaatagcattaagaactcctaaaacagaagggaatcatgcatataaacacttagctagctaaagaagagaggaatccacctaaacctaactcatcctcaagaactctgaagaacactactcaagaacactgaagaacatcatagaacaaaacccagaaaattcataaaactcagaaatcattataaacttagcaaaagatagatctcaatgagataaacaagtttgcagaagaaatcaaatccaaattctcaacagaacaaccagaaaatgcaaaagaaaatcaaagaaccctaaaaaccagcggacaaaaacgaagatctcttgggcaaaaacataagaggtctatttataggcaatcctagattgccctaattgggaataagacaaaaaagataagtcggcgcaggagcgctcggccctaggccgagtagaaaagccgagtggcttggtcttggtcacacagctcggccttaggccgagtggcttggtcgagtagcttctcttcatcctttagtgcacaactcggcctccagccgagtgccttggtcgagtaggctccttgttcttcacgtgtgctccactcggcctccagccgagtacataggccgagtatacttcaaatccttccttaggtcccccgaactcgagtctgtctatcccttgtgctagaaacctccaagttgagtccaaaagtacctgattcatctgcaaaacactccaaatgcaagtatgctatgcaatgcaatgcaaaatgtgcaaaagaaggaaaagagactaagaatgcataaaaagagacttgaaactaagctaaatgcatgaaaaacaagggcttaaaaaggttaaaatctagtgttatcaacacccccaaacttagctctttgcttgtcctcaagcaacaatagaactaggctaggagtgaggtttgaaggtggggattcagaaccaaaatatgcatgtaaaatagatagtctcaatgtccatgttgctagttctagagtgctaggttaaatgacctctacttaaaaactttagccatcttcttcacaacacaacctaatctttcacttagtctattcaagccttcaaatcagcaaattccctttaacatttattaagcaagagtcatggatcatactacgcaat

SEQ ID NO: 1268 - DNA, 587 bp, Arabidopsis thaliana landsberg
  unsure (1)..(587): unsure at all n locations
ctatttcattcctcacactatttgcaattatccaccgactatcgtgctcgcaattttaatcctcaacttgttgttgacttaacaaatttaacccaaaatttggtcaatgtttattagttaataagaaaaccctaaataactcgattaaaacctaataaacttaggaaatcctcaaaaaatgttctcaaactaagaactctatgtaaaaattaagtcgaattctcatattttgacgagagtatgatgaatagatgaagaagaagcttctaatttgaaagaataactaagaactatagggatctcagctttcaattttggagaaattttaagatttttttgagtttattaggtttaaatcgagtaaattaacgtttctctattgggccaaatatgttaagttaacgacaagttgaggattaaatttgtacacacgatagttgaagaataattgtgttaattgcaaatagttgagaaatgaaatgatcattttcccctaaactaactacatattttttgagggatttgttttataaaatatggaaaggtgttccacttacanatagatattcatgtgttttttagctatc

SEQ ID NO: 1269 - DNA, 528 bp, Arabidopsis thaliana landsberg
gcctgtatgttagctctcgtcaatggtgattgagtctgggactaggttaacttgagagtctctattgttgtggcacttagatttggttaaagaacttgttgtctagggttaatttattgagcatgtcaatcacctgtaaactgaggaatcgaaactactcaattaccccatcctcgggaattctttatctgattgaattctttgtttactctactgttgtttactgcatcttgtcatctgttgtttagtttctacatttctttactgttactcgacctgatactcgaccacccagttgtctggcaacagactatgcagtcgagtatccctgtttcactttctgtctgttactcgacctgtcactcgaccacacccagtgctctgcaaagagctgtgttggtcgagtgttttagtgtttctgtttgattttctacatcttcttgcgagtgttctacaacgatatgaatggtgttttaggataattaactaaaaaacctattatcagtgtagctaaagtccgtatgagtc

SEQ ID NO: 1270 - DNA, 2199 bp, Arabidopsis thaliana landsberg
  unsure (1)..(2199): unsure at all n locations
aacgtcgagcacctttcgccggaatgtcgccggggattcaataagcagagacgtcgagatgaagaataaaagaaagaagcttttagaaatttatttaatccgaacggcatcgttttaacgaaaggttaaccgacatcggtttttacagaccgatcatatacttttagtttaccctgaccggttcaaattaatggcaattgcaacattgaggagaatagaagaactgaatttacagtaactcactattttttcattaccataaaccaaaaacaataaacagatttcaacaaaatttcgacaatacaagaaaataagaaacatcattttgtacatcttctataaatccttgtgaagaacattccccagcttatcataagaatctctatccacaagctgtgtttcttgcaacatttccaacaatctcgtcgcttgatcatactttcctttcctacaactttcatcaactagtgttctatagctaataaaatcaaccacacgaccattctcaatcatctcccacaaacatttcactgcatcgtcaatctcaccgctaagcgcaaaagcattaacnnnnnnnnnnnnnnnnnnnnnnnnnnnnacaaagccttttcctttcatctcactaagcaattctctagcattaatggtcctaccttgagcacataatccatgtattagataatcataagtaaacgaattcggttcacaatcgtaaaccacactcatctgatgaaatatcctaagtgcatcattgacgtgaagcgagagcacgtaacctttaaccaaacagttcaaagcgaatacgtctggttcaataccgctatccaccatttgcctaaacaaagatcttactgtctccatatacacatggtttatgtaagagttgttacctctacccaacaaggctttgaaaagaatatgatacgttctaatcgttggtctacattccaagttcttactagtcaccatatgtctaaatatattcacagcgcgtatcaacttcccggctttcgtgaaatagaagatgatcgaattgtaaagattctcgttaccaatatgacgaaccgagagcacttggttcacaatatcatccatttcttgatacattttcgcagcaccgagcttccttatcgcgatatggtaagagcaattctcatgcgtaaacctcggctgttgcgatgcccagttaaagagatggaaacacagaaacgggtcttcttcaagagttatagcatcagctagttcttcaggggtgaatcttggtggaagctttgatatcgtttcatgaaactttgaaacattaaggattggttttgcactcgatttctttctattgctgattctccttctaagtgaacgtgttgggactgaagttgagtattgtatatacatggaaacagatgctaatcgacctacactttgattcaagagaaatgctctcaattagaagacgttaccaaagttgatgaaaccatttcgactaaattcttcggttaacaagcatcattgatacagagaaacataagtaccttgagaagaggttcgtcgagaactgaaccaagtggaagcactaacactatgaaatcgtacatggatgctcggaagaaaacttctggattcgaatcaaaatcgaaactttgcattagagtaagataaacccacaaataaaaacattcatttcaggaaaaaaacagaagaggattcaaacatcaaggacgtcatcacaaaccttggaatagaaccttcgattcgagactgacgaagagaagaagaagtgtggaagcgcgaggaagtgaaattagggcttgggagagagcgtctagcgatgggtgagatcaaaattcgtgctttagcggttctgaagatggagcctagaaatgtagacctagttgcagacatttttcttcgactgcttcgttctgcaaatcccaaaaccacaaactttgaagggactgaagaagacggttcaataaactgtagaaactaaaccggaattgctcggtttgattaaccggaatcatgaaggcgagcacattattataacttataagtatgttagcataagtgtttagatatgaatataatcaccacaattacatttagacatccacactcttcttggttttatttatctatcaaagttaaggtagaatgattgcttaaatcttaaaaatgagttaaattcttaaaaatttggta

SEQ ID NO: 1271 - DNA, 576 bp, Arabidopsis thaliana landsberg
tgttccaactcaaacaaatcatagaactctttttttttttatataccaaatttatatataaatttgtgggatcaatggtttcttaaaacccccttcacaagaaaagatgactgaaataaatgttgaaagcactcacaaaagttagttcactagtttaagaattttagaagactacattgataataaaacttggatacaatcttacacaacacacacacttacttgtactactttactttaactaaacttcaacctcaagctaattaaccagaaacactttctcttgcttgtccttaaccaaagctgcagcccatttacctaaaaacacaaagcccaacttttccttacaaaggctcaaactccaacaagaagatccaatagctagtgcctagtggcccacttgaaggttaaaattagcccagttttggagctaggtgtcgcattgctaggttttctctacgtcgtttgttcattggtttttctagggcttactactttttaacagaacttttcttctttgtgaattcatctgtcagaacaacttatctcattcaggaaataatgtttgagattatc

SEQ ID NO: 1272 - DNA, 1703 bp, Arabidopsis thaliana landsberg
taaaattctaacccgccctaacccgattttttggttcgagtattgggttggatatcgggtccgttttttcgtcagccctattaaagataatctaatataggccccaattatgtccacaaatataaccaaaatactatacaaaaactaattctaaattaggccaaaaattagatcttctaatacaaaggaaacatgtttcttaccaaaataacttctatacaaattgtacacatttacttaaaactacatatgttgtatttattataacaataacatttttaaacaaagtcaatctaatgcagcattatatgtaaatagtaaaacattgaaaaatattatggcatcacttttatactatactattttttatgtaattcaaacaaagtatacaatttaatttatacaaaatattaatgctcgtgctgtatagcacgggttatgatctagtaaatctattaaatgaataatcatatgagttaatcagatttatatacattgaaaacctcaaattaatatacttatttatctttcaattttgagcatagtttgtggggattttttttttttcgcaaacttatttagttccttcttatatcttttaatggcattattaatagaaacacagatgacaacaacaacaaaattcgataatgcacgatctacagagtaaaagtttctatcaagacattaggaagctcgtacaatataaaaattcactacgcaactcaagaccataaacattaaacaaaggttaggtagcaccatctatgttatttgagtgaaaaatccatagtaatatcttggtttgagctcagatcaagtcaatttggccagattcgattgctctttatacaatcttgtaacgtagagatcaccacgctccatctccacagtctcggggatctctccgatcctctgccaaaataagtaaaggcaaacccaaacttagtttacagaaaggttgtgtatatatgtgtatggagggaataagagaattctcactcttcgtatagattgagggagaaaaagtttaccattatagtcatcactaacaaaaacaactctagctactgtgaatggatttttcaactataataacaaacaagcttaaccaacttagatgatggttcaaagtgattaggttaagtgaaattttctgtctgtgttgtagaatggtatggttctctttagattcacaaaaactaaatcaagatatacagttagtgcttttttttgtctatttgtgttctgtttaatgcagatatttgtgttctgtttctatgttttgtatttgtagtttcaagtccaaactcatgtctttttataaatctaatcggatcattaatcaatttaatcttggtagctaaaccaaaaaggtaattatagaatcattgagcatttacaacagaagcatgaccaaaaaacattctgatggctcagatttatcaacttcgagccttatctagctggaacggaaaaatgttaatatctggagactactgcttattctggttgccggaagtttcacctatgtgtctttaccaacaaacaaatacacagaacagattacatttcaacaagcgatactattttatacaattaaaccatttcccccaaaatatacctctgctgcggatggtgattccagatactctcaggtagacaaccagtgattggtgtttgtgaaagatttctgtttaaca

SEQ ID NO: 1273 - DNA, 552 bp, Arabidopsis thaliana landsberg
cgaggtctctcacggtcaaatcgatagcagcctttgtgatcttttcgttcaaaaccaagttcgactccgcctgggccgcttgaccctccagcatcgtgtactcctttttggcgacccacttttccttgatcccagccagcaacttcgaatacgcagcggccagctcaacctaagcattgtgaaccaccttcttcgctccttgcgcagtcaaagtgaggtccatcacccttttggagagctcttccctcctctgcaatcccccgatctccatctccatgagcctaatcttctcagcataacctttctcgaggtctttcgaagtggacagctccatcttcaacctctcgatctccgcctgaaatcacaatcaggtcagaatcatcgtatcatcgataaattatatacaaacaagtcaaaaccgaggtatacctggaacgaaacctcgcgctcctgaccagccttcacactcgacgtcagctcctggatgagggtcttcccttcttcgagctcgctcaccgaggggacctgtctcagacgctgctcatagacaac

SEQ ID NO: 1274 - DNA, 980 bp, Arabidopsis thaliana landsberg
ttagtatttatttcataccgcactcaatccatagtttaaccacatctctaagcctatatttataggtgtattatatatactttttgtttggtattggtaagttgtaaatgattatagaagagcatcattttagcttactcgtgcatattttaataaatttaattttgtttttaacattcgttttgttctccttttttgttattttgtaaaattgtattttaaaataactattgtttttcaaatgtttgctacttaatttgttcgtattttgatttcttactacttgaatttatttattttgaagctttatgatagttcatcgcctgaaacattattggtggtatttttaaaaccggttccaactctctagatgatgtatttaagttataccataaagataaacttaaacatttatttgtagataaaacatgtttcacatgtgttgtttggatagcacacgcttgggggttttatgtcgcgatgtgatatgatgtagcaattctttctcgccactctaatcccatgtaatgatgttttgattttttttcaacatgcttcagccatggtggtgtctttagtccattgaagatggctcaaatacatgtagatagcttctttttggcctacatcagctgctttgccaatatggtggaaaccaacgtcagacacataaaggacaaagtagtgtattataccttttatgtagtgagcatttgggttgttgttgtcaagacatattttcatagtaagaaggtgtttgcgtgcccgataacggtttcttcaccaacagagcaagattaagagttttgaacacgtgtatgtcatttgctgatgcacctagttctttgcatacaagaatgcaattgtgaaaatcttcagctgttgttgctccaactttagcaactatttctccaagtagatcttgaggaagtgcctctaaacgactaatatcagctttcttgggatccattgattttgtt

SEQ ID NO: 1275 - DNA, 564 bp, Arabidopsis thaliana landsberg
tttcctttgaatacacagccgatttaaatagtggtccagctttcacaaagggtttcaaagcatccacgctttcttcagcaacgtagctaacaattttagcaagtactggtgccgatatgtgaatttcagggataatagcaacctgcgttaaaaaaatatgaaggtaagaaacaattggtttttggtttatgttggatgtcaaacgtataaaactatagcttatgacacgctgcactacctttttgacacctgaaacagatgagggttgttcactcatgtcgaccttcgttaacttgagcatggaagaaacttaaacgaatcgtggaagggtttttgtagctagagattattatggttagattaatctttatagttttcctggttattaaaagttgtagttgtgaaggtgagaatattttcatatagcgaagtttatcaatgttatggagggaagtaaatttagattggtcttccacgtaaaagagaataataatattctctgtataactaccacatgatctacatatccacttaaaaattttgattttttagttactaaaatag

SEQ ID NO: 1276 - DNA, 1759 bp, Arabidopsis thaliana landsberg
gggggtttggttgtaattgatggttttttggtagtatcatttttaggtggttaaaaattgtttcgtcaataataaaccgactaaagctgagatatgtggattctatgatttcagattatgattaggagataagttttgaaactttgttattgaaaaaatagaacgggaccattgcatgagatgcatctcgtgtaacagtgttatacgatacctctcataaaaaaggatagtcaaccctttaagtaacacgttattcaattaccataaataacaacttgccaagatacctctttttcctcctaaatttactagaggaaaccaggttacgcccataaatgtttatatattttttgtagaagcattgtaactttgtacgaaaaaattgtaaaacttgtttttcttaaacattgggagaatctgtatcacttagactaaataatttaattttttatatttttgttgaccgtatagtttatgaatccaaaatgacatgacaaaaaaaaactaatacgaaggagaaatattatttcaattgcttctttatattttaaccttctttcattaaattttgcattatttctcatatagtttttatataattcactgtctccggcgctggtgtagcagttgctcgccggcgtcgaacacagtcttctctttgttgttccgctcttctcccaaaaaatcaaaacaagtctagtcccaatcttttcaagcctctagtctgtcatctccgtctccttccatctttaatctcgctgtcgcgtcttgccaattgtagatctgttagaatcttttctttgaagatctttggctcagcgtaccgggccgacgtactttgcctcatttctgggagaaccaacaaatacttcgttaccggctcatttttttccgtttcttccctagccacgcgtttcatcttttctggttaaagccggtggttgttgtttcgccgaccttcctttttttgatctctgccatctattgatctcaatggttaatgatttgttcgcctctgtcacccgccgccgctgcatgttctcgacctcgtttgtattaggtcagatccctactatacaactttggaagaagactttagtttgggcatggcccatcttgggacctcttgggtggtgcagaggcccgttaagggttttgggctgctttcttttggcctgccctaatgttttgcaatgctcattatttgcacccatcactatcttgggaaaccttcgtctctccctttactacatgttatctgccgcctgtttctgcactcaacggttcatcggatacttctccgggttccatctgcttataccggatacttcttcggcaaacccattttgcttccgatcgagaaccacatatgttggtttggaacccgtcaatcttcggcgaagtttgctcaatatggaatgataaggtacactaagtgtatgtgttttttttatttgtgggatatgttattttttttggctaaaaaataataattgaaacttttaattaatgaaatctgaagatgacgtggcttatggagagagtgttttagaaacgctgatgtagacacgtggagaagcttcaatgagctttttttattagcagtagattatttattgtaaattatgaaaactgttatatatccaattttaccacggacaattccttccaaccattattagatccacgagagatgacaccttattcttcttcttcatgctctccgttattaaattcacgagagacgacacctctttct

SEQ ID NO: 1277 - DNA, 527 bp, Arabidopsis thaliana landsberg
  unsure (1)..(527): unsure at all n locations
gaggtcgagtagaggtctggcaatgggataaagtcactcgacctgggggtcgagtgatgttaatcgagtggtggtcggaagatggagatgaagtcactcgacctgggggtcgagtgatgtgatcgagtggttatcaagagatggagatgaagctccaaataacctgaaaacaacacaaatatgcaacatgcatgcaaaactatcctaaacatgcaaagtgatgacaaatgatgtgaaatggtataaaacagtgatgatatgatgctaaaatgatgacaaatggatgctcaaaacatgcaaaatgcacactaatcactaaaccctaacgctaaaccttaaaccctaaaccctaactctaaaccctaaactgtacaccctaaaccttaaaaccacaaccctaaacgcataacgttaaccttaaaccttaaaccctgaatcctactttaacttccaggttcttattgcgtttctagtttttatactgaatgataaacaaaacatcaagtcaattnggactacaaaaacac

SEQ ID NO: 1278 - DNA, 465 bp, Arabidopsis thaliana landsberg
tgtttttactatgaggatataatgctacgttaaattgactttttttaaaatgccatttttataataaatacaacatttgtagttataagtaaatgtgtaaaaatcgcacacaagttgtcttttgatttccgaggatctaatttttggcccaactaagaattagtcctttgtatagtattttggttatatttgtggacctaattgacgaaaaatccgggttagagcgggttaaaattttagaaaatttccttattgggtagagttttagtaaacttgtgggtatccgattggtccggagattacctgttacccaaaaaagaaatcaaaaacccaaacattaatttaatatccaaaatattaattataattaatcttaatataatctaggtatctaagattataatataaaattaaatatatcaaataaattgggccaaatatccaaaacaacaaaactattcaaaa

SEQ ID NO: 1279 - DNA, 929 bp, Arabidopsis thaliana landsberg
tgtactggagctcccagctgcttaacctcttcttcagcagatgaatacggacaactactgaaatggtcagatcttttaacattttcaacctcataatcagcactatcattttcctccgagctcggtgaattaaatcttgtatgcttgccacaataatccttatcttgccgttgtttctttgatgagaggatgcgatacttctgatgcagttcagtcaatacgatcttcaatatttcgccttcttgtctcttcgcatcttgaatgaaagatacatacatcctataaaatgcattaaacaaataaaatcagctaatgcgaacatatacaaccaactaatacaataatctagtgattccttaaaaaccagattcattcacttgtaaccaaacttcaattcaacatccaaaaaaatcaaaagatcttaacaacgcacagaaaaactatcaaactgatcataccgcaagttctgaatacggacaccaagcttttccttgcttgtaactgctttagcctcagcaacaaaatccaggaattcatcgagcttaacatcgtcaatatcgtaagtgtttagatagctatcaagtaatgatattatctcctcactagtgatcttaactggggcagtagaacaatagacggatggaaaatagagcaagacaagtggatgctgcagcaaaggtcccaatcccagatcatcaaaacaaccaacaaactcgttttggcatattgccacttccaaatcatgcaatgtcacgattcctctagcgccaatgaagcagtgaataaatgcaatgatctacaagattcaaaggttttaagtaaaaggaatcaactttgcaatagataggctctgaatacatttgcaatatagaaaattttaagctttaccttgccttcaaggagccatgagttgggtaagcgaaggatca

SEQ ID NO: 1280 - DNA, 528 bp, Arabidopsis thaliana landsberg
gagagttatcataacaacaggacttccaatggatgatgcatcaggaagcagtccaattgtgaagagaaagaagaaagaaaagtggtggataaaagataatcagactttgaagggaaagcagaaaaaaaatgtatggattgacaaggaaatgacttttttagatcttacatatggtttggaaatgcgttccaaaaaaatgcagccagaggagagactgagattggcgggtttgttactagtggagggcatattgctagctcgaaatccgactaccatgctgccaattgagaatctgaagagagctactgatttcgaaaagctctgtaagtatccatgggcgcagattgtgtactcatatttggtaactgaagtgaagagaatcggtatggattcacagaagaatcctgaagacaaggatctgttggatgtttttgatcttgtgatcaaaggatatagaatgagcaagaaggattggtgtcagggatggattcaagtgtgacaaggacatcaaggaagaattgatcatgt

SEQ ID NO: 1281 - DNA, 559 bp, Arabidopsis thaliana landsberg
  unsure (1)..(559): unsure at all n locations
gaaacaacaaccccctgtctttttatttggtcctagtttttttctcttctttaggatttatctgaactacttgtctccttgtggattcgatcctaaagtactactccgatatactgtgcacttgcagtagttgtgtggtcttttaggtaaaagcttgaggcgaaataaaatacgcatcagtaacttcagtggcaacatgtttacagggaaccagagttctacatgctacactccacaacctgcattccaaaagacctttcctcagaccaactttcagaagacttatggtaattcagcttgagcagattcttgaggaacagtcaaagcttgttgttgagtttaatggcaagtttgatgctatctacacagaccttaatgggaagatcgaaaatttgagctctcatatgaagaagctagatgtataggtggctcanactgcacaatctattaagaaaagaaggttttcttcctcgaactcctgatgctaaccctaagaagagctgtaatgccatcttggtcagagatggagacaatgtgtgggagggaatagacaactgag

SEQ ID NO: 1282 - DNA, 553 bp, Arabidopsis thaliana landsberg
tgtctagttcggctgcatattctggtattattataagtatatgataatacgtttattacgtgctctgtgatctctgatggatagagtttacctattaagttgattaaaccctagagatttatttgtgcatagattactcatgattctacttgtcttataggtaaccatagtgggataaccatagcgggaagacgaacactaggaaatgcctgaaataggatgttttacgttgcttctacaaaattatttgttattatgtaaattttaacaaggatccgatataaagatatatttttgggtaactctttgccaagtataagctatatactatgcataaagtgttttcttaaaggcagccgagtgtttaatgatataagacctagtccgggtcgctcaacactagaatatcacgagggttgacaagcctaagtggtgttcctagtgggaggagggtcgaatataatttggttaaggaaccggattcatctaaaacctctactaagttcgggtcgaacatcttcactggagcggaactgggtccgtcttggcttgt

SEQ ID NO: 1283 - DNA, 543 bp, Arabidopsis thaliana landsberg
  unsure (1)..(543): unsure at all n locations
aagaccggttagaactttgctggattctttnggcccttatgctgttcatttttgctaatgcggagattcgatcatagacgtctctcgttcaatagacggtcaaatggatgtctgatctacgaattcaagagatttgtacactcgaccaagacattggcttgtctgcttattggctttggtagattgttgttttaaccctgctctactatgtttcatcaatgaaagttgagattagaaagtggtagagttatgggggtctctgtcacgacagtggattgatcccgttttggaatctatcgtcaagggtatctaccttttacctgttacccacctgatgaaccctataattgcctttatcaatgaatccatctttagaacttctacatttattgcgccgttgccaattcattgttgcattgttacattcaagatatcaaaaaaagttaacatcaagttcttttacatttatcaagttactaactcatcttttcgtctgctcgtttttgtggtataggtactaatctttgtgcatgcaaactcgat

SEQ ID NO: 1284 - DNA, 2400 bp, Arabidopsis thaliana landsberg
ggctcggttcggtttaccctaagtcgcaggcctaatattttatatcaacaattgacatatattttgacccaaaaaaaaaaaatcaacaattgacatatatttgtttttattaaagtttaatttacatattatggaagtctcaaaatatttgttaaacaatggcaaatatttgttagacatatttcatctatttagcatgcacaacacgaatccatatctaatattagaaagaattatcctttgattctttttttctgaaggaaactttgattaatggtaagatttgtttataagcccaaaagcacaaatattctcctacttatagcatgatatattttgaagtgaatgtaaattaagaattattttcgtaacaacaaattttatatttatacaaaataaattaaattcagtttcttttctctcttctctttctcggtttcaccattttctatctagacaaagagtgttgtctgaattggctctgtctcaaaaaatgaaattctcaaattaaccacaacgatctttagagccttcttcgctcaccgatctctgaaaccctggtttgctctcgtcctcttcgtgtaacgattcttcttcttgataaatttttaatctttgtttcggcttttcgatgaaattgttttttttttggatctcgtctctatcagctcatgttcttctttgattatatgataattgttgcctcctttgctctgttttatgattattgctgatttttgagattgaaatgttcgagggtttctactgttcactgttctttacacgtatcaatgttttcttgatcatgttctcttatgatgttaatagagagactagtgttattgtgatgaatgatccttgttaacctaaatttgtcatttttgttttcacttgacattcatttctctaaccatttattataggtagtttctatgagtatgtcgcagtctcgagctgtccaaaaatcgtcttcacctaatgaggatagaggtgagaatcacctagtggatcatgacttgaaaggaaacgatgatactgaagaagaagttctaccggctcaatctcagcccttggcatccacaaacacactgttccttctatcggggcatttacggttcagtgtgcaagttgtttcaaatggagactcatgccttcaatgcagaagtatgaagagattagggaacagcttcttgaaaacccgtttttctgcgatacagcgcgtgagtggaagccggatatttcttgtgatgttcctgctgatatctatcaagagggaactcgtctttgggctattgataaaccgaatatctctcgcccacccgctggctggcaacgtttactgcggattagaggtgaaggaggtaccagatttgctgatgtgtatgtcgttcgttaactcttctctcatttatgttaatattagtctttcttctttataccattgtattggctttctttatcattcttttatcttggttgtttcagttattatgttgctccgtctggaaagaagcttcgatcaactgtggaggtccaaaagttagtttctctaccactccatttccacattttcgttttcacatttaacaaagtgttccttacttttatgtttgatgaggtctcactgtatcagtcttaccattttcgtcaaccaatatattgaatcagtaggaacctcaagtattgttctgtggtcataactagagttaggcactgatgcaaattacagaaatccttgcatgtgtattgtttactaacgaaaatgtactatgccaagaagttagttaaactattatccttatttccatgatacttacatgcagcatttgagagtgacaacaatggtaggagaaaaaagcttagtgacttaccaattcgtttagtgattaccaaattgttttcagtgacgtatagctagcttctttacacccttataaccactattactggtttgcaggtacttgaatgacaactccgaatacattggagaaggggtgaaactttcacagttctcgtttcaaatcccgaaaccgctgcaggatgactacgtgaggaagcgcccagctcgactactggattccatcgataatacaaacacccctgtagctaaagaaggtgtgttgcttatcaaggcacataaatataattgtggttatcttttgtatcaaggctttagattattgatgtcattttttcagtcaagagtgtatttgacgtatactcgaaccgaacattggtgtctttagggaactttattaacatgaaaacgtctatgcttttacaagtttctaacatttcgcttgtcttgttatttttcagctaatccactggcatggatatctccagatgatcatatatcgttgcagctaggtacgccaaccgagtgtggacttaaccatt

SEQ ID NO: 1285 - DNA, 1279 bp, Arabidopsis thaliana landsberg
cgaaagaaagttccatacctgcgttcatagcaaattatgagtataattacatatatggctaactaaattaattaaattatcacacatacctgcaattgcctcatgaacattttttggtaatagctctttgaagcaaatggtaataggcgttgcataaagacatggcagtcatggctttttcatacccgaaaactttttgccttgctcaacattctttgaaagttttgacacataatcatctaggaattttacatcagatttaacccactcaaaaagcgctgtctttgcttcagaggataatctaaaagttggaacgagaaccttcccatctctcgtaagatgcaaatcaggtcgcgaacatatatcaggcaaatccagtcttgtttttaagttgtctttactacgtcgctgcacattcaaaagtgtatgcatcatgttatcaaaaaaactcatttcgatatgcattacatcaaggttgtgcctcaacagaagatccttccagtaaggaagctgcaaaaaaatgtttttcttgtgctacttgtgattaaccagatatcaatctggcatattggcggggatgtgccaattacccccacatggaacagtttcttaagcaccccaataatctatctgctcaagcaaggcttctccagacacatatacaggtggaggtcacgtaccactttgttcttcttaaaaaactttttgtccttcctgtacgtatgactcatcggaagaaaacgacgatgacaatcaaactagcttgtcttacgaccatgcttcagttgaaatgcatccgatttggacaagataacctaccatgtgtagtccaacctgatagcattccgtacgcagaaacatcacttatggtctacataagcattgcatgcattgtaaatttttattgttatgagtaatcaaatgtacgaactccagtataccaaagctgttgtaagtcatggatcaaaggatgtcagaaaatatcaagagaacgtttaggatgcttaggaccagggactaaaatactcaagaataaaaattctcgctacatacacatagatggaggtagaatattgtatggtgtcacgattactggccacaaagaatactcccgaccggacataccaaatggactaaacctgtcactgcatagaccaagataaacattcctactctcccttgcaaagtcaaaatgtaccgtgttaaaatgcccccaagccttcgcatctgatgaaaatgtgacctaaccatctaaacgtgaatgctcagcatgccatct

SEQ ID NO: 1286 - DNA, 484 bp, Arabidopsis thaliana landsberg
actgtcccctataatcactttggttcgcccccccatttgaattcccgaacttatcattctcatatctccacctcccataccaaaagattcgcaaattcttataactcgctctctttccttcacttccccttcttatcaaaaacattgcaatattcatttgttatctccatcattcaatctcctaacctactgaattttggttttgagtctctcccattcttgttctcaatgacaaacaagtgcacgctcttgtcaaggatccggaacagagctctctcaccatcgaagagatatccaacaccttcttcgcatgcagcagctcgaggactctctgaagcaagtttcgagatcgatcacaacgaatcaagccaagaggaggaagcgatgcaagaagaagaaactttcaactctcctgccaaaaacactcgatcccgaggaaagaagcccgtgggagaaggttggaacttgtagatgaagactctga

SEQ ID NO: 1287 - DNA, 553 bp, Arabidopsis thaliana landsberg
aaaaaatttatttacaaaagcccataaaattttattttatttttttagtgggccatcttagtttactatagctcaaccatactaaattttttattgatttattaggctaaatatttagtgtaagactatttgcaatggaggtattgaataaataattcaactgtttaatcaatgcaatgaggttattgaaaaatgaaaaaaacctacgtggatattttttttttaaagaaaaatatttatatgaaaattcataactttttaagctctataaaaagaaacttgtttcatttcattcggacacatacaaaaaacaccatttttaccataattttcttattattctctaataaactcttgtttttattttaaatttgatttttgtgaaatggattccaataataatccttcacaaacttctacaaattttctattttatgtcaatttttcttaatttaatataattttagttaatattttaacttaatctatcaataattattattaatatataattacaagaaaataaatatattaagtaattataaaataataa

SEQ ID NO: 1288 - DNA, 484 bp, Arabidopsis thaliana landsberg
  unsure (1)..(484): unsure at all n locations
tgccggttactaacaccatactctctcctacatctttttatcttcatcctttatagctgaccgaatagtttttaggagacttgaaaagtcaataaannnnnnnnnnnnnnnnnnnnnnnnnnnttcacttatatatcaaacggtccagtttctctccaaactaaattaaacggtcaaccaataccatactatctcttatcttctaaatcattttatcttcatcctttaatgctgaccaaagagggttttgttatggactttaatagacaagaaggatttaagcaaaaacttccctttaacccaagtctttcttagagaattaggttaattgatggagcttcctatattttatataggccatgatacaacttatactctaacctaaacgtaaaaagaaagcacttaaacattgaaaggaaattatgaaaaccaaactcataaaaaaaccacagaagctaattaattaattaaaaaaaaaagttaa

SEQ ID NO: 1289 - DNA, 748 bp, Arabidopsis thaliana landsberg
agtatgatatattttaatttttcaaagttagtaattaatattatcatgaatagttatcaatcaaagattttaccatatgtcatgatttaaagggatttagtcaacgttgatcaatcatctctatatttttaacgtgcctaatttaaaaccattttgaaatcattcgctaactttatgatgaataattttaattttagttttcatataagtatatcaaaagttattgctatttgatatacttttcattcaaataatttgagcaattgctatatgatatatttttcattcaaataattttttattcaataattttagtggtgaaggaaacaatacaacattaagaaaaaaaaattacttttgaaagataattattatattttattaaatttgattttagttataaaaaaataaacccgtccatcggacgggtccttatctaattaattatataattggtaataagtaataacatatactagtgcgaaagtctagagtacgtggaaactagtcgagtgatagaacatggatcatggattagggtaaaaaaaaaaaaatacatggattagggttagaagcaaatgaaacaattaagaaaacaataaaatttaagagacacatcaagaacaaggaatagcatgggaagtacccaaagatggcacatttaaagaggctgacccattaatcaactattgtttgcatgttcattatcatattaatacacaaaatataaaaagtaatatacctataa

SEQ ID NO: 1290 - DNA, 935 bp, Arabidopsis thaliana landsberg
caaggacattctcgtatgccaagagacttgttgcaaagcatgccgactgaagtatataccggtgttcttgaagaaggttcgacttcggttacttgtgctatatgtattgatgattatcgcgttggtgaaatactcaggatcctaccttgcaaacacagtaagtcccattttgttctattcaacttggagttggttaattatctttcataagcttctttaaactagttttgttaactttttttttactcggggcagaatatcatgcggtgtgtatcgattcttggctcggacgttgtagatccttttgtccggtttgtaaacaaaatccaagaacaggaaatgatgtaccaccagcatcagaaacaacacctttgatttctcctggtccgaactctattacttcactacaatcgttttatgatctaccaatagttgtcagagtatatctgtaagtacctcattacatcccaaagatatgcaactagagagccaaaatgattcataaataaaatgaaacaaccatccgtttaaaacccaaaaagactaaccataaagaagataaataagcatgaactatataagttagcttcaagtataaaagaagaaaaaaaacataccacattcaagtgtaacaaaactagtcctcttttttgtcactaggcttatgctcactgctttcatcttcagggacagtagtggcctgatcaactctttcacggactgctgtggcggtccggactccagtaggctcctcaacttgaccgaggctccgtagcatcataatgaccgtcaccaagaacacaaggatgtacactgacctaatcccaatcattgagttgataaatcccatgaacgatggtccggagattttcttcgtctctgtacttccctctctatagccctctagaaaccgagacactggggtcaaatgatct

SEQ ID NO: 1291 - DNA, 2533 bp, Arabidopsis thaliana landsberg
tctaggcatctttaagctttgttcgacgaattcagcattcacttcgacgcgggctgggggcagagtccacatcaacattcacctgacacgtttatctcgaccatacctgattcactactgtgtacactatcttcctcaactttactcgaccgacggagctctactcgacctcttgtactcgtcctcagcctgattcaatctgagccactcgattctacccgtgaaagagaaacttgaaaaaggttaaggttactcgagcacttgattgtacttgtccgtttgggtctatattgtctgttgcttaccactttggcttgatcgtctcttagatactaacctattgatattggaattttgagttctaagtcttttgcaggataatcatgagtaattacagtggcagttcttcagttgatcctgactacaacatggatgagagagagtcatcgtcttcaagggcagggggagaacaaagagaatatgatagtttcagaagaaaagctgagatagcccgtgggaagcgagtttatagatgaggatctggaagacgagtacatgcctgagcatgctcgcagagctaccaaacttctgcacaaacctgatgtattgcctgctgaggaatatattaggctcttcaaattgaatgagttttgtagcacaaggtatccatgctcgaccacgcttgcacaacttggattattggaggatgttcagcatctgtgccagagttgtcatctggacactctgatggcttatgcgtatgtagcatatgaagaagagacaattcaattcctctccacactgcaagtggagctctaccaaggtatgacctttgatgagttggattatgaaggattgggattcttgagattctctgtgtatggtcatgagtataggttatcaatcaagcgcttggaaggattgtttggtttccccagtggaacgagtactaagcccaagtatgacggagaagagttgaaagacttgtggatcaccattggaagctttacacgctgaattcttccaggccaaagagcaatcagatacgtagccctctcatcaggtacttccagcgttctatagccaatgtactctactcccgagagatcatagggactgttactaattctgatatggagatgatcgttatggctctcaaaggcactctccgccaaactaagaacaacatgtctctccaaggtgaaatcaatgacacacctctctctgtacttattctgatccacctgtgtggatacaagagttgggctgtcatcaataaccacaagagagcacgaggcgctctgtgcatagatggtgttgtgacaccgattctgatcgcttgtggagtcccaatcacatctgatggacttgagccacgggcaatggatatcgagcatctacatcactgagagttcctggagtttgcaatggttggcgacaggcaccgtttcaagtttgagcattctatagataagaaagccaacatccttcttcccagtcttgaggttacacgcataatagagggagataacattgattttaagcctgagcttgggaacctctactacgaggacgctcagccattggatgaggatgttcttatagaaaaagctacggaggatgggatggatgaagacagagaagtggagtttgaaactagcatgtatcattttagtgagctcacatgaacaacagcaagctgcagaagtggtgcaagaaacatgataagttactcgccaagtgcttcaagactatcaagtttctgacagataagctgagctgctcctcttccacaacagctatcccacagggacaacctcctctggacatgccatcgaggagatttgatgagccttagccaagtcagcacaggcctgagcttagtgagcaaaggatctcataagttccagcgaggcattcatcatacgagccttgggagtacgggaggaagaagaaagttgtgctcactcgatctagcagcaagaatacaagacttctccagactagaagtttacgcgacagcggtgctggccgcagcagaagacaagaggtcgagtatcttcgttgcggtgttggccgtaagagaggggatgaggtcaagtaccctcaaggacctggagctgaaacagaacagggcgactcttcaatggcctgagagcaatcacaggataccattgacgacaaactccgtttatttttcgactgaggtaagcgcctcacttcaccattgtacaataccatcttctgtatttattttgtttatgtgatgtgttttatcctgagtactctcttccaaatttggtcacatagaggactgtgtgatttgaaaaatttctgaaaataatttcacaaaaacatgagtgttcatatagttgcattgcatatagaattgagtccaggatgtttcatgtaggattgttgcatatgcataggggataataaggagataaccttgtaagcatgatgattcactaaatgagctattagttcttggatgcatttgaatgactttgaagtaaaaccgcaccatgtt

SEQ ID NO: 1292 - DNA, 1651 bp, Arabidopsis thaliana landsberg
tttagttacgtgaaagtacatacgcaccaatagcagctaatatgaatgttgaaagtcaggttttgcatcaaacaccgaagtcttcattttcatcttgggacgaaaaacttcagagttatatctttaggaccattgatctatccttttttgtgaactcaaatgagtggcacttggatacttctgctggagctaatggctctctaatgcttctctggaggatacagttctttagccagttcatcaagagaagcaaggtccgaagccgagaatgccttgtaccatcaatccatcatgccagtcagctacttctcttatgaacattgctttgcagtgtacacgccgtttttcctgctcatggcaggacacgtccttgcagctagcactacaagaacggaaaagatacaagcaagagaaggcaaggtacttgacatggctaaccagaaacaagagggcccaggatatttaagcatactacagattctctttaacttcaaagtttttggttgcttcactacaaaattatgacaacaaaatattacatttgaggagaaaaaacaagtaaatacacgagcttgggatctctggtgactcagttttgcaaacagttagctagcccagcttgaaggcgtcaatgaagagaccataagtgaaacccatcttgaaattattgagcagagcaataggaaatgtgactgtggtgcggctataatagaatcttgtcacatactctgtcaaaagaacgcataaaaccgcagcgataacatcgttcactcccaaagctccaaacgacagagagatagtctgcgctacatagaacccacctaacaacgagattcctccaaaaagcgttcttcttgaaggcttcttgaagtaattcctagagatttcaggaactgatcttataatgtctatcaatcttcttggcgttggaccttcagtatctagtaaagctctaatgcttcttgaaaatctcctctttcgtttagacggtgacgataccacaaatgttcggaaactctggcactgatgatgattaagatggacgaaactgttcaagttggtggagatgaaactcaaagaatgtgccatcctgaaaacaagatggacgaacgaaacctataagaaattctactcttttccattgccatagtttcttcgtttccaacctaactttattctcttcaacctaattcaaatcttacacggaatcatcaacagaagctaattgaaatatctatctattcttcaaaaaaacaagaccttcaagtaatcaaaatcaaaatgcaaaaataaaatcccccagatattagggtttcagtgtctaagacagtgaatttcgattcccaatctatagaatcgagaaaaaccttggaaatggagttaccagcaaaaggaagatcgaagaaggtttgcttgggaggatttaattggggagaaaaacgccagagcgagaagaaaaagaagaagaagggaaggcccatagggttaaaaagcccattataatgtctggatttttaaccagagagaagaaaagggcatttgataattaagcccatgcttaatttgaatctgttattaaagacagtgatggattaggtttatttctcaatcaagtttatagttgaaacttcaatttgtgagcaaaaaaaaa

SEQ ID NO: 1293 - DNA, 530 bp, Arabidopsis thaliana landsberg
ttcacgagcatgtctatatagacttccatcattttctgaggtgattcttgatcgtcttgttcgcaaatttttggtatgtcacaccgacatttttagttcaaacgatatgatcgtaaaatagtatatacatcggttggtggtgaacgatgtatttttcttaatcattaggattcatcattatttggttgtaactaggtgctactcctttccgaactcttcgctcatgatctttttcatcgatggccacttcgattatgatgtcatccactacttgcccgcttgataattctaaaatcacttcttgattcgataaatccacggtgctccaactatgtcagtccagctactttccactctctccaagcgtactcaagaatagtagatcgaccaaacttacaacatcaatcacaatccttgaaactccaacgtcagccacgtctaagatgaggacaaaaatcaacgtcatgaggttctgcgaggtgacgaatttcttcttccttgaacattatgattgctctagcgtgttcgag

SEQ ID NO: 1294 - DNA, 956 bp, Arabidopsis thaliana landsberg
cgtaatgcctcttagattagctctcgtcaatggtgattgagtttgggactggtttaacttgagggtctctattgtggtggcacttagatttggttatcgaacttgttgtctagggataatttattgagcatgtcaatcaccagtaaacaaacctactcgattatcccatcctcgggaattctttatctaattgatttctttgtttactctgctgttgcttactgcatcttgttacatgttgcttagtttttgaatttctttcctgttactcaacctgatactcgaccacccagttgtctggcaatagactgtgctgtcgagtatccctgttacattttttgtctgttacttaacctatcactcgaccacacccaatgcttgggaacaagctgttttggtcgagtgtttttactttttctgcttgaatttttgtttccggcatgttcacttaggactgctacaaaccccaaaacctgttattgtttggcttaactgtgttttttttttttgttttcttgatccaggtacacctttgctgtatgcgaactcgatcaacaggcaaccagaacctcttttccaacaataacatcgaccgcatagctcgcgaactcagagaaaagagaaacacagtcgaccttgtacaacaccaataaccactcaaaatttctgatgaacaaaatcaacagaatgactctacaaaattaagagtggtctcatctcgattattcaggggagcaaattccatggtctgtcaatggaggttgtttccattctccttgggcgacaaagcacacatctaggaaaagaatctacccctgactcaatcaccatatgggttgattgcaagaaggcttttctagcaaagttcttctccaacgccagaactacaagactcagaaatgagatctctggtttttcacagaaggctggtgaaagtttatgtgaagcatgggagc

SEQ ID NO: 1295 - DNA, 817 bp, Arabidopsis thaliana landsberg
aagaaaccaatgattgattaagacgataaaaaagacttgagtgtaccttagcaataacaagatcttcataagtcattttatcatctttcttgcgttgagtgaccatatcaaacatccttttctcctaaagaaccactcggaccaaaatactcctgtgacaatcgaaatccaccacacatcgtgtgatgcttaagagagatttgagatcatcgagcttcttctgagtgaaagctctgcaacaaaattacaaactcacaattgaagaagtttattagagagtggaggtgagattggttccgatgaaaacctggaagcagaagtgaagtcatgatcaacagaggacgacgaaatcgaattcccattttcgccgggtttttctgttctccggcaggtttcgtcgtctctgtttacatggtttagtcttcgtcggagggagaaaaaatatttcggtttacatgattttgaaaagttcaaattataattggtttcggttcagtgtacatggtttaaaattacaaattgattttggttcggtttacataaaacaaaaaacataagagtcacgcgatggagattttgggaggaagtgcgttgaataaaaaaggcatgatttggaaaggtaaacccctacagaattgctctcactcgctcaacgctcattttgagagagtgggattgaaatagagctctctgagtggctgaaaaactcttaaaaaagcgaaatacttcacatgttgcgagctcttatgggatttccattcgtctggcaatggaggccaaaaactagcgttgacagatttcgattgggggggagtct

SEQ ID NO: 1296 - DNA, 544 bp, Arabidopsis thaliana landsberg
aatcatatgataagtcaacaatggaagcttctactgaaatttacttgaaaatcgtttttcgggaccaatatcaattaatctgctccatgtctcgtttaatgtatataaagaccgttgagaaaagtcgtatttggatcaccacaagttagtagaaagacttgttagtcagtcaacccatgtgatatatatgagaatgaaaccatgttatcattacaatttccattttcttgctttttcattgttgatactcaagaaggtaaaaatacttaaagaaagatgaaagactcttggaacacaatcagtctcattcttattactcttttctttcccttctttctcacttctaattatggagacgtgttagcagctcctactagaaacttgtgtcatccagaacaaagagacgcaattctcgagttcaagaacgagtttgagattcaaaagccttgtgttgatgggcgaataacagcgattgttgttcttgggatcgtatcagatgcgatgccaagttgggaatgtgatagagctgaaccttatctccagc

SEQ ID NO: 1297 - DNA, 559 bp, Arabidopsis thaliana landsberg
  unsure (1)..(559): unsure at all n locations
atccgattcattctaaacctacaatcaaaattagtattgtagttataaattgatatctaaactggtttttttatagattttatgaataattttgtgaatcttatatttttgtaaatactttactttcactaaaattacatatacataattaattaatacacattttaaacatattttaatatattcctccaattataatttagtaatgtttgattcaaaaatttatatttataaaatgtaaatatcaaatttatttaaatatttaatataaaaatcaaataaaccgattgtctgcggtaaacggcggattaaatcttagttgattgatacgaaacaaaacaagaagtttgcaataatagacaaagagactccaataatttaatttctgtactgtggttggtgagagactcggagaaaagtaaaatgaagttactggcggccccaaaattcagggccccgacttttactttttgcagtaaatggacccattattttacatttgacaggttcgtttgtttttttcatcttacanggagaggatcaatatgattttcccctt

SEQ ID NO: 1298 - DNA, 688 bp, Arabidopsis thaliana landsberg
aatatctttttcaatatatgcaacgacataagacgatttaacttcgtagtacgcttgtgcctcaacccacttggtgaaataatcagttaggactaacagaaatttcttagatcctgaagggggaattggtcccacgatgtccatggcccaccgcataaacgggtatggcgccgtaaccgaaggcaatgtttcaggtggcacattcttcatcgggccaggtcgctgacatggttcgcacttcgctgcgtaagcctcgcagtccgccagcataattggccagtaatgactgtccttttttagtttgagggccagggctcatccgccggaatgattacctccgtttccatcgtgcgtttccttcatgattgtacaggcttctttttggttcaagcaagtgaggaaagcttttgttgcgcttcatctgtataattcgccatccatcatcatgtagttcgccgcttttgctttgagacggcgggcttcccatcgatctgccaaaacttcgccgtctgtgatgtaagcttttatgggatccctccaatccgaaggctccgggtcgattgcatcgacgtctgcgtccatggccgttatggggtctataatcacgcagctcgaactgggcaatccgatacttggcttggctatgctctcaacgggaattgttcatcttaagtcggggttcgtgttc

SEQ ID NO: 1299 - DNA, 907 bp, Arabidopsis thaliana landsberg
gtatacagcaacggtatctcgctgctacatgttttcatgtttaagagctctcctttctgctcagccaagtaaagggctctgcctaagactaaaccattcttcattgtacatatgaatataagggcatatatgttcattccatgcttggtgactcattgtgcgggaagctagatcaaagtcaactaaaacacctcccgagctgaagcaatagaagtgaccattggcatagacaagattgctatgcatgtacggctcaaatccatgagagcaagaaaaatcttgagtaatccactcagttgctccaggatagcaaatgcttatacgaatgataaatctcgtaaaaggtctaaacgctattaccgcacaagtacctgatgtaggggccgaagagaaagcaacagcctgaaaggacaactcacactttggcaagtttataagctccctagtatacgggttgaagaagaacatgtccactaaactggatcttcgcataagcaaccatccgtctttcgagtaacaaacatcggttccaactaactcgggtaaattcagtgtgtacctcttccgttccaatggatcgaagagaaaagtcaagccttcatggttcggaaaggtgataacccatggatgcttttccacaacccgaactgattcagcagtagtgagagccttcttctccatcccattgttactgacatcttcgtttgacctacatatagatttcgaacataaaattagctgacatatgacaaaaccatgaggttaaaaagtgtctcaaaccaagatgcttcaagtaagcccagaaaacaataaaagttgtctcccattgaaactatcaattattatacgtcttagaaaccctaaatgtttcatagtggaagttataaatatttaagggagtcattgg

SEQ ID NO: 1300 - DNA, 900 bp, Arabidopsis thaliana landsberg
aaaagggcatatccaacgaaaatgaattggtcatcataagctatgcttccttgtctaagtagactgtcaaatgcgccattatatcgaagaaacctggagggaagaacctctcaaacatggagatagtttccacaatttcattctccattatagaaactgtctctctgtcaataactcgcggacacagtttgttgaagaaagacagaagcgtccaatagctatccgacacctttaggtaataaacctgtaagtagataacattgaagattaaaaacaacgtagcaaattatgcaagagttaagctaacataattcatcttatacctctaattgcaacctgaagaagttgttgcatcaacacatgataatcatgtgatttaagtcctttaaccgtagaatcttctatcttcacacatttggaaatattagaacagtagccattcggacctctgaagtcaaataagcgctgttttggacaaagacctaggagctgtaggaaggtaggttctttttccacgtgcttggggatggaaatccctcctaatatcgagcagttgcagatcttttcgagcattaattccatcctttgacttcccacaatgtagcattgtagagacaaggctagcggcaacatttctctccacgtgcatcacgtctaagttatgtctaaccggcatttcctagacaaaataataacagataataaaaagaatggttaagacatttattttgaaaatcttactccaaatctgaacatatagtggaataaaaactatgattttgatagctcctcttcatctaattggtattcttcttcttcagattcaatggattcatcatcagtactagaagtgatccaacacaatcattcatcttcctctttcttcctttactcttacat

SEQ ID NO: 1301 - DNA, 926 bp, Arabidopsis thaliana landsberg
ataaatccgaaccggaatcaatttcggtttggttttggttctttgttcatgctaagaaaacagagcgaaacactgtgttgcagcctgctggtgaattctgttataagtttataaccaacagaaggctaaagaatcattgaaagatccatgcaaacaaatctaaacacaaagtttgttattgcaatgtgtacgtctctcatggactgtaatgcgagtaaatgctcaaaattggagctcaatatcatgaagggatatacttacttcttcttgccttctttccttttagaccacaaaaacaattcatatttttcccaaagcaaaagaacagtggttacttttagaacatgttaaaacaaataaataatggagatgtaaattgttttcataatatgatttgtctaacatgtaagaactttcagagtttcaatcaagtctctaggcttgtggaaactacatttgttcgtctacaaagaaaccttatcatgtacacaacaagcagcacgattgctacagctcaaaacagacaaaaacagtaaacgattcagctataaacacatatttttatcttcacttgaatattagtgcaccaatagagccttctgcttcattctcgtctctaataatcatttctcctcaaaatcgacatcaatgatttgggacttaggtggctttttagagtttcccttgctattattattgttgttgttgttgttgttgttgccatcttttgagaagaaatcgccttgtggttgccacagtatgttcccacatccctcacatctgatgatttggttcttgtaccctataaactgcctcttacatgctgggcattctccctgtgcagacccaaacgtgttataacaaagctttgaaacacattttaattcataaaccaaattgaagaatgcagagaaaggacagagttt

SEQ ID NO: 1302 - DNA, 589 bp, Arabidopsis thaliana landsberg
atcatcaatggtaagataaaaaactagtttgcttgatgttgaaaagccaacgcttttatattgatctaaagaagaaaaaaacagagtctgtcaagctcttacacattaaggtccttgaagaaaaacaaggttcgggtgagatagagacgcacatatcgtgtatgagtccattatgaagaaggaaagttgaagaatgggtggtatacattttgggggaaatgatttcaccaaccttgttggtgccaggggaactcatatcaaccaaagggaagggaagatcaactgtttgcttggaccaatcatgtttattgaaatcctctctagtatccacaaatcaaaacgttggaaagaagcatatgcgtttcttgcaatcgacgctagcttccctaggggctttgttgggctccggagggaaactcaaggcccattaagcccaactctttatctttttttttttttttttttctctttctcattttgaaaatgatttgtttaatgttagtcaaaatcgaaagggataaaaaagggcaagccctagagttttagaagcagagctcagtgacgacaatggcggaaactatcaagagcg

SEQ ID NO: 1303 - DNA, 746 bp, Arabidopsis thaliana landsberg
  unsure (1)..(746): unsure at all n locations
ggatttacactagccaaccgctcggaaaacgttatccttccattttatacgacaattatgcgactatgtggcgacgaaggcaaaattatcgtattatcgtcgccgaatgtacgactattgtatgtagtcggatacgtagtcgacaaagtacgactactttacgactacatattggtctaagtaatgttgtcgtccgatagtcgaaattggacgactatgtaccgactaaatattgtagtcgctaaaatacgcctatgtaacgactatttgtactcttgtcgtaaagtcgttgtccagcagtcgtaagttagtcgcaaaaaggacgacgacattgttagtcgcctttcatagtcgtcgtttgtctgttttcttgtagtgggttgactaacgaagaagaaccaagaagttcaaagggaaagatcaatgtgattcttggaagctccaaactttgccgcgattcagttagtgctattaaaaagcataggcaaaatgttctacttaaatcaagtttgagtgaagaagtgaactaccaaggcgcttcaatataatttgacgacgaagaaacgcggcaccttcaaagacctcacgatgacgctctagtcattatgctggacgtggctaactttgaagtgtcaaaaattctcgtcgatacaggtcgtttggttgatctgatctttctaggtactttggaagaaagggaattagtagggcagatgtagttggacctccgtctnctttggtacctt

SEQ ID NO: 1304 - DNA, 986 bp, Arabidopsis thaliana landsberg
caattaatttgtataaatatggttaaagatggctatcaccaatatgaaatcatgaaagaatgtattcgtgattcacaaatgtgattatgtttaaacgaacatttgaagttaatagatgtgagttttttttttctttgctaaaaggttaagatatatgtaagttactagattttgacgggttaggtttttgataaaattagttatataaaatgtatacgtagatatttattttattaatattgtttgttttgtttagtgtttaagataatgtatatttagattttaattgttatatctaggatttcacccgtagtatatcgtttcgtattactatcgatccaaactcatcatactatctaatcctgcacagtgaaattaaacatatctaatggatttcacccatgatataccgtctcgtattactatcaaccaaacccgtcctaccagctaatgaattttacctgtggtataccgtctcgtattactatcgatccaaacccgtcataccatctaaccccgagcagtgaaattaaacattattttgttatttttgtttaaataatattttaatttagaagatatataattcaaatcaatttaaaagatatataatttaaatcaatttaaaagatatataattcaacagatatcgtaaagtagaaatctcggaaaatgtatattgggagtaattagttgatgaaaaaaatctcggattatagatatgtgaataaacccatgtagaattttttggagagatttttggaaacgtttgttgagcgcaatataaaatttttgaattttcaaatctgaataattaataccgattaaatatactgagagatttttggcaactattattgaatatgatatcttgtatttaattatcaaaataaaatatttaatgccagtggcaagacattgtaaataagtgtcaattacaaattttttttgctaaaatggctgcaaaaatgtatataagattccaa

SEQ ID NO: 1305 - DNA, 1379 bp, Arabidopsis thaliana landsberg
tctaacgaatctaagcttaacctttttatgcaaaccatgatcaacataagaagttactaccgaaatctataaaaaggatatggatagaaaaaaactcaccagagatatatgtatctttgccagtatcgtttctcttgggcttcgggaggtggaacattagcaacagccctctcatagatttctcttatcctatctttgttcccaacagtctcttctaacctaacgaaatcgaaccacgaatcatagttcaaagggttcttcctcacttcatcttcatactgacacctcctcttcccaataatggcatcctcaatcccttccttatccccattctgtttctcaaacgccacaaacttgctgtacaaattttcagctcttcctttaggaatctgatcaagagcaaacttgtattgttcttcaaattcagcgaacgccacaaagagaatctcagcttcttcatcgtctgcaagctccttcttggcgcgttcgaacactttcatagcaagctcaacttgaccatgcttcatctcaaactttgcatatcgaatataagcagaaaccttcggatgacaaagaacaaatctctcgtatatcgatctagcacattcgatttcattatacttaagttcgaatttaataaagcagagccaagcttgttgatcaggtgaacaatgaatccaacgctcgagtatctgtctagcgccggcaatattaccaagtttctcttccatgtgaataaacttgtaccaaagctggtccactcgagggaggagcgaaacagcacgatcccaaacgttcctcgcttcgttgacagacttgttcttcatctcaaaatcggcgtacttgacccagagcgtgtggttccggtaattttctccttctaaggctcgttcccacacgcttcgagcacgctccaaatccatctgcgactcttcccactgcgcatatctgacccaaacttgggtgttcaatctcgcacggcgaatctggtcttcgaactccttccgacgtcggagtctgtagtcggaaagctcagctgagtcagtgattgtctgattagacggacggaactcagcctcttgcctctctcgcgcttctctaagtatctgctcggcggtgatttggattggcgccggagtcttgtttttgccttgggtcatccgtggaagcttcaattgtgcatccttgcgggtcatgtaccataggttccgatcggaatcattgctggaggccatgaaatcgcgttttgattttggaaaagagggaagaaaaaggtttttgaactcagcgtgacatacgcattcaacataatgttgtttatgggcctcaaaggaaaaaaacgtaatgcacaaattatggaaacttggattatccatgtc

SEQ ID NO: 1306 - DNA, 1349 bp, Arabidopsis thaliana landsberg
gcaaaaacaagactcgatcttactttatatgaaacgaaacattgtcttgtgtaaaagacatgactcttgataaaagacacaactcttgatctaaagacacaactgtaaaagacatgacttgtgtctcttgatcaaataactgatttatgtaaataaaatatgatgcgagatttgattatacttcaacattaagaacagtggaggagattgtgagccgcttggtaaaaaatgtagacttgaggtgggtaacaatgattcaaagccttgtcacaagccattttcgattagctatgatggagatgaaactgtaccaccaccagaagtagggcaaaggaatgaagaaactgatgaaacagcgagcaaagcagggaagcgtatggttctgagaccactttatgaaactgactcatcaggttctcctgttgattttgatggagcaattgacattgttgaaccagcaccagagacaaggcaattatgtgatgatgagcttgatgcgtatggaagctatgcagagaagtcgactaagatcgatgctggcagcaaggaaccaaagtgtttgctccatgaagatgatgccatagctggagaaatgacgaaatcagatagtaagttgtgcagtgaaactgagaaagaaaatgatgatggaaggatcaacgataaggtgctagcttcaaagggagacaaagatgaaacaagcaaaacatataagagtatggttctcagctcatctgataagtcaaacattcacatcactgcaggtggcagaagtcagggacaaaattatttgcttcatgacgatggtttcggaagtgaagaaactaagaaatccagtgagcagttagaggatttagaaaagagaaaccatgattttggtgatggtgaagtcgataatgacaccactgaaaagagatttcaagagctcaaggtgctggaatcatcgatagaggagcgaattcttaaagcagaaagaactgtggcatggctgaaagaaaagagagccatagaacagaaaaaaaagcagcagctcgtttgagttaggtgcttttttgggtagataaagaaatgtgaagtctaatgcaagtagaatatcaaagttcagtctcatatagtcatatctatatgatcttttggtttagtatcctttgattttcctgcttaatctcttttgaggactggtttgctttaagtgttttatttaaatcttttgaactcagttatgagctagtagcttcttggtgtgttgcagatcagatttttcttacaagtttgataaatcaatgcatttgtttcttacaggtatgatagatcttttttttaatccagacaatgagctctcaatctgatca

SEQ ID NO: 1307 - DNA, 1433 bp, Arabidopsis thaliana landsberg
gtgggaaatctggattcgattttaccctaatcggaagaaccctagaattctgatttaaggtagctgagagatttggggacggagacgaaaacgctaacttttggaacgcacttcgctattttgttgtctgctttggcaaaaaaaaatggtaatttagttataaaacttaagagaataaatatactgaccataaaagcattagagtttgcttcaaaaatacatcattagagcttgcttaagagattataaacaacattaaagaagaatatttattcaattagagtataatcagtgggttgatccttttaattcaaagatcaattactgcatagtcaatagaatttggttatggaacagtccacgaggacaattttcaaattgaaaacgaaaatttctgtttttattcacatctgtggattgattcgtctttgaaataagcacatctaattcaaagataatataagctacaaaatccattaaccaaaatcactgcagttatttcaaattatccaaaccaaaagctaaagaggagagtagcagcacaactcttacactgtttaacagatatgtctgaaacaaaaacgaaagggtaagaagaagtgtcttatagccaccaattttaagtaggtgaaagctcagaagattctttgtggtggtcccattgtgctcttgaggtacaaacacctgacattttgccagttcttcttcaatagcgagacgaggaagttgacgctcatctgcacattctgaaagatctgcttctcttccattgaaaggttaccaactgcaactcccatgcacagaaccttcttcagctggaacttcactgttgcctttgtttcattcacctttgactccaaggattcctggtggctcacaagagttgggaattttcctgtgtaaagtaaagcaaaggaatgttacttaagaatcatcaaagaagcataatctcacaggataaaggattggcattgtatcaaaaagacattgacaaaagaaatagactactaaaacctatccaaaatcaaaacggatgtaaagaagaacaatggaatattagctgtagccagaacttgcctgccttgttaagaccaggaccaagaagacgaggaatctgcttaatgacagactcagaggccaagaaagcatggtatttctttgcaagcttcttgacgagtttcttgttcttgttaagcttttttagagactcaacatccatgttttccaaccccatcttctcagcctacgaaaagatacaagatgaaataagcaaatatttaattatgcaagaaatgaagcctaaataaacaatgaccaaattccgaaaacatcatgcatctacattcagaagacatatacaacatctaatgaaactaatagagccactaaaggaaatgagcacaaaatcattatacaagaaacagagctaaaaa

SEQ ID NO: 1308 - DNA, 3079 bp, Arabidopsis thaliana landsberg
  unsure (1)..(3079): unsure at all n locations
tttgtaaaccactcgacccccaagccgagtagatgcttcacgacatcaacttaccactcgatttcctggtcgagtagaagacttcaccactttacttcaccactcgaccacctggccgagtaccatgagagtcactcaatcacttcactcgaccacctggtcgagtatatcacttctaccacctgactatcactcgatcacaccactctaccatgaagtcgagtatcaccatcaccattactcgactagataatcgattgccagctccagagtcttttccagtccgcactcaaccagacactcgagcacaaggaagaaaagaagactttagcttatcagtcgaccacctgggtcgagtactgttcttaatccttcccaatactgcgtcgttttgagtattagggtttcaaaaatattttgccataaataggatgtactttacgttttcgtttacctaagttttattccacagacactatgttcttgaccttttgtttttaacattttaaaaccgagggcttttgcccatcttcaatagctaacaagaactctttcttttctttacaaatcccaaaacgtttactagactttttctgcttctttagcttactttacctagagtcttttacccttttctcatcaatgaatcaagccccttttttcttttaaacacatcccaacctaaagtataagcgcccaccttgtcctatctagtccgaaaaaatgcgaactagaactacatgagacactatctctgtcgttatgaacctaacactttctaccaaacttaatcggaataagacctcacaaacactcacaagtgatatagagcttgaaagaaagtctaggtttgggttcgggttaactactctaataaggagagtcagctacttggattaacaagagtgatgaaaatgaataagaaaatccaagtattttagggtatccatgagttcaaatttgatgcagacatgataattaaagatcagattcaggttcaaattgatagagaatggtatcagatcatgacagtgtggtcgagtagagcaatctaggcatggttcagttttatttcaaattcattgactatgcaatagacaactagcaacgagggaactgaatttatccggtgaattaaaatgcttacaaggctatctcatcatcatcccctatgcatatgcaacaatcctaaatgaaacactctagactcgatcctaaatgtgatgcaactacatgaacactctttttttgtgaaatcattttctgaaatttttcaaatttttttggtttttctatgccttacatgaatgcagactgaaaaatatacacaatgcaacacacacttcctgagccctcccccaaacttaaatcacacagtccactgtgcgaataaacttggaagagagtactcaggacaaatctaatcacagaaacaaaaaaaaatgaagaaacaaatcacaacagatggtataatacaatggtgaagtgaggcgcttacctcagtcgaagaatgaacgtagttgctcgtcaatggctgcctgcgattgctcccaggccatagacgaaccaccttgttctgtatcagttccagcaggtggtactcaacctcatcagctctgtggcggccagcaccgctctgaggaaactcgacctctctccttctactacggccagcaccgcggttgcataaactacgagacttcagaagtcgtccgctcctactgctagatcgagtgagtgtggtcctcctcttcctcccagattcacgaggctcgaatgattaatgcctcgcagggacatgcggaatctcctgctctctaggctcaggcctgcgccgacttggctcgggcgcgtcatatctcctcaaaggcatgtcctgagggagatgtccctgcggaatagctgtagtggaagaggagcagctgagcttgtttttcataaacttgatagccctgaggcacttggcgagcaacttgtcctatttcatgcaccacttctgcagcttgctgttgttcctgtgagcttcgcttaaactcctcgaaataaagttcttcaagcgcaggcttgaagtcaatgttcctgccctcgagaatcctagtagcgtcaatgcaggggagaagaatgttggcgattttaatcgatgaatgctcgaacctgtagcggtgaaagtcgccagccatgtcaaactccaagaactcacatctgcgcaaatgatccaagtccatcatcctcggtgctaaccctggttccttgagcggtactccacaagcttccagaattggcgtcacaacgccacccacgcatagtgctcctctcaccttcttcttcctgttcgtcaacgcccactttctgtctccacacagatagatcaacagaggcattactggtggtgcgttgttgagatcgcctctcaagacattcttccccttcgtccggcgcagaatccctgtaaacgcataatctatcatctccatgtccgtgttagacacggtgcctgtagactccctggagtaaaagacgttggcaaccgatcgctgaaagtagcggatcacacgactccagatttggttgctcttagaccgcgccgagtttagcggtagattgttccctatagtggcccacaaatctttaagctcctctctgtcaaatctgggtttagttccctttccactagggaaaccaaacagttcttctaacttcttgatcgaaagctgataccactgttcattcactgagaacgtcaagaagcctaaccccatggtatccagctcaaagtctgtgagtgccgcatacatctccacttgcagcgtggaaagaaactcgattgtctcctccttataggcagggtaagggtaagacatgagtgtctccaggtgacacttctcgaacagatgttgcacgtcctccagtaaccccagctgggctaaagtctcataacacggataccgcgttccccagaagtcattcatctcaaagaatttgatatactcctccactgtaacctcgtcgagtttgttcagtagcttcgtgggcatgcgcggtgactctcgctcatnaaagcatagatgtcctcatcaat

SEQ ID NO: 1309 - DNA, 889 bp, Arabidopsis thaliana landsberg
ttttttctctcttccacgatccttacgcaaatttgaaattttaatctctctctctctctctctcgttctctgtctcacatttgtagtgcctccctctctccacgtctccataacttctaggtttgattcctcttatcgattatgacggcggctcactaaaaattggtgataccgattctgcaaataaatgggagaagtttcttaaacaattcgatctcgattatctcagaaatttggtaaaaaattttggtgtccataataacgagtccatttaaatatatctattcagaaacctttttactgatccatatccaatctatataccatgtcaataataacaagaaattcgattaacccgtgttcgtatagaaaccaaagttccatgtccataaggtcttgaaggtggaggtatttgcaaactgaaagaaaaatcaacaaacaatggggtggggtccataagaacgagtccatttaagtatatccattcggaaacctttttactgatctatatccattttgtctaccatgtccataataacaagaaattcgattaaacggaatctccatgctacatagattaaacaagtttgacacataagagagagcaaaaatcaaatcaagccgtcattgttgaagaagaagaaatttcttagagaactgaatctcaaatttatgtcaaaacaaatatttaaattacaaaataaatcacaatcttaaagaaaccaagggctcgtattctccaattggtccagagagaagggaaaaccatcgcgtagagtggatttggagattgattgcagatttggaattgaagatattatgggaaagtttttttcttcgataaagtgagaaaaaaaaaaaaaaaaagagagaagaggtgggaaaggag

SEQ ID NO: 1310 - DNA, 578 bp, Arabidopsis thaliana landsberg
  unsure (1)..(578): unsure at all n locations
cgatgcaacaattcttggatttcacttagaataactcactcactcagacttatgcggcacacggaaaatggttctaacataagccataacccacatctcaagaaagtaatatttttgtgaccaaatcatataaactttgtatctcccgatggaatgtaactcaatttcagcttgaacatagattcatctatcttaatcttcatgcatatcgtatccactaattgaaaataagttatctccttcattgatgatgtcctaaacaatataccatacaaacaaactacttttggatttcactgatatgcttctccgatatttgaatagtattcatcataatcaaaatatatatttattggaaggttgctcattctcctgagaaaaaaacattagctgttatctcagaaattccagttgtaccagatataccacttgaaagagttataccacgtttctcacttatacccggattnttatgttctatcaaattgattctcggacccaaacactaatctgcctaagattaacaatgaatcaaccattaccgtacattcaaatgtcttaatcgacccagatacatc

SEQ ID NO: 1311 - DNA, 1039 bp, Arabidopsis thaliana landsberg
  unsure (1)..(1039): unsure at all n locations
ctagatctgctcctctgctattgtatttcatttttatttctaataacaataactatgtaattgatgtgggattttcataataaatgttttatgtacagtaatctatcattagctagagctgataatttaatttattatatcttgtcataaagtagttaattagggttgatcatttagtttgaatgaacatatagcgacggttgtccagtggttgaggcttatatactcatgnnnnnnnnnnnnnnnnnnaatccttatattcgtatagctctgttgtatttgaagtaactctatttcttagacaacaaaatttagagtaaaaactagagtgatacatacattagagaaaaagcctactctaatttgaagttactctattttccggtaaaaattagaaaaaaataagaaacaaattgtgttagtataacttgcgatttactcgtgtaagaccatctttactgatggtctcttaagacaactcttatgttaagaaatatatttaagaaactttcgttagttataagacatgtcttttaacataagagttgttttaagagactatcaataaagatgctctctcctctattcttatagctttcagtgtttcttgaagtcaactccatcactcaaagttcattttctgtttcacagctaaaagctcataattggttacacgtttatataaatatttttttattatataaaatacttaatttttcccaaataagatgaaaaatataaaaatattattcatatatttcatttcattcattgtgaggtagatgaagtagaaaaaaaaattaagctaattttgaatacactaaaataaagatgaacaaattagataagcatcgtgacgtgttgctttcagagtgattttctaccatttaaaatattacccaaatgcgtgttcaaaaaaaataaaattattacccaaattctactatagactatttacatattttggtattagttttaatacatacatatatcacacaaattaaaaacaaatttaaactaaaagtaatatagtaacaac

SEQ ID NO: 1312 - DNA, 2293 bp, Arabidopsis thaliana landsberg
  unsure (1)..(2293): unsure at all n locations
tccatgcggctttaaattcttcagctgctgttttagagaagatagagatcttccttctcagctcctcagaccttgcatcattaaaaaagttgttaagaaaagcaacctttatttctttccaagttgtcagagatccaggcttcaactgcttaagccaagaagatgcatccccagcaagagaatatgggaagagcttgcagggaaggtagtcagaagaaacaccttctgccttaatactcgaaaccaagtcttcaaactgctcaatatgatcgataggatgatcttgtgctagaccatgaaaagggtgggtactcacaagagtgtatagaaagcagggtttatctcaaaatcgcttctttcgaaggtaggtggtcggattgtagaccgattggaatattatagatccagtctgttgtagtcaccaagagtcatccgtcgtccatctgctctgatttcttcttggtgtcgatcgacaccctcggcgatttatagtatcaggtttccctgttcatctattttctgaccctcttcgttgtatgcctgaccagctctgtcgcgtaacactccagcagcatcaggtattactatcagcatcttgagttgcgtttgaattccttaaactcttgaaacacaagaagaaaaagaaataaaaacgcgtaagtaacaaaagaaaagaaaagcttagactaaattctacacctaatctaatggtgaatcgaagagaactttggcaacggcgccaaatttgatatgagtcaaattaccctaatgactactctctcaaataaagaggttgttatagcacttagggatcgaattccacaaagttctcggatcacacaatagattaacagttttgaataaagctaaacagaaaatattataaaagtaaaagacaagaaagcaattaaaattggttgtagattcagatgattaagacgtcaggtttagggaaattctcaggagatatcagaatagtagatttagcagtaaattgagattattatcgaaccattgtagaacacaaatcactaatataaagtaaccggtggtgttccgcgaaactcactatgcttaatagtattgatcccaactctcttgtaaataagcatctcattccttctgctgatgttccctcttctctgacatgaatcacatttcgagacaaattcctgagcatccttaaacaatgttggccaccaaaaacctacttgcaggatttttgacactgtcttgaaagttgcaaagtggccaccataggtagacccatggcaatgcaatttgatgccatcagtttcgtcttctgaaacgcatcncttgtagatcttatctttgcagagagtgtagagagaaggctcggcccagtagaaatggttaatgtccttgaagaacttcttcttctcatagctcaacatattcggaggctcttcaccactaaccaagtagttgacgtgatcagcataccacgaaagcttatcttttatggcacatacttgatcgagtgatttcaaaatttgagcactctcgttcagttgttgaatagccattagctgttcttctggcatggagtcgtcaatagggaccttatcttcaattctcatcctagagagatggtcagctacaccgttttcaattcccttcttattaactatcttcatgtcaaacttttggagcaataagatccatctcaacagcctaggtttggtatccttcttcgcatatatatgcctcaaagtagcatgatcagtgtagactgtcaccttagaacctactaggtagcttctaaatttctcgaatgcaaataccatagctagcagttctttctctgtagtggcataccttacttgtgcatcatccatcgttctgctcgcgtagtagatcacatgtagctttttgtcaatccggtggcccaaaactgctcctattgcataatttgaagcatcgcgcatgatctcaagtgggaagtcccagtttggagcttggactattggggtagtgaccaaagcttccttgatcatcttaaggttgtcaaacattcttcatcaaatgcaaactcagtttccttgcacagcagtctggtgagcggtctggccaacttggagaaatttttgatgaatcttctgtaaaatcctgcatgcccaaggaaactccttatgtccttgacagtttttggcggctgtactgcatcatcacatcagccttagccttatcaacttctatccctcttctgcaattgtggcccaaaaaggtgcttctctaccatgaaagacatttctccagtcagaacatgttg

SEQ ID NO: 1313 - DNA, 3097 bp, Arabidopsis thaliana landsberg
ggcgtctcggattgtctgtggtatagacaagtttaattcttttcgaaattcggacttataccacagtgcttcttcagagcagagagagccgctacgtcattgattccttcgactttggctagggtagatcggaattttgcgaggaagtctcgaagtggctcattaggctgctgagatagtgaccacaggtcgacgtctgatgtgccgggatcgattagcaccgaatattgcttcaggaagagtgttgatagctcctgaaaactatccacagaatttccttcgagtctcgagaaccaatccagagctggccctttcaagtgctcgacgaacaagtgacagagaccgacgtctctttcttctggtctgaatttggctcgggtcggaagacccgttgaagtactcgattcttagttttcttggatctgagattatcgcgttggagatcctatgtgtgaatggcatgttgtgggagtcttccagaatgcagtcgatgttcggggccgcggagactgcgttatgcatttgggatcttacgagcttcatctcgttctctgccttggctagggagagcttgatggcgcttatttcctgctctctggcgtattcttcagcccatctaacgttctccttggaatcttcattatccgaagcgtcgatatgatcggcttcggcaatctctgctcggagaggagggagttgcggttcgtttcgatctgcttcccgatttcccgaaattgccggctcggttcggtcccgtccgatttccggtgccgttctgcggacgggtcttgtggtattgccaggtgtttggaatacgagccgtgtgggattgagatcgcgctgccgcccgtcgatcgtgaatgtgcctcgcgccgaaacggatagtcctgatttgtccttgagaggttgctgcttcgagttgctgtgctaaggaccgatttgcttgttcttgatcgtttaccttctgttgaagttgagccatcatactcctcagttctgctagggtcgcgggagcagcggcttcaggagcatctgtctggattggagggattgggttcccttctgtatcaactacgttactggagacttgattgttgaccattgtgaattgggtgattggttccgtgttccgggtgttagagaaatctctactcccctccttttagcggcaaattgtgagagtcgaaactcgcacaatagaatttgttttaagggtttcttcaaagaacggatctttgtgagattctcaaagaacaacagaattctcaattaccgcggacggtgttcttgattttattaatgagaaagtaatgattttatcgtacaagtgtgatagaatatgagaaataggtgtttttgccttcaaagtcagagcgtttttgatagcctgaagttgagagcgttttttgtgtctcccatgtttgttctctgaggtgcttttttatagggtccgagaatatcacctcttgcgaagaagaggaaaaagaagaaaaaggcggtaatgccaaatcctcccggttcatcaatgtgtaccgagcaatctctctcggatcttaaggctcgatttggtttggtgctgtaactttgcgtgttccgagccctgaagagcgagccgacagtcctcctgcaggtttctatactctgtacgagggattcttctacggctgtttcttatggttgccgatcccgagattggtcttggaatatgtgacatcgtatcagatcgctctttcccagatcacgatgcggtctttgagacatctgctcgggattttgattcgaagttacgagtctgagacggagataacgctggctcatctgagaaattttctcgagatccggcgggtgccaaaatccgaagcggaccggtactacatttcccccgctaagggaaagaaaattattgatgggttcccgaacaaagacgagccatataccgatcacttcttctttgtagccattgaagatgctatttatgaagatctcctcgggactgttctgacaagatggggaattttgggtagtagttagaaatttattagtacccgaggtgatgttaatttcgttctctaattgcagttttccttttgcagaacgcactctcaagtttctcgagccgattccagacgattttctttcggcttttcacgcgttgtcggctacaaggtgagattggctgaaacatttttctcgggagcgagttgagcgtgcgcttcgttttcttctcggcgtttcttgtcccactagttcggaatcttccgatcatcgcactcaatttttcgtggacatgcaatcgacgaaacttactttgcgggaggtatatgccaagaagaaagaggacaaggagaggcgattggcggaagagaggcgccttgttaatacgggattgatctcgccgcgggccgatcctgaagcgatccaagatgggaattttattcccgatgctatcgcgccgcagactgcttgcgaggcgtctcgagatggggtcaatcccgatactgccgggccggttgacgtgacgcccgctgaggctcagggagccgagccatccgctgctgcgcccgaggcagttgtggcgttgcctgcgagtgacaaagcggcaggtaagcgcattcgggttgacgatgagtcgtcaaagaagaagaagaagaagaagaaggcatctggttccgaggcggagaaaatactccccatctttgaagatcgtactgcctcggctaatctgctcgggggatgtgttggtcccttgcttcctcctccagatactcttctggaatctcggaagtatgccgagactgcatctcattttctgcgggtacgagttctgttgcttataacctatcttggtgttatcattataaagctaacttttctcttttccagactgttgcttcgatgaaccggatggtacattcgtatgactcggctatgcgaagtaacatggaggtggctggtaaattagccgaggcagagtctcggattcaggccatcgagcgagagaagaacgaggcactctccgaagctgctgcagcgaagctggaaaaggaagagatcgagaggacggctcatgtgaataaggagaacgccattaagatgg

SEQ ID NO: 1314 - DNA, 1086 bp, Arabidopsis thaliana landsberg
ggtcaaagtttttatgatttacggttgaatttaggtgaattaattggtgatttcgagcatgtgtaaaattgcccttaattaattgttcttttttttctaggtgagttctatttgccttattagttattatacattttgtataatattgtaggagtatgataaaaaaaaagaattctttgtttattctgaaaattgatttgtttgctttcttaattaagttggttatgattatgataataagatatgttattctgttaaacccgatgtacacttatataacatgtaggaataaaagaaaataaaaacttgaattatttgaatatgtgaattctgaaaattgattatttgttttaatgtgattattctgaatatgattataatgaattgaaacttatgtctgttagtaccaacaagtgaacattattatgtgcgggatcagaccgtgttggtactagttagttgggtttgtagtctcactgggcgatttttttgctaacataagttgtgattccgtgtagacggcattgacaaggagaagggtgcagtagaggtttagagtttgttttttggttgtaaaacgagacttggtagattttcaactttatatgttgtaaaagttttggtatttttattatattagttttagtaatgcttcataaattcttttgaatttttggggtgttacagaaattataacaccccgatttcaggaatatggtggtgcactcggagaggtttaaaagaattgatttgaacacctatgtcattaaattgcacttatcttttcggtcaaacgtctcaaaatgggtgaccttccgaaaagtgattgtcggaaccatgtgagtgaggataaaacatggaaaaatatcatgtggtgatttgtagggttagtaacaagtctttaaaaccttccagatatggcgtaccgaccatcagacatgggtggacccataagcccgagagaggacgtggagtagcctaatagggacggtcgggcgttaccaattgaaaaaattaaaatattttttagttttaccatagttgtatctagtggtattaaacatgtcttttgtttcttaattgtaa

SEQ ID NO: 1315 - DNA, 3086 bp, Arabidopsis thaliana landsberg
ctcattctcggttcggagatgctcgacgagatgagaacgaccagaaaacaaggaatttctaaaccggaaaaatcaaaaataacaatgaaacggcggagcttcaccggaaaaagagagaacaatagaaatatcaagatcagagagaagaagcaaaccttgtttcttttcttcgaaaaccttgttgtctatggataatttattgagcatgtcaatcacctgtaaactaaggaaacgaaactactcaattatcccatcctcgggaatttcttatttaattgatttcttatttactcttctattgtttactgcatcttgttacctgttgcttagtttttgcaatttttgcctattactcgacctgatactcgatcacccagttgtctggtaagagactgtgcagccgactatccctgttactttatctgtcttttactcgacctgtcattcaaccacacccagtgctctacaacgagctgcgccggtcgagtattttattgtttctgcttgattttctgttttctgcatgttcacttaggattgctagaacgcaccaaaacctgttattgcttggcttgacttagtgacttctgatcacatcttgattgttagcatcacacccatttggatttacaacctaaaatactacaacgatctgattgctgttttagttgtctaaacactcttaatccatctttaactcttataattagtcaaatgcattggattgtgacacattttgaccatagaaacactaacaaagctatggactgcttctaagcaattgtttgttcgttttagcatcttttgggagaaaatgagtataaatgttgtctaaacacttctaatcgatctttaactcttatgattagtcaaatgcattggattgtgacatatttttaccatagaaccactaacaaagctattgactatgataagtgtgtattttgcatgttttgagcatccatttgtcatcactttagtatcatatcatcactgttttatactatttctcatcatttgtcatcactttacatgtttaggatagatttgcatgcatgttgcatatttgtgttgatttcaggtgatttggagctgttgacgagctatctggaagaagcggacatgatcatgtcaaaccactcgaccccgaggtcgagtaggagcttcaagatctcaagagaccactcgaccccctggtcgagtagaagacatcaccacttcacctcaccactcgaccccaaggtcgagtgtcttcatcccataacctgaccatcactcgatcacatcactcgacccaaggccgagtgtcttcaccttcattgccagaccactactcaacctcatcactctacctggaagtcgagtatcaccatcaccaccactcgactgccactacaagaaaacagacaaacgacgactacgaaagacgactaacaatgtaatcgtccttttttgcgactaacttacgactgctggacgacgacgttacgacaacagtacagttagtcgctggatagtcatatgttagcgactatgttatttagtcggtagatagtcgtccagttacgactatctgacgacaacattattgagaacaatacgtagtcgtaacttagtcgtactttagcgactacatctccgactacaagcaatagtcgtacattcggcgacgataatacgactattttgcctttgtcgtaacatagtcgcataagtgtcgtataatatggttggaaaacgttttccgcgttgctgggtaggtacacctaatttctgagcgtctacaaggtttagtcgtatagtagtcgtaaaaaatcctctaaataatccacaatactcttcattctcattcaccaacaaatcaaaacaacaataaaaaaaaaaaaacaatttcgaaagaaaaatataagtttagtttatgctatcatggcgggaaacttcaattatggtggtggaggcggtttctatcgagattggatgtacaagagatttgatgaagtaacgggaaatttgtcagccgaatatatcgcaggagtgaaggagttcatgacattcgctaatagtcagcatatagtacagagtagtcgaggtaaatttcattgtccttgtagtgtatgcaagaatgaaaaacacatcatctcgggtagaagagttagtagtcatttgtttggtcaaggatttatgtctgattactatgtttggtataagcatggaaaagaactgaatatggatataggaacgagttacacggatatgacgtattttagtgagaattatgaagaagtgggtaatgttgtagaagatccatatgtggatattatgaacgatgcatttaattttaacatggggtttgatgataactatcatcaggatggtagttatcagaatgtggaagaaccggtctgtaaccattcaaataaattctacgacttgttagaaggtgcaaataatccattgtacaatggttgtcgtgaagggcatctattagcatctcgactcatgcacaacaaggcggagtataatataagtgaaaagttggtggactccgtttgcgaaatgtttacatattttttaccagaaggaaaccaggctaccacttcacattaccagaccgagaagttgatgcgcaatttaagacttccatatcatacgattgatatttgtcagaacaattgtatgctattttggaaagaagacgaaaaagaagatcaatgtcgattttgtggcgcacaaagatggaagcctaaggacgaccgtcgaagccagattataatgatggtgggtttctagtaacaatcttaggttaggattcaaactagtaaaaatgagaacttaagagccctactcgatcattgggtcgagtagaaccaaaatgtgacaaatttgaattactaaaatgcaatcaaaagaggatacaaataacaggtaaataaaagtgcaatcaacaggggatacaaataaatctaatggaatttctaaagatggattcattgataagggcaactagaatgttcatcagatgcctaaaaggcgccaggtagataccctcgacgaaagattcaaataccgggtaatttcaactgtcg

SEQ ID NO: 1316 - DNA, 1925 bp, Arabidopsis thaliana landsberg
gacgtctaatttcggataactaccttattgcacaagagatgttttatgggttaaggtctaacacatcatgtaaaggaaaatacatggcaattaaaatagatatgagtaaagcgtatgatagggttgaatggaaattcgttaagagaattattaagaaaatagggattttgcttaaagtggatatcatggataatgtggtgtattacttcagttcagtattttgtccttcttaatggacaacctaaaggactaataataccataacgggaattaagacaaggatatctactttctccttacttattcatactctgcacagaggtgctaatagcgaacatccggaaggcaaaacaaggaaaattgatcacaagtatcaaagtagcagcatcgattccttcagtttctcacttgttatttacggatgatagtcttttcttttgtaaagcggataaagaccattgcggaataatattgggtatcctaaaacaatatgaagcggtttcgggacaaatgataaattttgcgaaatcatcgattcagttcaggcataaagtagacgaagctataaaggcaaaaataaaatcaaccttggctatacataatatcggaggtatgggatcctattttgggctacccgagagtttagggggctctaagacaaagattttttcctttgttagagatggattatagactagattaaatgggtggtcggttaaattcttatcgaaaggagggaaaaaagtgatgattaaattggtagccttggcattaccaacttatgtgatgtcttgctttaggcttccgtaaaaaattacttcgaaactaacaagtgcggtcgcaagattttggtggagtttaactggggaatctagaggtatgcactagatggcttggaataaattgtgtagtagtaaatcggaaggtgtcttaggttttagggatgtagatgattttaattcagctttagttttggaacattgatctcttgaaggagctttttgagccggaagatgtcgagctgataagtgcattgcacttgggtgcgtcaacaagggaggatatcctaggttggcatttcacaaaatccaaaaactattcagttatatccggctaccatacaacatgaatagttaacaaggatcttaattcatctttcatttgtccagagatcaaagctctgaaagcacatgtgtggaaagtgtaatgtccgcctaagttacggcattttttatggcaaatattatcaagttgcgtgcctgtaacagagaatttgcagaaaagaggtataaattgtgattcaggatgtgtcagatgtggttctatagaggaaacaataaaccatactcttttccagtgtcatccggcgagacacatatgggctctttcaaagatccctattgtccgagggatttttcccacctatttatgcaaatttggatcactcattctcaagaatctctttagaaattgattcagtcgcatatccatggatactttggtatatttggaaagcagggaatgaaaaaatcttttgaaaatgtggacaaagatcctctaaagatcttacatttggcggaaaaagagtcagacttgtggaagtccgctcaacttgagcttcacaacgagaattttggttctttcgatttggaagatcgtaatcgagtgcggcatttttctttagacaacaattattctggatatcgttgttttgtagatggatcttgaaaagataccgacaagttttcaggctaaggatggtactgtacatcatcaagtggagagacatcacctttgggaggtgcctatctcagaaaaagtttatctcctttacatgccgagctgaaaaatataatctggacgaggaagtgtatgagtggtgccaacaaccaagaggtagtttttaattacagcaaagttcaaat

SEQ ID NO: 1317 - DNA, 3716 bp, Arabidopsis thaliana landsberg
cttattagccagcagaagcatgagcacttccctgttgatgtcaatcagaatcaagtccgatatggggagggtacccagttggacgaagtcagctacatcaacaacaaccagggtggctacaaaggatacaacaacttcaaaaccaacaatcccaacctctcctaccgtagcacaaacgttgctaatcctcaggatcaggtgtatcctccgcagcaacaacaaagtcagaacaaaccttttgttccctacaaccaaggtttcgttcccaagcagcaattccaggggaactaccagcaaccaccaccacctgggtttacacctcagcaaaaccaaggtcctgttgctcctgatgctgaaatgaaacagatggtccagcagctgttacagggacaagcatctagctcaatggaaatggctaagaaattatcttaattgcaccataagctggactgcagctacaatgacctgaatgccaaagtggaggcattgaataccaaactcagatacttggaaggccaatcagcatctacctctgcaccaaaagttacagcacttccagggaagtccatacagaatccaaaagagtatgcaactgctcacgccatcactatttgccatgatcgagaactgccaattcgacctgtccctgatttaatcactgaggacagtgatgttgaagaaggggaggcttctactcagattgaagactctgttgttgaattcaaccgttctgctggttcttgtcatctctttcaatacacctcggaagagaaggccgccataatcgagagaatggtaatacgattcaaacctactccattaccctcacgtgctcttccatggacatttaggaaagcgtggatggagagatacaagtctgttgcagcgaaacagctagacgagattgaagcagtgatgccactaatggaagttctcaacctcattcctgatcctcacaaagatgtgagaaatctcgatctcagagcctctgtcagcttaatgtcagcttatttagtacagaccttgtgacctgactttgatccttgaggatagatctttaagaaaacccttcggcatgctgaaagatctcccagtcatgattaatggagtggaagtgcctacagacttcgtggtgctggatatggaagtagagcataaggatcccttaatactgggaagagccgttttagcgtcagtgggagcagtgatagatgtcagggaagggaaaataagtctcaaccttggaaagcatatcaagttgcagtttggcatcaacaaaactccacaagggtcaaccgaagatgaaagaacctctagaaatgatagagcgatctcaggagaaggatatgagactaaaagagtgaaagaacttagaaagaagtctaataagcagaatgaaactatagagaagctggcccacaccaatgaggaacttaggagtaagctgaatcagatgcagaaggaagctcaacctaaaggcgggattaacactatcccgagaaaagaattcacttcaagatggtctcaagatacagattatcctccagaagagaaggaagcctattttgaagaaagggggattgagtattctgctgcaaacctctccagggaggacgctgaatatgatgatggtatcagagaggattatgctgaccctctctacacttcattttcttcttgataagtgtgaggagtcaagctagagacttaaaacaagctcacttgggaggaagtcccatgactatccttgtaaataatttttactttcttgttatttttgatttgttttggttatgtttatggttctcaggaagaagggagtacgtgaaggtaaagtaaaaattcaaaacttttactcaactgatggcctagagatcgagtatagtggtcgagtatgagtgatgtttaaaaacctaaaaaaattttaatcatcattttactcgaccaacagaagctacaaagtcttccagggagtctcgagtccagccatcactcgacaacaccaccgtttcatctcttccgcgagctcaagttcactcgaccgctcctctccttcctttcaaagccactttacttcgccattacacaccgcctctccatctcattatcactcgatctcttgaatcaccaccgcaactcgtctcaaacccactagttactcgatcgcggctccttcacagcttcatcgctctcaccgccatctctcaacatactcgaccttgcgtagtcactcgatctcgctgcttctcaacgcctctccatcgtttccatcgccgctgctctcatccccacgaaagctcgtcatcgccggttcactcgattaagcaaacaaactcgacctctttcaaaccgtttcaccatctctcgcctctaaaggtcactcgatcgccaagcacaaccaaggaatcactcgaccgcgagttcaccaaaccgaaaaaaaaaaaaaaaaaaaaaaaaaaatttggtacactcgatcggtttactctttatgtttgtgtttttggttttgttggaactaacgtattaacgtttatttttgagttacatttgttttcaggtttcatcatgagtaactacagtggagaattctctatggaccctgactacaatgtggatgaagctgagtcctggtccgctagaccgagagagcaacatgtttaccagagcttcaaggatgaattcgaacgccctgcagcccgacgtaatcagagaagagctgaaatcgccagaggaaagagagcgatgtcaagaagatatgagctgattgatgaggatatcgagactgagtatgagcaagagtcatggcgcagggagacgaagctgttgaacaaacccgacgaggttatagtggaggagtatcagctttcgatcaagaagttggaagaactgtttggtttccctagtggaaagggaaccaaacccaggtttgacagagaggagcttaaggatttgtgggccactatagggaacaatctaccgctaaactcggcgcggtccaagagcaaccaaatccagaatcctgtgatccactactttcagagatcggttgccaatgtcttttactccagggagtctacaggcaccgtgtctaacacggacatggagatgatagattctacgcttacagggattctccgccggacgaacggaaagaatgtcttgagaggcgatctcaacaacgcaccaccagtaatgcctctgttgatccatctgtgtggatacaggaagtgggcattgacgaacgaaaagaagaaggtgagaggagcactatgcgtgggtggcgttgtgacgccaattctggaagcttgtggagtaccgctcaaggaaccagggttagcactgaggatgatggatttagatcatttacgcatatgtgagttcttggagcatgacatggctggcgactttcaccgctacaggtttgagcattggtcgatcaaaatggccaatattcttctcccctgcattgaagctattagaattctcgagggaaagaacattgacttcaagcctgcgcctgaagatatttattttgagggcagtccgccaactgaggagatcactcacgaggaaggagttacaacagaggaggttgatgagactgatgaaacagatgaagtggagtatgacaccagcacccatcattttagtgagcatgtacctcaaacgagggaaagcaagagtttgagtgaatctcacagaaacaacagcaagtt

SEQ ID NO: 1318 - DNA, 601 bp, Arabidopsis thaliana landsberg
tacgccgcttctttctaacaacctccaaatacaaggcttgctttccacaccctcaaccaattcttttgtctccaattcacattttgtaaccaactcctaagttttcttcttcaccaacttcatcttatcttcgagttcattgatctggaactgatttcacccaagaagactcttttgaattcgatcgtcgaaaccatttcagatacctcgtgttgtaacgtgatcaactccgccactttatccgacgaacttggtttgttctcatcgtaaaacgaacacaaagctggcttcaccactcttctggtgtttcacctctctcgtttacaacaaactgaacgtcatcaagcttcagtctcgttgaagcttggttataatcaatggcaagtttctgaatctactgaaactgtgatgcaagaattggaactaatccaactttagatcacttaatgatcaagcatttctaagcttgccatacggaaggtggggtgacgaaggtcgcttctctcgtgtgaatcaattcaagggaattgatggatagaggggtgattgactcgttaaccagtggaataatccctcactcgatcaatgaacgaataaagat

SEQ ID NO: 1319 - DNA, 566 bp, Arabidopsis thaliana landsberg
aatgaaaagtgcatttaacactgatcttttccattgaacttttttattcacaaccacgattaatgatttggacatgacatgattagtcaccaacacagatggttcatctgtaaactcaagaacatgtcaatgcaaaataagaaaggtcataagatctgttctttacgagaaatccataaaaacacacacagcaagagaccattataagcgaatatacttccatcaaatcaatgagaaacctaggattagaaaaataagattagcaagctcaacctcagataaaactaccttgctttgttttgagtctggagattctccttcacagcagagaacttcaaaagctgttcagggtgaagaagagagctgcagaaacaaaacccactactttgaatcgccgatcttattttgaaatcaccaagcagatccaagagatttcagatcattagaagagaagacgagaaatttcagagcggcgttaatcgttggctttagggtctggtgtttctgtgatttcttaaagatagtaagggtgtttaggtcattttctacattagtcgcagcttttg

SEQ ID NO: 1320 - DNA, 362 bp, Arabidopsis thaliana landsberg
gtctgactatgactgttagacgacacctgggtttagattttatcccgcttcttccttttgcatggggagcgtaccttcttcccaaagagtcccttcccaacaaacgcttccgctgcatcacacatatcaaaagaacttagatgaattatacatccttctctgacatatatcatgtttccttctttagtgttgcaaaacaagtcagtcacagatccggtagatcagtagtatacataccaacaaggagacggtcaggatctagtccatggttatgagtagcatttgcccgggcagcatgtataacctacattatgagaccaagttgtatgctaagtatcattagatgaggaaatgtttcaaat

SEQ ID NO: 1321 - DNA, 522 bp, Arabidopsis thaliana landsberg
gcctgcaggtctgcaggtcgactctagaggatcccctgaacaccttcggaagctatagaccctctgctatggcgccgaagaaagcttcagcgacgtggggctgcagcactgcaaccgctggaccccaaccagctcaatactttgctaggaagcctcctcagaccctggagaagctgctccaaaagatggacgagtacattcgtgctgacaatgactttcgccaaagaagggaggaggccttcagattttctgaaatgatcaggggcttcggaggaagatcctatccgaggcatgtcaggtccatccacaactctactcagaatgatgataaggggagtcagcagaacagaccgcagtgctcctcacaggcttcggggcaacaacaaactttcttccggccaccagctccaagaggcagaggcgccaggggcttcggcggaagattcggagatcaaccaaggaaactgttttgcttgttctgtggagaaagcaagggccatacacccagacgtgccatattac

SEQ ID NO: 1322 - DNA, 528 bp, Arabidopsis thaliana landsberg
cctattacttgacgttgttgctaaatggtggtatctacgcctttgatcaattgtgaatgtgtatgcctctaatttgcttgtcgcactggagagctgtcagaagaatcaaccttaaaggcatacacccgccatgaagtgaaacttgcggttgatggcgtgtatagctatcttaatcttgcaatcagacttggacttaaatactctgccaataaacagcttgtctccttcgtatttcacatcaaagaaagcagagaccacacctgaaacaaaatgaacatctttcagcaaatatatgtattatgctacttaaatagaaccagtatgtctaaacaaaatggtatacaagacataaactattttaacgaactagcaaattccaaattcttaaaacaaatcaacaaaacaattatatatgtatagccggattacaagttataccttcaccttttccatcattaaagaccggtggggcgtctcgaccgaatagattagaatcatcactaaaatcagagaggattgtgtttaaag

SEQ ID NO: 1323 - DNA, 567 bp, Arabidopsis thaliana landsberg
cctctttatctccggcggttttgggctgatttttttagattctgtctaaaactgctctaatgattcaattccttcacgagtttacggattctatgccgtgaatttgaaccctaggtttgcgaaagcaatcgcgagttttgcaatttcgttaaatttctgtctcaaagatgtaatctttttgatcatttagcttccattgctaccgtagcatcttattctttccctgaggttttgagttctctcattctatgtgtagcgttaacgagaacgaattaagattttttgaggtttttagggtttcttatttccagatacttttgctgggatcttacttgattccttttgcagttttttcttgtttaacttgaaatctcatgattgatacttggtttgagcagttatttgaaggggagggatcaaatggataacattgtggactcattgaacaaagcttatgagaagtttgttcttgcttcagctggtgttcttgagtctaaagagagtgcaggtggacaaaaagctttgctcactgatactgcgttggagaatttcaaggagaaatgggaa

SEQ ID NO: 1324 - DNA, 996 bp, Arabidopsis thaliana landsberg
aagtctgtgagtctctgatacatctccacttgcagtgtggaaagaaactcgattgtctttttcttataggcaacgtaagggtaagacatgactgtctccagatacctcgttccccagaagtcgttcatctcaaagaatctgatatactcctacactgtaacctcgtcgaatttgttcaacagcttcgtctccttgcgccatgactctggctcatactcagtctcgatatcctcatcaatcagctcatatatactcgacatcgctctctttcctctagcgatttcagctcttctctgattacgtcgagctgtggagcgttcaaattcatcgctgaaactctcgtaaacatgttcctctctctggtctagtggaccaggactcagcttcatccacattataatcaggatccatagaggattctccactatagttactcatgatgaaacctgaaaacagacaaaactcaaaaataaacgttaatatgttagtaacagcaaaccaaaaacacaaaccaatcaagtgaactggtcgagtgtaccaaaaaattttttttttttttttttttttcggtttagtggtgaggcggtgtgtcttggcgaggtcgagtggcgaatgtgagcttgaaaggcggatgtgctcttgccgtgaagtcgagtgaattgagtaaagcggtgaagttgttgatgatttaaaatcgagtacttggtgagaattggagtgagcgatgatgagagagatgcagtgaatcgagtgaagtggctatgaatgagaggtggtgaagtgggattgtggtcgagtgaagtatgggctggagagatgaagcggccgagtggtgcggcttggacggaggagaaggtggtgaagcggtcgagtgcgtttgttgaatcgagtgactcggttatgaagatggtggtgaaaagatcgagtgaagcctgtgagtatgaccatggtgattaggacctcgagtgatgtgaactcgcggaagaagagaagacg

SEQ ID NO: 1325 - DNA, 661 bp, Arabidopsis thaliana landsberg
  unsure (1)..(661): unsure at all n locations
cattgttttcttaatcttaaacttcacgttggaaaggaggtgcaagtttaatagagttttttctctccctctctccttgtaacaaagtgtcatgtcataaagagccgaggctaattccatttgctcacgttattagagcatctccaagagatactctatcccctcgaatataaagttttaggttctccaagagatactccaatacttcataatttagagtattgatttggaatatatcactattcaatactctaaatttgaagtttcatcttttttatttgcatttaagtccctaaaattatatgtttcataaaagtatttcacatatagcttataaatttaattgttacataatcaatatatgtggccgcatcaataactaattagtcgtatcagcccaccaatgagcttgaggagccaaagcgttttcacattcctctatttttcgtaatcaacacgattcccattgaaacctattaattgttgtatgtggttgcgttgatttaacttctaaaaacttcgaactcatagtgtgtaatcttcctttctttcttttttttttttttggctttaaattgttgtttgattttgttattaacaaacttnggcagttggttgtgaagagacttcatcaaagatcaatgggagagcaatatgaaaa

SEQ ID NO: 1326 - DNA, 892 bp, Arabidopsis thaliana landsberg
tttgggtttaagtttttgaaaaaactttcaccaatagtaggcggtcttcctagttcactttcctgaaatgttgaaaacaaaacaagtcaaattgttaagaacaagaaaattggtggtttcttaacaaagtttctcacctactaaagtaataataaaataaaaaataatattatttaatttgaagagtttcttaaaatagttggaaaagtctttcatgatctcttaaatgataaactctagcacatttttttaaaaaaactgtcttaattaaaaagtattatttattattttgctattatttttgttggtgagagactttgataagaaactaccattgtagatgctctaacattttataagtaaagaaaacaaatgttcatagtcaaaagaacttaccatctcttgctaggtttgtaagaacgactttgggtccgatacatgcttatgaggaccaagaccattatgattagacatttgagctgatgatgtgattgaactctttgttttggcttcttctgtgtcccaatagtcacacatttctccccacaatgtggtctcaatccacatattcttttcatacgcatttgacaaatcttatagaacttttggtcaatcacactattcagagacggatccaagtgtgagttttctaaaaaataatgagagttgatgttagttacacatttataaaaaacaaaaaagaagattgagaggagttagatttttaccgcgaattcgaggaagtatctttctcttctttcagatggcacacatcttcaactgtaatatggcccaacaaacttgtttgtaaaaacacttgtgatcttccgagttagcttacctttgttcttaccaaacctagaatcaaactagtgcttattaaaccacagta

SEQ ID NO: 1327 - DNA, 954 bp, Arabidopsis thaliana landsberg
  unsure (1)..(954): unsure at all n locations
tgaagaatgaagttattgagatcatcagcttatgtcaatatcggaaggatcatcggcgattctctctataagaacatagaacttgaaaaaattagggttttttctgtttggaagaagaaaaaggagcgtgcataaatttttgatttcttaatgaaagaagagatgacggttatctttcgactgatttcctttttttgttctttctgactaggttaacgttgtttccttttattcaattctgatgtaaaacaattgaaacgttattaagaaagtttaataacggtcatatttctcgtaataatttatcaaaaggtaaattatttatttgagtgactaaaccactttatgtatcatacaaaacttttgaaacagaggatatactctccaatggcgaggacagagctcaagctattattacaagtacctcacgctatgaagctttctaataagagttgcttgttccaaggcataagaaatctcaatgagctttgatgcgatgatcaagacgagaagaaagcttcattacaatcccttatctcttaccttcgggctttgaggccactagttgtcaaaaaccgccttcaggtatgaactcggacgcagttttcattgcctcgtccagtagatcataacccacccacaatagcatcaaggatagtaacagcatctaaaactgtccttcaaaacagagaagaaactaatgaaactatctgttgattctagaccggaaccattcttgaagcagtcctcgtaatttctttgattcgtaatagcgcagtgacataatacggcttcgaattgttttctcgatggcgatggcaagctggaggcatgtacgatagtgctggttgtatttcctctgattgcgttcgagccataagtacgaatatagtccatattgttacttgnaatgcaagccgaaggagaatgtatgtgttccctggccctcatatg

SEQ ID NO: 1328 - DNA, 608 bp, Arabidopsis thaliana landsberg
  unsure (1)..(608): unsure at all n locations
cacaaccctaattgaaaaagagcgtgtggctttgcatattatggttttgcatacgaacgtgtcgcgcaaattaggttggggaccattctatccatgacattgtgaacaattgttcgtttcaacaagttcataccgtccatgtactagtctactggattcaaaaacatataatctttgatggacaccttacttgtcatgttcttctcttttatttgaatcaaatcagatgagaactcttgaattaagaaatctgcaattttgttttttcaagctttgcattcaccttctctcacctgtttggatgatcaatagttataaatattggtatagtatattcgtttaagtaccttttaatatctatttaataataaacaaatgttcaatcataaaaggataatagatagggaattggacttgtttaggcacttctacanaactttattccttttgaggcacttctcacgtacaaggcacttttccttgcttttgaaaaataaatggacaattatattcccactcattctaaaccaaaaatttacttaaccggttagaaatgtttgttttgatttggtttccttttaataaatcgacagttgatatttacagat

SEQ ID NO: 1329 - DNA, 631 bp, Arabidopsis thaliana landsberg
cactcaacggtaacttagttgctgccagccacacattacgttcgatttcatgatttgttgccttgcctaacaaaaagaaaagtaaaaacttttacatacaaaaaattgacatgttaatagattcttgaaaactaattctcaccaatttgtctcaaacaaataaagattttaatcattgctttgtttttttgctaaatgattttaaccatgatttcctcttgctatcgaagcccacaaggcagggataaataagtttgaaatccctttgattctaccacaccacacaccatctactacgtccaaaatctcttttacatagttcactggattgctactttgattaaagtttggaagcatggagactcgtatttctggctgctggtcggaacttcctacagacattttgaggtctgtattcgatcgttcgaattatgtcgatttccacagaggctaaaaccatgtgtccgtattggtatttatgtttgaaacaaatattacctctataaatggaaaagtcaaacaatccatacacaaatgtcgagctagattctctaggcagtgctaaatttataattgtggcctttttaattattaaaaactcagttaacaaaatatcatccaaaatttggta

SEQ ID NO: 1330 - DNA, 1161 bp, Arabidopsis thaliana landsberg
agtaataatgagtgtaagaaagataggtaaaacaatgtcacctctctgtggtatgatatctaggcaccctttaataacttgatggacactgcagaagctcaagaaactattgacatggggattagtaaaaatattacccttgcagctgcttgggcaaatcggaggaggagaagacataaagccgatcatttagatacaataaaagaagctctacacctacaatggcaaaaaaacgaagtgagaaagatgactgctttatggcgcggggaaaacgatgtgtttagaccaaagttctccacaaaggatacttggaatcatattagaacaactgtaaacacagcctcgtggcaacaccaacaccaaaatttggacttttaacgggaggtcgtataatcaaatggcaaggaggagcaacacagacttgtatgctctgtcaaaactgtgttcaaactcgcaaccatctcttctttgcttgtgatttcagctcaaaaatttggaaagcacttacaacaggactactcaaagcacggtacacgacagattttaactcattcatagttacaacttacaagtatttgtgttaattgaaaaaatggaatctatagaacatagttacactaaggctagctccatgattagatcttgtattcaaaaacatattcatgtgagaacaagagaaacagtaaactaatctgatgtagacactaatgaaactcaaaagtttagctgagaatgatgtttggttgatatcacaacaagataaaaagcatagagataagtaacaaaattccttcctctattcatactaaattgcgtttacagatttcttccgtggatggtttggttgcgtaaagaaaagttcccttgcgcaatacttcacagaaaaggtggtcttctttcttcaatccattcctggcatatgcacatccatcttttgatacacgccaaacctcaagcaatagtccttcaccagttgtgcataatacaactcttacatcatttcacccatgatgcttgcttccttagtatacttcccgccacaacaatgatgcttgcttagaaaaaaaaatctgaacgctacttatttttggtatagccagactatactgatatatctaaagacatgactaatctactcaacgcataataagacattatgca

SEQ ID NO: 1331 - DNA, 2435 bp, Arabidopsis thaliana landsberg
gatttcaggttggtttggaccaagaatctttatctccaacatgatattctcctctttcatacacgggtcatgtggcatgttgtagttgagtagcaaaacaggccatgcactatagttaacattcgtcatgttgaaaggcttaaccgcatatgtggagagtccaagcctaatattcctttcttctgcagcaaatgagtgatacttctgattcatttgatcccatgtcacagaatctaccggatgacacatttttccaccggtgctcttgttagtgaaatgccactgtaagtctttggtcatgtcctctgatatgaacatcctcttgagactaagaatgatcagaaagtacctaagtagtttctatggattacctttcttcacctcaccagttcgcgtgttaatcttccatcgtgaagaattgcatttaggacaagtgtcaagctcctgaaactgatttctgaataaacagcagtcatttacacatgcatgtatcttttcataacccatatcaaaagttttaaaaaacttcttcacctcgtacaaggatatgtgcaagacattacccttgggtagcatatttgacaaggactcaagtagaccaaccaccctgagtctttagcctaaagagtgaaacaatagtagagattactgttgtttgtgcaatctggataaagaggttgatatacctcaaattgccttaagcttactccctcaattaagagatcgtcgttagcacttaagggtcgaattccactgagctctcgatgttcacacaatagacttatgatgttgtttaataagctaaataaagtaattgaatattaaaggcaaataagaaagtaaatgagttgtagattcaagtgattaaggcgtcaggtctaaggaattgtctcgggatatagataaattgtagatctagctaatatcaggattgttattgcaccgttctcaaactcaaactataattctagagtaaccggtggcgttccgcgaaactctcgatacttacaactaagataaccggagaagccgagagatcttatgctaaagcatgcattattaataagcttgattagttcacctagtatctaaaccagagcccttctatgagcctacctattctttcttagatgcctaggctcatctatgatggttcaagtaacaaatacctatggcgggaatacctattatctaatatcaagttctaggtgatcaatctaaaactagcattaagaataatcaagatgaagaactctaagaataatcctaaggggtttacgatctactaatccatctaaatccctattgagattccctagacccaacaaggtgattactcagacatgacaatagaaacacaaatcataatctgaatagttttcattgatgaattaagaataatagcaaaggagttcagaatcctctctttagggattggattctttttctctaaagtctaacaaaagctcaagaacaaaaactaggtctaacaatgaccaaacaattaggtatttaactctaaaaacgtgcagggactattttgccaataaggaaaacttcagggcttcttaaagacttggtgtaaaacgaatattctcctggcagcgacgagggtgtcgatcgacataggtgtggtgtcgatcggcaccagcttctaaaaaacgtccttcaagatctttcttgctgaaaagcttccatagtcccttattgtgctccatagttccctgatgtgtgagtgtacctggaatgactcaaaacgtacgaaaaagactagaaagactctaaaaaccattctgaaactgtgttagaaatcattaaaaaccgggacatatcaatggtttactcaacccaacttttgattagctcctttactgcatacatgcattgacattcatggggacttttagattgaaagtctaggttaacggtttctatggctttttttgatcgtttacactattatttctagttgagtttaatcttaatgcatgtatgtccagaacgccacctagtacatgatcttaggtattttatacttggtagaatcttgtataattgcctgaactagctcatctgaataaagaactataactcttgcacgcccgccgagtgagagggacttatggactagaatcaaatttgaatttaatgctttgatcttgtattttgaaaccatgttagcacctactaaccgttagggcaactgagtacgcaagatattagtgagtatagctggttttcacctactagccgttagggttagctggtcttgatagagtttcgtatgtctgagaatttggaagtaaacaaacctagccattttatcacctagattgagatctataccttatataatgaaccatgacatctggagaaacctccaaagacctaacgcttctctcttatttcttactgttgactttagatacttgtct

SEQ ID NO: 1332 - DNA, 3622 bp, Arabidopsis thaliana landsberg
  unsure (1)..(3622): unsure at all n locations
tctagaggatccccccttaaagtcattgcctttagtgaaaacactcaagagatgttgggtttgattccacatacagtaccaagtatggagcagcgtgaagctttgactataggaactgatgtgaaatcattgtttctgtctccaggttgttctgctttgcagaaagctgttgactttggtgagattagtattttgaatcctatcacgcttcattgtaggtcttcaagtaagcctttttatgcgattctgcatcggattgaggaaggtcttgttattgatttggagcctgtgagtccggatgaggtgcctgtgactgctgccggggctttaagatcgtataagcttgcggctgaatcgatttcaagattgcaggcaatgcctagtgtgaatatattgttgatgtgtgatgctttggttaaggaagttactgaattaaccggttatgataaggtgatgatgtagaagttccatgaagacgggaatggggaagtgactgctgaatgctgcagggacgacttggaaccttatttcaggttgcattactcggcaaacttcaagaactgtgctaatctttgcccaagatttacatgtaaatggtactgattgagtgttaaaaggaagaagcttcatacatgcaatatacattgatcgtagagtaggttccgagttccaaaacaaagtgaactatactgagtatttcaacatagaaaaattataaaattgacatcctttgcaaagtaaaagccatatcataacaaaaaaatcggaacatttaaccggaaacagagacaacccacaaaagaagaagaagaatgctaaaattgagaagcactggagttggtcgaaggggaccaaatggaatgggaatatgtcttggagaaattgcacacagtagtcgttgacccacttttaatttcagattttgacactatgggctgggcctttcagttattaaccattaagccaaaaactgaccaaaatgcccctgacgaaactgaacccggtttgtacgtatgaaccgcgtcgttggaatccaaaagaaccaggttcgtacgtacactgttcatcgacgagaaatgcattaaatgatttctgggtttcggcgaagttgacatttgagattggaattcaaaaattttaaaattcgttgggctcagaagtttttaatgctaaaaagttttgacaagactaaaacttatgattacctattataatagagattatattgtaagaaatttagataatttagattagaattctggggaaaaaacgtaaatcgaaattgtgttaaggtgaagaaacgaaaattgaatttgtgttacggtgaagaatctgaagttttcagttgctgttttacaaagtttgaaggattgaaggggagacaatctgtgttctgggtaagaaattcgtgttaatcctaattacacttgagaacgtgatttgaatgatacgtttttaaaaaattctgggttcatacattgttttgttggagattttatttgtatttgtagatataaatgaaagctctatgttttgttttgttaaatttataagtacataaattgttttgttagagattctttttgttttcgttgacataaatgaaagctttcaaaaagatctgatttttttctatttaatgttggtctgacctgaggaatttatgttgcaggtatggagttacctgtattaattatggttggtgagtggatatacaaagaagaatgtttgaaatatgaagctgagaaaaggaagtttcggacgttctgtacgtattacagacacaacgatgtacacggatttggcaagtacaatatgtgatgttttcagtttcaagtttatgaatggaaccctataataagttactggatgcctggaaagatgtctgatatgatagcaagtaatcgccctctagtatatattgagaatcaaatcagcctggatacatttatgttgattcgtaatggcgatccttctgttaacttgtttatgtctttttactctatcggcaagggaggccatacagagacagaggttacaaatgttgatgtatctcataatttttacgaagatataaatgtagatgtggatgacacagatgaaggtgatgaggatgaatatgaggacgaggataatgaagaggacgaagatatgaatgtacatgacgatgacaccgatagtgaatgtcgtggaagtaccctcgaccctactattgatggnagtgaaagtagttgcgaagattacgattacaacaagtggaacgatgtacttgtggaagaatatggaatagggaatgttgaggagaacgtcgtgaataacactcaacaaaccgtggaacccacagggggattcactcatctattggcatcgtgtacgtcgacgggtacacatgtacctcatgtagaacccactggtgttttggttgacagtacaccaacctcagctccatccccgacgtgtcaacatggtttgtaccaatgtaagtacactagagtctgtgcagaggagacaagatgctaaggtgaattagatgagcacacgctgtagatacactatgtagaacgtaactagagatgatggtatagatcgacctagaaggggtgtctacaagtgggttaagtatagaatctgacgaccgtctagcgacaacaggtgaagcctacgaagtgtataaagggttttctacattgtataccttcacgcagcatacgaccacctgggagaccacccaccaaaaggataccatctactggggaaaaccgggtaagattttcccccatcctcacttctatgcaatttttccttccttttaggcgccttaccattttttaactttcagaaaaagaggcagaaaaaactcattcctaatcagtgtagaagatgtcggaaaacggggcataacaagaagacatgcaaaaaccctatttaggcctcgcgatggttagagtttacctctccgtgcttttggaagctgttctacgtacgtttttggaaatcttttgatcagtctatgtagtaatattacatattattttgtctgtacgttaccttatgtacgtacgtttgtggacctcgtattatcgggtgtatttgattatccttcaactttttgtcaatcccgttgttttctgtacgtacttttgttaaacgttttcatttgtacgtacactgggtacatctaattatacagagttgacggttacatttttttgctataccgttacatcgatttgggaccaatcatcgcgtctttctaaaatctatttaagaaacttgtgataacacccttaattcattcaaacaaacgtccaatcccatcacacacataagacagaaagttggttattctggtttttgttgttgtcatcatggatgatggatatcatgccatttccgaactttgtcccatgatcaccggatggagtatacgcgcttttgtggtcagggtgtttcaaaaatgtgtgggaataaatgagttcgacctgggtctcatcttggcagataatcgattaatatttcgccaatgtccttataacgtttttactttcacataccgtacatgtcactaatcatgatgatttgttgtagggaatgcgttcccgcatagaggctaccaataatc

SEQ ID NO: 1333 - DNA, 653 bp, Arabidopsis thaliana landsberg
gtataacgatgggtaaagcaacaataccgaaaaaattaaaggcacaatcaagatacagaacatcatcagctttatcctactcatgtatacaagcaaaaaattatccgactgattccataagcaaaattgttgacattaaaagtataacaaaattctctgactaatgtctaccgatgcagcttattgttaattcccaaatctaagcttaactctgttagcatataaatcctgatttagtaatgacatattgatactttgttacttttcatcaaacaatctaatactgaactagatgaaaatacagcattgatataactgaaagatggttattgacagtgataaactgacctaaattataccctaaactgacacacaattctaaagcatatcagtttctaaatacacaatagatacaaaactcatgaatcagctcatacccatgaatctcgacaaatacaaaaacccatgaaaattatagcttataagcatcataaactcaatacaaaacccatgaatcttactttgtccaaaacgagctaaaataaataatcgaatccatctaatgactcaaggacaaatcaaacccgtgagtcttactgcaagagatagagaggtagaaggggagagtgaaacatattgaaatcaaatccatg

SEQ ID NO: 1334 - DNA, 533 bp, Arabidopsis thaliana landsberg
  unsure (1)..(533): unsure at all n locations
aatccgacatttgaatctgaatttgaatctgaatttgaatctgaatttttatttgaattcaaatcagtatctgaatcaacagcggtcattcatgaatccgatggtggaacaacatatgaatcatgttggagggcgtgaaannnnnnnnnnnnnnnnnnnnnnnnnnnnnaactacaatcaactaccagtcgttgatcttgcttccaccagttacatgccttcaaccaccggtgtttatgatccttacatcaataacaatctctaatcacaaaagacggagattttctagtctaagtgttcagttgtttgaatttgtgttttcttcatttcgaaagacaaaaactaatgttgtttattaataatggttgtaatggttaaagggtctctttttaacttaattatttattttgattattaaagaatgtttgcccaaaaaaaaaagattattgtgggaaactctaactgtggaatttatttcgaaaatttaatgtgtgattggtacaatatttagacgaaagttttcatttgaattc

SEQ ID NO: 1335 - DNA, 578 bp, Arabidopsis thaliana landsberg
  unsure (1)..(578): unsure at all n locations
tgttctttaaacgatgtgatactatgattatatttttgattgttttgtttcaaatggatggcttgattcgcgttatgggatgattacattatgtatgctcatccattcaaattttttctgaatagttctcataatgaaaaacgttattaattaggtcgcagcctcaaactcaaatgtacacaaacgtacaagacttgggtgagaaagacgctaattctggacttttgatctaaaaaaacgttataggagtggtccacgatcatttcatctagacatggacattgacgggccagctaagaactccgttaagattcatctagagaagcagagacttccacctggaaaatcaaggagaaagagttacttgaaggtcaagaaatatgtagcctgcaggactgataaagatgctcagataaagttgagcctgtacgacccttacgagttccatcttgtgaaccctaaccggcagtcttagttaaggaacttggncggttacaagctcttacctagtggtaatgcttgaagtttactcgataatgatgatcccgcacatattataggggctttcacaaacaatc

SEQ ID NO: 1336 - DNA, 751 bp, Arabidopsis thaliana landsberg
agcagttcaaaaacacatatcatcaagctcctgtttggtaaagctatcttcaaaggaaattccagctgcttgttacacattgccctgatcgtttagaactgaaggcatgacagtgtgaaagactagccactgaacattgagctgatctatcaacgatctgagtggttgtgacagtttctttctaagttctgaacaaccgataggcacaaagcactgaacagagtacaaggaagaggtatgctttgaaaatgtttggaaagctactaccggcatgtatcaattatctttttgggtcactaaactgtttcaggatatgactgttgaaatcatctcatctctgctatttgcaatcctgtgctaactaaaaaaatttgattgacgggtttcttggcaaatgagctcttatgcgtttgttaagtgttttagagtaatacaatttttaggtccaagcccagttcgagtttcaaaatcccataaggattcaagaagtttttgctcgggtattggagggaaaaagaggagttagggtttgaggagtcaaatcaagtctcgaagatttaggaaagaataagcttggaaacaaggaagattctttaaaacgagattctcggagatcctaggtttagggttctggagagtaggtataagtattctagaacttagcgtgagttgctttaaacactctagaatactgtcatacgattgtaaacttcagagcattacaaaagcttgaaggtgagtgtgtagttcg

SEQ ID NO: 1337 - DNA, 2756 bp, Arabidopsis thaliana landsberg
aggaagtttggacagtcacatggtaactttagtggcaactgattacagggaactagagttctttaggtttcatctcttaacctgccttccagaagtcctatcctcagagcaactttactaggacttatggtaattctttttaccaaattcctcctccaccctctagtgagagtaagatggaatccatgcttgaacagattctagagggacagtccaagttggttgtgggcttcaatggaaagtttaacgctatctacacagatcttaatgggaagatcgacaatctgagctctcacatgaagaagctagatgttcaggtggctcaaactactcagtctatcaagagacaagagggtttccttcctggcacccatgatactaatccaaggaagagctgtaacgcgatcatggtcagatctgaagaagaaagcatgaaaagggacgtgttggagctcgctgttgtagagttggtgtcgaccgacacacatcagtgtcgatcaacacaaggcaatccgatctgggacgaatcaaatgacaagacaatgtcaaacaggaacagaaaggatcgttcatcactcgacggtgtcgaccgacactcatctagtgtggatcgaacttaaaaacccttctggattcgcttggcccctacgcggttttcgctggctaatgtggagattcgatcataccaacgtccaaatgacgttcaaatggatgtctgatctacgaatttccagagatatgtagactcgaccaagatattgggcttgtctgcttattggctttggtagattgtttcttaaaccctgctctgctatgtttcatcaacgacagttgagattaggaagtggtagagttgtgggggtctctgtcacgagagtggattgacccagtttgtgaatttatcgtcatgggtatctacctttcgcctattagccatttgatgaaccctagagttgcccttatcaataaatccatccgtagaacttctattagattgatttgtatcccttgttgattgcacttttatttacctgttatttgtatcctctattttcatcccctgttgattgcattttagttcctaattttgtcacttgttggatctactcgacctaatgaccgattagggttgttaagttctcatttttacttgtctgaatcttgacctaggattgttactagaaacccaccatcattataatctcgcgagacttagttgtttttatacacatcttgattgctagcaatacagtggactggattgacaccctctataactgcatcgacatgtttgtgttttaaaggaattgaactgcactgaacaacagcattcatcatataagtaggcgtgaaaacctgcttatcatctatctcttgagtttactgcctggattgcttaggtactgcagattcaaatcaatctgactaatggaaaatccataaagtcaaccgacaaacttaaggacatccattcccaatataatccacagaggctggagctaaatctcactgctcttccttttacctcatcaaaacggttagtgtttgtgggatttgactccttgttcatacctgataagtcgactaatgtgataaaaagaaagtatttttctccccttataaaaataaaaataaaaatatgtgagattgataggcttttcggatagtgtataggggtaagaatgtttcctatgaccccattattatactttatttggaatgatcaattacaaaggttggaaaaatgcctagggtgtcaattcagtatccgagttcccttttgtttactgtcttaaaagaataagtgtgggaacagaaagaataccaaaaaaaaaaagagaatgaatggtcgattgatcatactgtattttactcattttaggtatatgtttatcatcatttagttgtgcatttgctcattatatcatatcattttgcccattttagcttattttgcatacttagccatctacgatcatcttgcatacgcattgcacgttttggtgtgttttcaggtgtagaaggagctaaaaagaactttactcaatccattcactcgatccaggcagctacagaagaggcatcattctactcgacctccttactcgatccaggcagctacagaggaggctgcagtttactcgaccctcttactcgatcaaggcaacctcagatgaagcagcatattgatctactcgcccctcctacttgatccactactcgatctatttactcgaccaagggtgaccatctctacaacacttgttgagctatcaaagcatcttcggatacttgataataggtttttaaatcaattaatcctaaagcactatcatgtcgttgtagtacttagggtgtcaatccaaatgggtgtgatgcaaacagatgagatgtgatcagaagacactaagtcaatccaagcaataaaagttttggggtttctaatagtcctaagcgaacatgcagaaaataagaaacaataacaaaattactaaaatcactcgacctcaacaggctgatgccacaagtaggatgtggtcgagtaatagacaggatatgaaccagctatactcgactgcacagtctgttgccagacactgggtgtggtcgagtatactggtcgagcagcggacaggaaacgagacaactgtactcgactgcacagtctgttgccagacactggaagaggtcaagtaagttggtctagtaattgcaaaacgaagaaacaggcaagtgagaacgattaaacaataacg

SEQ ID NO: 1338 - DNA, 1062 bp, Arabidopsis thaliana landsberg
cgcaagatttataagacattttaaaggatttgtaaagccttgcaaacgaattaacaagagtttacatggtttgttatcggtttttaaggataataaagtggtaaagcatgatttacaagcgattttaaaagcttttacaaggggtttacttgattaacaatcgtttaagaagaataagttaatgtcagaaaatgatttataagggattttaaaagcttgtaaaagtgtttaacttgattcacaattgttaaaagtatatgtaagtggtataacgaaatatttacaaggtgttttaaaaggattttcaaagacgttttaaacaggcttttacaaaatattttaaaaagataaattattggaattactattaaaattacttgtaaagtttgatagtaattttagtaaacgacttacaagatattttaaaagattcaagttaaaagcttgtaaaaatgtttaacttgatttacaatcgtttaaagtatatgtaagtcgcataacgaaagacttacaaggtattttaaaagaatttaaacagactttttatacaggattttacaagagattttaaaaagtaaaatattggaataaccttcaaaattacttgtaaaagtttgatagtaattttaacaaacgagagtaataacacaacacaatgaagaaaatattaaaaaactcaacaatattcaattctctggagataaagatatatctaaattgcagcaacacaagttgatttgttgtgacccgactgaccacacctactgaagaccttccatgctcccaaacagaaggtatcctctttttcttccgtctgccactaggtacacgagtagaaggtgggagacaaataacttcactaatagtttctggaatctcccaatattccatatcaccatttgggtgaatgctctctgaatatgcttgacgccacctgtaaattacagcgatgtaaactgagattaaaaccacataaacacagataaaaccataaaaagagatattaaaacatttaaaaacgcctgtaaagttgtgaagaatagagataaaacctgtaagtag

SEQ ID NO: 1339 - DNA, 887 bp, Arabidopsis thaliana landsberg
tttctttcaaaacgaattgaactcaattgggacaaactttcctcctctatcttttctgaagctttgaatcttttctcctgactctccttctaccatagctttaaaattcttgaacttgcagaaagcatctcctttctctttcaataagatcgtccatatatagcgagtataatcatcattgagaacaaaaatgtacctatttccggcgcttgtacttggtgttatggggccgcatacatctccgtgtataagttcaaccatctttgttgcttgataggtagttgcttgtggaaacatttgtcgagtttgttttccgagtaaacacgagctgcaaagtgtacatgccaagcgagtgtcactaaaatggaaagaataaatttattagtaaaaagtacaaatataataaacaatgaatatgaatatagattgtttgtattgctgatctctcaaatggaaatcgattcttttggtgggcttgttgttagcgtcaagatcttggatttcagaccgatcgacaacctgaaccattacatctgtttagacaaagagaatcactatgtaagatatttataagaatcagtggttaggtcaaaaaaacatgcgcaaaagatattatccttggaattcaagtttattcgatatcaagaatctgatgattataggaaaatatttatcatttccgtaaaagtaggtatgaatatagggaatacttggaaaaatgtaagataagtgcaaaagagaatcgaaacgaaatattagatgtgttagaattatggagaaatgtaaaataattccaaaagaagattgcaaagaaaaattagatgagctataattatggagaaaatgtaagataattccaaaagaagatccaaacgaaatatatatcg

SEQ ID NO: 1340 - DNA, 616 bp, Arabidopsis thaliana landsberg
caactgaaacagtctttaatccatgcaaagtctgaaacaggtttttggtgcagctacagcttttgcgagacattttcccgacgcatcagaaagagttaagaatcaggaaacaatgactctgtcggagcaacttcagaggataatggaagatacatacgacgtccgatctagctagaactttatagagtgattgttgacgcttctagataatgatttaccggtgggatcaagaaatcaaggatgaagaataaagttatcaatgcatctccgaatcagccaaaagaagaaaaaatcaccttgtcacaacaacttcatgaaaacgtggaagctttatacaatatccgatctgactaaaatttggagaaaaccttcacggaattagcagctagatactcaatggtgggatcgaaaacttaacggttgaaacgatagttatcagttcttatacgaatcatcaaaagaggtacattacaccaataagtggcaatggaacatcactaccaatcgctcaaggattccaatcatttatcaatgaagaaatctcaaattccgtctccgcctcataaaagataagttcaactactttcttacatattaattaagcttgattgacata

SEQ ID NO: 1341 - DNA, 1537 bp, Arabidopsis thaliana landsberg
atgcatattgtggttgtgcggaattagtaaaggacacccaggccctttacttcattggaggtgatctcatagtaactactccttatcatataagagattgtatatgtgaacacataccacgatttcaatttttataaaataatatttatcaatgacactttaatagtaatagtagattttttgttgagctagtagtaaacttcaaacgtttctacatattataaaatcgttaaacacattttactaagtgattatagttgaacgagctgaacctgttgtactaggcttacagatttcgggaattacaaaggaaacatagaaagacttgttattagttaaaataataaagtcagattacaaattccttcgtttatacgaataatacaaagtacccaaaaactaaaatactacattataaatttcatcaacttccaaatttccagattaccaaacaccttcgacacgaggccatgactcacaagcttcggtttagaatgaccgctcacacgccagcaaacgagtacagccacaattccccgagtacaaagactccgaaagtgagcttgaaagtccaaagcttgttgattgtgtgcttcacaataaaaaactttattgttgcaattcatagaaattatttacttgatcagaaattgtgaacgtccctatatgaagcgggtctgattaaccatttgaactatagcacttgagccatcagaatagagcgagtgacccatgtcctctatagcaatttgaaccatttgaagtagagtaggtgcaccatgtgaactatagcaatttgaaccatttgaactagagtaggtgaacatgtgaactaaagcatttgaaccatttgaactagaataggtgcaccatgtgaactaaaataggtgaaccgtttaaactatatcatttgaaccatttgaactaatcccaaaatagaaaccaagtttcattataataagttaagatggaggcacttactgttgattcattatcttgaaagaaaacttcacaccctcgatgccttcggtcaatcggctctaccaaataatcgcacctaccgcatcttgtgtataataatagaagtaagtattcgtacaatttctcaaagaaaatactataaaattgtcaaaataactcaccgaccaacacattcttgtaaaccgtcttctctatgatattgtcgaaaggagtaaaattccaaaacaagagtgcatccgttttcaaagctttagtaacaatagtttgttccataaaccatatctggtagtcatgggatgttgctctcacagactcagcgtcgtttcggaccgagaaattagtgataattatccactcatactcatattctcgtattcgatcaaagtaaaatgacgcaagacgatgaggaatggtagccttgattcgggaacggggaccctacaccaaataattttaactatatacatgcaagttatgtgaaagaaacaaaattaaacatattcgcaatatataaccgtttgatctgccaatatgacgcccagttcgaactcattcg

SEQ ID NO: 1342 - DNA, 1793 bp, Arabidopsis thaliana landsberg
cagccataaccaaaatcgaaattacagaatcaaaagagttgagataaaacagatatctatagatcgttatttcacatctacataaatggtaattacctaatgaactaactaaaaccgtaattaactatgagatcgtgcttaatcaagctgtgagaactaactaaaacatgggcattccattgcttcttcgcttaagtattcacttatgtcgatcaataactcgtcgtcttcgttggttgaggaatgatcttgaagaggaacctcaagattgttgtcgtccttaaaaagaccaaacacgtcgtcgacatctaggttttcccaaaagctctgatcctcctcagagaacatcggttgtgtttgtgtttcttggggtacaatcattctgttcttctcctcctctgtttcacataagcagtcaacaaatccagcatcttcattcaccaagtaacgaaattgatcagatgatgactcgctgccaacagagaaaatagggttttgatcaaaacaagtagtaacttgtgacgaaggctcaagcgaggagtaagagtggtgatcaaaaaacggagaagaggtactagggttttgaccaaaatcagaagcaatttgagaagaagaagaagaagaagaagaagaagaagacccaccgttgttcttagggttttgatcagatttagaaacagagtatgatttttctttcttctcaagacaatccatgagatgcttcttcgttctcatcagacgatcttcgatgattcttaactcagacagatcgtcacaatcaccgtaaagatcgggctcttcccaccaaaacttggctgattcagggttaatagtagtcttgggaggagacttgttgttgaggtaacagtcaacaatttcagaggcatgagagtagcccgagaatgaataaacgacatcggagttctcgtcaggagaagttacaaaaacggctatgttggctccggagagaaggcaaagatcagccgctttggagaagagtgtgggacggcgtttgctgcaagcgacggatcgttgttgtttagtcatgcgtttctcaatttcaatctttctttttgttcctcttttcctcattgtgcaatcagttacgttcgacgactgcattattagggtttgttttgtgtcttacagagagagataatggaatcgagagaaaaagagagagtgaaaagagagtagaggcaaagcacaaatatatagagattagataatactaatgtcggtattatcatgtgactcggtcaaacttaatttttttaatttttaccaaacaaacattttcattaagatcatcaagattattgcatctaatcacaactgttatcatcaaatatcaacacaaacactataaattcagaatcagattatgcatgagagaagagaaaagaagaagaaaaacaggatcgtacttggagagtaatacaacacaagcacccacatcctccttaaccaaaacaacaacaacaatatcagacaaacaaccataatcagtaagaagaaaagatcaaacacaaaaaaaaagctccaacaaagttgttgaagggtcagcagaggagagctcaagctcgaaccaaagtgtttgatgtaatgaagcagagaaggaagatgctgatggaaggatcaatgcatgagaaggtgctagcattaaaggcagacaacaacaaaaaaaatctagccctcataaaaagtttgcttctggatgcaaaaataaagatgaaacaagaaaagcatataagcataaggttctgaagtcatgtgatgagtcagacattctc

SEQ ID NO: 1343 - DNA, 781 bp, Arabidopsis thaliana landsberg
  unsure (1)..(781): unsure at all n locations
actaacatgtcgatgcagctataaggatgtcaatccagtccactgttattgctagcaatcaagatgtgtacaaaagcaactaagtaaagcctgattatagttatggtgggtttctagaatcnnnnnnnnnnnnnnnnnnnnnnttgcatccatttgaacgtcttttggacgctggataccctatgtcaaattccaacattagccagtgaaataagcattagggccaacgaatccagaagggatctaacctactccttaccacctgactaacctagagattaccctaatctaatccatcctcaagaaccctaatcactactcaagcaaaataatcaagaacacaaacctagaaattactaaaaacatatcaaattgtagatctaaacaagataaacaactttgcccaaagaactaaatgcaaaaacaaaatagaatattagtaattaaggtttcaagattctaaaacataaagaaaaactaaaagataaaaacttggtcctctagacaagagacttgaggcggttggatggatgctcgatcttggggatcgagtaaagagggtgctgcaaagtctgcgcctttacctccatgcttcgagtgataaattggtcgagtagatgtttcttcctctcctcttcttatgctcagatgtctggttgagtggggaatgaggaggatccgaagacgctntgaacgatcagcangtcttgtagaatgggttgcccttgatcgagtaactagtcgagtaggggatcgagtagagggtcaagaaatgtctact

SEQ ID NO: 1344 - DNA, 566 bp, Arabidopsis thaliana landsberg
  unsure (1)..(566): unsure at all n locations
ccctgcaagctctttcgatatttgatggtattaattaacgcatctagtagattgttacatgtatgtcttttgactacacgaaacatggtttttgcaagattcattgcccaaataatcaggttaaagatacaatttcttgattatgccataaaaaaagccaaacttgatattgttgggaaatttacttcgcaagcctttaatgattattgtgtatcgatgggaatcgatatagagcgtccggtccctcatgttcatacacaaaatgacatggccgaattattaattaaacggttgcaacttattgctacaccgttaacattgagaacaaaactctcaatttctatatgaggtcatatgctatattacatgctgcagctntattcatactactagattataacccgcggtacaccgcgggactattgtttttcagtgaaattaaatattattttgttatttttgttttaataatactttaatttaaaaaatatataattcaaatcaatttaaaagttttctttncaatggttatctaattnttataagttcatatgatataatattat

SEQ ID NO: 1345 - DNA, 352 bp, Arabidopsis thaliana landsberg
  unsure (1)..(352): unsure at all n locations
acctatatcaggtctcgaacttattctccttcaaatcggttcaacatcatgacatctaatctagccgaatctgctaatgccttgttgaaacagaaccgcgagtatacgattgtttgtctatttgagtcaatcaaatctattatgacaagattgtttgtctatttgagctattctactcacagggtttatctctattcttcacaactttacatgtgtttttaaagggtttaataccctattgnnnnnnnnnnnnnnnnnnnnnnnnaatcttcgtttacatagctgttatttacaagcggtgtcacgcatattcagagagcattcccttaatggtgaaatgaaaaattgggag

SEQ ID NO: 1346 - DNA, 2956 bp, Arabidopsis thaliana landsberg
gccaatcttgcacgtttatgtgctgccatttgggggtttaaaaagaagagctgccatctccatgcaatcctcaaggttcactttcatgttgatgattcggagaagaaataaagaggaggtctcggttacatcactttcaaggttaaaggtgtcaagtatgccctagatatcagccaccttgatactattttcgggtttccaagcggagagggaatccgccaagactatgaccaagacgagctactctctctttgtgcaaaaatcgccgtccaaagccctactcgcccaccaagagaaagagtcattcgattcaaagtctcgtgataaggtacctccaccaatgcatcgccaacactctctttccaaattagactaccgaatttgttggtgaaggagagctatgcattatcgatcaagctttagtcttcattctgagagagaccaaggatggaacgaagatggcgggtgacagagcagacacttcgctgactgttgttcttttagaccacgtaatgagctatagagagtatgctacaaccatccatcgatcggggattcggggaagtttttgtgttggtggtctcttaacaccaatcctagtagctggcggggatacacttgggaacccttgatgtgcaccccaagtacctcgacctcgattatctcaggggaaaggattatcttgacaagaagactccgtcggatcactacatcttcaagttcaaccatccggagtttggaccttctttgttacccttaccttgctagaaccgaacatcagttaggacaaggcgcaacagtaacttcatgccatctcccttagccctgaacattgatattggaggagctagagaagaggaacaagagtatactcaagctgactatgagcaccaagagtattatcctactgagtttgagcaacaagtcaaattcgagcaacatagcgaacaacctgagaaagagaccaacgagtttgagcaagctcactctgacccaggtcctgatcaaggtagagatgagtttgctgaagttcacaagaagctcggtgtacttgaagagcttgggaaccttcacagcaagacaatgaagggtttagagaagaagatgagaacaatgaagaagtcgctcaagagtatggctgctcaactcaaggacttccagagcaacccaaggccaccatctccaaccgccgaagtaagaaggagcggttcaacgagctcagctgcaaggagagctgaaaggatcgtcaagcccgagcttcatcttttgagcctcgggaagtgatctccgagttgagagagccaaggagcaggcagagacgagcttccacacgctcgatcggacagaacgagcaacaccctcccgcctcaacttcagcccctgcctatacccaagagagtatggatgactatgtctccatctacttcacctgaaaactgaggtaacaccacctctccattgtatataccatagcatctttttatttttctttgtgtgttttgtgttttgtgctttggtcttgaatgctctttcagatttttattacacaagggactgtgtaatttaagtttggggagggttcaagacatgtttaacattgtgttctcttttcttatttcaaattttgcatcatctagggcatagaaaaaaccataaaaatttgaaattttttcagaaaatgatttcatcaaaaacagagtgtcatgtagattgcatatcattttaggattgtatatagtgtgcttgcatttaggattgctcatttgcatatgggataatgatgatttcaaaccgataagcatgttttgattatgaagtaagttcaatgcccaggttgttagttctctgttgcataaccgattgtatctctaaagtaagactgcaccctgctttgaatttgtaacttgactatacttctttgattcaaactcgcttatctgatgccattccctatctattagaacatgaactgaatttgcaattatcatgtttatgcattgtttgtgaactcatggctaccatatacatacttggatcatcttattcatttcatcaccctctgttaatccaagtagctatctctcatttttagagcagtttccatacccttagcctagccttatttcaagccaaagatcattggtgtgtaattgtgaggtcttttttgattgagtttggtataacttgttaggtatgagccgacaagagcagcctttcatgtagacctagcccacgctttctgggttagctaggactaggtggagacttgtatttgggattgggattgtgtatggaatgattgaaaaagacaatgagaatgaaaagaaaagaaaaaaaaagtgagtaagagtttagagttcttaagggggatacaaaaagtgttagtctagtaaagggtttggaactcaaagaagttaggcattctgattcaaagaaaagggtaaaacgccctatgtgctaagattagaagaaaagccttaagtttgtcaaagtataaaaccaaatccgctagactcttaaattgtttcaaagagaaccccttagggtttcaacattgtactataaatagatcactttggggtttgtccaaaggatctatgctttatctttcagtttttctttgtgtttatgaatcttaaaactttaattacttttaatctatttcgtttttgcatttgattgtttaagaaaagttgtttagcttgtttagatctacattttggtatgatttcagtaatttatgggtttgtgttcttgagaatgttgcttgagtagcgattagggttcttgaagatggattagataagggtaatctctaggttagttaggtggttagtgcttaggtttatacctttctggattcgcttggcccctatgcggttttcgctggctaatgcggagatttgatcatagaccgttcagcgtcccaaagacgttcaaatggatgtctgatcta

SEQ ID NO: 1347 - DNA, 2223 bp, Arabidopsis thaliana landsberg
gattacttggggagcttgggctacctacaacagacattagttccccatcccataatcataacacaaaacacgcaatagacaataactacaaaaggcagcttaccgaagcatctagcaaaaacatgcaaatgcaattaagactccagttttattaagttctttttttaaacagggcccgatatgctgcgttcaaacacccccacaccaaaaacacaaactcccgggatctctcgctttacaaccatgataacactatattttactcattttaggcatgtatttatcatcatgtagcttagtgatcactcattgtatcatagcattttgcatcacatttagcttattttgcacacttaggcatttaggatcatcttgtatacatattgcatgttttggtatgttttcaggtgtagaaggagcttacaaggatttctactcgaccctctactctatcaaactaggagggaagtagcagagcattctactcgaccaattcactcgatccaggcagccacagaggaggcaacagaccctactcgacccccctactggatcctctactcgacccgtttgctcgatcaagggcgacctactctacatgacttgtttatcattcaaggcgtcttcggatcctcctgattccccactcaaccaaacctctaagcatacagataggagaggaagaagcatctactcgaccaattgatcactcggagcatggaggcaaaggcgtagactttgcagcaccctgtttactcgatccccaagatcaagcactcatccaaacctcctcaagtctcttgtcttctagagaatctagggttttcaacatcttagtataaatagataactttgggatttgcccaaaggatctagcttttatctcttagtttttctttgtgtttctgaatcttaaaaccgtaattactctcaatctatttcgttttgcatttagttctttgaggaaagctgtttagcttgtttagatctacattttggtatgatttcagtaatttatgggtttgtgttcttagttatgttgcttgagtagtgattagggttcttgaggatggattagataagggcaatctctaggttagtcaggtggttaagattaggttagatcccttctggattcgttggcccctatgcggttttcgctggctaatatggaatttcgaccatagacgtccagcgtacaaaaaacattcaaatggatgcctgatctacgaattctagagattatagactatagcccaagagattggctagtctgtatactggctctggtagattgttgcttaaaccctgctctgctatgtttcatcaacgagagttgagattaggaagtggtagagttatgggggtctctgtcatgagagtaaattgacccattttttgaatctatcgtcaagggtatctacctttcacctattagccatctgatgaaccctagagttgcccttaccaatgaatccatccttaggatttctattatatttatttgtatcccctgttgattgcacttttatttacctgttatttgtatcccctgttgattgtattttagttacttaaattcgtcacctgttggttctactcgacccaatgatcgagtagggctcttaagttctcatttttacttatttgaatcttgacctaggattgttactagaaactcaccataattataatctggcttgagttagttgcttctgtacacgtcttgattgctagcaataatagtggactggattgacaccccctatagctgcatcgacttgtttttgttttaggggaattgaactgaaccacacattctgcatataagtaggcatagtaaacctgcttatcaatttattgttgcggttgttacattcaagatatcagaaacttttaagatcaagttcttttacatttatcaagttactaactcatattttcgtctgcttgtttttgtggtataggtactaatctttgtgcatgctagattatttcccttctctttgggagacaaagcacaccactgggagaagactttgtccccagactccatcacctcatgggacgattgtaagaaagcttttcttgccaagttcttctctaacgctcgcaccgctagattgaggaacgagatctcaggattcacatagaaaaacaatgaaactttctgtgaagcttgtgagagggttaaaagctacaccactcagtgcccccatcacg

SEQ ID NO: 1348 - DNA, 1413 bp, Arabidopsis thaliana landsberg
  unsure (1)..(1413): unsure at all n locations
tgagcggtagatcagcataactaccaaggcccctcctttttggtgaaattatggcattttcttatctattcaatcaaataaagaaccttcttgtctctcacttcatcatcccactcaccccaaccatcctcattagtgtttacaaatagcttcaggataacaatcatctgaagaaacagactcagaaaattagaccaaataaaaaaagtcataagagcacatgaaagaaaagataccacaacaatgtttacaattacttacatcaggaacacgttcaaggagatgaacatcgttgatagtaagattgcttttcggtatcccaattgaatgccattccaaaaacgttctctcatctgcagaaccaggaattttgtccagtagaccagaaatgttcctataagcaagaagttgcagggctaagggacagccatccatagctatactctgctgttgcatatgattaatgaattgttggatgggatcttctagcttgattccaggtcgagacctttttctcttagaatcaaccattgacgggttttttctaacaggcctcatgatctgaatagtcttcaaaaaagattctctcccccatgggaaagccaggaatgagtcaatgtcctctaacatcttaacatacttgaaagttggacgatgagtctggttattagcaataaggactccatcaataatcaaaagcagagccagggggagttttaaagggtcttcaatcccttttaaagtttggaacttagaggaaacatcagctagtgttgcattcttatcttccccaatcaaaacatcccagtaatcatttgtcccattgacacgtctagggaagaagtcaggttcatactcctccggaaattcaccacacggcaaactagttacagaaccaaactcaactaaagagaatctaagaggctgtccaccaaaaacagtccacatttcgtatttctgcttggtcactaactgtctacataacaaagcatgaactagtttgccggagattggacattcgctaacccttaaactaaacaaagacccaaaacaagagtctaagatggtttccatctccttggaacctttcaagacgtcacatattacagtgagaatgtcgggtctggagtagatattgagacgagcatcagggtaacggtcagttgcgaaaagccgtggagggagacgagtgtcgaggtcatttgtatcatcttcaactgcgcttgaaatcaaagggacgatttgtaaggaaattttggaacaacaatggattaaacgttcagataactgtaactggtnaaagaacaaagaaaaacatagtcgattacctgtcattttttctgaaagaagtgaaaagtaatatcgaaggatttgaatgacggattgcaaactaggaaatgagtctgatttact

SEQ ID NO: 1349 - DNA, 539 bp, Arabidopsis thaliana landsberg
tatttgcttattctggaaactttcatattattttgaatcttcattgtcacgcaattaagatcctctccttttttaggctgccttaattcgaatcttccttgtcgcacaattaagatcacaccctaccaacaaataatgtgatcgtatcgaatgcagaataagattctaagaaagttttaagcactcagctcttaagcgatcaatccaacaagattaatacactctctagaaaatcctcaacatagagaaaacaacactagttttaccatggattgatttcaaacaaagataagctttacactttttcagcagccattattttgccaaatcatacatccactaagccaaatcaactcctaaatacaactttctagtagagggtaaacgtagacgtcctttgatttctccagagtcaatacgtaatacggattggggattgctttgatgtatatgacagtaggaaaagcattgaagctcagaaacatgtcaaaatacatatcaaggtgataaaatgtcagcattaaagctcagaaacatgc

SEQ ID NO: 1350 - DNA, 561 bp, Arabidopsis thaliana landsberg
ccaatctatatgctcctgaatacgagagcgtcagtgacacaaaggagaagttagatactagaatgaaagaagtgcttgcaagactgaaccgtaagctttctatttacacttcaacttattttactgtcagctattcttcttgctacaacaagaaagattatcattggggaaagtggacagaaactgtgtttcctcagtagacttaaagctgtcaattagtaattgggatttatcattgtactcaaagtggatcatacccttgaactgattgccatgtatgttgcagaagctaacattttgtttatagcattgtattagtaaagtttttgaggttagaaaagcattgactgttaagacgatttacagtataacttcacaagtctaatatggttctcatcttgtgaacagcccataaagcaaagagcacctcccaagttacaaaattggctggaccagctttgacccaaaccgacaatttttcccctcggcggtaaaacataatgtccacttggtctattctttgtatcataataaacaaataggatagtgctgagagattgt

SEQ ID NO: 1351 - DNA, 520 bp, Arabidopsis thaliana landsberg
  unsure (1)..(520): unsure at all n locations
gtctattctctataaaaatcaattttccagaaatctttcttcttcttctccttggatctatttatcttcttctttttcatagatgtctcttctctttcttcgatctcttcttctttttctgcaatctaacgaaaccctagattacttctttcttctcaacgaaccctagatatcgggtttagaaatacaaatagcttaacttctaccattttgtaccatttttcccgtataactgagttgtatcaactgtactattaatacattttgtaccagttgttcatatttatatctcacttatattatttgtatctgttgtactattttttcaataataccatttgtacagattgtttctatttacatacaattataccattttgtaccaaatggattatattatcatttagttatatcatttggacctgttattctataatctcttatttataccagttgtactttcataaaggtaaattttgaatatcacatntatagtggctctcagattataagatgacac

SEQ ID NO: 1352 - DNA, 1657 bp, Arabidopsis thaliana landsberg
  unsure (1)..(1657): unsure at all n locations
ttcattccttgtggcagcatttggatcgttccgggttgcagaactcgactggggaaacgaagatcatataacggccgttgagcctccctttgactatgtcatcggtactgatgttgtaagttcatcggaatcttcaaatgattcactctaatcatgtaatctagaaagactgaattcagctcaagggagactgacctcaccttaaatttggttttaaggtatattctgagcagcttctggaaccgctattgcgtacgatacttgcattatcagggccaaagacaacagttatggtatgaattaagatacttgggatatttgcttttaagatatcattggaactacaagatcattcgttgttgttgttttatagttgggatatgagatacgttcgacggttgttcatgagaaaatgcttcagatgtggaaagacaactttgaagtcaaaaccataccgagatccaaggtacgttgatggcacagttactgtttaagtttcatgaaatatacaaccgcttattctggaacgcaatctgcagatggatggtgaataccaagacccgagcattcatctgtacatcatggcacagaaatctcctgccgagagctctggaaacgtaagccgagatgaagttgttatagacacagacgaaacaaagtgtgagacgaaagtcccaaccggagaatgccataagagggtggaagaggaagctgttgttacacatggtcctcgtcttaatgaagatagtttgttgatgagactacgggatggaaagctaagtgaatgggagatgagaaggtatggtacagttgctgcacagcttctccgtgacgttaagatagatgttcaggtgcgtatatacataccattgtggttacgtaatctctcataaatgcaagtaaaataatctcttgtgtaaattttctttgaatttgcttgtaggtgaaaaaataatgttgcattagctactttcagagccttgttcctcaagatccaccactttaatttttagttttggtatcatggagactctatacaatgaatgaaatcttccttttcttattttctgcattgttttctgatataattgaaaaagcgatcacacatcacatatcatccttcaaccttggatagcaatcgaaaaatgatacaaggcagtgttacatgtgtttagacatccaaggcatggtgtcttcccacctctattcgatcatatagcagaatttgggtggctttgtgctcaaagttttaaggacaggacaattggagatcttggctcatggccacatccaatcatagtccgctttctccctcgttgccgcacttgggcgagcttgttaaatgtggcggaccattgctttgaggagttcctatacgctgtcagtatacgatccatcacnnnnnnnnnnnnnnnnnnnnnnnagagtaacagctttgtcttcaggcaaggtatatatttagatcaacagctttgtcttcaggcaaggtatatatttagatcaacagctctgtcttcaggcaaggtcgatgtgacactcaagccaaaatcgattagtaccagctgattaaatcagcctgatttgttccacttctgactaacatatttgatgtggtcaaatcaccgtgagccaagccaccatcatggagcttagcgat

SEQ ID NO: 1353 - DNA, 1225 bp, Arabidopsis thaliana landsberg
gagaatgttttcccatagaattctaagtcatataatatgtaacctgttgtacatatgtcttttgttctcagttcttttctgttcatcaaccatatttggtaatcaagttatcaaggaaagtggaaacccagtacttgtgttgttccataaatatttgggttaagccttcaatataacaaagcttttgagtatcatatgattaaatatatatcaggaaaaaaacaatcattgtatgactagacttattcaaaagaaaacagagtcaaagaacaaaatgaaggtgatgaacgaaacaaataacataatgtaaaaaagactggttgataatcttgatattttcttctgaccaataaggggtagttcttggccttggttgatttgctctaaacttggagcataagagcacactggtagctgacgatacggcacggcagctactccaagatccacagttctcaagtttccagtctctccagtgatgcaagctacggatccacaagataagcttgaatcaaaaatcacagcgtgtttcttctcttggtcaatgaaaaaactcccaactaaaatcggaagtgtacagtaagtaatttttaagaagttgctccatgacacagcattgggttcaatcttagttgtcacccatatctccatctcagattcttcccaattattaaataacaccacaagatgttcctctctagtagaagatagagctacattatcatcaaacttatcaatttgaaatgggagaggaagacacgacacaaatctctctcttgtaaaatcaaaagaaagtaagcaaccagctagtccttcccctattttctcacctcgatagaaaaaataagtatttccctttattgacatgtcacgtacataaatatttgtatgcaagtcgggaatgatatcaagaaccctccatgaatcagatttaaaatcgtagatttcgcaatttttcctattatacatcaagattttgtggttacggttgttgtcgtatccgagagcatacctatatctgaaatgctcaatatctctgcattggatcaacctggtttgtcccaaatacggattccaaaccacgatcttggaatctacctcatcagttaccaataacaacaagccatcgctgtaataaacttgaaataactcaagttcaataaatttatttatcttatttatagaaagttcaacttggttcaacggtctttatttttggatttca

SEQ ID NO: 1354 - DNA, 1458 bp, Arabidopsis thaliana landsberg
gtttccctatcaaaagaggaagaggagggggaaaacgataatagccttacccattatttcaaaattcgataaaagtacggagaacgaaaaataattcgcagggagaagaatgagagctacctttgattcttcttgcaagcggcggaaagtgaattctcgagggtttaatcgagtataaataggaggaagtgggcgacaaacctatgaagtaattattaaacctacgggactcttcgatttccaaacttcacgcgttgaatgcacccagaaatacgaatcgattcggagatctaatgattaattcacacattccaaggtttgaaccgaatattcattttcaaaattcgaaaatttcgaattaggcaattcggattctccgaactggaggggggggggactaattgttggtgcaggaattagcacctccatcaataccggtttaaaccgagggaatgtgaatcaaatcgagaattcaacttaaccgggataccccggtttgcctgttaatgggccaaagtggtgaggtcgccggaagacctaattcaatggctagagatcgcccagccgacttcctgaacttcggaaagagaagactcccatgtaaaataagagaatgtcatgaagaatggaaggaatgaagattcaagctttaaataattagaagtttagcatatctttaaaccatctatgtgtataaatagagggatttgtcctctatttaattcatcttgaacttaatactaaaaccctacttttctgagagaactcttgagcaaaaatcctagcttccttctcaagctaccctgttcttctttcgtatcgagcctttgattacttttgagcctaagagagaagtaaatttatctaaactcttagtataaattcattgtttgatttactgagtcaataatcatttaggtgagttccttggattcactctcttctatataaatggacacatttttggaaatgtaagaatatttaaaataaatgttttgaaacaatataaactcaatgcatacatttaagataatttaactaaaaataatcaaagatcataatgtttgaagtcaaacattaaaagaattgttttcatttgcgtgttcatcaactttctagtgtagacatttagttgctaaagaaaaaaaagtgaaggaaaattttcaaatcatttatgtattttatgttacgaacataccatatacattcctatgctttcaagacatttacttagtaagttacccaataaactgcacagaggttcattctgttcttgaaatgaacactatagaaatcgacttttcccaaatgttccgacgaagattccatcaaatctacatttgagctctacccaaatttctgtaaattattttagaaattggcaaactgtggttaaatttttaatattttttaaattcaagtcttacaataattataaaaaaattttttgtttgggaa

SEQ ID NO: 1355 - DNA, 1419 bp, Arabidopsis thaliana landsberg
agtatccatggaaagagttctaacacctcctctccaattccaaattcccggccacgccaaaaaaggaagtcaaaattatagaagagggaatttctagggaaaatattccctgaagaaggaataggcgataatgcccaaatctgtcgcgaaggtggacagtgaaaaaggagatgattaattgtctcttcagcttctccacaacgggggcatcctttatctgtacccatatgacgataggtcaatctttggcaagtggctagacaacccgagatacattgcctgaagtgcataagtttccgcgtagttttaagttttcatacttgtgcctgaagtgccgaaacacctggtccctgaaaaggggggtcacaagtaggacgagacagatctctcgcggcccaataccctgacttaaaagtataattaccggatttagtatgagaccaactatacccatcactcaagtaggtacggcttgggcgaatccctaaaatcaaagggatacagaatgatcaaccaaattaaagcttgaaggctatttaatttccaaacttattaacatgatcaattaggtcattaacataaaggtgtgggttccttatgttaagaatactctttgcaggccttgcacacacagaaggaaatcaaggattttcccatacacgggttagcattccggatcctattgttcttcgtaggccctagagaagaataggattttcccataaacgagggacggttagcctttcctatatgaataggatcactatacctaaaaaatattgtcccctcaacacccttatgaggagagaatttggcttctctttctccaaagaaattagggttcttagaattctcaatttggggatttttctaactggtatttatttcagattatgagtaaaccgaatcgggttgcaattcggtttactatattggatttttggtttgacataggattttgtgacataaccaatattaaaccgcaaaatttaaatttatggggactgaagtctcgacctttcgattgaaggggatacaaaattttaactttcattttatgtaaactggaaaagagatgtgaaaactatgtagttgtggtgctatatgaaactttgtagggagaaggtcgttcaccatagatcttattaataaagaagagaaaagaagagatttggtgccttcaaagcttctgatcaaggccgaggatggttgttgcgtctctaggcttctccagcttctttgtcactacacaagaagagactcctaagttatggtttaggaataagtatttataagtcttggggtccaagaggtcgggttagggtttttagggtttgataacttcagggcgaggaggctacgactagttttggtggctctggcgggtccttgaagaagacttcaccctagtcatgtggg

SEQ ID NO: 1356 - DNA, 518 bp, Arabidopsis thaliana landsberg
  unsure (1)..(518): unsure at all n locations
gaagcaaaacttgtcactgatagtcaaacagatctgttaatcaaatcgttcgctaagtgttagctcacgatacaatgatcaacaatgatcaacattgtaacatctccagacaaattctctctctctctcaacaatctcagaaaatacataaagaaatgaaatgagctgcaacggctcctttaaagctgagttctctttatttccatcagcgtcttccatatcctttgactccagcttgttgaagaataatcaaatctcgtataagtcaaagtcacattcgtataagttagttattaagttaagagtcgtgtctgttaacacagttgtgtctttatcaagagtcatgtcttttacacaagacaatgtttcatttcatataaatagatcgagtctctgtttcctgtaacacaattgagttttgtaatacaatcaagtcaataagattgattacattcatactctgtnttttcgntcttactctgttcttctttcataacaaaacattaacatggtatcag

SEQ ID NO: 1357 - DNA, 1728 bp, Arabidopsis thaliana landsberg
agttttatagtgagcatcatagtttatacaaaatatataattttcactaatatatatcattggtgggagcttacgtcattaatatatatcattggctgatgttgttggataagttgattgagaactctgaagaggagctttctgaactgctgaatctgtggtgttttcataggaaacttggtgggcaggccatgatacaaaagactgtaaacagtcctcaaggtatgtcacatgactcacatccatcgttggcctccatatgaacgtctcaggttgaagtattacatcaacaaatactgtcactgcaacaagtccgagaggaagcccattaactaatgcaaattggtcttttgtctgtcaacttgcttctgcaacaataaccggattggaagacaaatccagtggtttgcacttgtttccataagtgggtctgggtccctgtcaaacacattaaaccaatggcttagtatgactctgaatatataacattttacatgtgcaatgtcttctggattgagctcctgctgtaggctaacacacatagcagcaggccatgcaatcatatgtccaacaactttctcaatggtgaacatattagccgcaggtctccaaaggaatgcttctggttcaataacagtgtcaatcaagactttaacatccgtagggcctaagcgacagtcattcactaattcacccggatcagaagaaataatacatccctcagcaacttttgcatcagaaccagcccaatcaagtaagaaacattttggttgtgttcttttgttcacactctgtaaaagtaaatgatagacaaagtactaagttagtgtatctgttagaacagatcaaagcatatgttcaaccacatgctatcagtatgtttcccacatagacaacatcccatttttccctttactttgcagccagctagattcccataagcagggaaatcactaatcgtccaaagcaacattgccttcagattaaatgttgatttactataagcgtcatatgtcaatttcccattatcccacatgtggcatagatcctctataaggggttctaagtacacatcaatactattaccaggctgttgtggtccaggaataagcaaagtcaacatgatgttctccttcttcatacataggtcaagcggcaaattgtagtttactaacagaacaggccagcaactatacctagtattcttcatgttgaatggattaaatccatctgttgaaaggccaagtcgcaggtttctttcttcagcagcaaattcaggatacttgtcattcatcttatcccatgtaacagaatctacagggtgacgaagttttccatcaatgcttttgttactataatgccaccttaagtccttggccatttcctctgatctgaacattctcttaaaccgtggaattatcggaaagtatcgtaataccttctgtgggactcctttcttagcttctccagtttgcatgttactcttccaccgtgacgcattgcatttaggacaattttctagattcttgtacctctttctaaatagacagcagtcgtttacacatgcatgaatcttttcataccccatatcaaagctccttagaaatttcttgacttcatacaatgatgtatgaagcacattgtctgcgggcaacatctctggcaatgttccaaggagttcattgaaactcttatcagaccaaccattttttgtcttgatcctaaaaa

SEQ ID NO: 1358 - DNA, 431 bp, Arabidopsis thaliana landsberg
agcaatggaaaaactggcactggccgtagtcatgtatgctcgaaaactgagaccatagtaatgatgatgtcccaaccaatcagaaccattctgcatagtccaacacaatcaggtcgacttgcgaaatgggccatagacttaagcgagtaccatatagaatctcgcaccacaaccagcctgaacgcacaggtcctagctgactctgtaatcgagctccccttagcagacctggatacgagcaactccaataagacgtcgctcctccacgtgacggctcccgcaagcgatacggatcccgagtaggaatccaactcacctccaccaccagcgatagtcatcgacaaatcgtcccgactcggattcaacgtatcaaacaacgagtcttgcctacgcagccctcattgacggcattcagctaccttaaggactgg

SEQ ID NO: 1359 - DNA, 1123 bp, Arabidopsis thaliana landsberg
ccattgtggtttaaaattttatgacataaaatgtacccgtctcaaaaagacgcggatcttcttgtgacggtgcattaaagtcagatcttaacttctaacttaacttctaattttagccatctattacaattaatagtagttattgatgttttctagcaaaagtcaaatcctacagcaagattttcgaagagaaaatctttatctattaatttccaattaatttaggggggtattcaataccattcataattatgtgggttacaaattggaaaactatttatacttctccattataagaatttacaatatttattatattctaaaaaattactaatccaatcagatactttttaaaacatttcctaatcaaatctaacaaatctgctttattataagaaatttctactactcacctactaagattctctaatagtaattctgcaaagttatctcaaatcattttaaatccgtttaaatctccatagaaattttttttttgttaaaaaatctccatagaatttgaagtattcatataagccttcaagtaaaccaaaatcactaagccgataatctttgtgatcacgtgtgtttcatttagtgatgatttggacacatacttcgatctctgcagcttcacataatccagtgttatgctttgtgatcacgtttgtattactccaagaaaggtaatgctttgtgattatctgctttgcgctaaaagtggtcctgaatctctttgcagggggatctttcatctccatttaaggagatgttcccattgactttttggtgtcagcggattttcagttcacttggatttctttttttttgaataccaggagattctggaccgaatcccgtaatttttttaagcccgaaaccaccaagcgtcactcgaaccggcgacctcaaaacttcgcttagggtctttaccaattgagctaatgacacttgggttttttatggttcatcaaccagggttaagagcatgtctcttgagaaatcaaggaaacagaggtatgagccaatagaacagatcctgaacaagtaaggtcgtcatttggatttctagcaatatctttaatcagggggttctccatatactggacatagtggttagggt

SEQ ID NO: 1360 - DNA, 546 bp, Arabidopsis thaliana landsberg
  unsure (1)..(546): unsure at all n locations
gctgtacattcagcgttcacaaaactctcctccaattttgttgcatgttcttctagatcaaagcgcaagaagagaatggaggtgcctatccaatctgaaacattatcatattcttgtgcatttttaaagtttatcgcataataaatcttttatttttctcatagacttcatctcagtcacacatgctgtctaagcatgtatttggacagcctgaagttggacagcaagtcccaaacgataatttagataaagctcaagactccagtgatagtaccccnnnnnnnnnnnnnnnnnnnnnnnnagttaacttcaactatttccaaacttggtggtattaacgacgtcaacacatcttattgcaggagattactgatgaccccatggatgtgtttgttaccccactacaatcagagcactctaatcaggctgatgcaaatgaaggcaaccctatttatgacacagatgtcaaagatcaaaatgccaatgaaggagatgttgatagccaaatgcatgtacttatataaatacaaacacaactaatcaaag

SEQ ID NO: 1361 - DNA, 1199 bp, Arabidopsis thaliana landsberg
tgtgtcggtgggttgatagagctcgtagatctgaggatgtcatataataacttgtctggtaccattccagagtcgcttgggaactgcagtaagctggaatatctggctttgaacaacaacaagttaaatggttctttgccagcaagtctctatctactcgagaatcttgctgagctgtttgtcagtaacaacagccttggagggaggcttcattttggttctagcaactgcaagaagttggtttctttagatctctcgttcaatggtttccaaggcggtgttccacctgaaattggcaactgcagtagccttcagtctttagtcatggtgaaatgcaacttcacaggtacaatcccatcatccttgggtatgttgaaaaaggtttcggttatcgacctttccgataatcatctctcggggaatatccctcaagagcttgggaactgcaacagcttggaaaccttgaagctgaacgacaaccagctccaaggcgagataccacctgcattgagtaagctaaaagagctacaaagcctggagcttttttttaataagctgtccggtaagattcctatcgagatatggaagattcagagtcttacgcagttgctagtttatcggaacaatctcacaggaaaattaccagaggaaataaccaagctcaagaatctcaagatcgttactctcttcaacaatagcttttatggagtgataccacccaatttaggtctgaacagcaacttggagattatcgatttcattggtaacaatcttacaggtgagataccacgaaatctctgccatggaaagatgttgacagtgtttaacttaggatctaaccggcttcacggcaaaataccggcatccgttagtcagtgcaagactctaagcaggttcatcctcagagaaaacaacctttcaggctttcttcctaagttttcgaagaatcaagatctttcgtttctcgacctcaatagcaacagcttcgaaggaccaatccctcgtagtctcggaagctgtaggaatctcacgaccatcaatctgtctcggaacaagctcacgaggaatattcctagagaacttgagaatctacaaaaccttagtcacctgaatcttgggtctaacttattaaacggtacggttccttcaaagtttagtaactggaaagagttgaccactttggttctctccggaaaccg

SEQ ID NO: 1362 - DNA, 1216 bp, Arabidopsis thaliana landsberg
ctcccacctcatccgcgagagtctcgaccgacctatgttcgctttgacttaggggagctggctcggaagcgggggctttaagcgcctcttttagctcggacgtaatatgcacgagttttgcctcggcatccatgaagtccgaaagccactcctcgacctgtttcttctcagcttctaaggatccaccatcctcaagcaccttgatcagctgcgcattagcccgagtttgggacaaatagatgaacagatcattggcatcctcgagaagagctgccttctcctcggtcaccttaaacttggcgagaaagacctctgaaacctctcgcctggctttctgcgcaacccgagccacctcgctgtctctaagccccctcgcctcggcaaacattcgcttacagcgaacgacctcggaatctatcctcagattgctctcggctagtttgagagcattctccttattcacataggctttcctctcagcctcttccctcgccaatcttgcctcggtggcctcagagactgccgcatctctctcccgttcgaccttctctgctctggcctcggctgccgccagcttccctctcagcctccttcttcgcctacttcttcttcttcttcttcctcctcttctcctcggagtcatcgacctgaggacgtttacccgaggccttatcacgcgccgggagcgctactatcgcctgcgaggcagcttcaaccgggggatcagtcggaacttgatcgacaacatccgtttcgacaatccccggcacggcgggcatagcagcctcaggaacaaccttccgagccccggaaggttcagcagcgccgctctcttccgcgacgcgtctctcctcggccgcacgtttcctctcagcggcgagcctctttttctcataaacctctcaaacagtgggtttggaggtctgcatatcgacaaaaaattgggttcggtggtcagaggattctgagctggaaggacaggaaacgccgtgaaataatctaagcgctcgttcaactcgatcttgagagaaatgtttcgtccaatgacacttgcgggccgatagctctcgatggcaggaaatgagaattgtcgggacacggctcgagaaacctaattgggcggatctgcagaattagatcaacgaaataatgtcagcataaatcacagtaatcacctcgggcacagacaaatcaatcacggaatgtctaaactacc

SEQ ID NO: 1363 - DNA, 2106 bp, Arabidopsis thaliana landsberg
tgtgaaagtttctggaataatgtaaagtctcctaaacttctccaaaggaagtctattgtctagtttcttaaatctttaatagttaaatagttctcgcactgctttaaactaaattttagttttctctaaaactaattttttcttatttggttatattaggagagaaccagcaaattcttattcaatttttttttgtctttcatcatgattactccaaagggtttttctttgtgaataagattttatttctcatcaaatttgtgtataaaacgagaaagggtgtatttgttgtaagcaaaacgttatggggtagaattgaaaatagactgaaataatgagagccgtcttattttttaagtgatggttacaaaaccgaaattggaaaaaaaaaaaaagacacggaagctgcgatggctgcaacagtgctcggccatttcagtccaattacatcgtccctaaaaccaccgtcacgccaccggcgattcctacaccacaatttgtcccccaaaacaccccttcaatcttctcttatcaaattcggcgccgaaaactccgaacctcaacctccacggccgttgccggaaactgattgtcccgttccgccggagcagcagccaatcaacgagtatcaatctctctccacctctttccctttctcctgggcttcaggagatctaatcgagtactctaccagacttttcttaaccggcgcttctttcgcatttttcgtcgggttacccgtttcctggttcggatccatcggacccgaatatgaacctgttaagaggattctcgccgccagctctagcgggatcttcgttgtcacgcttgctgtcgaaggatgtatcttggttgggcttatgtcggtaatcgtcttcttagcgccaccgtcgagtatgaagaaactggttggtacgatggtcaggtatgggtgaaaacacccagaagtcttggcacgagaccgtcttcttggatctttctcggtaaagccagttcttgcgagactgaaaaacacgctagttattctcggattatcgctcattcttgttataaaccttggtgattctccaattgcaacgtcttatagaacatacagggatcctagggacagatcctcgctgccaatcccaggagcgtacaatgatgaaaccgcaagaactttcgaaccagaagctttctgcggtgaaccatcttccgatcttctttgaaaatctcttcatcacaacgcaaatacagatagttcctgatagtaaatatatctgtacattcctgtatatttcgataaattggatgtaaaggacaaaaaccagtcttgatgtatcggaaaaactcattattaggtttcaaatctaactcttatcattcggactagtattgacagtttctaactttctagaggtagtcatttcgatttctgtaagatcttacattgatactctttcatctctaacactatctttgtttgcctccgagaaaatctatgttaatactgaccattttatttttctagttttaagaaattttgcttctggaagaaattttggtgagtcaacggatatctaaagttcgataacgtgaaaaaacaaattcaggggatagaagtttctaagtcaaagacacaagattagtattataacaaacataactaatttagcttacataaatcataacgctctttctattattgtccgttcatatcaattatcaatatcataaagcttgggtttatatatataactaacaatccgaaagaggagagtatctgaataagaaatggctgagaaaatgaaagccctagtaatattttgccttgtttttcaagtaatcattcaaacaggaaactcagctgattcaggagatgttgatttttcaatactcatcaaaaacgaaatgtacaatgtcgataacccgtcggttttctacaattgtcgatcatcgaagaaagacatcggatggcacaaatcgggtccatcctcaaagtttcaatgggaattcgaagttcctcagtttggtaacggcgtgatggtccacaaatggcggttccggtcgagcgcaggaacagcaaacgttgagaacaggacattggctactacggcgatgctatgc

SEQ ID NO: 1364 - DNA, 1306 bp, Arabidopsis thaliana landsberg
agttaagtgggcaaggtgaatcatcatttgaagggaatgtaggtctctgtggtcttcctctccaaggaagttgctttgcgccaccaacaaaatatcccaaggaagaagacgaagaagaagaagaggacgaagtgattgagtggaaagcagtgtttttcgggtattggcctggactgttacttggattggtaatggcacacgttattgcttcattcaagccgaagtggtttgtcaagatagttggtccagctaagggcaagcaagtagatccagttagattgtttatgaatctggattcaagatgggacagttttaataataaggatactgtagaagaagaagtgatatgactataatagtatgtggatatgttgttgttacctgatgtaagaaagaagttgacttgtttctgtaacttttggttcccttaattacgatctctctattggatgataatgtcatggtagattgttgagatagaggcgcttatgacatactgctttggttcttctctgattcttcaagtaacccgagccgatgatttgtaatgcacgaaagcccgttgtttcaacttcctgttaagacaaactagatgaagtgaacataagagtataagatcaatctcagaccatacattgacgagatctcttttttctaaatgtaaatgttaccactcacaactgatgaaacaaaccagtttgatgtgaattaaaaaaaaaatatcatgagagggcttactaaatataagaatcttcttacactttgaactaatattttcagataacagagaaagaaagtatgcacaatacaaacagagagctatcaatgaccctaaaatatcaatccagagttgcttaacccctaaaccctataatcaaattgactattaactgatttcatttcatgattgcgtcaaaactaattgactttgagagttgcttttcttaactatatcatcaacgttaggatcaaacaaagagaattagctaaacccaaaaatggaaagaaaatttaaaggaggattcgattactcttgcttatgaaatcacctggcatccaccaaaacgtcgacgagagtgagtgacggtgatcgcaatagctccgctgtcgtcgcgtcataaaatctccttttcgactttactgaaatagaataatctggtatattaaatatgtattaatggtttcaatataaaccgcagtgtagttttggtctaaattggttaactttttgctggttcagcttctaattacttgtgtcacacaaattgtcaaacaaacacaaaagagatttatatgttcacactct

SEQ ID NO: 1365 - DNA, 583 bp, Arabidopsis thaliana landsberg
atgaaacggatttgagggcaaattctttttaagagggagggcaatacatgtttattgccaggcaagactcgcaacttgaaccatcaaagctgtttgtcgccgaggagcagcttgtagcgggggaaactttggcggaaccaaccagtcctatgactcgttcgaagactagatttctcaaccaagccgttagcggactacttaaccacttgggcaagaatccatcattcaaaccgtttggtaattggctaagtgttacttgggtactctttttcccttctaaggttttatcccaatgagttttcattagtaggtttttatgaggcttgagtaatacttccaaatcccccattatcatttcggcccacgcccaataagaggagcaaaaatttggaaggtcaagagtctattttggttcaaacttttatttatgattctttctttttcgagttgtcttggagcttggtctaagactaactctttcccttttcttttctcttttaaaactcttggatttcctctctgttactcatctatctcttcaataaaaaacctttttaagtagatcaatctcttgctcttctct

SEQ ID NO: 1366 - DNA, 647 bp, Arabidopsis thaliana landsberg
tcaagtttttacaggatcacctattcaccccctctaggtgctctcaattggtatcagagccgttctcttcaagaaagggactaatcacccgaagagatggatcctaagggaaaggggatggtggtcaacgacaatgagaaggagtccatcttcaatgagccaagggacgacaacaacgagtcttcttcttcccaaaaggatgatgacgacaatgactacgagaaaaagaagacggttaattcaaatttttcctttgattattctcgtattccgcaaagttccaatgctcatttgctttccattcccctcggtaaaccccctcactttgatggagaggactacggattttggagtcacaaaatgtgtagccacttgttctctctccatccaagtatatgggagaaagtagaaaatggaatgcactttgatagtacggatagtcccatgttcatcaatgaacaaattcataaaaatgcacaagctactactgttcttttagcgtcattgtgcagggatgaatccataaggtgagcggcttggacaacgccaagcagatttgggacacctcaggatctctcatgagggaaatgacgtcactatgctcactaagatggagttggtggagggcgacttgggagatcgcaatg

SEQ ID NO: 1367 - DNA, 1009 bp, Arabidopsis thaliana landsberg
caaaaattaataattacaattagatgcatatgaaacataatgatgtagttgaaaattaggataaaacttacttgtttttgctgctcagtaagtaactctctacaacacggtgtagttgtgagagtcgaaatcaacacaatggaaattgtatcttagggttcttacaaagaaacagtcttcgcgagaatctcaaagaacaacagaatcggtaagtaacctcggatggtgttcttgatattattgataagaaacaatgatttgatcgtacaagtgttttagaaaagtaaagaataagtgtttttagccttcaaagtcatagcgttttgatagcctgaagttgagagcctttttctgtgtaccctttttgcgaagtccttgaggcgccttatataggtcttcgcaataaggagattttccttatatttcaggagttttagaaaaacttccagatttgacaatatcctcgaagattcttcattatcatttccgggtttttcggaaatggtctttggatcctttttataacatgtgcaagtctttgcttcgggcctagaccgcctcctcctatcagatgctaggcttcggctcgccacacattctacgcaacctaatgtcttccgagccagatctaaacgatccacgaggcgtcaaagcttggctcgggtatgtttactggaccaacaaccgagccgcatggtggttcttcccggggtcccgaggtgtttccttccccggctcggggtgtgtttcctggaatgacatccgagccgggtaatagatacccgagtagataacgtctcgtgaatagttctctacccttaaagtggtaaacttagctctcgagacgtttatggtatttatctgcttggctcggtcttttggtgaaatctaaccctaacagtttgccccccccccagctcgttgtttttattaagagaggcgacaagatgtatgagtacgatgaccgagccgaccgattgtcttcctgtcccgcggcttctgacgtttg

SEQ ID NO: 1368 - DNA, 500 bp, Arabidopsis thaliana landsberg
  unsure (1)..(500): unsure at all n locations
cctacaacaaatcatcatgattagtgacatgtacggtatgtgaattnnnnnnnnnnnnnnnnnnnnnnnnnnnnngtggctcgattatctgccaagatgagacccaagtcgaactcatttattcccacgcatttttgaaacaccctgaccacaaaagcgcgtatactccatccgactataccatcatctccagttacgttctcagctatatcatccgtgtgctcaactaattcaccttcgcatcttgtctcctctgcacagactctagtgtacgtacattggtacaaaccaagttgacacgtcggggatggagcagaggttggtgtactgtcaaccaaaacaccagtgggttctacatgaggtacatgtgtacccgtcgacgtacacgatgccaatagacgagtgaattcccttggaggttccacggtttgttgagtgtcattcacgacgtcctcctcaacatgaccatttccatattgttccacaatcatgtcacccca

(The sequence listing continues in the following parts.)

We claim:

1. A substantially purified nucleic acid molecule comprising an Arabidopsis thaliana EST selected from the group consisting of SEQ ID NO: 81307 through SEQ ID NO: 138060 and complements thereof.

2. A substantially purified nucleic acid molecule of the Arabidopsis thaliana genome having a nucleic acid sequence selected from the group consisting of SEQ ID NO: 138601 through SEQ ID NO: 195836 and complements thereof.

3. The substantially purified nucleic acid molecule according to claim 2, wherein said group consists of SEQ ID NO: 138601 through SEQ ID NO: 162749 and complements thereof.

4. The substantially purified nucleic acid molecule according to claim 2, wherein said group consists of SEQ ID NO: 162749 through SEQ ID NO: 174652 and complements thereof.

5. The substantially purified nucleic acid molecule according to claim 2 wherein said group consists of SEQ ID NO: 174653 through SEQ ID NO: 195836 and complements thereof.

6. The substantially purified nucleic acid molecule according to claim 2, wherein said nucleic acid molecule further comprises nucleic acid sequences comprising one or more of a promoter region, regulatory region or intron region or parts of said regions.

7. A substantially purified first nucleic acid molecule which is complementary to a second nucleic acid molecule of the Arabidopsis thaliana genome having a nucleic acid sequence selected from the group consisting of SEQ ID NO: 138061 through SEQ ID NO: 195835 and complements thereof wherein said first nucleic acid molecule and said second nucleic acid molecule hybridize to one another with sufficient stability to remain annealed to one another under at least low stringency conditions of washing with a salt solution having a concentration of about 2.0× sodium chloride/sodium citrate (SSC) at 50° C.

8. The substantially purified first nucleic acid molecule according to claim 7, wherein said stringency conditions are at least 0.2×SSC at 50° C.

9. The substantially purified first nucleic acid molecule according to claim 7, wherein said nucleic acid molecule of the Arabidopsis thaliana genome has a sequence selected from the group consisting of SEQ ID NO: 138061 through SEQ ID NO: 162749 and complements thereof.

10. The substantially purified first nucleic acid molecule according to claim 7, wherein said second nucleic acid molecule of the Arabidopsis thaliana genome has a sequence selected from the group consisting of SEQ ID NO: 162750 through SEQ ID NO: 174652 and complements thereof.

11. The substantially purified first nucleic acid molecule according to claim 7, wherein said second nucleic acid molecule of the Arabidopsis thaliana genome has a sequence selected from the group consisting of SEQ ID NO: 174653 through SEQ ID NO: 195836 and complements thereof.

12. A substantially purified first nucleic acid molecule which is homologous to a second nucleic acid molecule having a nucleic acid sequence selected from the group consisting of SEQ ID NO: 138061 through SEQ ID NO: 195836 and complements thereof, wherein at least 90% of the nucleic acid sequence of said substantially purified first nucleic acid molecule is identical to said second nucleic acid molecule.

13. The substantially purified first nucleic acid molecule according to claim 12, wherein said first nucleic acid sequence is 100% identical to a nucleic acid sequence of a non-Arabidopsis thaliana homologue.

14. The substantially purified first nucleic acid molecule according to claim 12, wherein at least 98% of the sequence of said substantially purified nucleic acid molecule is identical to said second nucleic acid molecule.

15. The substantially purified first nucleic acid molecule according to claim 12, wherein said second nucleic acid has a sequence selected from the group consisting of SEQ ID NO: 138601 through SEQ ID NO: 162749 and complements thereof.

16. The substantially purified first nucleic acid molecule according to claim 12, wherein said second nucleic acid has a sequence selected from the group consisting of SEQ ID NO: 162749 through SEQ ID NO: 174652 and complements thereof.

17. The substantially purified first nucleic acid molecule according to claim 12, wherein said second nucleic acid has a sequence selected from the group consisting of SEQ ID NO: 174653 through SEQ ID NO: 195836 and complements thereof.

18. A substantially purified polypeptide encoded by a nucleic acid sequence selected from the group consisting of SEQ ID NO: 138061 through SEQ ID NO: 195836.

19. A transformed cell or organism cell or plant having an exogenous nucleic acid molecule which comprises:
(a) a promoter region which functions in said cell to cause the production of a mRNA molecule; which is linked to
(b) a structural nucleic acid molecule which is homologous or complementary to a nucleic acid molecule according to claim 2, which is linked to
(c) a 3′ non-translated sequence that functions in said cell to cause termination of transcription and addition of polyadenylated ribonucleotides to a 3′ end of said mRNA molecule.

20. A transformed cell or organism according to claim 19 which is selected from the group consisting of a plant cell, plant, mammalian cell, mammal, fish cell, fish, bird cell, bird, bacterial cell and fungal cell and wherein said mRNA encodes a protein in said cell.

21. A transformed cell or organism according to claim 19, wherein said structural nucleic acid molecule is a transcribed nucleic acid molecule with a transcribed strand and a non-transcribed strand and the transcribed strand specifically hybridizes to an mRNA molecule.

22. Computer readable medium having recorded thereon at least 1000 of the nucleotide sequences depicted in SEQ ID NO: 138061 through SEQ ID NO: 195836 or complements thereof.

23. Computer readable medium according to claim 22 having recorded thereon at least 10,000 said nucleotide sequences.

24. A transformed cell or organism having an exogenous nucleic acid molecule which comprises:
(a) a promoter region which functions in said cell to cause the production of an mRNA molecule wherein said promoter nucleic acid molecule is selected from the group consisting of a promoter located within SEQ ID NO: 1 through SEQ ID NO: 81306 or complements thereof upstream of a gene having a nucleic acid sequence selected from the group consisting of SEQ ID NO: 138061 through SEQ ID NO: 195836; which is linked to
(b) a structural nucleic acid molecule encoding a protein or peptide; which is linked to
(c) a 3′ non-translated nucleic acid sequence that functions in said cell to cause termination of transcription and addition of polyadenylated ribonucleotides to a 3′ end of said mRNA molecule.

25. A transformed cell or organism according to claim 24 which is selected from the group consisting of a plant cell, plant, mammalian cell, mammal, fish cell, fish, bird cell, bird, bacterial cell and fungal cell and wherein said mRNA encodes a protein in said cell.

26. A transformed cell or organism having an exogenous nucleic acid molecule which comprises a structural nucleic acid sequence which expresses an mRNA which is complementary to and hybridizes to at least part of a nucleic acid molecule having a sequence selected from the group consisting of SEQ ID NO: 138061 through SEQ ID NO: 195836 and homologs thereof.

27. A substantially purified oligonucleotide nucleic acid molecule comprising between about 15 and about 100 nucleotides homologous or complementary to a nucleotide sequence within any of SEQ ID NO: 138061 through SEQ ID NO: 195836.

28. A oligonucleotide nucleic acid molecule according to claim 27 comprising in the range of 18 to 50 bases, wherein from 18 to 25 of said bases are identical or complementary to an 18-25 bp segment of sequences from a fragment of SEQ ID NO: 138061 through SEQ ID NO: 195836.

29. A oligonucleotide nucleic acid molecule according to claim 28 wherein said 18 to 25 of said bases are identical or complementary to an 18-25 bp segment of sequences from a fragment of SEQ ID NO: 138061 through SEQ ID NO: 162749.

30. A oligonucleotide nucleic acid molecule according to claim 28 wherein said 18 to 25 of said bases are identical or complementary to an 18-25 bp segment of sequences from a fragment of SEQ ID NO: 162750 through SEQ ID NO: 174652.

31. A oligonucleotide nucleic acid molecule according to claim 28 wherein said 18 to 25 of said bases are identical or complementary to an 18-25 bp segment of sequences from a fragment of SEQ ID NO: 174653 through SEQ ID NO: 195836.

32. A collection of at least 1000 non-identical oligonucleotides according to claim 27.

33. A collection of at least 2000 non-identical oligonucleotides according to claim 27.

34. A collection of at least 5000 non-identical oligonucleotides according to claim 27.

35. A collection of at least 10,000 non-identical oligonucleotides according to claim 27.

36. A collection of at least 15,000 non-identical oligonucleotides according to claim 27.

37. A collection of at least 20,000 non-identical oligonucleotides according to claim 27.

38. A collection according to claim 32 wherein said oligonucleotides are situated in an array on a substrate.

39. A primer pair for amplification of a nucleic acid molecule of SEQ ID NO: 138061 through SEQ ID NO: 195836 comprising oligonucleotides according to claim 27.

40. A collection of purified nucleic acid molecules generated from a DNA template of the Arabidopsis thaliana genome using a collection of primer pairs according to claim 39, wherein said collection of purified nucleic acid molecules comprises at least 2 non-identical purified nucleic acid molecules.

41. A collection according to claim 40 wherein said purified nucleic acid molecules are generated by polymerase chain reaction.

42. A collection according to claim 41 comprising at least about 1000 non-identical nucleic acid molecules.

43. A collection according to claim 41 comprising at least about 2000 non-identical nucleic acid molecules.

44. A collection according to claim 41 comprising at least about 50000 non-identical nucleic acid molecules.

45. A collection according to claim 41 comprising at least about 15,000 non-identical nucleic acid molecules.

44. A collection according to claim 41 comprising at least about 20,000 non-identical nucleic acid molecules.

45. A collection according to claim 41 comprising at least about 30,000 non-identical nucleic acid molecules.

46. A collection according to claim 41 wherein said purified nucleic acid molecules are situated in an array on a substrate.

47. A collection of at least 3000 non-identical purified nucleic acid molecules having nucleic acid sequences selected from the group consisting of
(a) SEQ ID NO: 138061 through SEQ ID NO: 195836;
(b) sequences which are complementary to the nucleic acid sequences of group (a), wherein said purified nucleic acid molecules hybridize to nucleic acid molecules of the Arabidopsis thaliana genome having a sequence of a complement of group (a) with sufficient stability to remain annealed to one another under at least low stringency conditions of washing with a salt solution having a concentration of about 0.2 sodium chloride/sodium citrate (SSC) at 22° C.
(c) sequences which are homologous to the nucleic acid sequences of group (a), wherein at least 90% of said sequences are identical to homologous sequence of group (a).

48. A collection according to claim 47 wherein said nucleic acid molecules are located in one or more arrays on a substrate.

49. A collection according to claim 47 comprising at least about 10,000 non-identical nucleic acid molecules.

50. A collection according to claim 47 comprising at least about 15,000 non-identical nucleic acid molecules.

51. A collection according to claim 47 comprising at least about 20,000 non-identical nucleic acid molecules.

52. A collection according to claim 47 comprising at least about 30,000 non-identical nucleic acid molecules.

53. A method for determining gene expression comprising
(a) collecting mRNA from tissue of an organism;
(b) using said mRNA as a template for producing a quantity of a labeled nucleic acid molecule;
(c) contacting said labeled nucleic acid molecule with a collection of purified nucleic acid molecules according to claim 47.

54. A method according to claim 53, wherein said purified nucleic acid molecules are capable of said determining gene expression of at least 5000 Arabidopsis thaliana genes and said purified nucleic acid molecules are deposited in an array on a substrate.

55. A method according to claim 53, wherein said purified nucleic acid molecules are capable of said determining gene expression of at least 10,000 Arabidopsis thaliana genes and said purified nucleic acid molecules are deposited in an array on a substrate.

56. A method according to claim 53, wherein said purified nucleic acid molecules are capable of said determining gene expression of at least 15,000 Arabidopsis thaliana genes and said purified nucleic acid molecules are deposited in an array on a substrate.

57. A method according to claim 53, wherein said purified nucleic acid molecules are capable of said determining gene expression of at least 20,000 Arabidopsis thaliana genes and said purified nucleic acid molecules are deposited in an array on a substrate.
